United States Patent Application Publication US 2006/0134663 A1 - sequence listing, part 24

SEQ ID NO: 31711 - DNA, 5125 bp, Homo Sapiens
ggcccgagccaccgactgcaggaggagaaggggttgtgctcctggccgaggaaggagaaaggggcggggccggcgggcagcgtgcggcagtgcggagctcctgagaccggcgggcacacgggggtctgtggcccccgccgtagcagtggctgccgccgtcgcttggttcccgtcggtctgcgggaggcgggttatggcggcggcggcagtgagagctgtgaatgaattctccgggtggacgagggaagaagaaaggctccggcggcgccagcaacccggtgcctcccaggcctccgcccccttgcctggcccccgcccctcccgccgccgggccggcccctccgcccgagtcgccgcataagcggaacctgtactatttctcctacccgctgtttgtaggcttcgcgctgctgcgtttggtcgccttccacctggggctcctcttcgtgtggctctgccagcgcttctcccgcgccctcatggcagccaagaggagctccggggccgcgccagcacctgcctcggcctcggccccggcgccggtgccgggcggcgaggccgagcgcgtccgagtcttccacaaacaggccttcgagtacatctccattgccctgcgcatcgatgaggatgagaaagcaggacagaaggagcaagctgtggaatggtataagaaaggtattgaagaactggaaaaaggaatagctgttatagttacaggacaaggtgaacagtgtgaaagagctagacgccttcaagctaaaatgatgactaatttggttatggccaaggaccgcttacaacttctagaaagtggagctgttccaaaaagaaaagaccccttaacacacactagtaattcactgcctcgttcaaaaacagttatgaaaactggatctgcaggcctttcaggccaccatagagcacctagttacagtggtttatccatggtttctggagtgaaacagggatctggtcctgctcctaccactcataagggtactccgaaaacaaataggacaaataaaccttctacccctacaactgctactcgtaagaaaaaagacttgaagaattttaggaatgtggacagcaaccttgctaaccttataatgaatgaaattgtggacaatggaacagctgttaaatttgatgatatagctggtcaagacttggcaaaacaagcattgcaagaaattgttattcttccttctctgaggcctgagttgttcacagggcttagagctcctgccagagggctgttactctttggtccacctgggaatgggaagacaatgctggctaaagcagtagctgcagaatcgaatgcaaccttctttaatataagtgctgcaagtttaacttcaaaatacgtgggagaaggagagaaattggtgagggctctttttgctgtggctcgagaacttcaaccttctataatttttatagatgaagttgatagccttttgtgtgaaagaagagaaggggagcacgatgctagtagacgcctaaaaactgaatttctaatagaatttgatggtgtacagtctgctggagatgacagagtacttgtaatgggtgcaactaataggccacaagagcttgatgaggctgttctcaggcgtttcatcaaacgggtatatgtgtctttaccaaatgaggagacaagactacttttgcttaaaaatctgttatgtaaacaaggaagtccattgacccaaaaagaactagcacaacttgctagaatgactgatggatactcaggaagtgacctaacagctttggcaaaagatgcagcactgggtcctatccgagaactaaaaccagaacaggtgaagaatatgtctgccagtgagatgagaaatattcgattatctgacttcactgaatccttgaaaaaaataaaacgcagcgtcagccctcaaactttagaagcgtacatacgttggaacaaggactttggagataccactgtttaaggaaatacctttgtaaacctgcagaacattttacttaaaagaggaaacacaagatcttcaatgaacgtcatcggctacagaaacagcctaagtttacaggactttttagagtcttacatatttgtgcaccaaacttgaagatgaaccagaaaacagacttaaacaaaatatacaatgcaaatgtaattttttgttgtttaaggccttgccttgatggtcacagttatcccaatggacactaagttagagcacaacaaaacctgattctggtcttctttaccaatataatcataatgtaaataataatttgtatattgtgttgcagatgaaagtattccaggaacagtgaatggtagaagacacaagaacatttgtttgtttgtcttctgatgttttttcttaaaatagtaatttctcctacttttcttttctactgttgtcttaactacaggtgattggaatgccaaacactcttaagtttattttcttttttcgttttataaattcagtgtgccaaatgaaacttttttcctaagtaactgtaataggaaaaagtttattttgagagtttcttcttcataaatctacagacattaaacaattgttgtgttctttttaccttttatttttctattaccttgctaccaaacagtttagatagcaatataatagcaaaaaagcaaatatggtaaaatagagaaggtttgaaggtttgagttactctgtcatataacatgtagatcagtcttcatgtgacctgcagtatttttttttctaatgtatttgtcagaaatctgttgtagactgttaacttcttcctgatggaatttattttctgcaagaattattctgatatttaagagagccaattttaactgctgtgaaaatgtttccagtgcaagagaagggaaatactaggaactaagacatttctaatttattgcttattactttcttaattttacaggataattataagcaagtggaactaccatcttttattcttaataattattaatcccttcaatgaaactttaaaaaaactgaatttttatacatggcatacatttttctagttccttctgcttgctttattaactcaaaagttctagttctagtctgttgatctgccttttgttctcccaaaatgtacagtaattccatttgtttgtataaatatgcctggattttcattataaaaatgtcattgtagggagtagagactcatatcatggccttttaaatattgtaataaaggcaaatagatatttgcccttagtttactggttaaaagtttgtttacagaacttttctctggtgcttaaatgatgctatgtaaaatgtcatgagtggaaagaatatttgtagtagtaacaagaatttttcatttaggaaagatttcttaggttttgaaagaatacattaaaataaaaaacttgcccctactaggtaagaactttataatgaagacatacattcttcttaattttactcttgctcttgttaaagatttgtttgaatatagaagatgcatgatttctgggtttttttttttttttgagacagagtttcgctcttgttgcccaggctggagtgcaatggcgcaatctcgactcaccacaacctccgcctcccaggttcaagcaattctcctgcctcagcctcccgagtagctgggattacaggcatgcgccactaccccagctaattttgtatttttagtagagatggggtttctccatgttggtcaggctggtcttgaactcctgacctcaggtgatccgcctgcctcggcctcccaaagtgctgggattacaggcataagccactgcgcccagccagaagatgcatgatttcttaggatcatatgctgtttgtagccataaggtaaatcatgtctcttccaatcatgactttggaactccctgaataataaaaatgagagttgagataaataggggaaaaaaaatttttttcaagccagagctatgcatatgttaggtgatgggtagtatccctttaaggtctcaaacattacaacatcaattatgaaatactgataacgaaaggtagtaatgaaatatatatgatgaaaagaattgagaagttctaaattaagacatttcagttaagctcataaaatttcattgttttcatttaaaagattaacgttattgatacttggataactggctaatcatattaaaggactatgtggttccagctcaacttttaatatattgtctcctttaaaactatcatggttataattctattgggaaagacttttagataacaaagatttcaaatgttaaaagagataaaagtcaggttaatactatcttaaacactgagtcagaaaatcattactgtatagaagttgctttcctgatcaagtctgaacttcagctagtgctagagaactattttctatgacttaactctaaccaagttttattttaagctgtttctttgatagaagggccatgaaaatagagtaatgatatagtaggagataagggattggtttggtctttttcaataaagatagaagttgctgaagttttctgaattaataatgacttagattgtgaccttttagattcggtgttgagctctgtgttgtattacttcctaaaagataatgcttaaacattaagcattagtgtgctcttcatgttaatatggcagagttttgtaaactaaattaaaacttactgatatattggactttgagccaagggaaagaatgagtactatctttccagatatcttaagggtaaaagcttattctaagacagtctgtccattgagaatattagatttctgacttgcaaatatgtttgtactccagaagaattagaggaaaagcagatactagaattctaatttaattacatatacagccgtctttgtttatagtgtagaattctttatattttgtacaaaaactaattcttttggtaaaatgaaccatttacagttcggttttggactctgagtcaaaggattttcctttaaatgcttgtctcaattttagtctggtcttttgtacttttcttcagaagaaatgaattaaagggtacagttgcataaagtgggtttttatcctaatgtattggaaataaatgataaactttaaaaaaaaa

SEQ ID NO: 31712 - DNA, 6318 bp, Homo Sapiens
actctgcggcgggaagaaccacctggaggtggcggggggggttgatttctatcacccctagggagagaggatcggggacccgctgatcttccagctcccctcacccaacgtcgtgcatgctgcagacagacctttccgtccttcatgaacacacgtgtggtagacagatgactgtcctgtaccctgtgctgctctaggtgtgccagacgtggagctgtccagttgggagaagatggattccaaagatgaaagctcgcatgtgtggccgacatctgcagagcatgaacagaatgccgcacaggtgcactttgttccggacacaggaacagtggctcagattgtctataccgatgaccaggttcgccccccacagcaggtggtgtacacggcagatggtgcctcctacacatcagtggatggtccagagcacacgctggtgtacatccacccggtggaagctgcacagactctgtttacagaccccggccaggtagcttatgtccaacaggatgctacagctcagcaggcctcattgccagttcataaccaggtgctgccttccatcgagagtgtagatgggtccgaccctttggcaactctgcagacccctctaggcagactggaggccaaagaggaagaggatgaggatgaggacgaggacactgaggaagatgaggaagaagacggtgaggacacggatctggatgactgggagccagacccgccccggcccttcgacccacacgacttgtggtgtgaggagtgcaataacgcgcatgcttcagtgtgtccgaagcacggccccttgcacccgatccccaaccggccggtgctcacccgggccagggcgagcctccccctggtgctctacatagacaggtttctgggcggggtgttctccaagcggcgcatccccaagcgcacccagtttggccccgtggaggggcctctcgtcaggggctcggagctgaaagactgttacattcacctcaaggtttctcttgataaaggggacaggaaagaaagggatttacatgaagacctatggtttgagttgtctgatgagacgctttgtaactggatgatgtttgtacggccagcccagaatcacctggagcagaacctggtggcttaccagtatggccaccatgtgtattatacaaccataaaaaatgtggagcccaagcaggaactgaaggtgtggtatgccgcatcctatgctgagttcgtgaaccagaaaattcatgacatttctgaggaagaaaggaaagttcttcgagagcaagagaagaattggccctgctatgaatgtaaccgccgatttataagctcggagcagttgcaacagcatctcaattctcatgatgagaaactagatgtgtttagcagaacaagaggcagaggaaggggacgaggcaagaggcgattcggtccaggtcgacggccggggcgtcctccaaaatttatccgcctggaaatcaccagcgaaaatggggaaaagagtgacgatgggacacaggacttgctacattttcccacaaaggagcaatttgatgaggctgaaccagccactctgaatgggctggatcaaccagaacagaccactatcccaatccctcagctgccacaggaaacccagtcttccctggaacatgaaccagaaactcacaccctgcacctgcagccgcagcatgaagagagcgtggtgcccacccagagcacgctgacagccgacgacatgcgcagagccaagcgcatccgaaatgcagctcttcagcatctgtttattcggaagtccttccggccttttaaatgcttgcagtgtgggaaggccttccgggaaaaggacaaactggaccagcacttacgcttccatgggcgggaggggaactgcccactgacctgtgatctctgtaacaagggcttcatcagcagcacatccttggagagccacatgaagctccactcagaccagaagacttactcttgcattttttgcccagaatcctttgaccgccttgatttgttgaaagatcatgtggccattcatatcaatgatggctacttcacctgcccaacttgtaagaaacggttcccagattttatccaggtgaaaaaacacgtgcgcagcttccactcagaaaagatctaccagtgcacagagtgtgacaaggccttctgtcgccccgataaactgcgactccacatgctccggcattcggaccgcaaagacttcctgtgttccacctgtgggaagcaatttaagcgaaaagacaaactacgggaacacatgcagaggatgcataatcctgagagggaggccaagaaagccgaccgcatcagccgctccaagacgttcaagccccgcatcacgtccacagactacgacagcttcacgttcaagtgccgcctgtgcatgatgggcttccggcggcgcggcatgctggtaaatcacttatcgaagagacacccagacatgaagatagaagaggtgccagagttaactctacccatcataaaacccaatcgtgattacttttgtcagtattgcgataaggtttataaaagtgccagcaagcgcaaagcccacattctgaagaaccacccaggagcagagctcccaccgagcattcggaagctccgacccgctggtcctggagagccagaccccatgctgagcacacacacccagctgacgggcaccatcgccacccctcccgtctgctgtccccactgctccaagcagtacagcagcaagaccaagatggtccagcacattcgaaagaagcatccagagttcgcccagctctccaacaccatacacacaccactgacgacagctgtgatcagtgccaccccagcggttttgactacagacagcgccactggagagactgtggtgacgacggacctgctcacccaagcaatgacagaactgtcccagaccttaacgacagactaccgaacgccacaaggggattaccagagaattcagtacatccctgtgtcgcagtcggcgtctggcctccagcagcctcagcacatacagctgcaagtggttcaagtggcctcggccacttcccctcaccagtcacagcagtccactgtggatgttggccagctccatgatcctcagccctacccccagcacgccatccaggtgcagcacatccaggtcagcgagcctaccgcctcggccccgtcctccgcccaggtatctgggcagccgttgagtccctcagcccagcaggctcagcaggggctcagcccctcccacatccagggcagttcttccacacaggggcaggctctgcagcagcagcagcagcagcagcagaattcctctgtgcagcacacgtacctgcccagtgcttggaattccttccgtggctattcatctgagattcaaatgatgacgcttcctccgggtcagtttgtgattacagacagtggtgtggcaactccagttactactggccaggtgaaggcggttacttcgggtcattatgtgttatcagaaagtcaatcagaattggaagaaaagcaaacttctgccctctctggtggagtccaggtcgagccacctgcacacagtgactccctggacccccagaccaacagccaacagcagaccacacagtacatcatcaccaccaccaccaacgggaacggaagcagcgaagtgcatatcaccaaaccatgacttccaccctggagcttgaatccagcacccacctcatgtctgttctcataagtctgaaagctctgacacgtagagctcttttgtaagatttattattcactcaagagttcggaaaccacagttttgtctctcatccatacactggggtttattttgccaaggtcatctttatcaaattgactcttcaaaccctcggtttttgccacagaacagagatctttcaggggaaagtagatttcgaggtggagagaatttgccttgctcttgagctggtcttttaacatactgacgagccttacttttcctttgtggaaatattaagtggcatattgtgttcataccaaaggtggagacaggatgtgccaagttcatggttactggacttcttattccaagccatggcaccaaaggagaaggggcattttgtgggtgtgcattaggtctgaactgctttatcttgttttagttttcagtaatttaacaaagggagcctgctgaataacaaaattaaaatgatgaaacaaaagtttgacagtgatattctgaagcaaaaactgtcatctaaatttttcttgctgattttttttaacttccctattttagaaaactattgttgggctgttggtagtgctttccacagatgctggtcctcagtggattaggtcagaagctcatgttctgatagttcttcattatttcacaaaggtggacaacctgaaagagaaaaggctgcttgatgtcagcagaatctaaacccctacattaaagctttgcctcccattctgtggttgtggtggtggtaagaaggagatattggtaccaagaaaaatttccaaaactattgagagagagagagagaaagtattgaaattttgttctgccttgcaggatccatttatcattcattggtaaaggatatattccttgttcttaccaagtgtacatttaactcttgctgacatgttcagtgtattttattacttttaatgctgtcttaaaatgaacattctttaaagttggacaggaaggtggcatttcttatttattaacatttttaactttaaacatattgtgactcatctagaccttttaataagacgatcaacttcacacttagggaaaaaattaaaatgtgatggccacttctaataattcaggtagttataagggatctggaagaaatccagtctttatgaatatactattagttgggcattaaaaaatcagtatatattttaactttttgtgacatgctaacacattttcagaataattattgcatagtagaatttattactccagaacagaaagaccttacttcatttcaaatgaagttaattaatttacatttctgggtaaaaactggttctataaattaagtagagtagcttctttatgataaagacaattttctgaaaagtgaacaattctgttaaaagaactttattgatgtgtagatttcgcactttatttctgagactgcgttcatgtagttgttccccaatgtttgagtactaagagaacttgagaaaattacttcataaacatatggaaactgaaaatggactctctttgtgacaaagatattcaacagaaaatattgaccctgcattgcaaaacacaggttcgggttccctaagtcccacagtgtaatgattacaaatatcctagtgtccggtctagaaagactttctaggagaagactagtggaattttctaaaggttcagttttagcttttataacttaaatttggccctgttacgttctttttaatttgaaccataaggtatctcccctcccttcaggaataacttattggaaaactgaaaagaatcactgaatggaatgttcattttatggcagttgttttaagttttaaaatacacagaggaaaatattgtggaaggacctctttgttgctttcccttctaagttgtcttcttcttcttcttcttcttcttcttctttggtccttaagtgaaataaagactctaaaactaatttgtatattatcagccagagatgcggatggcagtcgagccaaatcgcatggctttcagatcaggtattctgcacattcattccaaggtcatagatttttaaaaggacctggatttgaagagatggcaaatgatgagccatcagaaaacttaatttggaaaacatgtatgtagccagtgtggatattgtggcctctctcaagacacattgacactgtagacttcattcagtccagtgtgagtattttggagtaggttggatgtagattttgtttttatcattgatttgtaccgacagaaatagacatttcatcatgtaaaattcctgttattctggaaaaacctattgttttgatcttcttgttttctgacttggaagtatcctttcaaaaaaactcttaagatatctaggtctaaaaagcacttcatgagatgctaaagctgacccactggttgaaaatgttgaccctatcctgttatttaaatgtgaacatttattgtacattcagtgagttatagtgttaatagtcttgtgctatgcagcaggtgtaaaaattaataaatatattttttaataaacatgtttgtatgtgtgaagctacaagaaaaaaaaa

SEQ ID NO: 31713 - DNA, 4035 bp, Homo Sapiens
  misc_feature (2530)..(2530): n is a, c, g, or t
ggcaggccggcgggcaggctcggcgtgtcccttccgtccggcccgcgccggcggcggggaggcggcgcgcggcccgcagcccgcccatggaggctttcccctgggcgccccgctcgccccgccgcggccgcgcccccccgcccatggcgctcgtgcccagcgcccgctacgtgagcgccccgggcccggcgcacccgcagcccttcagctcctggaacgactacctggggctcgccacgctcatcaccaaagcggtggacggcgagccgcgcttcggctgcgcccgcggtgggaacggcggcggcggctccccgccctcctcctcctcgtcgtcctgctgctccccccacacgggggccgggcctggggcgctggggccggcgctggggccgcccgactacgacgaggacgacgacgacgacagcgacgagccggggtcccggggccgctacctggggagcgcgctggaattgcgcgcgctggagctgtgcgcgggccccgccgaggccgggctgctggaggagcgcttcgccgagctgagcccgttcgcgggtcgtgccgccgccgtgctgctgggctgcgcgcccgccgccgccgccgccgccaccaccaccagcgaggcgacgccgcgcgaggagcgggccccggcgtgggcggccgagccccggctgcacgcggcctccggggcggcggccgcccggctgctgaagcccgagctgcaggtgtgcgtgttctgccggaacaacaaggaggcgatggcgctctacaccacccatatcctcaagggccccgacgggcgagtgctgtgtcccgtgctgcgccgctacacgtgtcccctgtgcggcgccagcggcgacaacgcgcacaccatcaagtactgcccgctctccaaagtgccgccgccgcccgcccgcccgccgccccgcagcgccagggacggcccgcctggcaagaagctgcgctgaaggcccgggctcccggccgcccagggtcgccgccgcccctcgcaccgctaggtctgcgcaccatctcgcccccgccgtggggaggcgtgcggctcagcggtcggctcgacatgggacgtcgtcctggtggtttttgaaaagcagccgaccgtgtggagtacttccgtgctgaacgattgggactagacgctgaaatccccatttgtcttcagtttctagtttgcacatccagaacggcgaaggctgggtgtgtattccactaactgaaatatggcaacttagaggcgctgtttatttactgtatacgtcgacctattttagatgcgcatcagtatgaaattgtctcaatcttggatgtttcattttatgaatggaggcactttactaggtctagaatatttttttaaaagcctctgaactgagcttaaaactggcgattttatgaaatgtcggcaaaatgactattttattgtttgaagcgagttaatattctcagttgtctttaaaaatcagttactctaattccaggtgaagcaagccgctggtagcatcacccttatgagaagtgaaggttttgtaaactttccagtattaatttgggcgggtattccccgcttgtggcttgtttctgtcctagctggaggtgtaaaatgcacaatgtgtagcaggtagaatacagctccttatcgttctatgtaccaggtattttattactgaactagcaactagccttttccacctttaaaagttgtgccaagtcataatcatattgtgtataacttggaaatggtgctgtttaaaaaaattgtgtatttatacagtaacagtatgaattcattaatctcacctgtaactttcctacttggccttttctctacacactcaccctcttccagttctttaaaaacgtttatgatattaagatcaaagggaggaagggaagacagcagtattaattcaccctagattactcaatttcagggttcctagtggaggaaagcccattccagctgttgcctgtcaaacaaatagaagatggatctctagctctgagctattcgtgtattaactcgtattcaagaaggttccaccgtgggctgcgtctgactttaatacaggcagtgctcaaactagaataagcactaattaaaggaattgttgggggtccttcatgtgttcccactcctactggaagacccatgtcggtttccggaaccccaccagtttacccataagcaagactaaacctgatccttgggcaaaagttcctaacccctactttaccctcccaccctcacttttaaatccaccatactgaatgccacactatggaatgcagctacctgccaagcaaggcaatagaaggcaaaaaatggaagtgaattaagatgaactcatctgaaatacacaaatgcattactatctgaagataccagcaagagtttagtctacgtgtataaggctcccagtaggatttagctaggctactagaagttagactgctttcgcattaaacagctaacttcattcacagcaaattgacttaatcagaacctttattttgnaaggtgtgttagaaggatgggggtccatagctgtctttttggtgaaagaaaaggtgcatttcaagaacttggggggcaggaggaaagcacaatgtttcttagccaggaaagacaaataatccaacgctgctagtcttaaccccagaccagagagaactgcagatctgactgggcctaaattaagtagcttaatgaaaccatgtaattacttgttctcctttcttttgctatagaaaatctaccagtttaaatgagcttcaccttctgggtgaagtttctaaggtcaacatgaatcctcttacctctctcactgctcgtgttctgccttttcaaaaggaccactatgaacagatcagcgcattctctaggccaaaagggctagccaggtggcaagatcaatttagctactttgtattttcagagtcaaattacagacggtttccaaaggtcttgagcatggggctttggcatagcctcaatatatgggagtcactgtgatgagatgtgcctaatgttaatttgatattctgacattgctactattttaccagaactaagaacatattgagctggagcttcttgagggcaggagagtattggaaaaggaatccagaagaccctctccactactcaggcagccactattcatctatttttaaagtaccccattttcaggccgggtgtggtggctcatgcctgtaatcccagcactttgggaggcgaggcgggggtggatcacaaggtcaggagaccagcctggccaacatggcgaagccccgtctctactaaaaatacaaaaattagccgggtggtgtggtgggcgcctgtaatcccagctcctcaggaggctgaggcaggagaattgcttgaaaccaggaggcggaggttgcagtgagcccagatcacgccactgcactccagcctgggcaacagagcgactctgtatccaaaaaaaaaaaaaagtaccccatgttcagcccctgtgccaaatttgcctaggttttccagctgacaatgaatactgggagttaaaacgcagagtattactatagttaattttctagggttctcttatgaaaagtatatgtaaacacattcatttaaaaatccttggaactcaatgtggaactttaaacattttgcaaaattacatttagagaaacccaatttttcaaagtttaagaaatatacaaagtatgacaaaattatcttcataagaacatgctgcatacttgcctagtagcaaaacaatacagggaagagtcaaaagggcttctccaactgtagaggtacagattgtcttaacctgttcttttctgtacagacttaaaatttctagtggcttttatttttctttgtattttaattttcctacaaagtcctttttggaagttgcagaattattagctttgatgagaacaacttttgtcatagatttgatttattaaaccaaaattatacatattaaaattatatcacaaatataaaaaaaaaaaaaaaaaaaa

SEQ ID NO: 31714 - DNA, 1716 bp, Homo Sapiens
gcgccggcggcggggaggcggcgcgcggcccgcagcccgcccatggaggctttcccctgggcgccccgctcgccccgccgcggccgcgcccccccgcccatggcgctcgtgcccagcgcccgctacgtgagcgccccgggcccggcgcacccgcagcccttcagctcctggaacgactacctggggctcgccacgctcatcaccaaagcggtggacggcgagccgcgcttcggctgcgcccgcggtgggaacggcggcggcggctccccgccctcctcctcctcgtcgtcctgctgctccccccacacgggggccgggcctggggcgctggggccggcgctggggccgcccgactacgacgaggacgacgacgacgacagcgacgagccggggtcccggggccgctacctggggagcgcgctggaattgcgcgcgctggagctgtgcgcgggccccgccgaggccgggctgctggaggagcgcttcgccgagctgagcccgttcgcgggtcgtgccgccgccgtgctgctgggctgcgcgcccgccgccgccgccgccgccaccaccaccagcgaggcgacgccgcgcgaggagcgggccccggcgtgggcggccgagccccggctgcacgcggcctccggggcggcggccgcccggctgctgaagcccgagctgcaggtgtgcgtgttctgccggaacaacaaggaggcgatggcgctctacaccacccatatcctcaagggccccgacgggcgagtgctgtgtcccgtgctgcgccgctacacgtgtcccctgtgcggcgccagcggcgacaacgcgcacaccatcaagtactgcccgctctccaaagtgccgccgccgcccgcccgcccgccgccccgcagcgccagggacggcccgcctggcaagaagctgcgctgaaggcccgggctcccggccgcccagggtcgccgccgcccctcgcaccgctaggtctgcgcaccatctcgcccccgccgtggggaggcgtgcggctcagcggtcggctcgacatgggacgtcgtcctggtggtttttgaaaagcagccgaccgtgtggagtacttccgtgctgaacgattgggactagacgctgaaatccccatttgtcttcagtttctagtttgcacatccagaacggcgaaggctgggtgtgtattccactaactgaaatatggcaacttagaggcgctgtttatttactgtatacgtcgacctattttagatgcgcatcagtatgaaattgtctcaatcttggatgtttcattttatgaatggaggcactttactaggtctagaatatttttttaaaagcctctgaactgagcttaaaactggcgattttatgaaatgtcggcaaaatgactattttattgtttgaagcgagttaatattctcagttgtctttaaaaatcagttactctaattccaggtgaagcaagccgctggtagcatcacccttatgagaagtgaaggttttgtaaactttccagtattaatttgggcgggtattccccgcttgtggcttgtttctgtcctagctggaggtgtaaaatgcacaatgtgtagcaggtagaatacagctccttatcgttctatgtaccaggtattttattactgaactagcaactagccttttccacctttaaaagttgtgccaagtcataatcatattgtgtataacttggaaatggtgctg

SEQ ID NO: 31715 - DNA, 4578 bp, Homo Sapiens
ctcactgagtccactctgaacgtgctaaaatgggaaggaggcggtgttttgctgatctgttaaattcttagtgaagtttccttgatttccagtggctgctgttgtttgagtttggtttggagcaaaactgaggtagtcctaacatttctgggactgaatccaggcaagagaaagaagaaaaagaagaagaaaaagaggaggaaaaaggtagggagaaataaagggaggagagaagcacagtgaaagaaaaaaaaagtcccttttcgacatcacattcctgtgttttccctcagcctggaaaacatattaatcccagtgcttttacgcccggaaacaaagagactaagccagactatgggggaaagggagataagaaggatcctggaactttaaagagggaaagagtgagattcagaaatcgccaggactggactttaagggacgtcctgtgtcagcacaagggactggcacacacagacacacgagaccgaggagaaactgcagacaaatggagatacaaagacttagaaggacagctcctttcacctcatcctacttgtccagaaggtaaaaagacacagccagaaagaaaaggcatcggctcagctctcagatcaggacaggctgtggatctgtggcggtactctgaaagctggagctgcagcacaccccttttgtattgctcaccctcggtaaagagagagagggctgggaggaaaagtagttcatctaggaaactgtcctgggaaccaaacttctgatttcttttgcaaccctctgcattccatctctatgagccaccattggattacacaatgacatggagaatgggaccccgtttcactatgctgttggccatgtggctagtgtgtggatcagaaccccacccccatgccactattagaggcagccacggaggacggaaagtgcctttggtttctccggacagcagtaggccagctcggtttctgaggcacactgggaggtctcgcggaattgagagatccactctggaggaaccaaaccttcagcctctccagagaaggaggagtgtgcccgtgttgagactagctcgcccaacagagccgccagcccgctcggacatcaatggggccgccgtgagacctgagcaaagaccagcagccaggggctctccgcgtgagatgatcagagatgaggggtcctcagctcggtcaagaatgttgcgtttcccttcggggtccagctctcccaacatccttgccagctttgcagggaagaacagagtatgggtcatctcagcccctcatgcctcggaaggctactaccgcctcatgatgagcctgctgaaggacgatgtgtactgtgagctggcggagaggcacatccaacagattgtgctcttccaccaggcaggtgaggaaggaggcaaggtgagaaggatcaccagcgagggccagatcctggagcagcccctggaccctagcctcatccctaagctgatgagcttcctgaagctggagaagggcaagtttggcatggtgctgctgaagaagacgctgcaggtggaggagcgctatccatatcccgttaggctggaagccatgtacgaggtcatcgaccaaggccccatccgtaggatcgagaagatcaggcagaagggctttgtccagaaatgtaaggcctctggtgtagagggccaggtggtggcggaggggaatgacggtggagggggagcaggaaggccaagcctgggcagcgagaagaagaaagaggacccaaggagagcacaagtcccaccaaccagagagagtcgggtgaaggtcctgagaaaactggccgccactgcaccagctttgccccaacctccctcaacccccagagccaccacccttcctcctgccccagccacaacagtgactcggtccacgtcccgggcggtaacagttgctgcaagacctatgaccaccactgcctttcccaccacgcagaggccctggaccccctcaccctcccacaggccccctacaaccactgaggtgatcactgccaggagaccctcagtttcagagaatctttaccctccatcccggaaggatcagcacagggagaggccacagacaaccaggaggcccagcaaggccaccagcttggagagcttcacaaatgcccctcccaccaccatctcagaacccagcacaagggctgctggcccaggccgtttccgggacaaccgcatggacaggcgggaacatggccaccgagacccaaatgtggtgccaggtcctcccaagccagcaaaggagaaacctcccaaaaagaaggcccaggacaaaattcttagtaatgagtatgaggagaagtatgacctcagccggcctactgcctctcagctggaggacgagctgcaggtggggaatgttccccttaaaaaagcaaaggagtctaaaaagcatgaaaagcttgagaaaccagagaaggagaagaaaaaaaagatgaagaatgagaacgcagacaagttacttaagagtgaaaagcaaatgaagaagtctgagaaaaagagcaagcaagagaaagagaagagcaagaagaaaaaaggaggtaaaacagaacaggatggctatcagaaacccaccaacaaacacttcacgcagagtcccaagaagtcagtggccgacctgctggggtcctttgaaggcaaacgaagactccttctgatcactgctcccaaggctgagaacaatatgtatgtgcaacaacgtgatgaatatctggaaagtttctgcaagatggctaccaggaaaatctctgtgatcaccatcttcggccctgtcaacaacagcaccatgaaaatcgaccactttcagctagataatgagaagcccatgcgagtggtggatgatgaagacttggtagaccagcgtctcatcagcgagctgaggaaagagtacggaatgacctacaatgacttcttcatggtgctaacagatgtggatctgagagtcaagcaatactatgaggtaccaataacaatgaagtctgtgtttgatctgatcgatactttccagtcccgaatcaaagatatggagaagcagaagaaggagggcattgtttgcaaagaggacaaaaagcagtccctggagaacttcctatccaggttccggtggaggaggaggttgctggtgatctctgctcctaacgatgaagactgggcctattcacagcagctctctgccctcagtggtcaggcgtgcaattttggtctgcgccacataaccattctgaagcttttaggcgttggagaggaagttgggggagtgttagaactgttcccaattaatgggagctctgttgttgagcgagaagacgtaccagcccatttggtgaaagacattcgtaactattttcaagtgagcccggagtacttctccatgcttctagtcggaaaagacggaaatgtcaaatcctggtatccttccccaatgtggtccatggtgattgtgtacgatttaattgattcgatgcaacttcggagacaggaaatggcgattcagcagtcactggggatgcgctgcccagaagatgagtatgcaggctatggttaccatagttaccaccaaggataccaggatggttaccaggatgactaccgtcatcatgagagttatcaccatggatacccttactgagcagaaatatgtaaccttagactcagccagtttcctctgcagctgctaaaactacatgtggccagctccattcttccacactgcgtactacatttcctgcctttttctttcagtgtttttctaagactaaataaatagcaaactttcacctattcatgagttattattgaaacctcaaatcataaagacatttaaaagaattgtttttctaactggaggggctctagtgctaaataatagtactgaaaattgatattattttccttttcttatatgaaggaccttatttggcatataaaattttataaaatatgtatttaaagctttttcttattttttgtattaattggtaagtgaaaactctgttaaagatcacaccacaatgttttcaagaaacatctgaaaagataaaacaaagaacaaataacttataatacttacttaaattgacactttttgaaatgccagtctgaaaataattaagatatctctgctttgtatgagtttcttttatgaaacttgataccacgggagtccagtaatattggccacaaaagccagagaaagtaccaagcccagctttgttatcatagccacttcctgccctgcttctgttatttttagtgttttttcagatataaatcggggtccaggaaatcctcaccagaatctggcactgcagccaaaggcgatacttccagagttctagtaggctgctatggaatttctggcatgaaaattcttgacccctcacactttaccccctgtacagcacaggcataccatggagatattacaggatcagttccagaccaccataataaagtggatatcgcaataaagtgagtcacacaaaaaaaaaaaaaaaaaaaaaaaaaaaaaaaaaaaaaaaaaaaaaaaaaaaaaaaaa

SEQ ID NO: 31716 - DNA, 6671 bp, Homo Sapiens
cagagatcgcgagcgaggcaccagcctgcagccggcccccagcacatcctcagccgcacagacactcggcgaggtggaggtgagggcgggcgccagcgaactcggagaggggctcgctcactcccaggcgatcccagccgccaccgccgccgcaccagcagcagcaacagcagcagcagcttccttcctcagactcccctcgagaggctggccaagcgggtgtagccgttgggggaggctcccgccgggggaacccggcgaggacaagagcagggcggccgccttccactcgggctgtccggcggcggctgcctccgcccgtgtgtccgtcaagggtgccgcgggatgtgtgtcagtttacgcctctgagatcacacagctgcctgggggccgtgtgatgcccaaggcaagtcttggttttaattattattattatcattattgttacgcttggctttcgggaaatactcgtgatatttgtaggataaaggaaatgacactttgaggaactggagagaacatatatgcgttttgtttttaagaggaaaaccgtgttctcttcccggcttgttccctctttgctgatttcaggagctactctcctcctggtgaggtggaaattccagcaagaatagaggtgaagacaagccaccaggactcaggagggaaacgctgaccattagaaacctctgcataagacgttgtaaggaggaaaataaaagagagaaaaacacaaagatttaaacaagaaacctacgaacccagctctggaaagagccaccttctccaaaatggatatgtttcctctcacctgggttttcttagccctctacttttcaagacaccaagtgagaggccaaccagacccaccgtgcggaggtcgtttgaattccaaagatgctggctatatcacctctcccggttacccccaggactacccctcccaccagaactgcgagtggattgtttacgcccccgaacccaaccagaagattgtcctcaacttcaaccctcactttgaaatcgagaagcacgactgcaagtatgactttatcgagattcgggatggggacagtgaatccgcagacctcctgggcaaacactgtgggaacatcgccccgcccaccatcatctcctcgggctccatgctctacatcaagttcacctccgactacgcccggcagggggcaggcttctctctgcgctacgagatcttcaagacaggctctgaagattgctcaaaaaacttcacaagccccaacgggaccatcgaatctcctgggtttcctgagaagtatccacacaacttggactgcacctttaccatcctggccaaacccaagatggagatcatcctgcagttcctgatctttgacctggagcatgaccctttgcaggtgggagagggggactgcaagtacgattggctggacatctgggatggcattccacatgttggccccctgattggcaagtactgtgggaccaaaacaccctctgaacttcgttcatcgacggggatcctctccctgacctttcacacggacatggcggtggccaaggatggcttctctgcgcgttactacctggtccaccaagagccactagagaactttcagtgcaatgttcctctgggcatggagtctggccggattgctaatgaacagatcagtgcctcatctacctactctgatgggaggtggacccctcaacaaagccggctccatggtgatgacaatggctggacccccaacttggattccaacaaggagtatctccaggtggacctgcgctttttaaccatgctcacggccatcgcaacacagggagcgatttccagggaaacacagaatggctactatgtcaaatcctacaagctggaagtcagcactaatggagaggactggatggtgtaccggcatggcaaaaaccacaaggtatttcaagccaacaacgatgcaactgaggtggttctgaacaagctccacgctccactgctgacaaggtttgttagaatccgccctcagacctggcactcaggtatcgccctccggctggagctcttcggctgccgggtcacagatgctccctgctccaacatgctggggatgctctcaggcctcattgcagactcccagatctccgcctcttccacccaggaatacctctggagccccagtgcagcccgcctggtcagcagccgctcgggctggttccctcgaatccctcaggcccagcccggtgaggagtggcttcaggtagatctgggaacacccaagacagtgaaaggtgtcatcatccagggagcccgcggaggagacagtatcactgctgtggaagccagagcatttgtgcgcaagttcaaagtctcctacagcctaaacggcaaggactgggaatacattcaggaccccaggacccagcagccaaagctgttcgaagggaacatgcactatgacacccctgacatccgaaggtttgaccccattccggcacagtatgtgcgggtatacccggagaggtggtcgccggcggggattgggatgcggctggaggtgctgggctgtgactggacagactccaagcccacggtagagacgctgggacccactgtgaagagcgaagagacaaccaccccctaccccaccgaagaggaggccacagagtgtggggagaactgcagctttgaggatgacaaagatttgcagctcccttcgggattcaattgcaacttcgatttcctcgaggagccctgtggttggatgtatgaccatgccaagtggctccggaccacctgggccagcagctccagcccaaacgaccggacgtttccagatgacaggaatttcttgcggctgcagagtgacagccagagagagggccagtatgcccggctcatcagcccccctgtccacctgccccgaagcccggtgtgcatggagttccagtaccaggccacgggcggccgcggggtggcgctgcaggtggtgcgggaagccagccaggagagcaagttgctgtgggtcatccgtgaggaccagggcggcgagtggaagcacgggcggatcatcctgcccagctacgacatggagtaccagattgtgttcgagggagtgatagggaaaggacgttccggagagattgccattgatgacattcggataagcactgatgtcccactggagaactgcatggaacccatctcggcttttgcaggtgagaattttaaagtggacatcccagaaatacatgagagagaaggatatgaagatgaaattgatgatgaatacgaggtggactggagcaattcttcttctgcaacctcagggtctggcgccccctcgaccgacaaagaaaagagctggctgtacaccctggatcccatcctcatcaccatcatcgccatgagctcactgggcgtcctcctgggggccacctgtgcaggcctcctgctctactgcacctgttcctactcgggcctgagctcccgaagctgcaccacactggagaactacaacttcgagctctacgatggccttaagcacaaggtcaagatgaaccaccaaaagtgctgctccgaggcatgacggattgcacctgaatcctatctgacgtttcattccagcaagaggggctggggaagattacatttttttttcctttggaaactgaatgccataatctcgatcaaaccgatccagaataccgaaggtatggacaggacagaaaagcgagtcgcaggaggaagggagatgcagccgcacaggggatgattaccctcctaggaccgcggtggctaagtcattgcaggaacggggctgtgttctctgctgggacaaaacaggagctcatctctttggggtcacagttctattttgtttgtgagtttgtattattattattattattattattattatattttatttctttggtctgtgagcaactcaaagaggcagaagaggagaatgacttttccagaatagaagtggagcagtgatcattattctccgctttctctttctaatcaacacttgaaaagcaaagtgtcttttcagcctttccatctttacaaataaaactcaaaaaagccgtccagcttatcccatcctctgattgtcttctgacttaagggatttactgtggtgtaggttctgccagccaaccctacaagctgccatttccagtcctagcatttaagtaggatgttgttgcctttaacttttcttatccaggggaaaattgccattttagggtcagcatgaacagctctttcttgtatgcgatttaaaacaaactggaaaggaaacttcacacgtcaaaatccatagaagcgcctggacgaggcttaaagtgctttgtgagtgaataggagccattcgctaattctagacccacagtgtctggtggtggggcttcccttgtggggcttctggtggtggttttgccttttcttttccctcctccatgttcttctaaaacatatacatatatacatacacacatacacatattcttcaggtctctaagcccctggaagcagcattgtgtgatattctcagaggcaggggaaaatagagggaaaaatagagactattggtatgttctccccatcagcgagttattgtaactggtcaccactggacgggaaggagaacagaggagagggaaagagaagcccaacctctgtgatcatatgagggccaaggctgagcagtgtagacagagaccctttgaaatgcatttgtctctcaaatagactagtaaacaccgacttctcctttgggttacaaacaccatttcaacctttcgggagagtcagagctaggatgtacaagaactgattctaaccagaagtccgcaagtactgtggacaagaatgcttaaccatgctgcttcagccttgagagacctaggttcttacacatatgcacacacgcatacacacatgcacgcacacacacatacacacatgcacgcacgcacgcatgcacaccaatttatgtttttattaagtgccttgaaaaaatgaagaaaaatgtattttccctttatgtaaaaattagtgaatatcttatgaattaaggcattcctctttccctaaccccgatggctccattcccaagtaccccaactcactgctgatcctattaaaggaatgagtcctgctacccgagtggtagtcatagccctagatgactctcaactactcttcaaagggaggcatcaggaatagaatgaaactgtgtgaaggataagattgttcgcatcaagatccaaatcttgatttcatattaacgcctaaggattgcctgtgtgctggaaatatatttgaaactcaaccagtatgcccagcctattgcatatcattgtcagaccatttttgctgctgtggtcacccacgatttcatttgtcttatacccaggtgaaaggggaagggtgaatgggactggctggttcctttaaatgttaacttatggaaatgctagttcaaatggtaatgtcacagtgttttgtatgcagagagcaagagttcaaccaacagctgtttattcatgtgtgtgtgtctttgctgctttgagttctctgtatctactgtgtatgtgaatggtcatgtgggactcagtggtggtgttgtgactttgacctagggtccgagtgtcacagctgatcttggcactcggcactcattggcacagtggtagttagaggtgaaaagtagagctgtcaagcccaagggcttagctttagggctcctcctgagttcggcccacagtagaagcaagattttaactagccccttttcctcttcaccctcccatgatgcgcagtgttcagaaagctggtaagtcctagggatttccagaagtagcctgcagaagaaggtaagtttgaaagccactccaggggtcctgatgctgtcatgctcagtgagccattttacagttctccaaagtctagccctgtttcggacctgcacttcacctctaagttatgtacaactcaacctgcatccctctaaaagtcctatatccatattcaccattggctaatttgaggccctgagtgggccttgaatgctaaaaagaagcagggtacgcagggctacatgtagataccacaccaaggctggaggctggtctgtcataagacagaaagaaagacgctgggcccaattttgacttggccaggggacaccttggtgtgtttgttatctttatctgtgggtaggctagctgacccatctccttgagtcattccctttgggaaaccccactgccagtattgatctcctttttgccttgtactgaatgacacattacctccacactctcccggactaggtggtcaacagggccacagggttgctttctgtctttggtggggcaggggagttgacagggatgagggtccaaggaataagcatgaatgacaagaaaacaagggaaagagttaacctgtcacatagcaggttaactttttcagggtttgcagttagaggtattcgaccattcactggctgagccagatcacgggaacttgagagcttttactgtgattcttcaatgtaaaaaataaacaacaatgtcaaactgtgtttatatgatttgtataaagcctttttaagattactatttaaataaacattataccagagataaaaaaaaaa

SEQ ID NO: 31717 - DNA, 4148 bp, Homo Sapiens
cagagatcgcgagcgaggcaccagcctgcagccggcccccagcacatcctcagccgcacagacactcggcgaggtggaggtgagggcgggcgccagcgaactcggagaggggctcgctcactcccaggcgatcccagccgccaccgccgccgcaccagcagcagcaacagcagcagcagcttccttcctcagactcccctcgagaggctggccaagcgggtgtagccgttgggggaggctcccgccgggggaacccggcgaggacaagagcagggcggccgccttccactcgggctgtccggcggcggctgcctccgcccgtgtgtccgtcaagggtgccgcgggatgtgtgtcagtttacgcctctgagatcacacagctgcctgggggccgtgtgatgcccaaggcaagtcttggttttaattattattattatcattattgttacgcttggctttcgggaaatactcgtgatatttgtaggataaaggaaatgacactttgaggaactggagagaacatatatgcgttttgtttttaagaggaaaaccgtgttctcttcccggcttgttccctctttgctgatttcaggagctactctcctcctggtgaggtggaaattccagcaagaatagaggtgaagacaagccaccaggactcaggagggaaacgctgaccattagaaacctctgcataagacgttgtaaggaggaaaataaaagagagaaaaacacaaagatttaaacaagaaacctacgaacccagctctggaaagagccaccttctccaaaatggatatgtttcctctcacctgggttttcttagccctctacttttcaagacaccaagtgagaggccaaccagacccaccgtgcggaggtcgtttgaattccaaagatgctggctatatcacctctcccggttacccccaggactacccctcccaccagaactgcgagtggattgtttacgcccccgaacccaaccagaagattgtcctcaacttcaaccctcactttgaaatcgagaagcacgactgcaagtatgactttatcgagattcgggatggggacagtgaatccgcagacctcctgggcaaacactgtgggaacatcgccccgcccaccatcatctcctcgggctccatgctctacatcaagttcacctccgactacgcccggcagggggcaggcttctctctgcgctacgagatcttcaagacaggctctgaagattgctcaaaaaacttcacaagccccaacgggaccatcgaatctcctgggtttcctgagaagtatccacacaacttggactgcacctttaccatcctggccaaacccaagatggagatcatcctgcagttcctgatctttgacctggagcatgaccctttgcaggtgggagagggggactgcaagtacgattggctggacatctgggatggcattccacatgttggccccctgattggcaagtactgtgggaccaaaacaccctctgaacttcgttcatcgacggggatcctctccctgacctttcacacggacatggcggtggccaaggatggcttctctgcgcgttactacctggtccaccaagagccactagagaactttcagtgcaatgttcctctgggcatggagtctggccggattgctaatgaacagatcagtgcctcatctacctactctgatgggaggtggacccctcaacaaagccggctccatggtgatgacaatggctggacccccaacttggattccaacaaggagtatctccaggtggacctgcgctttttaaccatgctcacggccatcgcaacacagggagcgatttccagggaaacacagaatggctactatgtcaaatcctacaagctggaagtcagcactaatggagaggactggatggtgtaccggcatggcaaaaaccacaaggtatttcaagccaacaacgatgcaactgaggtggttctgaacaagctccacgctccactgctgacaaggtttgttagaatccgccctcagacctggcactcaggtatcgccctccggctggagctcttcggctgccgggtcacagatgctccctgctccaacatgctggggatgctctcaggcctcattgcagactcccagatctccgcctcttccacccaggaatacctctggagccccagtgcagcccgcctggtcagcagccgctcgggctggttccctcgaatccctcaggcccagcccggtgaggagtggcttcaggtagatctgggaacacccaagacagtgaaaggtgtcatcatccagggagcccgcggaggagacagtatcactgctgtggaagccagagcatttgtgcgcaagttcaaagtctcctacagcctaaacggcaaggactgggaatacattcaggaccccaggacccagcagccaaagctgttcgaagggaacatgcactatgacacccctgacatccgaaggtttgaccccattccggcacagtatgtgcgggtatacccggagaggtggtcgccggcggggattgggatgcggctggaggtgctgggctgtgactggacagactccaagcccacggtagagacgctgggacccactgtgaagagcgaagagacaaccaccccctaccccaccgaagaggaggccacagagtgtggggagaactgcagctttgaggatgacaaagatttgcagctcccttcgggattcaattgcaacttcgatttcctcgaggagccctgtggttggatgtatgaccatgccaagtggctccggaccacctgggccagcagctccagcccaaacgaccggacgtttccagatgacaggaatttcttgcggctgcagagtgacagccagagagagggccagtatgcccggctcatcagcccccctgtccacctgccccgaagcccggtgtgcatggagttccagtaccaggccacgggcggccgcggggtggcgctgcaggtggtgcgggaagccagccaggagagcaagttgctgtgggtcatccgtgaggaccagggcggcgagtggaagcacgggcggatcatcctgcccagctacgacatggagtaccagattgtgttcgagggagtgatagggaaaggacgttccggagagattgccattgatgacattcggataagcactgatgtcccactggagaactgcatggaacccatctcggcttttgcagggggcaccctcctgccagggaccgagcccacagtggacacggtgcccatgcagcccatcccagcctactggtattacgtaatggccgccgggggcgccgtgctggtgctggtctccgtcgcgctggccctggtgctccactaccaccggttccgctatgcggccaagaagaccgatcactccatcacctacaaaacctcccactacaccaacggggcccctctggcggtggagcccaccctaaccattaagctagagcaagaccgtggctcgcactgctgagggccgaagcaagaacagcacccaaaacaaacgagaaagactgcaaacatgttgcctcgattttgcacttttttctcctcgcctagtttctgtgtgaactctcagacatctctttcccggatccccaaccctgagcactcttatcaatcccaaccatcctccttgggttcattttggtttctggtttttctttttcctttttgttgattccaaaccaacaaacccaactctaatgctgcatcttggactatccgaagagatccacccccaagcactccacaactcaaggctcagctggttttgttccagagactggttcgcttgttttttccccttgccttatcccatacctcctctcagtgggcagtctgccaggagacgtgaggggaagcctggatctgtgtgtatgtacatagtagacatgtgtgtgtgtgaatagctctctgtgtgtgggtgtgtgagagagcggctggttcattgtgtgtgtgtttgggcgaggggtgagtgttcagagagggcccctttaactcttatgttacttctcctggggtacattttacaagaaaataatatactgtacaagttttgtttacttggagaagagattgaagctttttgttgccttatctaaaaaaaaaaaaaaaaaaaaaa

SEQ ID NO: 31718 - DNA, 2282 bp, Homo Sapiens
aggcgcagcgtggccgcgggtgggcggaactggtcgggatgagtggcggagggacagagacccctgtgggttgtgaggccgccccgggcggtggcagcaagaagagggactccctggggactgcgggctcagcgcacctcattatcaaggatcttggagaaattcattcaaggcttttggatcacagaccagttattcaaggtgaaactcgttattttgtaaaagaatttgaagaaaaacgtggtcttcgagaaatgcgagttcttgaaaatttgaagaacatgatccatgaaacaaatgaacatactcttcccaaatgtagagacacaatgcgggacagcctcagccaggttctccagagattgcaagcagctaatgactcagtctgtagactccaacagagggaacaggaacgaaaaaagattcatagtgaccacttagtagctagtgagaaacagcatatgctccagtgggacaacttcatgaaggagcaacccaacaaaagggctgaagtggatgaagagcacagaaaagccatggaaaggcttaaagaacaatatgctgagatggagaaggacctagcgaaattttcaaccttttaagaacttgaaccacaacaatcacaaactaatgagaagatgttcacctctctcctgaaaactattcccaccagaccgtttagcctctgcttcaagcttagcaatatattcagtggcactcttatatcagaagaaagaagtttctactggcattctgattggatatttaaagaagggtgccacatttttccagctttaagtgcctatatatgattatttgaatgaagaggagtaggaaggaaaatggaatcaatatactctttgttagtcagaattgatcatcttttccattgattagctcagagaactgtaggtatagacttcttagaaagataatttcattcatttctatacagggttaacaatagtttattattgtggcttaatgggaaggtatagaagctacctgtcatagcctccttggctgttggaaggatgtataaagtgttactgcatgagtaatgtagacaaaaaaaaaagccagctgtccttggagcagagatcacatttcagagaggtgagagtgaacacattgtctctgctgtggcaaagatggccacgctggtgtttgagctgcctcttgggaagcgttgcatattttacagtgcagcataatgccatgggcttccgtggatgggaagacacatgttaagttttgtggccttccagcacttactattttcagctttttaaagcatgcttagaaggaaaagcttaccaaaaatatattttgacatttagtttttccaagagctataatcttgcccatagtatttacctcatttttgtgtctgttttgctgtgggtaagctttataagataaataatgtctatacatgtttcgactgtttaatgagtaatcaacaaaatctgccagagagtccctctggaaccatataaagttcctggctttgaatgaaccagaagtgtttgcccacacagcaaatggtccatgttaaatgtaaatcctttttagtgttaatgtctgttctcataagcaggtatattatgatgaaacatgtaccagttctgtcatcactgtgatctttaaaaacctgcatttaacagtctaatttgaggctgggtgcagtggctcacacctgtaatctcaacactttgggaggccgaggcaggcggatcatttgaagtcaggagttcaagcctagcctggccaacatggtgaaaccccgtctctactaaaaatacaaaaattagcccggcatgttggtgcacgcttgtaatcccagctactcaggagtctgaggcacgagaatcacctgaactcaggaggcggaggttgcggtgagctgagatggcaccactgcactccagcttgggtgacagagtgagactccatctcaacaaaaaaaaaatctaactgaagaactaagttgattttttatttgccataaaccaagcaaaagtaaatgcaataatttcgagatttatggtaaacaaatttgaggtatggataaatctttcacatattttttattgctctttagtaaagaaaggcacaagaaagaaaatatccagctctcttgtgttatctcagtgtggcgactgcagaaaattgacaatgcctgcctgtgtaaatgtatggcttactgtcaaagcttcattcttggctgcatgttgaaaatgtgattaaagttaatagaggagatgaaaaaaaaaaaaaaa

SEQ ID NO: 31719 - DNA, 14675 bp, Homo Sapiens
ggcggctatggagccctcgggcagcctgtttccctccctggtggttgtgggtcacgttgtcaccctggccgctgtgtggcactggcgcaggggacgtcggtgggcgcaggacgagcaagatgagcgggatcgtgtgcagaagaaaaccttcaccaagtgggtcaacaagcacctcatcaaggcccagaggcacatcagtgacctgtatgaagacctccgcgatggccacaacctcatctccctgctggaggtcctctcgggggacagcctgccccgggagaaggggaggatgcgtttccacaagctgcagaatgtccagattgccctggactacctccggcaccgccaggtgaagctggtgaacatcaggaatgatgacatcgctgacggcaaccccaagctgacccttggcctcatctggacaatcattctgcacttccagatctcagatatccaggtgagtgggcagtcggaggacatgacggccaaggagaagctgctgctgtggtcgcagcgaatggtggaggggtaccagggcctgcgatgcgacaacttcacctccagctggagagacggccgcctcttcaatgccatcatccaccggcacaagcccctgctcatcgacatgaacaaggtgtaccggcagaccaacctggagaacctggaccaggccttctctgtggcggagcgggacctgggagtgacgcggctcctggaccctgaggacgtggatgtccctcagcccgacgagaagtccatcatcacctacgtctcgtcgctgtatgacgccatgccccgcgtgccggacgtgcaggatggggtgagggccaacgagctgcagctgcgctggcaggagtaccgggagctggtgctgctgctgcttcagtggatgcgacaccacacggccgcctttgaggaacgcaggttcccctccagcttcgaggagattgagatcctgtggtctcagttcctgaagtttaaggagatggagctaccagccaaggaggccgacaagaacaggtccaagggcatctaccaatccctggagggagcggtgcaagcaggccagctcaaggtgccccctggctaccacccgctggatgtggagaaggagtggggcaagctgcacgtggccatcctggagcgggagaagcagctccgcagcgagtttgagaggctggagtgtcttcagcgcatcgtgaccaagctgcagatggaggcggggctgtgtgaggagcagctgaaccaggccgacgccctgctgcagtcggatgtccggctgctggctgcaggcaaagtgccacagcgggcgggggaggtggaacgggacttggacaaggcggatagcatgatccggctgctcttcaacgacgtgcagaccctcaaggatggacggcacccgcagggcgagcagatgtaccgcagggtgtaccgtctgcacgagcgcctggtagccatccgcaccgagtacaacctacggctgaaggcaggcgtggcggcccctgcaacccaggtggcccaggtgactctgcagagtgtgcagaggcgccccgagctggaggactccactctgcgctacctgcaggacctgctggcctgggtggaggagaaccagcaccgtgtggatggcgctgagtggggtgtggacctgcccagcgtggaggcgcagctgggcagccaccgaggcctgcaccagtccatcgaagaattccgggccaagatcgagcgggcacggagtgacgagggccagctctcccccgccacccggggtgcctaccgtgactgcctgggtcggctggacctgcagtacgccaagctgctgaactcctccaaggcccgcctcaggtccctggagagcttgcacagctttgtggcagccgccactaaggagctaatgtggctgaatgagaaggaggaggaggaggtgggcttcgactggagcgaccgcaacaccaacatgaccgccaagaaggagagctactcggcgctgatgcgggagctggagctgaaggagaagaagatcaaggagctccaaaatgctggggaccggctgctgcgggaggaccacccggcccggcccacggtggagtccttccaggcggccctgcagacgcagtggagctggatgctacagctgtgctgctgtatcgaggcacacctgaaggagaacgctgcctactttcagttcttctcagatgtgcgggaggccgaggggcagttgcagaagctgcaggaggcactgcgtaggaaatacagttgtgatcgctccgccaccgtcacccggctggaggacctgctgcaggatgcccaggacgagaaggaacagctgaacgagtacaagggccacctctcaggcctggccaagcgggccaaggccgtcgtgcagctgaagccccgccacccagcccaccccatgcggggccgcctgcccctgctggccgtgtgcgactataagcaggtggaggtgactgtgcacaagggtgacgagtgccagctggtgggccctgcacagccgtcccactggaaggtgctcagcagctccggcagcgaggccgccgtgccctccgtgtgcttcctggtgcccccgcccaaccaggaggcccaggaggccgtcaccaggctggaggcccagcaccaggccctggtcacgctgtggcaccagttgcacgtggacatgaagagccttctggcctggcagagccttcgccgcgacgtgcagctcatccgctcctggtccctggccacgttccgcaccctgaagccagaggagcagcgccaagccctgcacagcctggagctgcactaccaggccttcctgcgggacagccaggacgcgggcggcttcggacccgaggaccggctgatggctgagcgcgagtacggctcctgcagccaccactaccagcagctgctgcagagcctggaacagggtgcacaggaagagtctcgctgccagcgctgcatctccgagctcaaagacatccggctgcagctggaggcctgtgagacgcgcaccgtgcaccgcctgcggctgccgctggacaaagagccggcacgggagtgtgcccagcgcatcgccgagcagcagaaggcacaggcagaggtggaggggctgggcaagggggtcgcccggctctctgccgaggccgagaaggtcttggccctaccagagccatcgcctgcggcccccacgctgcgctcggagctggagctgacgctgggcaagctggagcaggtccgcagcctgtctgccatctacctggagaagctcaagaccatcagcctggtgatccgcggcacgcagggggccgaggaggtgctcagggcccacgaggagcagctcaaggaggcccaggccgtgccggccaccctcccggagctcgaggccaccaaggcctctctgaagaagctgcgggcccaggccgaggcacagcagcccacgttcgacgccctgcgggatgagctgcggggggcacaggaggtgggggagcgactgcagcagcggcacggggagcgggacgtggaggtggagcgctggcgggagcgggtcgcccagttgcttgagcgctggcaggctgtgctggcccagaccgacgtgcggcagcgcgagctcgagcaactgggccgccagctgcgttactaccgcgagagtgcagaccccttgggcgcctggctgcaggacgccaggcggcggcaggagcagatccaggccatgccgctggccgacagccaggctgtgcgggagcagctgcggcaggagcaggccctgctggaggagatcgagcgccacggcgagaaggtcgaggagtgccagaggtttgcgaaacagtacatcaacgccatcaaggactatgaactccagctggtgacgtacaaggcgcagcttgagccggtggcctccccggccaagaagcccaaggtccagtcgggatcagagagtgtcatccaggagtacgtggacctgcgtacgcactacagcgagctgaccacactgacgagccagtacatcaagttcatcagcgagactctgcggcgcatggaggaggaggagaggctggctgagcagcagcgggcagaggagcgcgagcggctggccgaggtggaggccgcgctggagaagcagcggcagctggccgaggcgcacgcccaggcaaaggcacaggcggagcgggaggcgaaggagctgcagcagcgcatgcaggaggaggtggtgcggcgggaggaggcggcggtggacgcgcagcagcagaagcgcagcattcaggaggagctgcagcagctgcggcagagctcggaggcggagatccaggccaaggcccggcaggcagaggcggctgagcgcagccggctgcgcatcgaggaggagatccgcgtggtgcgcctgcagttggaggccaccgagcgccagcgtggcggggctgagggggagctgcaggcactgcgtgcacgggcggaggaggctgaggcacaaaagcgacaggcgcaggaggaggccgagcgcttgcggaggcaggtgcaggacgagagccagcgtaagcggcaggcggaggtggagctggcctcgcgcgtgaaggccgaggccgaggcggcgcgcgagaagcagcgggccctgcaggccctggaggagctgcggctgcaggcggaggaggcggagcggcgcctgcggcaggccgaggtggagcgagcgcggcaggtacaggtggccctggagacggcgcagcgcagtgcagaggcggagctgcagagcaaacgcgcctccttcgccgagaagacggcacagctggagcgctccctgcaggaggaacacgtggctgtggcacagctgcgggaggaggctgagcggcgggcacagcagcaggccgaggccgagcgggcgcgcgaggaggcagagcgggagctggagcgctggcagctcaaggccaacgaggcgctacggctgcggctgcaggcggaggaggtggcgcagcagaagagcctggcgcaggccgaggctgagaagcagaaggaggaggcggagcgcgaggcgcggcggcgcggcaaggcggaggagcaggccgtccggcagcgggagctggctgaacaagagctggagaagcagcggcagctggcggaaggcaccgcgcagcagcgcctggccgcggagcaggagttgatccggctgcgggccgagacggagcagggggagcagcagcggcagctgctggaggaggagctggcccggctgcagcgtgaggcggctgcagccacgcagaaacggcaggagctggaagccgagctggccaaggtgcgggccgagatggaggtgctgctggccagcaaggcgagggctgaggaggagtcgcgctccaccagcgagaagtccaagcagaggctggaggccgaggccggccggttccgcgagctggccgaggaggccgcccgcctgcgtgccctggcggaagaggccaagcggcagcggcagctggccgaggaagacgcggcgcggcagcgggccgaggcggagcgggtgcttgcggagaagctggccgccatcggcgaggccacgcggctcaagacggaggcggagatcgcgctcaaggagaaggaggcggagaacgagcgcctgcggcggctggcggaggacgaggccttccagcggcggcggctggaggagcaggccgcgcaacacaaggctgacatcgaggagcgcctggcccagctgcgcaaggcatcggacagcgagctggagcggcagaaggggctggtggaggacacgctgaggcagcggcggcaggtggaggaggagatcctggcgctgaaggcgagcttcgagaaggcggccgctggcaaggcggagctggagctggagctgggacgcatccgcagcaacgcggaggacacgctgcgcagcaaggagcaggccgagctggaggctgcgaggcagcggcagctggcggcggaggaggagcggcggcgccgtgaggctgaggagcgcgtgcagaagagcctggcggccgaggaggaggccgcacggcagcggaaggcggcgctggaggaagtcgagcggctgaaagccaaggtggaggaggcgcggcgcctgcgggagcgagcggagcaggagtcggcgcggcagctgcagctggcccaggaggccgcccagaagcggctgcaggcggaagagaaggcacacgccttcgcggtgcagcagaaggagcaggagctacagcagacgctgcagcaggagcagagcgtgctggaccagctgcgcggcgaggcggaggcggcccggcgggcggctgaggaggcggaggaggcccgggtgcaggcggagcgtgaggcggcgcagtcccggcggcaggtggaagaggccgagcggctgaagcagtcggcagaggagcaggcacaggcccgggctcaggcacaggcggctgcagagaagctgcgcaaggaggccgagcaagaggcggcgcggcgggcacaggcggagcaggcggccctgcggcagaagcaggcagctgacgcggagatggagaagcataagaaattcgccgagcagacgctgcggcagaaggcgcaggtggagcaggagctgacaacactgcggctgcagctggaggagaccgaccaccagaagaacctgctggacgaggagctgcagcggctgaaggcggaggccacggaggccgcacgccagcgcagccaggtggaggaggagctcttctcggtgcgcgtgcagatggaggagctgagcaagctcaaggcacgcatcgaggctgagaaccgcgcactcatcttgcgtgacaaggacaatacgcagcgcttcctgcaggaggaggctgagaagatgaagcaggtggcggaggaggccgcgcggctgagtgtggcggcccaagaggctgcgcgactgcggcagctggcagaggaggacctggcacagcagcgggccttggcagagaagatgctcaaggagaagatgcaggcggtgcaggaggccacgcgactcaaggctgaggcggaactgctgcagcagcagaaggagcttgcgcaggagcaggcgcggcggctgcaggaggacaaggagcagatggcgcagcagctggcggaggagacgcagggcttccagcggacgctggaggccgagcggcagcggcagctggagatgagcgctgaggctgagcgcctcaagctgcgtgtggccgagatgagccgagcccaggcccgcgctgaggaggacgcccagcgcttccggaagcaggcggaggagatcggtgagaagctgcaccgcacggagctcgccacccaggagaaggtgaccctggtgcagacactggagatccagcgacagcagagtgaccatgatgccgagcgcctgcgggaggccatcgctgagctggagcgtgagaaggagaagctccaacaggaggccaaactgctgcagctcaagtctgaggagatgcagacggtgcagcaggagcagctgctgcaggagacgcaggccctgcagcaaagcttcctctctgaaaaggacagcctgctacagcgggagcgcttcatcgagcaggagaaggccaagctggagcagctcttccaggacgaggtggccaaggcacagcagctgcgtgaggagcagcagcggcagcagcagcagatggagcaggaacggcagcggctggtggccagcatggaggaggcgcggcggcggcagcatgaggccgaggagggcgtgcggcgcaagcaggaggagctgcagcagctggagcagcagcggcggcagcaggaggagctgctggctgaggagaaccagaggctgcgtgagcagctgcagctcctggaggagcagcaccgggccgcgctggcgcactcagaggaggtcactgcctcgcaggtggctgccacaaagaccctgcccaatggccgggatgcacttgatggccccgcggcagaggcagagccggagcacagcttcgatggcctgcggcggaaggtgtcagctcagaggctgcaggaggccggcatcctgagtgcggaggagctgcagcggttggcgcagggccacaccacggtggacgagctcgcacggcgggaagacgtgcgccactacctgcagggccgcagcagtatcgcagggctgttgctgaaggccaccaatgagaagctgagtgtttacgccgccctgcagaggcagctgctgagtcccggcacggccctcatcctgctggaggcgcaggcggcctcaggcttcctgctggaccctgtgcggaaccggcggctgaccgtcaacgaggctgtgaaggagggtgtggtgggccccgagctgcaccacaagctgctgtcggccgagcgcgccgtcactggctacaaggacccctacactggccagcagatctctctcttccaagccatgcagaagggcctcatcgtccgggagcacggcatccgcctgctggaggcccagatcgccacgggcggcgttatcgaccccgtgcacagccaccgcgtgcccgtggacgtggcctaccggcgcggctacttcgacgaggagatgaaccgcgtcctggcggaccccagcgacgacaccaagggcttctttgaccccaacacgcacgagaacctcacgtacctgcagctactggagcgctgcgtggaggaccccgagacgggcctgtgccttctgccactcacggataaggctgccaagggcggggagctggtctacactgactccgaggcccgggacgtctttgagaaggccaccgtgtctgcgccgttcggcaagttccagggcaagacggtgaccatttgggagatcatcaactcggaatacttcacggcagagcagcggcgggacctgctgcggcagttccgcacgggccggatcacagtggagaagatcatcaagatcatcatcacggtggtggaggagcaggagcagaagggccggctttgctttgagggcctgcgcagcctggtgccagccgccgagctgctggagagcagggtcatcgaccgcgagctctaccagcagctgcagcgaggtgagcgctctgtgcgagacgtagccgaggtggacactgtgcggcgggctctccggggtgccaacgtcatcgcgggtgtatggctggaggaggcggggcagaagctgagtatctacaatgccctgaagaaagacctgctgccatccgacatggccgtggccctgttggaagcccaggccggcaccgggcacatcatcgaccccgccaccagcgcccggctgaccgtggacgaggcagtgcgtgctggcctggtgggccccgagtttcatgagaagctgctatcagccgagaaggctgtgacagggtacagggacccctacacagggcagagcgtctccctgttccaggccctgaagaagggcctcattccccgggagcagggcctgcgcctgttggacgcccagctgtccacgggcggcatcgtggaccccagcaagagccaccgcgtgcccctggatgtcgcctgcgcccgaggctgcctggatgaggagaccagcagggccctgtcggcaccaagggccgacgccaaggcctacagtgaccccagcacaggggagccggccacctacggcgagctccagcagcggtgccggcccgaccagctgaccgggctgagcctgctgccgctctcagaaaaggctgctcgggcccggcaggaggagctctactcagagctgcaggcccgtgagacctttgaaaagaccccggttgaggtccccgtgggtggcttcaagggcaggacggtgacggtgtgggagctcatcagctctgagtacttcactgcggagcagcggcaggagctgttgcgtcagttccgcacgggcaaggtcaccgtggagaaggtcatcaagattctcattaccatcgtggaggaggtggagaccctgcggcaggagaggctgtccttcagcggcctccgtgcccctgtgccagccagcgagctcctggcttccggggtcctcagcagagcccagtttgagcagctcaaggacggcaagacgacggtcaaggacctttcggagctgggctccgtgcggacgctgctgcagggcagtggctgcctcgccggcatctacctggaggacaccaaggagaaggtgtccatctacgaggccatgcgccggggcctgctgagagccacaacggctgcgctcctgctggaggcgcaggcggccactggcttcctggtggaccccgtgcggaaccagcgcctgtatgtccacgaggccgtgaaggcgggcgtggtgggccccgagcttcacgagcagctgctgtctgccgagaaggccgtcaccggctacagagacccctactcgggcagcaccatctccctcttccaggccatgcagaagggcctggttctccggcagcacggcatccgcctgctggaggcccagatcgccacgggcggcatcatcgaccccgtgcacagccaccgcgtgcctgtggacgtggcctaccagcgcggctacttcagtgaggagatgaaccgcgtcctggcggaccccagcgacgacaccaagggcttctttgaccccaacacgcatgagaacctcacgtacaggcagctgctggagcggtgcgtggaggaccccgagacgggcttgcgccttctgccactgaaaggggcggagaaggctgaggtggtggagaccacgcaggtgtacactgaggaggagacaagaagggcatttgaagagacacagatcgacattcccggcggcggcagccacggcggctccaccatgtccctgtgggaggtgatgcagtcggacctgatccccgaggagcagcgggcccagctgatggctgacttccaggccggccgggtgaccaaggaacgcatgatcatcatcatcatcgagatcattgagaagacagagatcatccgccagcagggtctggcctcctacgactacgtgcgccgccgcctcacggctgaggacctgttcgaggctcggatcatctctctcgagacctacaacctgctccgggagggcaccaggagcctccgtgaggctctcgaggcggagtccgcctggtgctacctctatggcacgggctccgtggctggtgtctacctgcccggttccaggcagacactgagcatctaccaggctctcaagaaagggctgctgagtgccgaggtggcccgcctgctgctggaggcacaggcagccacaggcttcctgctggacccggtgaagggggagcggctgactgtggatgaggctgtgcggaagggcctcgtggggcccgagctgcacgaccgcctgctctcggctgagcgggcggtcaccggctaccgtgacccctacaccgagcagaccatctcgctcttccaggccatgaagaaggagctgatccctactgaggaggccctgcggctgctggatgcccagctggccaccggcggcatcgtggacccccgcctgggcttccaccttcccctggaggtggcttaccagcgtggctacctcaacaaggacacgcacgaccagctgtcagagcccagcgaggtgcgcagctacgtggacccgtccaccgacgagcgcctcagctacacgcagctgctcaggcggtgccgtcgtgacgacggcaccggccagctgctcctgccactgtcggacgcccgcaagctgaccttccgtggcctgcggaagcagatcaccatggaggagctggtgcgctcgcaggtcatggacgaggccacggcgctgcagctgcgggagggcctgacctccatcgaggaggtcaccaagaacttgcagaagttcctggaaggcaccagctgcatcgctggtgtcttcgtggacgccaccaaggaacggctctcggtgtaccaggccatgaagaagggcatcatccgccccggcacagcctttgagctcctggaggcgcaggcggccaccggttacgtcatcgaccccatcaagggactgaagctgacggtggaggaggctgtgcgtatgggcattgtgggccccgagttcaaggacaagctgctgtcggccgagcgcgccgtcactgggtacaaggacccctactctgggaagctcatctccctcttccaggccatgaagaagggcctgatcctgaaggaccatggcatccgcctgctggaggcccagatcgccacgggcggcatcatcgaccctgaggagagccaccggctgcccgtggaggtggcctacaagcgcggcctcttcgatgaggagatgaacgagatcctgaccgacccctcggacgacaccaagggcttctttgaccctaacacggaggagaacctcacctacctgcagctgatggagcgttgtatcactgacccccagacgggcctgtgtctcttgccgctgaaggagaagaagcgggagcggaagacgtcctccaagtcctccgtgcgcaagcgccgagtggtcatcgtggaccccgagacgggcaaggagatgtcagtgtacgaggcctaccgcaagggcctgattgaccaccagacgtacctggagctgtccgagcaggagtgcgagtgggaggagatcaccatctcctcctcggacggcgtggtcaagtccatgatcatcgaccgccgctccgggcgccagtacgacatcgatgatgccatcgccaagaacctcatcgaccgctcggcactggaccagtaccgcgccggcacgctctccatcaccgagttcgccgacatgctctcgggcaacgccggtggtttccgctcccgttcctcctcggtgggatcctcctcctcctaccccatcagccccgccgtctccaggacccagctggcctcctggtcagaccccactgaggagacgggccccgtggctggcatcctggacacggagacgctggagaaggtgtccatcaccgaggccatgcaccggaacctggtggataacatcacggggcagcggctgctggaggcgcaggcctgcaccgggggcatcatcgaccccagcaccggtgagcgcttccctgtcaccgacgccgtcaacaagggcctggtggacaagatcatggtggaccgcatcaacctggcccagaaggccttctgcggcttcgaggacccacgcaccaagaccaagatgtcggccgcccaggccctgaagaagggctggctctactacgaggccggccagcgcttcctggaggtgcagtacctgaccggcggcttgatcgagcccgacacgccgggccgcgtgcccctggacgaggccctgcagcgcggcacggtggacgcccgcaccgcacagaagctgcgtgacgtgggcgcctactccaagtacctcacctgccctaagaccaagctcaagatctcctataaggacgcgctggaccgcagcatggtggaggagggcacggggctgcggctgctggaggctgccgcgcagtccaccaagggctactacagcccctacagcgtcagcggctccggctctaccgctggctcccgcaccggctcgcgcaccggctcccgggccggctcccgccgcggcagctttgacgccaccggctccggcttctccatgaccttctcttcatcctcctactcctcctcgggctacggccgccgctacgcctcggggtcctcggcctccctggggggccctgagtctgccgtggcctgaggctgcctgcgcccaccccgctctgcatgcggcccagcccggctcccaccgaggcgcgggggccgttttcaacgcttaaaggtgtcttcctcccaagtggtgcctaaagtttaaccaaaaagaccagactaatatattaatatatatctgctgtccagacagcctgtatcttgggggacagggctggcccagccctgctggccgcctcaccccctcgggtctcctcactcccttctacctgccactcacacagccaggtgccttggagggtcccaagctgggccccagcccaccctcctgtcttcccagggtagcccgcctgccagtcctagctgcacagggcagctgggcccaaccctgtctgtagagggccctggtgtttctagcactggcctgcacggtgggccttgctggggacggggggccccagtcagcctctctcccagtctacccagagaagccccttccccatgggaagacgaggccctcgggcccagcccccacagtgctgtctgatctgtgctttccagctcaccccccacactcactcctgagacccctggcctccggcgtcagcctccagcctctgttcccctagtaagtgccttccatgtcggcctctaaccccaggccccgaggacccagacccagtggggaggcggacgttccagccggcatggctgggaactgcagacctgtcctcctggtgggtccaggggcccctccagcttgtggagccccacactggggtgccgcctgcccgtctctctcccatggagccccagccccctttgggcccagggacaccagccaggctctgtgctgaccctcctgttgcacccagccctggtctcagcagcgaccacccctgcctccaccctctgagctttgcatgttccactaaccccgggcgggtggcaggtggaggtgtcaggctgctggcgcctctgcaagggcagaacactaacctgaccgtgggcggggccttgcggtatccgcccccaataaaagcaattccaacctt

SEQ ID NO: 31720 - DNA, 14797 bp, Homo Sapiens
tgagctgagcctgtgccgagtgagcgtctcgtggggccgccagccttcagctgcctgtgtgccacacggggctgcccagagcaccgtgcctgaggccgagggtccgggcgacgaaggtgtgggggcagcatgtctcagcaccagctccgcgtgccgcagcccgagggcctgggccgaaagagaaccagctcggaggacaacctgtacctggctgtgctcagggcctctgagggcaagaaagatgagcgggatcgtgtgcagaagaaaaccttcaccaagtgggtcaacaagcacctcatcaaggcccagaggcacatcagtgacctgtatgaagacctccgcgatggccacaacctcatctccctgctggaggtcctctcgggggacagcctgccccgggagaaggggaggatgcgtttccacaagctgcagaatgtccagattgccctggactacctccggcaccgccaggtgaagctggtgaacatcaggaatgatgacatcgctgacggcaaccccaagctgacccttggcctcatctggacaatcattctgcacttccagatctcagatatccaggtgagtgggcagtcggaggacatgacggccaaggagaagctgctgctgtggtcgcagcgaatggtggaggggtaccagggcctgcgatgcgacaacttcacctccagctggagagacggccgcctcttcaatgccatcatccaccggcacaagcccctgctcatcgacatgaacaaggtgtaccggcagaccaacctggagaacctggaccaggccttctctgtggcggagcgggacctgggagtgacgcggctcctggaccctgaggacgtggatgtccctcagcccgacgagaagtccatcatcacctacgtctcgtcgctgtatgacgccatgccccgcgtgccggacgtgcaggatggggtgagggccaacgagctgcagctgcgctggcaggagtaccgggagctggtgctgctgctgcttcagtggatgcgacaccacacggccgcctttgaggaacgcaggttcccctccagcttcgaggagattgagatcctgtggtctcagttcctgaagtttaaggagatggagctaccagccaaggaggccgacaagaacaggtccaagggcatctaccaatccctggagggagcggtgcaagcaggccagctcaaggtgccccctggctaccacccgctggatgtggagaaggagtggggcaagctgcacgtggccatcctggagcgggagaagcagctccgcagcgagtttgagaggctggagtgtcttcagcgcatcgtgaccaagctgcagatggaggcggggctgtgtgaggagcagctgaaccaggccgacgccctgctgcagtcggatgtccggctgctggctgcaggcaaagtgccacagcgggcgggggaggtggaacgggacttggacaaggcggatagcatgatccggctgctcttcaacgacgtgcagaccctcaaggatggacggcacccgcagggcgagcagatgtaccgcagggtgtaccgtctgcacgagcgcctggtagccatccgcaccgagtacaacctacggctgaaggcaggcgtggcggcccctgcaacccaggtggcccaggtgactctgcagagtgtgcagaggcgccccgagctggaggactccactctgcgctacctgcaggacctgctggcctgggtggaggagaaccagcaccgtgtggatggcgctgagtggggtgtggacctgcccagcgtggaggcgcagctgggcagccaccgaggcctgcaccagtccatcgaagaattccgggccaagatcgagcgggcacggagtgacgagggccagctctcccccgccacccggggtgcctaccgtgactgcctgggtcggctggacctgcagtacgccaagctgctgaactcctccaaggcccgcctcaggtccctggagagcttgcacagctttgtggcagccgccactaaggagctaatgtggctgaatgagaaggaggaggaggaggtgggcttcgactggagcgaccgcaacaccaacatgaccgccaagaaggagagctactcggcgctgatgcgggagctggagctgaaggagaagaagatcaaggagctccaaaatgctggggaccggctgctgcgggaggaccacccggcccggcccacggtggagtccttccaggcggccctgcagacgcagtggagctggatgctacagctgtgctgctgtatcgaggcacacctgaaggagaacgctgcctactttcagttcttctcagatgtgcgggaggccgaggggcagttgcagaagctgcaggaggcactgcgtaggaaatacagttgtgatcgctccgccaccgtcacccggctggaggacctgctgcaggatgcccaggacgagaaggaacagctgaacgagtacaagggccacctctcaggcctggccaagcgggccaaggccgtcgtgcagctgaagccccgccacccagcccaccccatgcggggccgcctgcccctgctggccgtgtgcgactataagcaggtggaggtgactgtgcacaagggtgacgagtgccagctggtgggccctgcacagccgtcccactggaaggtgctcagcagctccggcagcgaggccgccgtgccctccgtgtgcttcctggtgcccccgcccaaccaggaggcccaggaggccgtcaccaggctggaggcccagcaccaggccctggtcacgctgtggcaccagttgcacgtggacatgaagagccttctggcctggcagagccttcgccgcgacgtgcagctcatccgctcctggtccctggccacgttccgcaccctgaagccagaggagcagcgccaagccctgcacagcctggagctgcactaccaggccttcctgcgggacagccaggacgcgggcggcttcggacccgaggaccggctgatggctgagcgcgagtacggctcctgcagccaccactaccagcagctgctgcagagcctggaacagggtgcacaggaagagtctcgctgccagcgctgcatctccgagctcaaagacatccggctgcagctggaggcctgtgagacgcgcaccgtgcaccgcctgcggctgccgctggacaaagagccggcacgggagtgtgcccagcgcatcgccgagcagcagaaggcacaggcagaggtggaggggctgggcaagggggtcgcccggctctctgccgaggccgagaaggtcttggccctaccagagccatcgcctgcggcccccacgctgcgctcggagctggagctgacgctgggcaagctggagcaggtccgcagcctgtctgccatctacctggagaagctcaagaccatcagcctggtgatccgcggcacgcagggggccgaggaggtgctcagggcccacgaggagcagctcaaggaggcccaggccgtgccggccaccctcccggagctcgaggccaccaaggcctctctgaagaagctgcgggcccaggccgaggcacagcagcccacgttcgacgccctgcgggatgagctgcggggggcacaggaggtgggggagcgactgcagcagcggcacggggagcgggacgtggaggtggagcgctggcgggagcgggtcgcccagttgcttgagcgctggcaggctgtgctggcccagaccgacgtgcggcagcgcgagctcgagcaactgggccgccagctgcgttactaccgcgagagtgcagaccccttgggcgcctggctgcaggacgccaggcggcggcaggagcagatccaggccatgccgctggccgacagccaggctgtgcgggagcagctgcggcaggagcaggccctgctggaggagatcgagcgccacggcgagaaggtcgaggagtgccagaggtttgcgaaacagtacatcaacgccatcaaggactatgaactccagctggtgacgtacaaggcgcagcttgagccggtggcctccccggccaagaagcccaaggtccagtcgggatcagagagtgtcatccaggagtacgtggacctgcgtacgcactacagcgagctgaccacactgacgagccagtacatcaagttcatcagcgagactctgcggcgcatggaggaggaggagaggctggctgagcagcagcgggcagaggagcgcgagcggctggccgaggtggaggccgcgctggagaagcagcggcagctggccgaggcgcacgcccaggcaaaggcacaggcggagcgggaggcgaaggagctgcagcagcgcatgcaggaggaggtggtgcggcgggaggaggcggcggtggacgcgcagcagcagaagcgcagcattcaggaggagctgcagcagctgcggcagagctcggaggcggagatccaggccaaggcccggcaggcagaggcggctgagcgcagccggctgcgcatcgaggaggagatccgcgtggtgcgcctgcagttggaggccaccgagcgccagcgtggcggggctgagggggagctgcaggcactgcgtgcacgggcggaggaggctgaggcacaaaagcgacaggcgcaggaggaggccgagcgcttgcggaggcaggtgcaggacgagagccagcgtaagcggcaggcggaggtggagctggcctcgcgcgtgaaggccgaggccgaggcggcgcgcgagaagcagcgggccctgcaggccctggaggagctgcggctgcaggcggaggaggcggagcggcgcctgcggcaggccgaggtggagcgagcgcggcaggtacaggtggccctggagacggcgcagcgcagtgcagaggcggagctgcagagcaaacgcgcctccttcgccgagaagacggcacagctggagcgctccctgcaggaggaacacgtggctgtggcacagctgcgggaggaggctgagcggcgggcacagcagcaggccgaggccgagcgggcgcgcgaggaggcagagcgggagctggagcgctggcagctcaaggccaacgaggcgctacggctgcggctgcaggcggaggaggtggcgcagcagaagagcctggcgcaggccgaggctgagaagcagaaggaggaggcggagcgcgaggcgcggcggcgcggcaaggcggaggagcaggccgtccggcagcgggagctggctgaacaagagctggagaagcagcggcagctggcggaaggcaccgcgcagcagcgcctggccgcggagcaggagttgatccggctgcgggccgagacggagcagggggagcagcagcggcagctgctggaggaggagctggcccggctgcagcgtgaggcggctgcagccacgcagaaacggcaggagctggaagccgagctggccaaggtgcgggccgagatggaggtgctgctggccagcaaggcgagggctgaggaggagtcgcgctccaccagcgagaagtccaagcagaggctggaggccgaggccggccggttccgcgagctggccgaggaggccgcccgcctgcgtgccctggcggaagaggccaagcggcagcggcagctggccgaggaagacgcggcgcggcagcgggccgaggcggagcgggtgcttgcggagaagctggccgccatcggcgaggccacgcggctcaagacggaggcggagatcgcgctcaaggagaaggaggcggagaacgagcgcctgcggcggctggcggaggacgaggccttccagcggcggcggctggaggagcaggccgcgcaacacaaggctgacatcgaggagcgcctggcccagctgcgcaaggcatcggacagcgagctggagcggcagaaggggctggtggaggacacgctgaggcagcggcggcaggtggaggaggagatcctggcgctgaaggcgagcttcgagaaggcggccgctggcaaggcggagctggagctggagctgggacgcatccgcagcaacgcggaggacacgctgcgcagcaaggagcaggccgagctggaggctgcgaggcagcggcagctggcggcggaggaggagcggcggcgccgtgaggctgaggagcgcgtgcagaagagcctggcggccgaggaggaggccgcacggcagcggaaggcggcgctggaggaagtcgagcggctgaaagccaaggtggaggaggcgcggcgcctgcgggagcgagcggagcaggagtcggcgcggcagctgcagctggcccaggaggccgcccagaagcggctgcaggcggaagagaaggcacacgccttcgcggtgcagcagaaggagcaggagctacagcagacgctgcagcaggagcagagcgtgctggaccagctgcgcggcgaggcggaggcggcccggcgggcggctgaggaggcggaggaggcccgggtgcaggcggagcgtgaggcggcgcagtcccggcggcaggtggaagaggccgagcggctgaagcagtcggcagaggagcaggcacaggcccgggctcaggcacaggcggctgcagagaagctgcgcaaggaggccgagcaagaggcggcgcggcgggcacaggcggagcaggcggccctgcggcagaagcaggcagctgacgcggagatggagaagcataagaaattcgccgagcagacgctgcggcagaaggcgcaggtggagcaggagctgacaacactgcggctgcagctggaggagaccgaccaccagaagaacctgctggacgaggagctgcagcggctgaaggcggaggccacggaggccgcacgccagcgcagccaggtggaggaggagctcttctcggtgcgcgtgcagatggaggagctgagcaagctcaaggcacgcatcgaggctgagaaccgcgcactcatcttgcgtgacaaggacaatacgcagcgcttcctgcaggaggaggctgagaagatgaagcaggtggcggaggaggccgcgcggctgagtgtggcggcccaagaggctgcgcgactgcggcagctggcagaggaggacctggcacagcagcgggccttggcagagaagatgctcaaggagaagatgcaggcggtgcaggaggccacgcgactcaaggctgaggcggaactgctgcagcagcagaaggagcttgcgcaggagcaggcgcggcggctgcaggaggacaaggagcagatggcgcagcagctggcggaggagacgcagggcttccagcggacgctggaggccgagcggcagcggcagctggagatgagcgctgaggctgagcgcctcaagctgcgtgtggccgagatgagccgagcccaggcccgcgctgaggaggacgcccagcgcttccggaagcaggcggaggagatcggtgagaagctgcaccgcacggagctcgccacccaggagaaggtgaccctggtgcagacactggagatccagcgacagcagagtgaccatgatgccgagcgcctgcgggaggccatcgctgagctggagcgtgagaaggagaagctccaacaggaggccaaactgctgcagctcaagtctgaggagatgcagacggtgcagcaggagcagctgctgcaggagacgcaggccctgcagcaaagcttcctctctgaaaaggacagcctgctacagcgggagcgcttcatcgagcaggagaaggccaagctggagcagctcttccaggacgaggtggccaaggcacagcagctgcgtgaggagcagcagcggcagcagcagcagatggagcaggaacggcagcggctggtggccagcatggaggaggcgcggcggcggcagcatgaggccgaggagggcgtgcggcgcaagcaggaggagctgcagcagctggagcagcagcggcggcagcaggaggagctgctggctgaggagaaccagaggctgcgtgagcagctgcagctcctggaggagcagcaccgggccgcgctggcgcactcagaggaggtcactgcctcgcaggtggctgccacaaagaccctgcccaatggccgggatgcacttgatggccccgcggcagaggcagagccggagcacagcttcgatggcctgcggcggaaggtgtcagctcagaggctgcaggaggccggcatcctgagtgcggaggagctgcagcggttggcgcagggccacaccacggtggacgagctcgcacggcgggaagacgtgcgccactacctgcagggccgcagcagtatcgcagggctgttgctgaaggccaccaatgagaagctgagtgtttacgccgccctgcagaggcagctgctgagtcccggcacggccctcatcctgctggaggcgcaggcggcctcaggcttcctgctggaccctgtgcggaaccggcggctgaccgtcaacgaggctgtgaaggagggtgtggtgggccccgagctgcaccacaagctgctgtcggccgagcgcgccgtcactggctacaaggacccctacactggccagcagatctctctcttccaagccatgcagaagggcctcatcgtccgggagcacggcatccgcctgctggaggcccagatcgccacgggcggcgttatcgaccccgtgcacagccaccgcgtgcccgtggacgtggcctaccggcgcggctacttcgacgaggagatgaaccgcgtcctggcggaccccagcgacgacaccaagggcttctttgaccccaacacgcacgagaacctcacgtacctgcagctactggagcgctgcgtggaggaccccgagacgggcctgtgccttctgccactcacggataaggctgccaagggcggggagctggtctacactgactccgaggcccgggacgtctttgagaaggccaccgtgtctgcgccgttcggcaagttccagggcaagacggtgaccatttgggagatcatcaactcggaatacttcacggcagagcagcggcgggacctgctgcggcagttccgcacgggccggatcacagtggagaagatcatcaagatcatcatcacggtggtggaggagcaggagcagaagggccggctttgctttgagggcctgcgcagcctggtgccagccgccgagctgctggagagcagggtcatcgaccgcgagctctaccagcagctgcagcgaggtgagcgctctgtgcgagacgtagccgaggtggacactgtgcggcgggctctccggggtgccaacgtcatcgcgggtgtatggctggaggaggcggggcagaagctgagtatctacaatgccctgaagaaagacctgctgccatccgacatggccgtggccctgttggaagcccaggccggcaccgggcacatcatcgaccccgccaccagcgcccggctgaccgtggacgaggcagtgcgtgctggcctggtgggccccgagtttcatgagaagctgctatcagccgagaaggctgtgacagggtacagggacccctacacagggcagagcgtctccctgttccaggccctgaagaagggcctcattccccgggagcagggcctgcgcctgttggacgcccagctgtccacgggcggcatcgtggaccccagcaagagccaccgcgtgcccctggatgtcgcctgcgcccgaggctgcctggatgaggagaccagcagggccctgtcggcaccaagggccgacgccaaggcctacagtgaccccagcacaggggagccggccacctacggcgagctccagcagcggtgccggcccgaccagctgaccgggctgagcctgctgccgctctcagaaaaggctgctcgggcccggcaggaggagctctactcagagctgcaggcccgtgagacctttgaaaagaccccggttgaggtccccgtgggtggcttcaagggcaggacggtgacggtgtgggagctcatcagctctgagtacttcactgcggagcagcggcaggagctgttgcgtcagttccgcacgggcaaggtcaccgtggagaaggtcatcaagattctcattaccatcgtggaggaggtggagaccctgcggcaggagaggctgtccttcagcggcctccgtgcccctgtgccagccagcgagctcctggcttccggggtcctcagcagagcccagtttgagcagctcaaggacggcaagacgacggtcaaggacctttcggagctgggctccgtgcggacgctgctgcagggcagtggctgcctcgccggcatctacctggaggacaccaaggagaaggtgtccatctacgaggccatgcgccggggcctgctgagagccacaacggctgcgctcctgctggaggcgcaggcggccactggcttcctggtggaccccgtgcggaaccagcgcctgtatgtccacgaggccgtgaaggcgggcgtggtgggccccgagcttcacgagcagctgctgtctgccgagaaggccgtcaccggctacagagacccctactcgggcagcaccatctccctcttccaggccatgcagaagggcctggttctccggcagcacggcatccgcctgctggaggcccagatcgccacgggcggcatcatcgaccccgtgcacagccaccgcgtgcctgtggacgtggcctaccagcgcggctacttcagtgaggagatgaaccgcgtcctggcggaccccagcgacgacaccaagggcttctttgaccccaacacgcatgagaacctcacgtacaggcagctgctggagcggtgcgtggaggaccccgagacgggcttgcgccttctgccactgaaaggggcggagaaggctgaggtggtggagaccacgcaggtgtacactgaggaggagacaagaagggcatttgaagagacacagatcgacattcccggcggcggcagccacggcggctccaccatgtccctgtgggaggtgatgcagtcggacctgatccccgaggagcagcgggcccagctgatggctgacttccaggccggccgggtgaccaaggaacgcatgatcatcatcatcatcgagatcattgagaagacagagatcatccgccagcagggtctggcctcctacgactacgtgcgccgccgcctcacggctgaggacctgttcgaggctcggatcatctctctcgagacctacaacctgctccgggagggcaccaggagcctccgtgaggctctcgaggcggagtccgcctggtgctacctctatggcacgggctccgtggctggtgtctacctgcccggttccaggcagacactgagcatctaccaggctctcaagaaagggctgctgagtgccgaggtggcccgcctgctgctggaggcacaggcagccacaggcttcctgctggacccggtgaagggggagcggctgactgtggatgaggctgtgcggaagggcctcgtggggcccgagctgcacgaccgcctgctctcggctgagcgggcggtcaccggctaccgtgacccctacaccgagcagaccatctcgctcttccaggccatgaagaaggagctgatccctactgaggaggccctgcggctgctggatgcccagctggccaccggcggcatcgtggacccccgcctgggcttccaccttcccctggaggtggcttaccagcgtggctacctcaacaaggacacgcacgaccagctgtcagagcccagcgaggtgcgcagctacgtggacccgtccaccgacgagcgcctcagctacacgcagctgctcaggcggtgccgtcgtgacgacggcaccggccagctgctcctgccactgtcggacgcccgcaagctgaccttccgtggcctgcggaagcagatcaccatggaggagctggtgcgctcgcaggtcatggacgaggccacggcgctgcagctgcgggagggcctgacctccatcgaggaggtcaccaagaacttgcagaagttcctggaaggcaccagctgcatcgctggtgtcttcgtggacgccaccaaggaacggctctcggtgtaccaggccatgaagaagggcatcatccgccccggcacagcctttgagctcctggaggcgcaggcggccaccggttacgtcatcgaccccatcaagggactgaagctgacggtggaggaggctgtgcgtatgggcattgtgggccccgagttcaaggacaagctgctgtcggccgagcgcgccgtcactgggtacaaggacccctactctgggaagctcatctccctcttccaggccatgaagaagggcctgatcctgaaggaccatggcatccgcctgctggaggcccagatcgccacgggcggcatcatcgaccctgaggagagccaccggctgcccgtggaggtggcctacaagcgcggcctcttcgatgaggagatgaacgagatcctgaccgacccctcggacgacaccaagggcttctttgaccctaacacggaggagaacctcacctacctgcagctgatggagcgttgtatcactgacccccagacgggcctgtgtctcttgccgctgaaggagaagaagcgggagcggaagacgtcctccaagtcctccgtgcgcaagcgccgagtggtcatcgtggaccccgagacgggcaaggagatgtcagtgtacgaggcctaccgcaagggcctgattgaccaccagacgtacctggagctgtccgagcaggagtgcgagtgggaggagatcaccatctcctcctcggacggcgtggtcaagtccatgatcatcgaccgccgctccgggcgccagtacgacatcgatgatgccatcgccaagaacctcatcgaccgctcggcactggaccagtaccgcgccggcacgctctccatcaccgagttcgccgacatgctctcgggcaacgccggtggtttccgctcccgttcctcctcggtgggatcctcctcctcctaccccatcagccccgccgtctccaggacccagctggcctcctggtcagaccccactgaggagacgggccccgtggctggcatcctggacacggagacgctggagaaggtgtccatcaccgaggccatgcaccggaacctggtggataacatcacggggcagcggctgctggaggcgcaggcctgcaccgggggcatcatcgaccccagcaccggtgagcgcttccctgtcaccgacgccgtcaacaagggcctggtggacaagatcatggtggaccgcatcaacctggcccagaaggccttctgcggcttcgaggacccacgcaccaagaccaagatgtcggccgcccaggccctgaagaagggctggctctactacgaggccggccagcgcttcctggaggtgcagtacctgaccggcggcttgatcgagcccgacacgccgggccgcgtgcccctggacgaggccctgcagcgcggcacggtggacgcccgcaccgcacagaagctgcgtgacgtgggcgcctactccaagtacctcacctgccctaagaccaagctcaagatctcctataaggacgcgctggaccgcagcatggtggaggagggcacggggctgcggctgctggaggctgccgcgcagtccaccaagggctactacagcccctacagcgtcagcggctccggctctaccgctggctcccgcaccggctcgcgcaccggctcccgggccggctcccgccgcggcagctttgacgccaccggctccggcttctccatgaccttctcttcatcctcctactcctcctcgggctacggccgccgctacgcctcggggtcctcggcctccctggggggccctgagtctgccgtggcctgaggctgcctgcgcccaccccgctctgcatgcggcccagcccggctcccaccgaggcgcgggggccgttttcaacgcttaaaggtgtcttcctcccaagtggtgcctaaagtttaaccaaaaagaccagactaatatattaatatatatctgctgtccagacagcctgtatcttgggggacagggctggcccagccctgctggccgcctcaccccctcgggtctcctcactcccttctacctgccactcacacagccaggtgccttggagggtcccaagctgggccccagcccaccctcctgtcttcccagggtagcccgcctgccagtcctagctgcacagggcagctgggcccaaccctgtctgtagagggccctggtgtttctagcactggcctgcacggtgggccttgctggggacggggggccccagtcagcctctctcccagtctacccagagaagccccttccccatgggaagacgaggccctcgggcccagcccccacagtgctgtctgatctgtgctttccagctcaccccccacactcactcctgagacccctggcctccggcgtcagcctccagcctctgttcccctagtaagtgccttccatgtcggcctctaaccccaggccccgaggacccagacccagtggggaggcggacgttccagccggcatggctgggaactgcagacctgtcctcctggtgggtccaggggcccctccagcttgtggagccccacactggggtgccgcctgcccgtctctctcccatggagccccagccccctttgggcccagggacaccagccaggctctgtgctgaccctcctgttgcacccagccctggtctcagcagcgaccacccctgcctccaccctctgagctttgcatgttccactaaccccgggcgggtggcaggtggaggtgtcaggctgctggcgcctctgcaagggcagaacactaacctgaccgtgggcggggccttgcggtatccgcccccaataaaagcaattccaacctt

SEQ ID NO: 31721 - DNA, 1791 bp, Homo Sapiens
gagcggctgaaaggcggaagtggaggccggagcctgggacaccgccggcggggagagaagcggatcccgtccgagccccggccccaagtaacgccgccgccccggagccgccagtctcgctctctcgccaggccggagtgcagtggcactatctcagctcagtgcaacctctgcctcccgggttcaagcgattctcctgcctcagcctcccgagtagctgggactacagttggaggtccccctccccactaagtgcctctttgcatagcaccagtccccacccgcacgctctctggaccactacagctggacgggcaatggcgggtcggggaggcgcagcacgacccaatggaccagctgctgggaacaagatctgtcaatttaagctggttctgctgggggagtctgcggtaggcaaatccagcctcgtcctccgctttgtcaagggacagtttcacgagtaccaggagagcacaattggagcggccttcctcacacagactgtctgcctggatgacacaacagtcaagtttgagatctgggacacagctggacaggagcggtatcacagcctggcccccatgtactatcggggggcccaggctgccatcgtggtctatgacatcaccaacacagatacatttgcacgggccaagaactgggtgaaggagctacagaggcaggccagccccaacatcgtcattgcactcgcgggtaacaaggcagacctggccagcaagagagccgtggaattccaggaagcacaagcctatgcagacgacaacagtttgctgttcatggagacatcagcaaagactgcaatgaacgtgaacgaaatcttcatggcaatagctaagaagcttcccaagaacgagccccagaatgcaactggtgctccaggccgaaaccgaggtgtggacctccaggagaacaacccagccagccggagccagtgctgcagcaactgagccccccttgcctgcccgctgcccccgcctcctccgcctgaatgacccgactggaatccactctaaccaatcgcacttaacgactcgggccaccactgggggggcagggggaggggtccaccatgatttctccatataattttgatcataggccggagtgagtcattccacctgcacctttctgtacaaatactaattcaattttaagtcttaagtcacttttttaatatatatgatcttctgctcttcccacttcctcccctttctactgctctcccattttcccttgctgggagtagccacatgctcttgccccccaacccttgtatatggggacagtggggtcagtgcagctaccctttctttccctcctgcggaacagcggacccagcaagagcatccacatcctcactttgttcggagtggtctttggtttgggcggtggggcagaccttgggaaggggcttaggaagggagaggcagctcttccttcagctggctctcatcaggctgcagccccctccccgctcccacctccctgctgggaaaccacagcattatcacagcattattgtgacagccacgaacccattgcccacaacccctccaccctcggtcaccccaacctctggctctgagccctgttctgaccaaatcatgatgatgagtatttgggggtgggtgggtaagggggggagtgggaggggacggaaccaactttttctgtattttgtattgtatgttttcttcaacatgtaaccaatcagtatcttgtcaatatagtcagccgatcgatcgacctcaaaaaaaaaaaaaaaaaaaa

SEQ ID NO: 31722 - DNA, 3229 bp, Homo Sapiens
atgaatcaggggagtggactggacctgctgaagatctcatatggaaaaggagccagaaggaaaaacagatttaaaggatctgatggaagcacgtcatctgatactacctcaaatagttttgttcgccagggttcggcagactcctacactagccgtccatccgattccgatgtatctctggaggaggaccgggaggcagtgcgcagagaagcggagcggcaggcccaggcacagttggaaaaagcaaagacaaagcccgttgcatttgcggttcggacaaatgtcagctacagtgcggcccatgaagatgatgttccagtgcctggcatggccatctcattcgaagcaaaagattttctgcatgttaaggaaaaatttaacaatgactggtggatagggcgattggtaaaagaaggctgtgaaatcggattcattccaagcccagtcaaactagaaaacatgaggctgcagcatgaacagagagccaagcaagggaaattctactccagtaaatcaggaggaaattcatcatccagtttgggtgacatagtacctagttccagaaaatcaacacctccatcatctggtgcaaaatctgcagatgaacaagaccagtggaaaactgcaggcttgttttggcggtttactacagagcacactcctccgtatgatgtggtaccttccatgcgaccagtggtcctagtgggcccttctctgaagggctacgaggtcacagatatgatgcaaaaagcgctgtttgattttttaaaacacagatttgaagggcggatatccatcacaagggtcaccgctgacatctcgcttgccaaacgctcggtattaaacaatcccagtaagcacgcaataatagaaagatccaacacaaggtcaagcttagcggaagttcagagtgaaatcgaaaggatttttgaacttgcaagaacattgcagttggtggtccttgacgcggatacaattaatcatccagctcaactcagtaaaacctccttggcccctattatagtatatgtaaagatttcttctcctaaggttttacaaaggttaataaaatctcgagggaaatctcaagctaaacacctcaacgtccagatggtagcagctgataaactggctcagtgtcctccagagctgttcgatgtgatcttggatgagaaccagcttgaggatgcctgtgagcaccttgccgactatctggaggcctactggaaggccacccatcctcccagcagtagcctccccaaccctctccttagccgtacattagccacttcaagtctgcctcttagccccaccctagcctctaattcacagggttctcaaggtgatcagaggactgatcgctccgctcctatccgttctgcttcccaagctgaagaagaacctagtgtggaaccagtcaagaaatcccagcaccgctcttcctcctcagccccacaccacaaccatcgcagtgggacaagtcgcggcctctccaggcaagagacatttgactcggaaacccaggagagtcgagactctgcctacgtagagccaaaggaagattattcccatgaccacgtggaccactatgcctcacaccgtgaccacaaccacagagacgagacccacgggagcagtgaccacagacacagggagtcccggcaccgttcccgggacgtggatcgagagcaggaccacaacgagtgcaacaagcagcgcagccgtcataaatccaaggatcgctactgtgaaaaggatggagaagtgatatcaaaaaaacggaatgaggctggggagtggaacagggatgtttacatcccccaatgagttttgcccttttgtgtttttttttttttttttttgaagtcttgtataactaacagcatccccaaaacaaagtctttggggtctacactgcaatcatatgtgatctgtcttgtaatattttgtattattgctgttgcttgaatagcaatagcatggatagagtattgagatactttttcttttgtaagtgctacataaattggcctggtatggctgcagtcctccggttgcatactggactcttcaaaaactgttttgggtagctgccacttgaacaaaatctgttgccacccaggtgatgttagtgttttaagaaatgtagttgatgtatccaacaagccagaatcagcacagataaaaagtggaatttcttgtttctccagatttttaatacgttaatacgcaggcatctgatttgcatattcattcatggaccactgtttcttgcttgtacctctggctgactaaatttggggacagattcagtcttgccttacacaaaggggatcataaagttagaatctattttctatgtactagtactgtgtactgtatagacagtttgtaaatgttatttctgcaaacaaacacctccttattatatataatatatatatatatatcagtttgatcacactattttagagtcttaatgccaagtcagcagatttgctttatgaattacagggactagaaatgcccacattcaggaaatttgtaataacattgtctagacacctatcctcattctagtagaaagtgtgtacatactgtaaatatgtgtgattgcttgacttgaaaaggtttgaattctgaatgttataccatccttgtaagtaagtttgtaatttccaccataaattatggtaaatataaaactccagaggttgttctactccatacagttcacactgattgtgacacattcttagtagctagtgtctgttctagtcactgcactggagtctacgagccggaactcgctatatgcacgtgtgtgtgtccgtatgtaagaaagtgtgcaccgagtgactgaatggttgagatgaattggaatgctgaagactaacgaagaaactagagactgatatcgagcattctgcccacctcgctctgtatttaattaattgtgctatatgttgctttaacaacccattgagcagtcagggaatgtgagtaagcttgctgccaaaggtaactaggaaagcattcatctgctgcctccttgtttttgctcctagagagtgaaaatacaggcaattttactgtgagtgtttcactggaaatgtacaatctttgtgtgttagagtatttgttttagtaagaaatgtttacacagcttgtggaattatttcgtgggaaaataaatttttataacttctcccaaaaaaaaaaaaaaaaa

SEQ ID NO: 31723 - DNA, 2695 bp, Homo Sapiens
gatcggctcgatgagcggaggcgctgctgcggcgctgcggccgacgccgggtccgcaccaactgtctccccctcccagcttcttacctcggcttcctactccttcccccgcccgcccagcaccgccagcccgggagagctgccgggagttccccgggagcctcaggtggtgactatcctgttgagaagcaaaagatactttgcaagtaaaaaatatgcctcccaagtttaagcgccacctcaatgatgatgatgtcacaggttctgtgaaaagtgaaaggagaaatcttttggaagatgattcagatgaagaagaggacttttttctaaggggaccatctggaccaagatttggacctagaaatgataaaattaagcatgttcagaatcaagtggatgaagttattgatgtcatgcaagaaaatattacaaaggtaattgagagaggggagagactagatgaactacaggacaaatcagaaagcttatcggataatgcaacagcttttagcaacagatccaaacaacttcgaaggcaaatgtggtggcgtggatgcaaaataaaagccatcatggctttggttgctgctatccttttgctagtgattatcattcttatagtcatgaaataccgtacttgatttgatgacagagatcttcattaaacaagatctgggacagtaataaaagattgctgcataatttaaatgaaacctatgtgtatataactttcaaaacttctttttcaagaaactaagagctcagatcatcctgcacttgaaaaatgaagttttaccaccatcaaaactatcattatttaacaacaagtgaagatcaacagaaaaattcaagtagctttgcaaatactagttgatactcagtgaaatcacgtcactattttgatgcctgaatccatacctttgtgatttatgtttaattacagaagcctattgccttgcagcaattttgttgttataatactgattaattggttactccttcttattataactcagtaatacctgtggtcatttggttcctctatcctgacaaagttcactggaaattgccctcagattttataaactgggggatttcttaattagataaaagttcattactgaagatggaatattatataagatggaggaagggtaattaatagacatgagatatagaaatactttgttagccctgctatagattgcctattgtagtctttctgtgcatttcaatagtctgtattaggaaattataacttcagcacttttgatagcaaaaattggcatctttcaattctgtatagtatgtgactatcctgtaaatgataatatgtgtacagactgagaaggcaggaatataaagtaattgaaatctctcattgccggtatactctaaaacatgcttgatgccttgtcagcatcattgcacacattgactctgtatttacatctgtatatacactatgattagaaaatatgcaagaaattgtttttccatgttaagaacaaatgccattagaagatgtccccttaattgtattgtcagagtattactatgtcaaggatgactgttctgttaacctaattttgtgttttcacatggaaatgtgattggactccatttttctgtgagttgagagtaagagcataagtcagtttgaaagcatttacaagtttgttttagaatgtagtaagggctgaaaggtgctctacttcttaacttgttttttccatgttgtagacaaatgaaatttgtctaaatgcttttgtctaaaaatgcatttgtctaaatgctttagattgatgtagggtttagatcctctttaatactttgagatagtcttattctgattttttttttcttctggaaaccaagtagaattagggatgggaatacaaatgcatttattctggcttctgttttattccaagaagcttcttggaacaaatcagtaggaattgaaaagaaagcatgaccaacccaattacaggggataaatgtaagcttgttaaagtaagcaccacaccatgtttctgtctccccagcacccagcacagtgctgtgaaccttggcagatgctagataaatgtgtgttgaatgaatgtgcctatgaagccacaaagatgccacatgttagtatatcagtgagaggtgactccacagtgctctctggagaagcaatatgagtgactgaagagtggggccttttgcttttgcctggatataggggtgctcttctactgtaattgggtgtggaaaaactctggctttatggtattccattaggttcttttcatttaaagtagtcttaaaatcaaagtatccaatattttaaagccacaaagtagattacataattagcagagattttagtcagtaaaatgttagaaatcaaactataagaaaattcaagtcctttattttgtgtcttgggtatatgtcattattttaaattccacactcccttatttaatcactttggtaagtgcctttgatgttttgaaatgtatagtgggagatgagcaaatgtaaatgtcatgtgccctgttccctagcttctcaattcctcataaccatttttaccagtgttgcaaagtttagacctttgtgttaatatcagaagtgtatttgtagcccctccatagtgaacaatgaaataaactatttcatagaaaacaaaaaaaaaaaaaaaa

SEQ ID NO: 31724 - DNA, 4022 bp, Homo Sapiens
agcgggtctctcgctgtcgccggagtcccaggtctgtcttcactgctctgtgtcctctgctcctagaggcccagcctctgtggcgctgttaccagcaggtattggagatccacagctaagatgccaggaccccctagaagcctagaaatgggactgttgacatttagggatgtggccatagaattctctctggaggagtggcaacacctggacattgcacagcagaatttatatagaaatgtgatgttagagaactacagaaacctggccttcctgggtattgctgtctctaagccagacctgatcacctgtctggaacaagggaaagagccctggaatatgaagcgacatgagatggtggatgaacccccaggtatgtgtcctcattttgctcaaggcctttggccagagcagggcatggaagattcttttcaaaaagcaatactgagaagatatggaaaatatggacatgagaatttacagttaagaaaaggctgtaaaagtgtggatgagtataaggtgaacaaagaaggttataatggacttaaccagtgtttcacaactgcccagagcaaagtatttcaatgtgataaatatttgaaagtcttctataaatttttaaattcaaacagacctaagataagacatactgaaaagaaatctttcaaatgtaaaaaacgtgtcaaattattttgcatgctttcacataaaacccaacacaaaagcatttatcatagagagaagtcctacaaatgtaaagaatgtggaaaaacctttaattggtcctcaacccttactaatcataggaaaatttatactgaagagaaaccttacaaatgtgaagaatataacaaatctcctaagcaactctcaacccttactacacatgaaataattcatgctggagagaaactctacaaatgtgaagaatgtggtgaagcttttaatcgatcctcaaatcttactacacataagataattcatactggagagaaaccttacaagtgtgaagaatgtggcaaagcatttatctggtcctcaacccttactgagcataagaaaattcatactagaaagaaaccctacaagtgtgaagaatgtggcaaagcatttatatggtcctcaacactaactagacataagaggatgcacactggagagaaaccctacaaatgtgaagaatgtggcaaagcttttagccagtcctcaacccttactacacataagataattcatactggagagaaacgctacaaatgcttagaatgtggcaaagcttttaagcaactctcaactcttactacacataaaataattcatgttggagagaaactctacaaatgtgaagaatgcggcaaaggttttaatcgatcttcaaatcttactacacataagataattcatactggagagaaaccttacaagtgtgaagaatgtggcaaagcatttatctggtcctcaacgcttactaaacataagagaattcatactagagagaaaccctacaaatgtgaagaatgtggcaaggcatttatatggtcctcaaccctaactagacataagaggatgcacactggagagaaaccctacaaatgtgaagaatgtggcaaatcttttagccaatcctcaacccttactacacataagataattcatactggagagaaaccctacaaatgtgaagaatgtggcaaagcctttaactggtcctcaactcttactaaacataacataattcatactgaagagaaaccctacaaatgtgaaaaatgtggcaaagcctttaagcagtcttcaatccttactaaccataagagaattcatactggagagaaaccctataaatgtgaagaatgtggcaaatcttttaaccggtcttcaacttttactaaacataaggtaattcatactggagtaaaaccctacaaatgtgaagaatgtggcaaagcatttttctggtcctcaaccctaactaaacataagagaattcatactggagagcaaccctacaaatgggaaaaatttggcaaagcctttaatcggtcctcgcacctcaccacagataagataactcattggagagaaatcttacaagtatgaataatgtgccaaagcctaagaaaaccctcaattcttaatagatataagattattcctactggagagaaactacaaacctgagagaggcgctaatgcttttgacagtacctaaaactttaaagaaaatcattctgctgaaaaatcctagaaatgtgaagaatgtgaaaaagcctttaaatgattgtcacacttgattgtaggtaagataattcatactggagaaaactaccagtgtgaacaacgtggccaagcttcgacaatgctcacaccctattgcacaggaaagcatttatacttgagaagaaatgtacaaatattggcaaagtaaaaaatccattaacacctgctcacatcttactcaaaattgtagagttcatagtaaataaaagcattaaaattctaattactctcagaagatctgtcagaaagtatgtctttaaagtatagaagagcatttattttgaaaaaaacattacacatatgaagaggattgtaatatctttacttgtaccacagatcttattgtacacattttatactagagaaaaaccctcaggcagttgttaaaattttgttgaacatcagggagtttaagaaaaccctgcaagtataatgaatttggaaaaacattttttcaaaaactacaaattataaaacaccaaagtgttcatactaaaatatatttttgcagatacattaaatatgaaagatattcaatccaaaattaagtctatgtaaatatcagggaataattcacagtagaaatatctagggcattcaagctttagacattacactaaatcagagtgctgagtatagaaaataatacaaacagatttgtctaaacatttgtatataactttaaaaatagaatattttttggagggttataattacattcaaagtacttttttttgaaaatacagattttttttaaaagtgaataatgtgttcaactcttaaattcatgctgtttcatcattgctggtgtattcatatgtgaaagcatgtgactaattgctgcataaaagatatgagattcttttttattaggcattatttatgaccttttctatgaaaagataaggacattaaaatgtaagatgcgtgaggaaaatttaggtagagaggctctttgtggttaacttataatattgagtgatgcatgaggtaggtgttcagaataatattcctctgcattattatgaatgaaaagcattcttaattttagttaaaattaagttagtcatatgttattttattaattgtacttctatgaaataatatgcagtctatttttaaattataaattatgtgtgaacttagcttttcaattcaacatttttaacatattaaatactattgtgaattcaatgaagtgttcttatgccactaactttaacctattcccttactcaaggatgtaggtaaaagatggtaacaatacactatttggtaagataatgtactgacatctctagcaatcttttttgccagtggctttaaattgccaataagttaaagaatattgttcctatgggttaaatttttattcttattttcacatttaaatttatttttcttaatttttgtggatacataatatgtgtatatatgtatgccatatatggtatattttgatgcaggcatactctatataataatcacattagaggaaatgagatatccattacctctagcatttattctttttattacaagcaattcaattgtacacttttagttatttttaaatttacaatgttattgattacagggtcatttttatggtcataataaaaaattttatacaaacgtgtaaaatctatacatttctgagttctgaataaatatttttaaaaattttaaaaaaaaaaaaaaaaaaaaaaaaaaaaaaaaaaaaaaaagaaaaaaaaaaaaaa

SEQ ID NO: 31725 - DNA, 2499 bp, Homo Sapiens
agggaaggcagcgagcaggatcccctactctgcgggcggcgcgaggcgtctggctcttcgcggcggcggcgaggggaaagggagcgcgggggctgggtggaatcgaggagtgaggaaaaagggaaggggcgggggagagggaccagggaaggcgtcggggggaatctcgcgagggttggagttttggcgagagtttgtggaagatggcgcctgttgtgacaggtcattgaaattatgagactatcattcaaatggaagcattatagttcttcggaaccattatgatctcaaaacgaaaggagaatgatacagatacactggctgaggtgttttgaggtgcatcgaagtgttccaagctgtgacttaccttaacatgttcttgaagtaccatggcgtggattaaaaggaaatttggtgagcggcctccacctaaacgacttactagggaagctatgcgaaattatttaaaagagcgaggggatcaaacagtacttattcttcatgcaaaagttgcacagaagtcatatggaaatgaaaaaaggtttttttgcccacctccttgtgtatatcttatgggcagtggatggaagaaaaaaaaagaacaaatggaacgcgatggttgttctgaacaagagtctcaaccgtgtgcatttattgggataggaaatagtgaccaagaaatgcagcagctaaacttggaaggaaagaactattgcacagccaaaacattgtatatatctgactcagacaagcgaaagcacttcatgttgtctgtaaagatgttctatggcaacagtgatgacattggtgtgttcctcagcaagcggataaaagtcatctccaaaccttccaaaaagaagcagtcattgaaaaatgctgacttatgcattgcctcaggaacaaaggtggctctgtttaatcgactacgatcccagacagttagtaccagatacttgcatgtagaaggaggtaattttcatgccagttcacagcagtggggagccttttttattcatctcttggatgatgatgaatcagaaggagaagaattcacagtccgagatggctacatccattatggacaaacagtcaaacttgtgtgctcagttactggcatggcactcccaagattgataattaggaaagttgataagcagaccgcattattggatgcagatgatcctgtgtcacaactccataaatgtgcattttaccttaaggatacagaaagaatgtatttgtgcctttctcaagaaagaataattcaatttcaggccactccatgtccaaaagaaccaaataaagagatgataaatgatggcgcttcctggacaatcattagcacagataaggcagagtatacattttatgagggaatgggccctgtccttgccccagtcactcctgtgcctgtggtagagagccttcagttgaatggcggtggggacgtagcaatgcttgaacttacaggacagaatttcactccaaatttacgagtgtggtttggggatgtagaagctgaaactatgtacaggtgtggagagagtatgctctgtgtcgtcccagacatttctgcattccgagaaggttggagatgggtccggcaaccagtccaggttccagtaactttggtccgaaatgatggaatcatttattccaccagccttacctttacctacacaccagaaccagggccgcggccacattgcagtgcagcaggagcaatccttcgagccaattcaagccaggtgccccctaacgaatcaaacacaaacagcgagggaagttacacaaacgccagcacaaattcaaccagtgtcacatcatctacagccacagtggtatcctaactaccgtctttttgctaggacttaaactgacttgagtgtggcaaaaagttaacaaaaaaggagaaaaaatgaacaatcgtttgtggtttcttgggaaaacttttcataccaggtgatactattcaaaaaccccgttgtctccctgcaagtgctgatttgaaatgcagaagccacagtaaaaaaaaaaaaaaaaaaaaaaaaaaagaaaaaaaaatcaaaatgtataaatattggaaatcaagtttttcagctgttttgttggttggttggttggtttttgtttggttttgtttaaatgggcaagaagtaaataatgtggctggaatacaagttgaacaaactagaagacacaaatctaacatagtttttatggaccaaggaacttgtatattgtataagctttagtaaaaggtacattttcaccatacctttttttatatcacggtattatagtacaccttgttaccaaataggttgttctcttccccacccacctttgagcttttgctctaaaatacattcaggttccaagcctgaccatccttgtttaatctatcatactcttccaggttttttttttttggtctaaggctggaacttttttcttttttttcagctgaagtcttatgacttttcatgagtcaaaatt

SEQ ID NO: 31726 - DNA, 2862 bp, Homo Sapiens
gctccgcgtcctgtgaggtccagtggccgcccaggcgcgaccagatctgggtgcgcggagagcgcgcatggcggctgtgggaccgcggaccggccccggaaccggcgccgaggctctagcgctggcggcagagctgcagggcgaggcgacgtgctccatctgcctagagctctttcgtgagccggtgtccgtcgagtgcggccacagcttctgccgcgcctgcatagggcgctgctgggagcgcccgggcgcggggtctgttggggccgccacccgcgcgccccccttcccactgccctgtccgcagtgccgcgagcccgcgcgccccagtcagctgcggcccaaccggcagctggcggcagtggccacgctcctgcggcgcttcagcctgcccgcggctgccccgggagagcacgggtctcaggcggccgcggcccgggcagcggctgcccgctgcgggcagcatggcgaacccttcaagctctactgccaggacgacggacgcgccatctgcgtggtgtgcgaccgcgcccgcgagcaccgcgagcacgccgtgctgccgctggacgaggcggtgcaggaggccaaggagctcttggagtccaggctgagggtcttgaagaaggaactggaggactgtgaggtgttccggtccacggaaaagaaggagagcaaggagctgctgaaacagatggcagcggagcaggagaaggtgggggcagagttccaggcactgagggctttcctggtggagcaggagggtcggctgctaggccgcctggaggaactgtcccgggaggtggcacagaagcagaatgagaacctggcccagctcggggttgagatcacccagctgtccaagctcagcagccagatccaggagacagctcaaaagcctgaccttgactttctccaggaattcaaaagcacgctgagcaggtgtagcaatgtgcctggccccaagccaaccacagtctcttctgagatgaagaataaagtctggaatgtttctctcaagacctttgtcttaaaagggatgctgaagaagttcaaagaggaccttcggggagagctggagaaagaggagaaagtggagctcaccttggatcccgacacggccaacccgcgcctcatcctctctctggatcttaagggcgtgcgcctcggcgagcgggcccaggacctgcccaaccacccctgccgcttcgacaccaacacccgcgtcctggcgtcctgcggcttctcctcgggccggcatcactgggaggtggaggtgggctctaaggacggctgggcctttggcgtggcccgcgagagcgtgcgccgaaagggcctgacgcccttcactcccgaggagggcgtctgggccctgcagctcaacggcggccagtactgggccgtgaccagccccgagcggtcgcccctcagctgcgggcacctgtcgcgcgtgcgggtggccctggacctggaggtgggagccgtgtccttctacgctgtggaggacatgcgccacctctacaccttccgcgtcaacttccaggagcgcgtgttcccgcttttctctgtttgctccacgggcacctacttgcgaatctggccttgaggggcactgctggggagctcctgtctctgggctgccggtgggaggggatgtcgcctccccagagatgcctggtccgtcttgggtctgccctccgtgctcctgacccctgctgcccaagagagcctgctacagacacaaccccgaggcaggagagtgactgtggccaaccgagcaggggaacaggggctttggactcctgagggtgttcccttcctgaggtcacatgtggatttggccagagccttcaggaggtggaggccggtgaggtcaggagcccagctctccagggggcttctgccctgactgggaagggtgcctggctccctaaaacaatgtcaaagccagtcctgctgttctctgttgccagggggcaggtctgggcctgggccaaccacgtttgttatcatggctgctgccttctggacagctgccagctctgccttgagaggttgtgggacctctggatccagctgacctgacaggtcatctactcagggaggagccctgtgctcccagctcagaggacagtctgggccagaactggaaggagacatctgtcccgtctttgagtgacaagcccgggacaacagccagtgggcatcacggctctccagcactccttagccggaggatacagagtgatgggtgcatcctgaccaatgcgacaaccaacacgtgctctcacaaacccctgactcccgcactttccagtgccaaagtacaaacgctgcttggataaggagagcaaagcttctggaactttatttactctttctttttaattttcttttaagagactgggtcttgctatgttgcccaggctggtcttgaactcctggcctcaagtgatcctccagtttccatctccctaagagctgggattacaggtgtgagccgctgtacccgaactttttttgtttttgcttctggaactttgaaacacaaaacacaagttggcacttacaattttaaagatgcagccagctctaaacaacacacagagcacaaatatgctcctgacggactcaggaaaatgccaacagcagagcaccctggtgccaaggccttctcagcccatgccctggagggcattcccctggccagcctcagccccttgtctacttgttctccagcttctgggtagctgggcttctggaagggtggcagtgggctactccctgctcagcgctcccctgggaagggggtgaggagatgaaaatgaaactatgagctgtctttggaaaaaaaaaaaaaaaaaa

SEQ ID NO: 31727 - DNA, 2660 bp, Homo Sapiens
tgcgcgacgtcccccacggacttggcgatgttcttcctgtctgttcggagcctctagcctggtctgcgtctccgcagctctctgcccgcgggaagtctccggcacagccacgcagccgctgcccccactcttatctctttccccgaagcgggctctgctcaaagtccccacctcgtggaactgagtgagaggacctcgccaagatgtccagggagggggctcccgggttaagccgcgcacctagagccgtctgactgtgccaacgctgtcgattctgggggccctttctttgctattttctcgctgagcctcagcgagggagctcttggagtccaggctgagggtcttgaagaaggaactggaggactgtgaggtgttccggtccacggaaaagaaggagagcaaggagctgctggtgagccaggcacccgcaggccccccgtgggacattacagaggcctgagaactcagcaccagggctcgaaacagatggcagcggagcaggagaaggtgggggcagagttccaggcactgagggctttcctggtggagcaggagggtcggctgctaggccgcctggaggaactgtcccgggaggtggcacagaagcagaatgagaacctggcccagctcggggttgagatcacccagctgtccaagctcagcagccagatccaggagacagctcaaaagcctgaccttgactttctccaggaattcaaaagcacgctgagcaggtgtagcaatgtgcctggccccaagccaaccacagtctcttctgagatgaagaataaagtctggaatgtttctctcaagacctttgtcttaaaagggatgctgaagaagttcaaagaggaccttcggggagagctggagaaagaggagaaagtggagctcaccttggatcccgacacggccaacccgcgcctcatcctctctctggatcttaagggcgtgcgcctcggcgagcgggcccaggacctgcccaaccacccctgccgcttcgacaccaacacccgcgtcctggcgtcctgcggcttctcctcgggccggcatcactgggaggtggaggtgggctctaaggacggctgggcctttggcgtggcccgcgagagcgtgcgccgaaagggcctgacgcccttcactcccgaggagggcgtctgggccctgcagctcaacggcggccagtactgggccgtgaccagccccgagcggtcgcccctcagctgcgggcacctgtcgcgcgtgcgggtggccctggacctggaggtgggagccgtgtccttctacgctgtggaggacatgcgccacctctacaccttccgcgtcaacttccaggagcgcgtgttcccgcttttctctgtttgctccacgggcacctacttgcgaatctggccttgaggggcactgctggggagctcctgtctctgggctgccggtgggaggggatgtcgcctccccagagatgcctggtccgtcttgggtctgccctccgtgctcctgacccctgctgcccaagagagcctgctacagacacaaccccgaggcaggagagtgactgtggccaaccgagcaggggaacaggggctttggactcctgagggtgttcccttcctgaggtcacatgtggatttggccagagccttcaggaggtggaggccggtgaggtcaggagcccagctctccagggggcttctgccctgactgggaagggtgcctggctccctaaaacaatgtcaaagccagtcctgctgttctctgttgccagggggcaggtctgggcctgggccaaccacgtttgttatcatggctgctgccttctggacagctgccagctctgccttgagaggttgtgggacctctggatccagctgacctgacaggtcatctactcagggaggagccctgtgctcccagctcagaggacagtctgggccagaactggaaggagacatctgtcccgtctttgagtgacaagcccgggacaacagccagtgggcatcacggctctccagcactccttagccggaggatacagagtgatgggtgcatcctgaccaatgcgacaaccaacacgtgctctcacaaacccctgactcccgcactttccagtgccaaagtacaaacgctgcttggataaggagagcaaagcttctggaactttatttactctttctttttaattttcttttaagagactgggtcttgctatgttgcccaggctggtcttgaactcctggcctcaagtgatcctccagtttccatctccctaagagctgggattacaggtgtgagccgctgtacccgaactttttttgtttttgcttctggaactttgaaacacaaaacacaagttggcacttacaattttaaagatgcagccagctctaaacaacacacagagcacaaatatgctcctgacggactcaggaaaatgccaacagcagagcaccctggtgccaaggccttctcagcccatgccctggagggcattcccctggccagcctcagccccttgtctacttgttctccagcttctgggtagctgggcttctggaagggtggcagtgggctactccctgctcagcgctcccctgggaagggggtgaggagatgaaaatgaaactatgagctgtctttggaaaaaaaaaaaaaaaaaa

SEQ ID NO: 31728 - DNA, 3742 bp, Homo Sapiens; identical to SEQ ID NO: 27793

SEQ ID NO: 31729 - DNA, 3398 bp, Homo Sapiens
cccggggcctctgtccttgggtcccagttatgcaacagtcagtcgaggctgtggggctggcccaggggctttatctgtctccctctccaacttttgccaagttacccttctgggcttccgccagccaggagcccacactccctcagccctcccacacgctcctctcacctcctagctgggcttcgctgacttgaacctggccgagtttgcgggctcgggctccacggtgcgctgctgcctgctcgagggatatgacacgaagaacactcgccaggacaactccatccttaaggtcaccattggtatgttcctgctctctggagatccctgcttcaagacgccaccatcgactgccaagtccatctccatcccaggccaggattcctccctgcagctgacgtgtaagggtggtgggaccagcagtgggggcagcagcaccaactccctgactgggtcccggccccccaaggctcggcccactattctcagctcagggctgccagaggaacccgaccagaacctgtccagccctgaggaggtgttccactctggccactcccgcaactccagctatgccagccagcagtccaagatctccggctacagcacagagcactcgcgctcctccagcctctcagacctgacgcaccgccgcaacacgtccaccagcagcagcgcctctgggggccttggcatgaccgtggagggccctgagggcagtgagcgggagcaccggcccccggagaagccgccgcggccaccccggcccctgcatctgtccgatcgctctttcaggcggaagaaggactcggtggagagccacccgacctgggtggacgacacgcggatcgatgcggatgccatcgtggagaagatcgtgcagagccaggacttcacagatggcagcaacaccgaggacagcaacctccggctgttcgtgagccgcgatggctctgccacgctgagcggcatccagcttgccaccagggtctcttctggggtctacgagccagttgtgattgaaagccattgaggagcaggtgtccgggctggagaagagtcctgctttctctggagtccagacctgtatcattccatgaggaactttccccttcagatcacctctgcgccacatctcatccatgcctcctccatgcactccagtccacactccccgtagcatcattccattgcccctcccatccatgctgggaccctcctggcccaccaaggcccaggcaccactgtgaatattctcctctgaaccactagagggcaggccaggcaggccaggcgggcccgtgcagcttgtgggcaagaaggagctggcaaggaccggcgctgctggagactgacccagccctctggctgaggacatgcagcagctcctaaatgtagagatgcctgtggctgagggggcctctctacctgtgtccccactcactccaggagcactggctttggtcacgtcttagcagcagggccttgctccgttgttcccttgccctggtggtgggggggccagaccgcctccggaatcctgccacctgtgactgtctgactgcttagtgcttcagctgtcccttccttgtgtcctgggggacctgctggcggcctcttcctgggagccatgacctcagaccccacccacactccagatcgagacccctgcctccccccggcaaatgtcctcccgctgccttgcagcctgcactttgcacatgctcacccccagcacagtcccactggcccctcacctccccttccctgagctccttcccaaggactcctggtcactgcctgctgtgcagtcagaggcccagggtccagcagcccggcgggaacgggtgctgcctcttcctccagttagctccagctcaggtctgagacccgtgctgagaaaggtctgagcaccgaccgtgccctctgcccagggctgggtcctgagcagctggttttcctgcaggaaggttggagcaagcaaagtccttctctgccctcagggtcagctgcccagactggggcggatgccagagaggcaggtgggctgtggctggactggtccggagctggcttccttaccagaaaagcctcagccttcctctggaagcatcccccgttctgggcaagggggaagggctcctttaaggggtgtgctttcccagtggggagcagtctggccctgccccctactaaagcctctgctctcagcactttcccccaagtccttgtaacttgcttgaaggtgggttctggctgccagccagtccctggacaaactctcctgccccttttaaatttcactcattttgtataaacccagcaggctggtgtttacttagccctgtagcttttttcattttttctttccgtctttcttcttgagttcacggttcaatattgcctcctcgccctggtgaggggaggtgctgcttttctgccccacctgccggctggttccagcagcgctggggcccagctggggggccgggatgggggcttctctctctgggaggggtgcaggtgccctccccaggctgggagggttccttccctagctccccatctgcccccgctggtgagagttgggcttcttggtcttggaactccctggcattgggaacagagcatttccagcatttgttgttgttgttttactcacctaacccttagaaaatgaatgttagaaggtgcctgccgaggcgggacagagtgtttgctcgcgctggagaaggctctgctcagccctgagagtcccttcctgccccaccgatactggcactttaaaaaggaagctgaccgcacagtgtccagacgaattggcccccagaagatggggagttctgtcctgcccttctgtgtctgcgtgacctcacccagcctaggagggaggtgcattcaggctagatttgcctctcattcaaagttctggggctttgggcggaaaacagccagctttggcgctgttggggagactcctccagaccaggaaccccagaaggagacagagcctgccacatcctcccacgccaggccctgggccagggtgattggactgagaatttggccacaaccaaattgatgctggctggaaccagaggccagaaagcctggccttgtccccatgtgggagccctgtcctcagccctcttgtccccttgagctcagtgaattcccaccaggtgcccacagctcctggacttcaaattctatatattgagagagttggagagtatatcagagatatttttggaaaggagttggtctatgcaatgtcagtttggaatcttcttgaaagtttaatgtttttattaggagatttaaagaaaataaaggtctacaatatcaaaaaaaaaaaaaaaaaaaaaaaaaaaaaaaaaaaaaaaaaaaaaaaaaaa

SEQ ID NO: 31730 - DNA, 6971 bp, Homo Sapiens
cattcatcttctcctgcccttggacatcacagctccaggaactcagatcttcagactcagggtgaaggacaccaccagctttccaggttccccagcttgcagacggcatacgctaggtcttgactccactaacggggacttctcatacggctttgaacttggaccttggtgcataagcaaatgtaactcagcgaattgtaatggaaagcatatggacaggtctacgccacatcacttaggtgctaagagatgccgtttgcaggcctcatctctgcttgagaatcgggggctccaggcactagaagagccggctgatcctgggctcctagcttgaataagccttcacttccagctgctctccccaacggctgtgtaaactactcgtttctcttaatgatgggtattggtaagaataccacatccaaatcaatggaggctggaagttcaacagaaggcaaatacgaagacgaggcaaagcacccagctttcttcactcttccggtggtgataaatggaggcgccacctccagcggtgagcaggacaatgaggacactgagctcatggcgatctacactacggaaaacggcattgcagaaaagagctctctcgctgagaccctggatagcactggcagtctggacccccagcgatcagacatgatttataccatagaagatgttcctccctggtacctgtgtatatttctggggctacagcactacctgacatgcttcagcggcacgatcgcagtgcccttcctgttggccgatgccatgtgtgtggggtacgaccagtgggccaccagccagctcattgggaccattttcttctgtgtgggaatcactactttgctacagacaacgtttggatgcaggttacccctgtttcaggccagtgcttttgcatttttggcccctgctcgagccatcctgtctttagataaatggaaatgtaacaccacagatgtttcagttgccaatggaacagcagagctgttgcacacagaacacatctggtatccccggatccgagagatccagggggccatcatcatgtcctcactgatagaagtagtcatcggcctcctcggcctgcctggggctctactgaagtacatcggtcccttgaccattacacccacggtggccctaattggcctctctggtttccaggcagcgggggagagagccgggaagcactggggcattgccatgctgacaatattcctagtattactgttttctcaatacgccagaaatgttaaatttcctctcccgatttataaatccaagaaaggatggactgcgtacaagttacagctgttcaaaatgttccctatcatcctggccatcctggtatcctggctgctctgcttcatcttcacggtgacagatgtcttccctcccgacagcacaaagtatggcttctatgctcgcacagatgccaggcaaggcgtgcttctggtagccccgtggtttaaggttccatacccatttcagtggggactgcccaccgtgtctgcggccggtgtcatcggcatgctcagtgccgtggtcgccagcatcatcgagtctattggtgactactacgcctgtgcacggctgtcctgtgccccacccccccccatccacgcaataaacaggggaattttcgtggaaggcctctcctgtgttcttgatggcatatttggtactgggaatggctctacttcatccagtcccaacattggagttttgggaattacaaaggtcggcagccgccgcgtgatacagtgcggagcagccctcatgctcgctctgggcatgatcgggaagttcagcgccctctttgcgtcccttccggatcctgtgctgggagccctgttctgcacgctctttggaatgatcacagctgttggcctctctaacctgcagttcattgatttaaattcttcccggaacctctttgtgcttggattttcgatcttctttgggctcgtccttccaagttacctcagacagaaccctctggtcacagggataacaggaatcgatcaagtgttgaacgtccttctcacaactgctatgtttgtagggggctgtgtggcttttatcctggataacaccatcccaggcactccagaggaaagaggaatccggaaatggaagaagggtgtgggcaaagggaacaaatcactcgacggcatggagtcgtacaatttgccatttggcatgaacattataaaaaaatacagatgcttcagctacttacccatcagcccaacctttgtgggctacacatggaaaggcctcaggaagagcgacaacagccggagttcagatgaagactcccaggccacgggatagcctttgctgtgccctgtggcctggccgcagtgaggcatgtatctgtagttccttgctgagtaacaagaagtaaaatacatgtttgtatatctacatttacattctgcgccccagagctaagacagactgcgaatcacttttctgctgtgagggtgatggtgcctgatgcggtgtctcgcctatctccttatttaagcccttaactccttgccctttgagagtgtccattgctggccatggtcactaaatttgaagttccagtcctccctttggagtggacatttaaaatctgcagccattccttgcttcagttcccttccaccacccagggctggctttcctataagccacctccagggtccaggggctttctctctctctccgaagcccctggacctgtttccttgtcatttgaccctcgtctgtgcccgcggagacctcctctgaccaaggggcactagtatgccttgcgctatcatgactgactggcccagtatgattctgttgtcgctgatctcccggaggaggaggctgttgacctgaaaacagtggcgtggctcccctgtgcccagatctggccatgggtgaggcctgcacagatgttgaatgaacatctgtttggggcattggagggaaaaggaaaggaccctgaagccaatatctgattctcggctgcaccttctcttggccaccctggccctgaccgggccagcacgtgcacactggcctcttttcatttcactagtggccgagacaccctctctggcatttatcactgttggccggtgtgatgagtatagagtgccacccaaggcaccagtcacacaagctgatgggcgtcttggctctgccgtcatgtggatgttattgtcgcgcgcgtctataattacaaggttttattcctatttaatgttattgactatagcagattttggaaatcagtgttttccatgtgaccctctttccttgcatccctattccttgtcccccacccactcttccccccatcaagaaaagaaccagcatttgtaaagctgtggacaccatcagggaagcttgttgtaacggcttttgaaggccagtaaccattgttgtggttgtgttttgtattgcttgataccatgaaagtgtaaatactgtaatgcctaatctatttatcaaaactgactactggaccggagcccagaaaccatgggtcaagttacacgtgaatttgttttgtgaagaagggaagctggggcaggtaacacgcagagccgccacgtggaacggtctgtccgccggtctgtcccgcttgccgggcttctgttgcaagtcttggcttaaggagacttcctgtgggttgccatgtcgcacgtccgttagatcttgattttacaggtgagggtggttgccaaaggtgataagaaaagcagccaacaggctccctctcacttaagagagttctaattaataacactaaattcttcctgagaaatgactcctcttggtttggtttgaagtttttcagtgaaggaaaaggcctgagataggaagcagtgccctcgcttcatgaggtggcacatcttcggtggccgttggcctggtcgagctttggtcagctgcgtgggtgcctgtctcctgtctccagcggcagggcatggttcttggcagcctggtgtccacacggtgcattcctgtccccctcggccccaggctggctcagctctccagtgctgcggcgctgtctttgcagcattgccatgtcaccgtagcccccttcactcttggaagtttggggcttcaaggtttattctggcaagaacacctcggagccactgcattgttttgccaaaaacttactgcagattaagtaaagaacttagatgctaaattacatctaattttgtatgtttttttaaatgtgtctttgatgcatactttagaagcacactggctcgcggtttccatccctcttgccttgggacactcttgaggctggcagccctcctgcaatgagttgctctcagttccttctgtttggattttgctcaacatctccagtttctctgctctgaaaaatggggaaaactgctaaacatcccagagatttgcaatcttctagctctccaggtgagcagaaagaccaaatatccaaataaaagcctgaaagccattggtgatccaggggcaccttctcttcagcttgactgggcgtcttccgctgcataacactcaaggtgtctgctctagtcatccagaaacccactcccttctgaagcccctccttgggccgggttgtatcaggaggattcaaccccgctaacatgtggggtgccctctgtaggccttcacacagggaaggaagccctaccctttcaactcctgttggagtgagagtttcctgttctgattccactgtggccaacccaataattctgtccgaggaggggtaagggaataggaggtggggagcaaagagggcagcctgactagatgcccctgctgaatctggtactttctgcacagccttgagtgattggagtcccctaatgactaataaacttgaacatgtaacacacacacacacacacacacacaccattttaggaagtggttctcctactggaaaatatgctacagaatgaaagtttgtaattgaaagaaaaagaatgtattcatctgcttcttgggtttaagcacacacctgaaggggagatattgggggacacggtggccactcgcggtctgtgtcatgacacttcccattcacatcattggcctgcgttgctggggctttgaaccaccaccccgtactttgttttgcctgtagagtgttgtaaaatattttggatgtgaatgtccttgcaggccggttagtctccagtttccacagagaccacctacccaccaccttcccaggtcacctgcctggtccctgaaagaaagcatttgtgtgggcaatcccaacatgaaatgtagacagcgtgaatacggacaggaggtgatgccatattcacagtgggggatggagggcccccacccctgcttcacagaataatgggaagtgactctagtctttgtaagcaattttcattctcattaggaagttaaatgtagattcacagatacatttactttcagaatcctcaagaggatttcaaatgctaacttttagtttcttgggattgatcaaggcaagagaagtggctttaaccatgccagccagaatgaagcatcatgggtcctgatggtttcccgttttcatggtaacaaattcgcacagaggttttgctttatgctgtagaataccgactttcatgatgacaacttggtttatgcatgaatattgcagtatttccatatagcaaaataacatttctacccaggataatagtcacagttttccagggagggaatgatataattttcatgacaatgtcatgtgatgatagaatttctccattgatgaatctctagtatgtgtgtatactttatttacccatacgtatattttatgaccatgagctaagttgttatttctttcattcatatccctgctgaaatattggtactagcaacttaaagttggcaagtctcatcttcagtaatacggatgccatgggagtggccaggccagattgaaggtgaatatggagcagtagcagaagcctcattccagaacccatctggccagagaagcagcagcatcctgggggatggccgtgcatggggtgtacactcgctataggcataggcccggcatggctgtcgctggacgccagctgtgcacacccagccacacctgctgcacgccgcgttagtgtgcggctccgggcctgagcattcgcaaagctcgcttctccagggagcctcctcttggctttggaaaagagcccagggacttaacgtgctgcctgttgtactctgtcccctcatgactttttagacacagggactaggacatcgaccaccctctgcccctcctgcagtcagaacccgagtagtgcaagaacggccacccggttttgccagcgttcagcgtctgcccatggacccataaggcacattagcgttgggggtctcttttcagcagcctcacagacattcccgtcctttctggttggtgttgactgtgtttcagcatcactctaccctcccatgtccttagcattgctgtgcgtgtttccaggcacttaggacacccttccccacgttgccatcttactgacagttcaaatgactctccttttttgttcgttagtaacaatcttcatttgacaccttaatacatttctgactgttcttaaaacagtggggatgcctatattttccttgagtttttgtgactgactttggctatatatacctttctggggttttgtttgttttttatttttattttgattaccgagggtatttggggtggggttgttttttgagatgtgtaattcttttatggagtttttaaaaagaattttcatattgtttttctaacatggcttcattaaacgtttaagtattttaaaaatatgtaatatttggaccagatgttgtgaataatagtagagataaagctattttattctgtatttttaaaactgttccgtacaaataaaagctctcctggacacagtaaaaaaaaa

SEQ ID NO: 31731 - DNA, 7794 bp, Homo Sapiens
gggccggggggcggagccttgcgggctggagcgaaagaatgcgggggctgagcgcagaagcggctcgaggctggaagaggatcttgggcgccgccagtctctctctgttgcccaagctggagtgcagtggcacagtcttggctcactgcaacctccacctcctgggtgcaagcgattctcgtgtctcagcctctcaagtagctgggattacagtctttagcaccagttggtgtaggagttgagacctacttcacagtagttctgtggacaatcacaatgggaatccaaggagggtctgtcctgttcgggctgctgctcgtcctggctgtcttctgccattcaggtcatagcctgcagtgctacaactgtcctaacccaactgctgactgcaaaacagccgtcaattgttcatctgattttgatgcgtgtctcattaccaaagctgggttacaagtgtataacaagtgttggaagtttgagcattgcaatttcaacgacgtcacaacccgcttgagggaaaatgagctaacgtactactgctgcaagaaggacctgtgtaactttaacgaacagcttgaaaatggtgggacatccttatcagagaaaacagttcttctgctggtgactccatttctggcagcagcctggagccttcatccctaagtcaacaccaggagagcttctcccaaactccccgttcctgcgtagtccgctttctcttgctgccacattctaaaggcttgatattttccaaatggatcctgttgggaaagaataaaattagcttgagcaacctggctaagatagaggggctctgggagactttgaagaccagtcctgtttgcagggaagccccacttgaaggaagaagtctaagagtgaagtaggtgtgacttgaactagattgcatgcttcctcctttgctcttgggaagaccagctttgcagtgacagcttgagtgggttctctgcagccctcagattatttttcctctggctccttggatgtagtcagttagcatcattagtacatctttggagggtggggcaggagtatatgagcatcctctctcacatggaacgctttcataaacttcagggatcccgtgttgccatggaggcatgccaaatgttccatatgtgggtgtcagtcagggacaacaagatccttaatgcagagctagaggacttctggcagggaagtggggaagtgttccagatagcagggcatgaaaacttagagaggtacaagtggctgaaaatcgagtttttcctctgtctttaaattttatatgggctttgttatcttccactggaaaagtgtaatagcatacatcaatggtgtgttaaagctatttccttgccttttttttattggaatggtaggatatcttggctttgccacacacagttacagagtgaacactctactacatgtgactggcagtattaagtgtgcttattttaaatgttactggtagaaaggcagttcaggtatgtgtgtatatagtatgaatgcagtggggacaccctttgtggttacagtttgagacttccaaaggtcatccttaataacaacagatctgcaggggtatgttttaccatctgcatccagcctcctgctaactcctagctgactcagcatagattgtataaaatacctttgtaacggctcttagcacactcacagatgtttgaggctttcagaagctcttctaaaaaatgatacacacctttcacaagggcaaactttttccttttccctgtgtattctagtgaatgaatctcaagattcagtagacctaatgacatttgtattttatgatcttggctgtatttaatggcataggctgacttttgcagatggaggaatttcttgattaatgttgaaaaaaaacccttgattatactctgttggacaaaccgagtgcaatgaatgatgcttttctgaaaatgaaatataacaagtgggtgaatgtggttatggccgaaaaggatatgcagtatgcttaatggtagcaactgaaagaagacatcctgagcagtgccagctttcttctgttgatgccgttccctgaacataggaaaatagaaacttgcttatcaaaacttagcattaccttggtgctctgtgttctctgttagctcagtgtctttccttacatcaataggtttttttttttttttttggcctgaggaagtactgaccatgcccacagccaccggctgagcaaagaagctcatttcatgtgagttctaaggaatgagaaacaattttgatgaatttaagcagaaaatgaatttctgggaacttttttgggggcggggggttggggaattcagccacactccagaaagccaggagtcgacagttttggaagcctctctcaggattgagattctaggatgagattggcttactgctatcttgtgtcatgtacccactttttggccagactacactgggaagaaggtagtcctctaaagcaaaatctgagtgccactaaatggggagatggggctgttaagctgtccaaatcaacaagggtcatataaatggccttaaactttggggttgctttctgcaaaaagttgctgtgactcatgccatagacaaggttgagtgcctggacccaaaggcaatactgtaatgtaaagacatttatagtactaggcaaacagcaccccaggtactccaggccctcctggctggagagggctgtggcaatagaaaattagtgccaactgcagtgagtcagcctaggttaaatagagagtgtaagagtgctggacaggaacctccaccctcatgtcacatttcttcaatgtgacccttctggcccctctcctcctgacagcggaacaatgactgccccgataggtgaggctggaggaagaatcagtcctgtccttggcaagctcttcactatgacagtaaaggctctctgcctgctgccaaggcctgtgactttctaacctggcctcacgctgggtaagcttaaggtagaggtgcaggattagcaagcccacctggctaccaggccgacagctacatcctccaactgaccctgatcaacgaagagggattcatgtgtctgtctcagttggttccaaatgaaaccagggagcaggggagttaggaatcgaacaccagtcatgcctactggctctctgctcgagagccaataccctgtgccctccactcatctggatttacaggaactgtcatagtgttcagtattgggtggtgataagcccattggattgtccccttggggggatgagctaggggtgcaaggaacacctgatgagtagataagtggagctcatggtatttcctgaaagatgctaatctatttgccaaacttggtcttgaatgtactgggggcttcaaggtatgggtatatttttcttgtgtccttgcagttagcccccatgtcttatgtgtgtcctgaaaaaataagagcctgcccaagactttgggcctcttgacagaattaaccacttttatacatctgagttctcttggtaagttctttagcagtgttcaaagtctactagctcgcattagtttctgttgctgccaacagatctgaactaatgctaacagatccccctgagggattcttgatgggctgagcagctggctggagctagtactgactgacattcattgtgatgagggcagctttctggtacaggattctaagctctatgttttatatacattttcatctgtacttgcacctcactttacacaagaggaaactatgcaaagttagctggatcgctcaaggtcacttaggtaagttggcaagtccatgcttcccactcagctcctcaggtcagcaagtctacttctctgcctattttgtatactctctttaatatgtgcctagctttggaaagtctagaatgggtccctggtgcctttttactttgaagaaatcagtttctgcctctttttggaaaagaaaacaaagtgcaattgttttttactggaaagttacccaatagcatgaggtgaacaggacgtagttaggccttcctgtaaacagaaaatcatatcaaaacactatcttcccatctgtttctcaatgcctgctacttcttgtagatatttcatttcaggagagcagcagttaaacccgtggattttgtagttaggaacctgggttcaaaccctcttccactaattggctatgtctctggacaagtttttttttttttttttttttaaaccctttctgaactttcactttctatgtctacctcaaagaattgttgtgaggcttgagataatgcatttgtaaagggtctgccagataggaagatgctagttatggatttacaaggttgttaaggctgtaagagtctaaaacctacagtgaatcacaatgcatttacccccactgacttggacataagtgaaaactagccagaagtctctttttcaaattacttacaggttattcaatataaaatttttgtaatggataatcttatttatctaaactaaagcttcctgtttatacacactcctgttattctgggataagataaatgaccacagtaccttaatttctaggtgggtgcctgtgatggttcattgtaggtaaggacattttctctttttcagcagctgtgtaggtccagagcctctgggagaggaggggggtagcatgcacccagcaggggactgaactgggaaactcaaggttctttttactgtggggtagtgagctgcctttctgtgatcggtttccctagggatgttgctgttcccctccttgctattcgcagctacatacaacgtggccaaccccagtaggctgatcctatatatgatcagtgctggtgctgactctcaatagccccacccaagctggctataggtttacagatacattaattaggcaacctaaaatattgatgctggtgttggtgtgacataatgctatggccagaactgaaacttagagttataattcatgtattagggttctccagagggacagaattagtaggatatatgtatatatgaaagggaggttattagggagaactggctcccacagttagaaggcgaagtcgcacaataggccgtctgcaagctgggttagagagaagccagtagtggctcagcctgagttcaaaaacctcaaaactggggaagctgacagtgcagccagccttcagtctgtggccaaaggcccaagagcccctggcaaccaacccactggtgcaagtcctagattccaaaggctgaagaacctggagtctgatgtccaagagcaggaagagtggaagaaagccagaagactcagcaaacaaggtagacagtgtctaccaccatagtggccataccaaagaggctaccgattccttcctgctacctggatccctgaagttgccctggtctctgcaccttctaaacctagttcttaagagctttccattacatgagctgtctcaaagccctccaataaattctcagtgtaagcttctgttgcttgtggacagaaaattctgacagacctaccctataagtgttactgtcaggataacatgagaacgcacaacagtaagtggtcactaagtgttagctacggttattttgcccaaggtagcatggctagttgatgccggttgatggggcttaaacccagctccctcatcttccaggcctctgtactccctattccactaaactacctctcaggtttatttttttaaattcttactctgcaagtacataggaccacatttacctgggaaaacaagaataaaggctgctctgcattttttagaaacttttttgaaagggagatgggaatgcctgcacccccaagtccagaccaacacaatggttaattgagatgaataataaaggaaagactgttctgggcttcccagaatagcttggtccttaaattgtggcacaaacaacctcctgtcagagccagcctcctgccaggaagaggggtaggagactagaggccgtgtgtgcagccttgccctgaaggctagggtgacaatttggaggctgtccaaacaccctggcctctagagctggcctgtctatttgaaatgccggctctgatgctaatcggcgaccctcaggcaagttacttaaccttacatgcctcagttttctcatctggaaaatgagaaccctaggtttagggttgttagaaaagttaaatgagttaagacaagtgcctgggacacagtagcctcttgtgtgtgtttatcattatgtcctcagcaggtcgtagaagcagcttctcaggtgtgaggctggcgcattatctggagtgggttgggttttctaggatggaccccctgctgcattttcctcattcatccaccagggcttaatggggaatcaaggaatccatgtgtaactgtataataactgtagccacactccaatgaccacctactagttgtccctggcactgcttatacatatgtccatcaaatcaatcctatgaagtagatactgtcttcattttatagatcagagacaattggggttcagagagctgatgtgattttcccagggtcacagagagtcccagattcaggcacaactcttgtattccaagacacaaccactacatgtccaaaggctgcccagagccaccgggcacggcaaattgtgacatatccctaaagaggctgagcacctggtcaggatctgatggctgacagtgtgtccagatgcagagctggagtgggggaggggaaggggggctccttgggacagagaaggctttctgtgctttctctgaagggagcagtctgaggaccaagggaacccggcaaacagcacctcaggtactccaggccctcctggctggagagggctgtggcaatggaaaattagtgccaactgcaatgagtcagcctcggttaaatagagagtgaagaatgctggacaggaacctccaccctcatgtcacatttcttcagtgtgacccttctggcccctctcctcctgacagcggaacaatgactgccccgataggtgaggctggaggaagaatcagtcctgtccttggcaagctcttcactatgacagtaaaggctctctgcctgctgccaaggcctgtgactttctaacctggcctcacgctgggtaagcttaaggtagaggtgcaggattagcaagcccacctggctaccaggccgacagctacatctttcaactgaccctgatcaacgaagagggacttgtgtctctcagttggttccaaatgaaaccagggagcaggggcgttaggaagctccaacaggatggtacttaatggggcatttgagtggagaggtaggtgacatagtgctttggagcccagggagggaaaggttctgctgaagttgaattcaagactgttctttcatcacaaacttgagtttcctggacatttgtttgcagaaacaaccgtagggttttgccttaacctcgtgggtttattattacctcatagggactttgcctcctgacagcagtttatgggtgttcattgtggcacttgagttttcttgcatacttgttagagaaaccaagtttgtcatcaacttcttatttaaccccctggctataacttcatggattatgttataattaagccatccagagtaaaatctgtttagattatcttggagtaagggggaaaaaatctgtaattttttctcctcaactagatatatacataaaaaatgattgtattgcttcatttaaaaaatataacgcaaaatctcttttccttctaaaaaaaaaaaaaaaaaa

SEQ ID NO: 31732 - DNA, 4852 bp, Homo Sapiens
gcctcggagcgtcccggcttctcccgcgcggggggcgagtaagccagcggcaggaccagcgggcgggggcccaaaagctggcaggctgacagaggcggcctcaggacggaccttctggctactgaccgttttgctgtggttttcccggattgtgtgtaggtgtgagatcaaccatgagttccgttgcagttttgacccaagagagttttgctgaacaccgaagtgggctggttccgcaacaaatcaaagttgccactctaaattcagaagaggagagcgaccctccaacctacaaggatgccttccctccacttcctgagaaagctgcttgcctggaaagtgcccaggaacccgctggagcctgggggaacaagatccgacccatcaaggcttctgtcatcactcaggtgttccatgtacccctggaggagagaaaatacaaggatatgaaccagtttggagaaggtgaacaagcaaaaatctgccttgagatcatgcagagaactggtgctcacttggagctgtctttggccaaagaccaaggcctctccatcatggtgtcaggaaagctggatgctgtcatgaaagctcggaaggacattgttgctagactgcagactcaggcctcagcaactgttgccattcccaaagaacaccatcgctttgttattggcaaaaatggagagaaactgcaagacttggagctaaaaactgcaaccaaaatccagatcccacgcccagatgaccccagcaatcagatcaagatcactggcaccaaagagggcatcgagaaagctcgccatgaagtcttactcatctctgccgagcaggacaaacgtgctgtggagaggctagaagtagaaaaggcattccaccccttcatcgctgggccgtataatagactggttggcgagatcatgcaggagacaggcacgcgcatcaacatccccccacccagcgtgaaccggacagagattgtcttcactggagagaaggaacagttggctcaggctgtggctcgcatcaagaagatttatgaggagaagaaaaagaagactacaaccattgcagtggaagtgaagaaatcccaacacaagtatgtcattgggcccaagggcaattcattgcaggagatccttgagagaactggagtttccgttgagatcccaccctcagacagcatctctgagactgtaatacttcgaggcgaacctgaaaagttaggtcaggcgttgactgaagtctatgccaaggccaatagcttcaccgtctcctctgtcgccgccccttcctggcttcaccgtttcatcattggcaagaaagggcagaacctggccaaaatcactcagcagatgccaaaggttcacatcgagttcacagagggcgaagacaagatcaccctggagggccctacagaggatgtcaatgtggcccaggaacagatagaaggcatggtcaaagatttgattaaccggatggactatgtggagatcaacatcgaccacaagttccacaggcacctcattgggaagagcggtgccaacataaacagaatcaaagaccagtacaaggtgtccgtgcgcatccctcctgacagtgagaagagcaatttgatccgcatcgagggggacccacagggcgtgcagcaggccaagcgagagctgctggagcttgcatctcgcatggaaaatgagcgtaccaaggatctaatcattgagcaaagatttcatcgcacaatcattgggcagaagggtgaacggatccgtgaaattcgtgacaaattcccagaggtcatcattaactttccagacccagcacaaaaaagtgacattgtccagctcagaggacctaagaatgaggtggaaaaatgcacaaaatacatgcagaagatggtggcagatctggtggaaaatagctattcaatttctgttccgatcttcaaacagtttcacaagaatatcattgggaaaggaggcgcaaacattaaaaagattcgtgaagaaagcaacaccaaaatcgaccttccagcagagaatagcaattcagagaccattatcatcacaggcaagcgagccaactgcgaagctgcccggagcaggattctgtctattcagaaagacctggccaacatagccgaggtagaggtctccatccctgccaagctgcacaactccctcattggcaccaagggccgtctgatccgctccatcatggaggagtgcggcggggtccacattcactttcccgtggaaggttcaggaagcgacaccgttgttatcaggggcccttcctcggatgtggagaaggccaagaagcagctcctgcatctggcggaggagaagcaaaccaagagtttcactgttgacatccgcgccaagccagaataccacaaattcctcatcggcaaggggggcggcaaaattcgcaaggtgcgcgacagcactggagcacgtgtcatcttccctgcggctgaggacaaggaccaggacctgatcaccatcattggaaaggaggacgccgtccgagaggcacagaaggagctggaggccttgatccaaaacctggataatgtggtggaagactccatgctggtggaccccaagcaccaccgccacttcgtcatccgcagaggccaggtcttgcgggagattgctgaagagtatggcggggtgatggtcagcttcccacgctctggcacacagagcgacaaagtcaccctcaagggcgccaaggactgtgtggaggcagccaagaaacgcattcaggagatcattgaggacctggaagctcaggtgacattagaatgtgctataccccagaaattccatcgatctgtcatgggccccaaaggttccagaatccagcagattactcgggatttcagtgttcaaattaaattcccagacagagaggagaacgcagttcacagtacagagccagttgtccaggagaatggggacgaagctggggaggggagagaggctaaagattgtgaccccggctctccaaggaggtgtgacatcatcatcatctctggccggaaagaaaagtgtgaggctgccaaggaagctctggaggcattggttcctgtcaccattgaagtagaggtgccctttgaccttcaccgttacgttattgggcagaaaggaagtgggatccgcaagatgatggatgagtttgaggtgaacatacatgtcccggcacctgagctgcagtctgacatcatcgccatcacgggcctcgctgcaaatttggaccgggccaaggctggactgctggagcgtgtgaaggagctacaggccgagcaggaggaccgggctttaaggagttttaagctgagtgtcactgtagaccccaaataccatcccaagattatcgggagaaagggggcagtaattacccaaatccggttggagcatgacgtgaacatccagtttcctgataaggacgatgggaaccagccccaggaccaaattaccatcacagggtacgaaaagaacacagaagctgccagggatgctatactgagaattgtgggtgaacttgagcagatggtttctgaggacgtcccgctggaccaccgcgttcacgcccgcatcattggtgcccgcggcaaagccattcgcaaaatcatggacgaattcaaggtggacattcgcttcccacagagcggagccccagaccccaactgcgtcactgtgacggggctcccagagaatgtggaggaagccatcgaccacatcctcaatctggaggaggaatacctagctgacgtggtggacagtgaggcgctgcaggtatacatgaaacccccagcacacgaagaggccaaggcaccttccagaggctttgtggtgcgggacgcaccctggaccgccagcagcagtgagaaggctcctgacatgagcagctctgaggaatttcccagctttggggctcaggtggctcccaagaccctcccttggggccccaaacgataatgatcaaaaagaacagaaccctctccagcctgctgacccaaacccaaccacacaatggtttgtctcaatctgacccagcggctggaccctccgtaaattgttgacgctcttcccccttcccgaggtcccgcagggagcctagcgcctggctgtgtgtgcggccgctcctccaggcctggccgtgcccgctcaggacctgctccactgtttaacactaaaccaaggtcatgagcattcgtgctaagataacagactccagctcctggtccacccggcatgtcagtcagcactctggccttcatcacgagagctccgcagccgtggctaggattccacttcctgtgtcatgacctcaggaaataaacgtccttgactttataaaagccaaacgtttgccctcttcctttcccacctccctcctgccagtttcccttggtccagacagtcctgtttgtggagtgcaatcagcctcctccagctgccagagcgcctcagcacaggtgtcagggtgcaaggaagacctggcaatggacagcaggaggcaggttcctggagctggggggtgacctgagaggcagagggtgacgggttctcaggcagtcctgattttacctgccgtggggtctgaaagcaccaagggtccctgcccctacctccactgccagaccctcagcctgaggtctggtgagtggagcctggaggcaaggtggtaggcaccatctgggtcccctgtggccgtcacagtgtctgctgtgattgagatgcgcacaggttgggggaggtagggccttacgcttgtcctcagtgggggcagtttgccttagatgacagctgggctcttcttcacaccacctgcaggccctccctgcccc

SEQ ID NO: 31733 - DNA, 4843 bp, Homo Sapiens
gagaacggtggccggacggagagactgcgggtctgagggactggcgggcgggcgggccgagcggcgccgccgaggccgggctgggccgagcccaggagcgcccgggatgtagcgggccaccctgccgatgccacagcgcccggccgcgggcggagccggagccggagcctggggaggcggcgggggcccagagcgcagcccgcgccccccgcgcggagccaggcccgctgccgtccccgccgcccgggcccccggcatgcagccccggctgcggaggtgacactcacggaccttagccaccgccgccgccatcgccaccatggacgaacaggaggcattgaactcaatcatgaacgatctggtggccctccagatgaaccgacgtcaccggatgcctggatatgagaccatgaagaacaaagacacaggtcactcaaataggcagaaaaaacacaacagcagcagctcagcccttctgaacagccccacagtaacaacaagctcatgtgcaggggccagtgagaaaaagaaatttttgagtgacgtcagaatcaagttcgagcacaacggggagaggcgaattatagcgttcagccggcctgtgaaatatgaagatgtggagcacaaggtgacaacagtatttggacaacctcttgatctacattacatgaacaatgagctctccatcctgctgaaaaaccaagatgatcttgataaagcaattgacattttagatagaagctcaagcatgaaaagccttaggatattgctgttgtcccaggacagaaaccataacagttcctctccccactctggggtgtccagacaggtgcggatcaaggcttcccagtccgcaggggatataaatactatctaccagccccccgagcccagaagcaggcacctctctgtcagctcccagaaccctggccgaagctcacctccccctggctatgttcctgagcggcagcagcacattgcccggcaggggtcctacaccagcatcaacagtgagggggagttcatcccagagaccagcgagcagtgcatgctggatcccctgagcagtgcagaaaattccttgtctggaagctgccaatccttggacaggtcagcagacagcccatccttccggaaatcacgaatgtcccgtgcccagagcttccctgacaacagacaggaatactcagatcgggaaactcagctttatgacaaaggggtcaaaggtggaacctacccccggcgctaccacgtgtctgtgcaccacaaggactacagtgatggcagaagaacatttccccgaatacggcgtcatcaaggcaacttgttcaccctggtgccctccagccgctccctgagcacaaatggcgagaacatgggtctggctgtgcaatacctggacccccgtgggcgcctgcggagtgcggacagcgagaatgccctctctgtgcaggagaggaatgtgccaaccaagtctcccagtgcccccatcaactggcgccggggaaagctcctgggccagggtgccttcggcagggtctatttgtgctatgacgtggacacgggacgtgaacttgcttccaagcaggtccaatttgatccagacagtcctgagacaagcaaggaggtgagtgctctggagtgcgagatccagttgctaaagaacttgcagcatgagcgcatcgtgcagtactatggctgtctgcgggaccgcgctgagaagaccctgaccatcttcatggagtacatgccagggggctcggtgaaagaccagttgaaggcttacggtgctctgacagagagcgtgacccgaaagtacacgcggcagatcctggagggcatgtcctacctgcacagcaacatgattgttcaccgggacattaagggagccaacatcctccgagactctgctgggaatgtaaagctgggggactttggggccagcaaacgcctgcagacgatctgtatgtcggggacgggcatgcgctccgtcactggcacaccctactggatgagccctgaggtgatcagcggcgagggctatggaaggaaagcagacgtgtggagcctgggctgcactgtggtggagatgctgacagagaaaccaccgtgggcagagtatgaagctatggccgccatcttcaagattgccacccagcccaccaatcctcagctgccctcccacatctctgaacatggccgggacttcctgaggcgcatttttgtggaggctcgccagagaccttcagctgaggagctgctcacacaccactttgcacagctcatgtactgagctctcacggccacacagctgccggtcgccctttgctgcatggcagggggctgctgctgggctcagtgaagttgctgcttctcccaggcaaggctgtggaccatggagtggcagcccagccagcgtcggtctgtgccccttccgccactggggctcagagccggggtggggtggctgcagcctcaggactgggagcccccagcctgtcagatccaggagctccagtgtcctgagctcagcgtggaggggtaggggctgggaacagtgtgcaaggcagccgtgggccccaccctcggggatgtgtcctgacactgcaattggcaccgaagcccagagggtctgggggcacaagactgacgccagggtatgaagagtgttattttcattcaaagtgttattttgtttttccttccaatgtctggagaccaccagggcatctctgggctggatgagctcccacaagcctgagggaaaggccagcactcgctagcagtggcaggcagaggcccaggctgccgtcccctagagtcccaggttggctctgccagtcctgtcctttaccaaagatgaatgaagcaaatgtcatgctgccttattcagggaaggaggagcctgtcctgcctgtggccatgaccctgcctctcccaggcaggggcccgcgatgtggaactgctgccactgaggggggatccagttttgtcaatgcagttgtctctgttttacaagttggagtcactcttatgctgtacccagtttctaaactggagactgtgtgtgccctctgggctctgagtacccctgctttgggcttgggcctaggctgcattgaaaagagctgaaggttgtggcctttgcgctcctggcccagcctttgttccccactggagcagaaggggagatggacgacacggtcggggcatctggcctggccagtgccctgatcccagagagcccgaggaggtgtctcaggctgcctgagtcgtgacctgctaggccagagcccactccatctggtagaagggaaagcccatatgctaccaccagctgtgtccaaaaccgccagctctgttcttcctcagccagcctcgcccatccccttgaggtctcagcccctttcccttgtagctcctcccctggagggggaatggcagcaggggttggggaaacagcatctccaagcagcttagagttggccatatttacctcagcctgggcgctggtcctttcttccggcccctcccctccaaaatgtgcctattgctagagctcctccctctcaacacccagtttccttgggagttgtcattaaaggaaaaaaaaaaaaaaaaaagccagtgcccagggatgggcatctccagggagctggggattagtgccaggcagccctgccagccatgcctacatccccatgggcacagaacaagccaaagccttcgttgtatgttgacgatgcacttttatgaatgtagtttctatcgctgtttttagccttttcacatcatgtaatgtgaggccttgtacttgttaatttatatctcagatcatatttgatggtttttatatatatcaattctagactgttacaggtgacggacgcctcaagagagagaagagaaaatgaaagcagctggttttgcagaagtgtgtgtcgcatgcgccagttgggcctggaccctcctgtgtccatccctgttcccccaggggctctatcagcccctgtaccccacactgccctctgaagacaacacaggctcctgcttccacctcggcccttgcccagggtggggcctggccctcatcttgaccaaagctgctgtgtggcagctcggcctctctacgaccccatcttggtggctgcacactcttcctggcccgcacccccatccccagtccctgttccccaagaggatacagagcacggtgctggctgactcaactgtgcgtcccaggttcagggtcttacagagctccaccccctggggtcttacctcactgggaatgtgttttgaaaatgaatttgaagacaagccaacaaaccctgcactccaaaaaagcaaaacagaccctaatttttttgtgccaaaaactgtggacatgctggctcagcatcctcaggaccaagttgttgcttaatttattgttttttaataactaatccagataaaaagttgtggggcttcagggtgacctgggcccaaaggttctgaagggcagttcctggcagccccaggcttgctgtgggaaggggccgtgccgtcactttctcatcattccatggggtgtgtctgcctgggccaactctgcatggagaggccagggctggggacagtccgcactctgccaccctcctgccccttccacccaccccagctctatgtctgtgtctgaattgtggatcgtgcagccatggttattgtggaactgtggaacctgcagccatagttatttgactatatcttgaccgagggcttgcagtgcaaagccaggccagtgttgcgcattacttacaataaaagggatcatttatatcagaaaaaaaaaaaaaaaaaa

SEQ ID NO: 31734 - DNA, 3757 bp, Homo Sapiens
tgcccggccgaaaccaaaccgaggggtggggtggcgaggacagggtacgtcgcaggcttgtgcgggtcgggctcggacctgcgctgcctcgggatgtaaagtataacaagagggtcgggatgggcagcgtaggcctgtgaggcctgcgggtgcccctgtcccccagctccccccgcagccggctccgcagtggtccactccggttgccgggtgcggattcgggttccggaccgaaggctgtgtgttctccgccgtttattgtggccccgacaggccggggttactgtggcgaccacgagagcagctttggcgctatggaggagcccggggttacccctcaaccgtatttggggctgctcctggaggagctacgcagggttgtggcagcactgcctgaaggttaggagtcggctttatgtgggacgagagaaaaagcttgctctaatgctttctggactaattgaagaaaaaagtaaactacttgaaaaatttagccttgttcaaaaagagtatgaaggctatgaagtagagtcatctttaaaggatgccagctttgagaaggaggcaacagaagcacaaagtttggaggtagaaaatcaaatggcaacctgtgaaaagctgaacaggtccaattctgaacttgaggatgaaatactctgtctagaaaaagagttaaaagaagagaaatccaaacattctgaacaagatgaattgatggcggatatttcaaaaaggatacagtctctagaagatgagtcaaaatccctcaaatcacaagtagctgaagccaaaatgaccttcaagatatttcaaatgaatgaagaacgactgaagatagcaataaaagatgctttgaatgaaaattctcaacttcaggaaagccagaaacagcttttgcaagaagctgaagtatggaaagaacaagtgagtgaacttaataaacagaaagtaacatttgaagactccaaagtacatgcagaacaagttctaaatgataaagaaagtcacatcaagactctgactgaacgcttgttaaagatgaaagattgggctgctatgcttggagaagacataacggatgatgataacttggaattagaaatgaacagtgaatcggaaaatggtgcttacttagataatcctccaaaaggagctttgaagaaactgattcatgctgctaagttaaatgcttctttaaaaaccttagaaggagaaagaaaccaaatttatattcagttgtctgaagttgataaaacaaaggaagagcttacagagcatattaaaaatcttcagactgaacaagcatctttgcagtcagaaaacacacattttgaaaatgagaatcagaagcttcaacagaaacttaaagtaatgactgaattatatcaagaaaatgaaatgaaactccacaggaaattaacagtagaggaaaattatcggttagagaaagaagagaaactttctaaagtagatgaaaagatcagccatgccactgaagagctggagacctatagaaagcgagccaaagatcttgaagaagaattggagagaactattcattcttatcaagggcagattatttcccatgagaaaaaagcacatgataattggttggcagctcggaatgctgaaagaaacctcaatgatttaaggaaagaaaatgctcacaacagacaaaaattaactgaaacagagcttaaatttgaacttttagaaaaagatccttatgcactcgatgttccaaatacagcatttggcagagagcattccccatatggtccctcaccattgggttggccttcatctgaaacaagagcttttctctctcctccaactttgttggagggtccactcagactctcacctttgcttccagggggaggaggaagaggctcacgaggcccagggaatcctctggaccatcagattaccaatgaaagaggagaatcaagctgtgataggttaaccgatcctcatagggctccctctgacactgggtctctgtcacctccatgggaccaggaccgtaggatgatgtttcctccgccaggacaatcatatcctgattcagcccttcctccacaaaggcaagacagattttgttctaattctggtagactgtctggaccagcagaactcagaagttttaatatgccttctttggataaaatggatgggtcaatgccttcagaaatggaatccagtagaaatgataccaaagatgatcttggtaatttaaatgtgcctgattcatctctccctgctgaaaatgaagccactggccctggctttgttcctccacctcttgctccaatcagaggtccattgtttccagtggatgcaagaggcccattcttgagaagaggacctcctttccccccacctcctccaggagccatgtttggagcttctcgagattattttccaccaggggatttcccaggtccaccacctgctccatttgcaatgagaaatgtctatccaccgaggggttttcctccttaccttcccccaagacctggatttttccccccacccccacattctgaaggtagaagtgagttcccctcaggtttgattccaccttcaaatgagcctgctactgaacatccagaaccacagcaagaaacctgacaatatttttgctctcttcaaaagtaattttgactgatctcattttcagtttaagtaactgctgttacttaagtgattacacttttgctcaaattgaagcttaatggaattataattctcaggatagtattttgtaaataaagatgatttaaatatgaatcttatgagtaaattatttcaattttattttagacggtataactatttcaatttgattaatccactattatataaacaatagtgggagttttatatatgtaatctttcaggtggggaggctttaaattctgaagtctgtgtctttatgccaagaactgtatttactgtggttgtggacaaatgtgaaagtaactttatgcttaaataaattatagttgatttaaagatttgtttggcattgataataataaaatcagtagtttttctataactatggctctattaacttttttccttttaccaataactttgaggtgcaaaactcaaacttatgtgggtcttttgtgttcaattatgttatgacaaatgtgctctctttcttgtaaatagacatgagtggcccaaagcaacaaattaatacacttttaaaagtcaaaattgattatattttaaagataaccaggatattatctaatggtgaattgtagaattttgatcttcttattcactgagtttcttgcacggtttctttattgcttttttttccccgcctgttcttttgtaaggtatttactattttctgtggaggatattgagatgtactacaggataactgtagtgaatgatgtgtcatcattttgagctttggactcaatatctttagtgtttccctaaatcagatttgtaggtcatgttaagcttcttgcacattaatatgattatggaaggaaaggcagtgaagcataactaataaacatcataatacttaacgttgcccagttggttgttttagtattagacttttttttcaatgccaaaagatagaagattaaatattcttgaataaagcagtgatatatattggaacacttcaccccagcatttccccaggtgttgtttggaacactgatcttgtgaagtatttttgctccctttctattctaaccctcacctcaaaaaaaaa

SEQ ID NO: 31735 - DNA, 4262 bp, Homo Sapiens
gtcccaggcggttccgctcaacagacgctgctgtggctgcgccgggctgcgacactgcagttgtctacgcggccggggccgggacgaggaggcgttggacggggtcgcatacgttcgtcccctcgcattgcggccccgacagctgcgccaggatccccgggcggcggcgcggggcgtgaacgctctggggctcagccaggcctgcgcgggcccgaggccggaggaacccggactccggcgtagcggttttgacacaagggcgcatatcttcaaagcacctagtacctcctaccattgtcaactgattctcgctgaagtctgttaattctactttttgagtacttatgaataaccacgtgtcttcaaaaccatctaccatgaagctaaaacataccatcaaccctattcttttatattttatacattttctaatatcactttatactattttaacatacattccgttttattttttctccgagtcaagacaagaaaaatcaaaccgaattaaagcaaagcctgtaaattcaaaacctgattctgcatacagatctgttaatagtttggatggtttggcttcagtattataccctggatgtgatactttagataaagtttttacatatgcaaaaaacaaatttaagaacaaaagactcttgggaacacgtgaagttttaaatgaggaagatgaagtacaaccaaatggaaaaatttttaaaaaggttattcttggacagtataattggctttcctatgaagatgtctttgttcgagcctttaattttggaaatggattacagatgttgggtcagaaaccaaagaccaacatcgccatcttctgtgagaccagggccgagtggatgatagctgcacaggcgtgttttatgtataattttcagcttgttacattatatgccactctaggaggtccagccattgttcatgcattaaatgaaacagaggtgaccaacatcattactagtaaagaactcttacaaacaaagttgaaggatatagtttctttggtcccacgcctgcggcacatcatcactgttgatggaaagccaccgacctggtccgagttccccaagggcatcattgtgcataccatggctgcagtggaggccctgggagccaaggccagcatggaaaaccaacctcatagcaaaccattgccctcagatattgcagtaatcatgtacacaagtggatccacaggacttccaaagggagtcatgatctcacatagtaacattattgctggtataactgggatggcagaaaggattccagaactaggagaggaagatgtctacattggatatttgcctctggcccatgttctagaattaagtgctgagcttgtctgtctttctcacggatgccgcattggttactcttcaccacagactttagcagatcagtcttcaaaaattaaaaaaggaagcaaaggggatacatccatgttgaaaccaacactgatggcagcagttccggaaatcatggatcggatctacaaaaatgtcatgaataaagtcagtgaaatgagtagttttcaacgtaatctgtttattctggcctataattacaaaatggaacagatttcaaaaggacgtaatactccactgtgcgacagctttgttttccggaaagttcgaagcttgctagggggaaatattcgtctcctgttgtgtggtggcgctccactttctgcaaccacgcagcgattcatgaacatctgtttctgctgtcctgttggtcagggatacgggctcactgaatctgctggggctggaacaatttccgaagtgtgggactacaatactggcagagtgggagcaccattagtttgctgtgaaatcaaattaaaaaactgggaggaaggtggatactttaatactgataagccacaccccaggggtgaaattcttattgggggccaaagtgtgacaatggggtactacaaaaatgaagcaaaaacaaaagctgatttctttgaagatgaaaatggacaaaggtggctctgtactggggatattggagagtttgaacccgatggatgcttaaagattattgatcgtaaaaaggaccttgtaaaactacaggcaggggaatatgtttctcttgggaaagtagaggcagctttgaagaatcttccactagtagataacatttgtgcatatgcaaacagttatcattcttatgtcattggatttgttgtgccaaatcaaaaggaactaactgaactagctcgaaagaaaggacttaaagggacttgggaggagctgtgtaacagttgtgaaatggaaaatgaggtacttaaagtgctttccgaagctgctatttcagcaagtctggaaaagtttgaaattccagtaaaaattcgtttgagtcctgaaccgtggacccctgaaactggtctggtgacagatgccttcaagctgaaacgcaaagagcttaaaacacattaccaggcggacattgagcgaatgtatggaagaaaataattattctcttctggcatcagtttgctacagtgagctcagatcaaataggaaaatacttgaaatgcatgtctcaagctgcaaggcaaactccattcctcatattaaactattacttctcatgacgtcaccatttttaactgacaggattagtaaaacattaagacagcaaacttgtgtctgtctcttctttcattttccccgccaccaacttactttaccacctatgactgtacttgtcagtatgagaatttttctgaatcatattggggaagcagtgattttaaaacctcaagtttttaaacatgatttatatgttctgtataatgttcagtttgtaactttttaaaagtttggatgtatagagggataaataggaaatataagaattggttatttgggggcttttttacttactgtatttaaaaatacaagggtattgatatgaaattatgtaaatttcaaatgcttatgaatcaaatcattgttgaacaaaagatttgttgctgtgtaattattgtcttgtatgcatttgagagaaataaatatacccatacttatgttttaagaagttgagatcttgtgaatatatgcctgtcagtgtcttctttatatatttattttttattagaaaaaatgaagtttggttggtgatgcatgaaacaaaatagcaagagagggttatagtttaatagtaagggagataacacagcatgtgtagcaccagttgataattggtctctagtagcttactgtcaaaatgttcaatgaagtcttctgttcatctgttgaaactaggaaaatacccaaacttaaatggaagaattctgaaagagaggatagaatttaaagaacaagagtatataaagttattctttgaatatttcgttgactatatgtacattgagttatctatatttgtaaacaaattagtcatggaaaattattctatctcaaagtctccttttagtctagataatcattatttcattttaaaattagtgtttttcctagtttgcactgatgcgtgtatggatgtgtgtgagtcagtggtagcttatttaaaaagcaccttatcctttctcccataacctttgtacactaaaaaatgaaagaatttagaatgtatttgatgatagcattctcactaagacacatgagaatttaactttataaccgcgtgagttaagatttaattcataggttttgatgtcattgttgaagttatttgtaattcagaaaccttgcttgtgtgatacatagtctcttcatttattactgcttgtctgttgttatatctggattatcaaaagcaatagtgcaccaattaagatgtgctcaaatcaggacttaaatcataggcaccacatttttcatgtcagactagttactttgttgattctcagttactgtaggcatcaaaaggcaaaaatcaaaaaaaaaaaaaacaaaaacaaaaaaaaagatgaacctaggtctgtgtaaagtaaggggagtgttaggagcagccaggactgtgtagtgtgtgtttggttgcatcacaaacatcgtatgtggagacattgcaatacagtgttttttgttttcaacttttcttgtattgtatatttgtattatgttttgaatgcttttctcttttcataattaaatattaatgtttgggataactgccaagaagaagtaaaaatattgaatggaacttctatatgaggatgctgtgatctaaaaattaaatctcagtgggcggagaaaaaaaaa

SEQ ID NO: 31736 - DNA, 1350 bp, Homo Sapiens
gttttattgacaatacatgcatcatatcttttgactttgaaggatatctcatgtcaaaggaatcaagttatgatttatagaggattcagctggaataccttgtgggtgctggctgagggtggcaaaacgcctaccgagacatgaaggttttagccactagttttgtccttgggagcctggggttggccttctacctgcctttggtggtgactacacctaaaacactggccatccctgagaagctgcaagaagctgtggggaaagttatcatcaatgccacaacctgtactgtcacctgtggccttggctataaggaggagaccgtctgtgaggtgggccctgatggagtgagaaggaaatgtcagactcggcgcttagaatgtctgaccaactggatctgtgggatgctccatttcaccattctcattggcaaggaatttgagcttagctgtctgagttcagacatcttggagtttggacaggaagctttccggttcacctggagacttgctcgaggtgtcatctccactgacgatgaggtcttcaaaccctttcaagccaactcccactttgtgaagtttaaatatgctcaggagtatgactctgggacatatcgctgtgatgtgcagctggtaaaaaacttgagactcgtcaagaggctctattttgggttgagggtccttcctcctaacttggtgaatctgaatttccatcagtcacttactgaggatcagaagttaatagatgagggattggaagttaatctggacagctactccaagcctcaccacccaaagtggaaaaagaaggtggcgtcagccttgggaataggaattgccattggagtggttggtggcgtgttggtgaggattgtcctctgtgcgctaagggggggcctgcagcagtgacagcttcaagaacttaacagccttgctcctgaagaactggctgcccaggaagccaagctagctttttaggggagtgttccagctgctggtagtggatcagcttagagggaacactcccacagccaaaagaatgagtgggagaaatggaggggacaatctcctgggagctatgcgcagtaacctaacttccttatgtcccatggatctcttcctgatcttccctgcccattgggtacccaggaaactgcaagcattgcctgtgttcctgggaagagttctaagaagcttgcattcattttctaccctttatgacttggatgcctccccacctccatttcccctcttctgagctgtgtattcatgtagagggatgtattcagcctttttagtgaacattttttttcaataaaagtaattcacagtaaaaaaaaaaaaaaaaaaa

SEQ ID NO: 31737 - DNA, 4718 bp, Homo Sapiens; identical to SEQ ID NO: 27220

SEQ ID NO: 31738 - DNA, 4718 bp, Homo Sapiens; identical to SEQ ID NO: 27220

SEQ ID NO: 31739 - DNA, 5728 bp, Homo Sapiens
ctacgatccaggctggagttgcgctcggccggtctgagcgctggcgctgcccggacgccgcggggtccccgccagcccagggcactcggcgcggggatctgcgcgcctcgctctcccttcccgatgccgccgcccggctgctgatcgccgcaccaccttccctcatcggcttgggtccgtggaggtccctgcagaggcaggaagcctccttaggaaagcagggatggaggtaaattgtttaacactaaaagacctgatcagccccaggcagcccagactagattttgcagttgaagatggggaaaatgcacaaaaggaaaatatatttgttgatcgatcaaggatggccccgaagactccaataaaaaatgaaccaattgatttatcgaagcaaaaaaaatttactccagaaagaaatcccattactccagttaagcttgttgacagacagcaagcggaaccatggacacccacagctaacctgaagatgctcattagtgctgccagcccagatataagggaccgggagaagaaaaagggactattccgacccattgaaaacaaggacgatgcatttacagattctctacagcttgatgttgttggggacagtgctgtggacgaatttgaaaagcaaaggccaagcagaaaacagaaaagtttaggactcctgtgccagaagtttctagctcgctatccaagttatcccttgtcaactgagaaaactaccatctccctagatgaagttgctgtcagtcttggtgtggaaaggagacgcatctatgacattgtaaatgtgctggagtcgctgcatctggtcagccgggtggctaagaatcagtatggctggcatggacggcacagcctgccaaaaaccctgaggaacctccagagactaggagaggagcagaaatatgaagagcaaatggcctacctccaacagaaagagctggacctgatagattataaatttggagaacgtaaaaaagatggtgatccagattcccaggaacaacagttactggatttctctgaacccgactgtccctcttcatctgcaaacagtagaaaagacaagtctctgagaattatgagccagaagtttgtcatgctgttcctcgtctccaaaaccaagattgtcactctggatgtggctgccaaaatactgatagaagaaagccaagatgccccggaccatagtaaatttaaaacaaaggtacgacgcctctatgacatagccaatgttctgaccagcttggctctgataaagaaagtgcatgtaacagaagagcgaggtcgtaaaccagccttcaagtggatcgggcctgtggacttcagctcaagtgatgaagaactggtggatgtttctgcatctgtcttaccagaattgaaaagagaaacatatggccagattcaagtctgtgcaaaacagaagctggctcgccatggttcttttaacacagttcaggcttctgagaggatccagaggaaagtgaactcagaaccgagcagcccgtacagagaagaacaaggatcaggtggctactctttagaaattggaagcctggcagctgtctatagacagaaaatagaagacaattcacagggaaaagcctttgccagtaagagagtggtgcctccatcaagcagcttggaccctgttgctcctttccctgtcctctctgttgacccagaatattgtgttaatcctttagcccacccagtattttctgttgctcagacggacctgcaggcattctccatgcagaacggtctgaatggacaagtggatgtctcacttgcttctgcagcctctgctgtggagagcctgaagccagcactccttgctggccagcctctagtgtatgtgccctctgcctcactgttcatgctgtatggaagtctgcaggagggaccagcgtcagggtcagggtcagagagggatgacagaagctcagaagccccagccacagtagagctgtcatctgcaccctcagctcagaagcgcctctgtgaggagaggaaacctcaggaggaggatgagccagccactaaaaggcaaagtagggaatatgaagacggcccgctgtcgcttgtcatgcccaagaaaccctcagattccacagaccttgcctctcccaagactatgggtaacagggcatctatacccctcaaagacattcatgtgaatggccaactccctgctgcagaagagatttcaggaaaggcaacagcaaactctcttgtttcttctgagtggggaaatccttcaagaaatacagatgttgaaaagccttcaaaagaaaatgaaagcaccaaagagccttctttgctacaatatctttgtgtgcagtctcctgcaggattaaatggtttcaatgtacttttatctggcagtcaaaccccccctactgtgggcccgtcctcaggtcagctgccgtctttcagtgtcccttgcatggtcttaccatctccacctctgggcccttttcctgttctctattctcctgcaatgccgggcccggtttcttctactcttggtgctctcccaaacacaggacctgtgaatttcagcttgcctggccttggatcaatagcccagcttctcgtcggccccacagctgtggttaatccaaagtcgtccacactcccttctgcagaccctcagcttcagagtcagccctcactaaacctaagtccagtgatgtcaaggtcacacagtgtcgtccaacaacctgagtcccccgtttacgtgggacatccagtctcagtagtaaaattacatcagtcaccagttccagtgacccccaagagcatccaacgcacacatcgtgagacgtttttcaagacacccggcagccttggagaccctgtcctgaagagaagagaaaggaaccagtcacgaaacaccagctcggcccagaggagactagaaatccccagcggcggcgctgactaacctgccgctttgccaggtgggggtgggatcaaacgccctgagagtcccggatgtccgaggcgggatgcaaaccatcccgtcctgagcacgggtccttcctctctctttcatccacacttctgttaacttcccaccaccatcaatcatctgatttcctgaaagtaattaattgtgcatttaataccagttagagttccgactctgcatggtgtcacagtgaaagcgccgactgacttatggttttgattcaagaatcgtcttattctggaagtagatctgaataggctaccggagccttgtttttctaaaggggggcgctgtctagcacttaactagggtaagcattcttaacatgtatttccacttgccctgagtaaatctgtggtgagagaagcttcctttctgcagtttaaaaaagctactgcttccttaggcttcatcaggaagccaccttcagttgtgaatcctatggtgttatttattttgttcctgaaatgggatttagtgcaaaaagtttacaactacagtctttaacacatttttttcagggtatgacgacttgaatgtttatacttttattctataatttgccctgcacttattttacaacctagtaataatgtggataaatgtatctacatgacacatgtcaagaccaaaataactgtgaatgacacaccttgctgtaaatgaactgtgctaaccctgactgtgggcttgagaacaaagatgaactctagaactctagcagcctaactgctgcttctcaaataactgtgtgaacagtgagatattactgtttgtttctaaaaatcctactgtgcccagtttccttcactacatgccctgcattttttatttaaatatttagctgtagcgccatcagatatggatgccttctaacaattgctgtttgtaaaataaatcaggatggtagaaagtgattatatggaaaattggaacctggatgagaccttttcgttgaattctgaagagtaatgatgtgaaaattgatacagggcaagagatgattcttttgtttttcttctacttcatgtccagaagagtaagagggaaaatggacatatgtttcatatccaagggtattcaaactgtagttagttggtacctctgaaaaatgagaatggtgagcgcacgggttggttgttctagcatgaatacaattctggaaactgttatgcaatttcccttttttaacccacattactttaggggtgcattaagtcgccaaactatactagttctttgtattcctagacttgctgatatttacctctctcttgtctcttcagagtaaatggttcccttctttccttcctactttccttcattctctcttccttccctccttcctacttcttttcttccttcctcttcctctcttaaaactatcttagatgtagaatcctggtgtagggttttattttatttttattttttgacccaataaaatgttatatgaaagaatgaaaatattaatttaagagactctgggagtctgaataaagtagctttatattaactacaggataatattagccttattacccccacaagattttttaaaacttgaggtaggtagctacattaaataaatttgctacttatataaaaatttttatcaacactaaacttttaaagtttacaagttttttttttcttttttacagtcttctatagagttaggttaaaaatgtggttctaaccatcaacaattgcatggttaaatgaccctgaactaaaactgatgggttccctatcaaaacaaataaaaatatacctttttcaggtttcaatctgtgcagggtatatgcatgttaattctaccatgcttaagaacttccacaaaatatttcatggagaggtctgcatttagacggaaacagaaattgcttttcccctcactgttcctgaatgctctatacttgttttaacatttttgctatctttttttattattctgatcatgatatgaccatttaacctcagaattcataattcctgaggggtgttaagaagcagtcccattggtgaggatattatgacttggtgaccattcttaggagtagaaaaccaaggacaattgcttctgtattcagtatccacttcttaatgtggctttatatgtaaaaataataatgcagtggttgtttctgtcaggaaaataaatcttacagaacaactggtggaattgaagctgctgcgctagacttggatattttgggtagtgaagaagcaatggcaatcttgagtctattattgtataatttagtaaaagaaaaaaataatcgttggtggtcctactaagagaatgcagcttttttgagttgtcacagaggctgtgtgtgccctacactgaccagggtttgtaaaaccctttcattctggtacaagagtcgggggtataacttttatacttgaatctacctaccaagtttacatttctcaattcctttttgtaaggtgctatttctgtatttaaataactttcttttaacgtaaagctgctttctgcttatcttattgcactgctagttgtatgtaggtattaattttattgctgcttactgcttttgttttcttattatttagctctgctctttttcctaatggctatattatctatagctatttacttgtaactgtactacatgtaaactgattttttgttctgattttttttctaatatttttaggaaaatattaagctttataaaatagcaataaaaaataattcatttaagaaaa

SEQ ID NO: 31740 - DNA, 5728 bp, Homo Sapiens; identical to SEQ ID NO: 31739

SEQ ID NO: 31741 - DNA, 5727 bp, Homo Sapiens
ctacgatccaggctggagttgcgctcggccggtctgagcgctggcgctgcccggacgccgcggggtccccgccagcccagggcactcggcgcggggatctgcgcgcctcgctctcccttcccgatgccgccgcccggctgctgatcgccgcaccaccttccctcatcggcttgggtccgtggaggtccctgcagaggcaggaagcctccttaggaaagcagggatggaggtaaattgtttaacactaaaagacctgatcagccccaggcagcccagactagattttgcagttgaagatggggaaaatgcacaaaaggaaaatatatttgttgatcgatcaaggatggccccgaagactccaataaaaaatgaaccaattgatttatcgaagcaaaaaaaatttactccagaaagaaatcccattactccagttaagtttgttgacagacagcaagcggaaccatggacacccacagctaacctgaagatgctcattagtgctgccagcccagatataagggaccgggagaagaaaaagggactattccgacccattgaaaacaaggacgatgcatttacagattctctacagcttgatgttgttggggacagtgctgtggacgaatttgaaaagcaaaggccaagcagaaaacagaaaagtttaggactcctgtgccagaagtttctagctcgctatccaagttatcccttgtcaactgagaaaactaccatctccctagatgaagttgctgtcagtcttggtgtggaaaggagacgcatctatgacattgtaaatgtgctggagtcgctgcatctggtcagccgggtggctaagaatcagtatggctggcatggacggcacagcctgccaaaaaccctgaggaacctccagagactaggagaggagcagaaatatgaagagcaaatggcctacctccaacagaaagagctggacctgatagattataaatttggagaacgtaaaaaagatggtgatccagattcccaggaacaacagttactggatttctctgaacccgactgtccctcttcatctgcaaacagtagaaaagacaagtctctgagaattatgagccagaagtttgtcatgctgttcctcgtctccaaaaccaagattgtcactctggatgtggctgccaaaatactgatagaagaaagccaagatgccccagaccatagtaaatttaaaacaaaggtacgacgcctctatgacatagccaatgttctgaccagcttggctctgataaagaaagtgcatgtaacagaagagcgaggtcgtaaaccagccttcaagtggatcgggcctgtggacttcagctcaagtgatgaagaactggtggatgtttctgcatctgtcttaccagaattgaaaagagaaacatatggccagattcaagtctgtgcaaaacagaagctggctcgccatggttcttttaacacagttcaggcttctgagaggatccagaggaaagtgaactcagaaccgagcagcccgtacagagaagaacaaggatcaggtggctactctttagaaattggaagcctggcagctgtctatagacagaaaatagaagacaattcacagggaaaagcctttgccagtaagagagtggtgcctccatcaagcagcttggaccctgttgctcctttccctgtcctctctgttgacccagaatattgtgttaatcctttagcccacccagtattttctgttgctcagacggacctgcaggcattctccatgcagaacggtctgaatggacaagtggatgtctcacttgcttctgcagcctctgctgtggagagcctgaagccagcactccttgctggccagcctctagtgtatgtgccctctgcctcactgttcatgctgtatggaagtctgcaggagggaccagcgtcagggtcagggtcagagagggatgacagaagctcagaagccccagccacagtagagctgtcatctgcaccctcagctcagaagcgcctctgtgaggagaggaaacctcaggaggaggatgagccagccactaaaaggcaaagtagggaatatgaagacggcccgctgtcgcttgtcatgcccaagaaaccctcagattccacagaccttgcctctcccaagactatgggtaacagggcatctatacccctcaaagacattcatgtgaatggccaactccctgctgcagaagagatttcaggaaaggcaacagcaaactctcttgtttcttctgagtggggaaatccttcaagaaatacagatgttgaaaagccttcaaaagaaaatgaaagcaccaaagagccttctttgctacaatatctttgtgtgcagtctcctgcaggattaaatggtttcaatgtacttttatctggcagtcaaaccccccctactgtgggcccgtcctcaggtcagctgccgtctttcagtgtcccttgcatggtcttaccatctccacctctgggcccttttcctgttctctattctcctgcaatgccgggcccggtttcttctactcttggtgctctcccaaacacaggacctgtgaatttcagcttgcctggccttggatcaatagcccagcttctcgtcggccccacagctgtggttaatccaaagtcgtccacactcccttctgcagaccctcagcttcagagtcagccctcactaaacctaagtccagtgatgtcaaggtcacacagtgtcgtccaacaacctgagtcccccgtttacgtgggacatccagtctcagtagtaaaattacatcagtcaccagttccagtgacccccaagagcatccaacgcacacatcgtgagacgtttttcaagacacccggcagccttggagaccctgtcctgaagagaagagaaaggaaccagtcacgaaacaccagctcggcccagaggagactagaaatccccagcggcggcgctgactaacctgccgctttgccaggtgggggtgggatcaaacgccctgagagtcccggatgtccgaggcgggatgcaaaccatcccgtcctgagcacgggtccttcctctctctttcatccacacttctgttaacttcccaccaccatcaatcatctgatttcctgaaagtaattaattgtgcatttaataccagttagagttccgactctgcatggtgtcacagtgaaagcgccgactgacttatggttttgattcaagaatcgtcttattctggaagtagatctgaataggctaccggagccttgtttttctaaaggggggcgctgtctagcacttaactagggtaagcattcttaacatgtatttccacttgccctgagtaaatctgtggtgagagaagcttcctttctgcagtttaaaaaagctactgcttccttaggcttcatcaggaagccaccttcagttgtgaatcctatggtgttatttattttgttcctgaaatgggatttagtgcaaaaagtttacaactacagtctttaacacatttttttcagggtatgacgacttgaatgtttatacttttattctataatttgccctgcacttattttacaacctagtaataatgtggataaatgtatctacatgacacatgtcaagaccaaaataactgtgaatgacacaccttgctgtaaatgaactgtgctaaccctgactgtgggcttgagaacaaagatgaactctagaactctagcagcctaactgctgcttctcaaataactgtgtgaacagtgagatattactgtttgtttctaaaaatcctactgtgcccagtttccttcactacatgccctgcattttttatttaaatatttagctgtagcgccatcagatatggatgccttctaacaattgctgtttgtaaaataaatcaggatggtagaaagtgattatatggaaaattggaacctggatgagaccttttcgttgaattctgaagagtaatgatgtgaaaattgatacagggcaagagatgattcttttgtttttcttctacttcatgtccagaagagtaagagggaaaatggacatatgtttcatatccaagggtattcaaactgtagttagttggtacctctgaaaaatgagaatggtgagcgcacgggttggttgttctagcatgaatacaattctggaaactgttatgcaatttcccttttttaacccacattactttaggggtgcattaagtcgccaaactatactagttctttgtattcctagacttgctgatatttacctctctcttgtctcttcagagtaaatggttcccttctttccttcctactttccttcattctctcttccttccctccttcctacttcttttcttccttcctcttcctctcttaaaactatcttagatgtagaatcctggtgtagggttttattttatttttattttttgacccaataaaatgttatatgaaagaatgaaaatattaatttaagagactctgggagtctgaataaagtagctttatattaactacaggataatattagccttattacccccacaagattttttaaaacttgaggtaggtagctacattaaataaatttgctacttatataaaaatttttatcaacactaaacttttaaagtttacaagttttttttttcttttttacagtcttctatagagttaggttaaaaatgtggttctaaccatcaacaattgcatggttaaatgaccctgaactaaaactgatgggttccctatcaaaacaaataaaaatatacctttttcaggtttcaatctgtgcagggtatatgcatgttaattctaccatgcttaagaacttccacaaaatatttcatggagaggtctgcatttagacggaaacagaaattgcttttcccctcactgttcctgaatgctctatacttgttttaacatttttgctatctttttttattattctgatcatgatatgaccatttaacctcagaattcataattcctgaggggtgttaagaagcagtcccattggtgaggatattatgacttggtgaccattcttaggagtagaaaaccaaggacaattgcttctgtattcagtatccacttcttaatgtggctttatatgtaaaaataataatgcagtggttgtttctgtcaggaaaataaatcttacagaacaactggtggaattgaagctgctgcgctagacttggatattttgggtagtgaagaagcaatggcaatcttgagtctattattgtataatttagtaaaagaaaaaaataatcgttggtggtcctactaagagaatgcagcttttttgagttgtcacagaggctgtgtgtgccctacactgaccagggtttgtaaaaccctttcattctggtacaagagtcgggggtataacttttatacttgaatctacctaccaagtttacatttctcaattcctttttgtaaggtgctatttctgtatttaaataactttcttttaacgtaaagctgctttctgcttatcttattgcactgctagttgtatgtaggtattaattttattgctgcttactgcttttgttttcttattatttagctctgctctttttcctaatggctatattatctatagctatttacttgtaactgtactacatgtaaactgattttttgttctgattttttttctaatatttttaggaaaatattaagctttataaaatagcaataaaaaataattcatttaagaag

SEQ ID NO: 31742 - DNA, 7401 bp, Homo Sapiens; identical to SEQ ID NO: 24965

SEQ ID NO: 31743 - DNA, 7401 bp, Homo Sapiens; identical to SEQ ID NO: 24965

SEQ ID NO: 31744 - DNA, 1730 bp, Homo Sapiens
atcaccgggcgtccgctccggggtgccgtcgaggagacaatagggggcgtgggccctcgtttacctccctccctccctcccttccctgcgggccccgccgggttccccattgtctgaagggacggggcggtgccccagggaccagcggctttaggaccaaactgcgggcagccagggccgcgaccctccctgcgaccgtcccctggcgaccgcagctggtgattgaggggcggcgctcccgggccccacgagggttcttctgtcttcgcggccggacgcgcggacagcgtgggtggcggcaggactttccttatcccagttgattgtgcagaatacactgcctgtcgcttgtcttctattcaccatggcttcttctgatatccaggtgaaagaactggagaagcgtgcctcaggccaggcttttgagctgattctcagccctcggtcaaaagaatctgttccagaattccccctttcccctccaaagaagaaggatctttccctggaggaaattcagaagaaattagaagctgcagaagaaagacgcaagtcccatgaagctgaggtcttgaagcagctggctgagaaacgagagcacgagaaagaagtgcttcagaaggcaatagaagagaacaacaacttcagtaaaatggcagaagagaaactgacccacaaaatggaagctaataaagagaaccgagaggcacaaatggctgccaaactggaacgtttgcgagagaaggataagcacattgaagaagtgcggaagaacaaagaatccaaagaccctgctgacgagactgaagctgactaatttgttctgagaactgactttctccccatccccttcctaaatatccaaagactgtactggccagtgtcattttattttttccctcctgacaaatattttagaagctaatgtaggactgtataggtagatccagatccagactgtaagatgttgttttaggggctaaaggggagaaactgaaagtgttttactctttttctaaagtgttggtctttctaatgtagctatttttcttgttgcatcttttctacttcagtacacttggtgtactgggttaatggctagtactgtattggctctgtgaaaacatatttgtgaaaagagtatgtagtggcttcttttgaactgttagatgctgaatatctgttcacttttcaatcccaattctgtcccaatcttaccagatgctactggacttgaatggttaataaaactgcacagtgctgttggtggcagtgacttcttttgagttaggttaataaatcaagccatagagcccctcctggttgatacttgttccagatggggcctttggggctggtagaaatacccaacgcacaaatgaccgcacgttctctgccccgtttcttgccccagtgtggtttgcattgtctccttccacaatgactgctttgtttggatgcctcagcccaggtcagctgttactttctttcagatgtttatttgcaaacaaccattttttgttctgtgtcccttttaaaaggcagattaaaagcacaagcgtgtttctagagaacagttgagagagaatctcaagattctacttggtggtttgcttgctctacgttacaggtggggcatgtcctcatcctttcctgccataaaagctatgacacgagaatcagaatattaataaaactttatgtactgctgtagcaaaaaaaaaaaaaaaaaa

SEQ ID NO: 31745 - DNA, 4300 bp, Homo Sapiens
caacccgcgaggccccacactttctgcgccagctgggagtgcgcgccctgcagagccagtgggtgggcggttctagctcttcccaccctcactgcgggcctctgctgtcacacgcccggggtggcgaaacggtcgccacctgagtctccattctgctgcagtggcccctgcgttaaagctctctcgtggtgcggctgccgaggctgcggtagctcctgcgcccccgtgctggtggcgcagcctctgcttgctgccgacctggcggaagggtgcgggagcgcacgctacgggcagcgtcggtctgcgtccttcctcctcctattccgacccccgcatcccacgcccccgcctcgctctacgcctcctccctggctgcaggcagaccgcttcacacagccgcagtgccctgtgtgtggacagcctgtgggagactcgcacgcccacactcaccccgcctggctgcacccctgcccagcatgtcggcgctcgagtggtacgcccacaagtctctaggcgatggtatcttctggattcaagaacgtttctacgagtcgggcaaccgtgccaacatctggctggtgcgcggctccgagcaggacgtggtgatcgatacaggcctggggctgcgcagcctcccggagtacctgtactcctccggcctcttgcaggaccgagaggccaaagaggacgcggcgcgccggccactgcttgccgtggccacccacgtgcacttcgaccactccggcggcctctaccagttcgaccgcgtggcagtgcaccacgccgaggccgaggcgctggctcgcggggacaactttgagaccgtgacctggctttccgatagcgaggtggtgcgggcgcccagccccggctggagggccagacagttccgggtacaggcggtgcagcccaccctcatcctgcaggatggggatgtgatcaaccttggtgacagacagctcactgttatgcacatgccaggtcactccaggggcagtatttgcttacatgacaaagaccgaaagattctcttcagtggagacgtcgtgtatgatggatcactgattgactggctcccatacagcaggataagtgactatgttggaacttgtgaacgtctaatagaattagtggacagaggtctggtagagaaggtgcttcctgggcacttcaatacctttggtgctgaaaggctttttcgattggcttctaactatatttcaaaagctgggatatgtcacaaagtttctacttttgccatgcgatctcttgcaagtttagctctacgtgtaacaaattctaggacctcgccctagtatctatactgataatatattttgattaattatatacattaattcattctgtgctatttaactgattaatagtgagcatttcatgaagtgcttttataccactattatatatcagagaaagattgagaatgaataagccaaaaagaaaattgttagtttaaattgttttctttcttccaagaaagaagccacttaaataagcttatactttgccaaagctgtcatcttgtaatatatgctctagaaatgacataaaggtttatggggaagcaaagagagattttgtggcaagagaactgcccttgcctctgtttttcttgttttattcccttgatgacctagggaaaaaaaggcatgtagagtattatgtttatactttaaacttgatatttttagtgtattatttaaagataaaggttcttgggtttaaaatacattagaacttaatgcagacatataaagtaacattgagaatgacaactaaaacattccattgttatggtcctgaattttttatgcttcatttcatgtatttattctttgtataattatagcatacatgttatgtaatataacttatgaaaagtacagtgaattttgctttattgcaaagctttaaatataaatttcagagtgcttcagtaaaaagctactatatattgttgtttgttattgtgtaggtaatattttcaattatgaaagtgaaatgcaaatgtctgttatctaactacaaattgtcagatttcttaaaaggacactgtcaggcaaatttgaaaatatacacattgagaataattttttattattatatcctattttaatattaacagctattatgaacaaaatttttcctgttaaatagcgacttcagtattgtgttatgttttacagcgttaaaacaactatgaagatctgcagctattcttttacttaacatgcatatgtactacagagggatttttaaattaattgcaaaatgtgcattagctattgacttagagtgaattgccttttgtatcctgattcacaacacctattcctgttcagtattctttgtcttgaatagagaagtctatgttcgtaaagtcatataaaaggttataccactatttagtaaaaagttttagtttggtgctgttaataataatttgctaaaaggccttttagaatatttcataaagggttttaaacagttttttcccactgcctttttattattgacatatctaaaaccaaactgaaatcgctttggaaatcagattttttaatgttaggaagatccagcaattttggtttctgaaaaattacaaaacttttctaccctacagatgcccaggttctttagttttttattcattcaactcacacacacataaacatatacatacacaaacacaatcccacatgcaaacacacacagccacatatatacatgtgtagcacagcgctaaacactgtggaggctaaaaaaagtcaaagacaacattataactaaaagtcgaaagcacacaaaatataaataatagtgtatgcaagttaatgtacattatacatgcgtgtaagggacataaatggaggggtgtgaactttggttaggcaaagtttactggaggaggggtttttgagtcaaatttggaaggatgaacttgttagatagtcagagttggaaacaaaacaatccaagaatagggatataagcattgctagtctagaatagtctattccttgtgaaaatataaatttaattttcaggaatccagtatattccaaacatcacatatttagcatgagaaaaattgatttgtgattgtgtatatgagtcattgttaatgggagacaagctgaactgccacatgccaccaaatgaacctttacttcaatcaaaaaggagggtatgattggttcaattatattaacagaatatcatgggcatttctctatgatggtcattcaaggtagtaggtctctttcaactgagtgcaacattgagaataatgatttggttcagggcaactacaaataatcacttactaagccttaaataaagccattatttttatatcaatagcacaaaggaaaaccaaaagtccttaaccactgaccatttttatcatattttaggcctttttttaaaaaatcagggtatagtaggcactaagttttattaggaaatatttaaacctgctgaaggatttatttataaaaagtgcaatttttcaaaacacattattattttttaatttcccaattttttcagtttttcaaattgtaccacaacatagaactgtgatattttgctattacttcaatgtgaataaataaggtaaagtatatcatttattgagtgcccatgctgtacatttaaaatatgcattatttaatttaatcttactcccagcaccaaaaggtaattgaccagcctcaacacaattttggacaaagctagtaactgaacacaggtctgtctgccccacacttctctttctcttgtaactgcacaatagcagaaaattggcaagatgtatttttactttccaagatgccgtgtgtgccaagaataaatgaaatgatgttaaagcataataataacatatctttaaaaagcttttcaaaatatattttcaccctgacagtgacccttgtaacttaaatgatttttggaaatattagtatgtaagtataattcaaagttgtcaaaatgtaagacatttagaagtaatttttattatttatattgttaatacttaatcactggaaattcattttccttactcgatgttttctttcaactgagaagcctaaaacaaacaaaaaccttgtgtgttatcctgatatagttgactaaatgtatttgttcttatatggatagtaatatgaatgtgacatgcaccaattgtcctattataattttcagataagtgtaactaagcacttgtgtaataaatattagtcattttatttcaaaaaaaaaaaaaaaaaaaaaa

SEQ ID NO: 31746 - DNA, 7359 bp, Homo Sapiens
acggggcggacctcgcgcggacggacggacggagacggcgccgccacattcctatgcccgggagcggcggcggcggcggcggcggctcccgcgggaggcggcaggcgcgcggcgcggacagctgagcttctcctccgtcggcgcccgggcggacatcgcccgggccccgatggtttgagcttgcttctccctccctcccgacccccgtggtggcgaggccacgccatgtgaaggttagggccgggacatcccgaggagccgcggtgaaagatgggggatgctgcagaccccagggagatgagaaagacgttcattgttccagccatcaagccttttgaccactatgatttctccagggccaaaatcgcctgcaatctggcctggctggtggccaaagcctttgggacagaaaatgtgccagaggaacttcaagaaccattttacacagatcagtatgaccaggaacacatcaaaccacctgttgttaatttgcttctatcggctgaactatactgtcgtgctgggagtctcattctcaagagtgatgctgcaaaaccccttttgggccatgatgctgtaatccaggctttagcacagaaaggtctttatgtcactgaccaggaaaaattggtaactgaacgagatctccacaagaaacccatacagatgagtgcacatttggccatgatcgataccctcatgatggcttatactgtagaaatggtcagtatagaaaaagtaattgcgtgtgctcagcagtattcagctttttttcaagccacagatctgccctatgatattgaggacgctgtcatgtactggataaataaggtaaatgaacatttgaaagacataatggaacaagaacaaaaactgaaagaacatcacacagttgaagctccaggaggtcaaaaggctcgttatcggaaagagcaaacattgcttaagcaactgccttgcattccattggtagaaaatttgttgaaggatgggacagatggctgtgcattagctgcccttattcatttttactgtcctgatgttgtcagattagaggatatttgtttgaaagaaactatgtctttggctgatagcctgtataatctgcagctgattcaagaattttgccaagaatacttgaaccagtgttgccatttcactctggaagatatgctctatgctgcttcatccataaagagtaattatttggtgttcatggcggaactgttctggtggtttgaagtggtgaagccgtcttttgtacagcctcgtgttgttcgtccacaaggagctgaacctgtaaaagatatgccttcaattcctgtcttgaatgctgccaaaagaaatgtcttagatagtagttctgacttcccttcaagtggggaaggagctacatttacacagtctcatcatcatttgccttctaggtattcacgtccccaggctcattcttcagcctcaggaggaattagaaggtcttcatctatgtcttatgttgatggcttcatagggacatggcccaaagagaaaagatcatcagtgcatggcgtatcatttgatatttcttttgataaagaagatagtgtacagagatccactccaaaccgaggaatcactcgttctattagtaatgaaggacttactctgaacaacagtcatgtatctaaacacattaggaaaaatttgtccttcaagccaataaatggagaagaggaagcagagagcattgaagaagaacttaatatagattctcacagtgacctcaaatcttgtgtgccccttaacacaaatgaactaaattctaatgagaatattcattacaagcttccaaatggagctttacaaaatagaatacttcttgacgagtttggcaatcagatcgagacaccaagcattgaagaagcattacaaataattcatgatactgaaaaatctcctcatacacctcagccagaccaaattgctaatggcttctttcttcatagtcaagaaatgagtatcttaaattcaaatatcaagttaaatcaatctagtcctgataatgtaactgatacgaaaggtgccttgagtcccataactgacaatactgaagtagacactggaattcacgttccttcagaagatattcctgaaactatggacgaagattcttcgttgagagattatactgtaagcttggactctgacatggatgatgcatctaaatttcttcaggattatgatattcgaactggcaacaccagggaagctttgagtccttgtccaagtactgtaagtaccaagtctcagccaggcagcagtgcttcttctagttctggagttaaaatgaccagctttgctgaacaaaaattcaggaaactgaatcataccgatggaaaaagtagtggaagcagttctcaaaaaactacaccagaaggctctgaacttaatattcctcatgtggttgcttgggcacaaattccagaagaaacagggcttccacagggacgggacactacccagctgttggcctctgaaatggtgcatcttaggatgaaactagaagaaaagaggcgtgctatagaagcccagaaaaagaaaatggaagctgcttttaccaaacagagacagaaaatgggaaggacagcattccttactgtagtgaaaaagaaaggggatgggatatctcctctacgagaggaagcggcgggtgcagaagatgagaaagtatatactgatcgagcaaaagaaaaggaatcacaaaaaactgatggacaaaggagcaagtcactggcagatataaaagagagcatggagaatcctcaagccaaatggctaaagtctccaactacacctattgatcctgagaagcagtggaacctggcaagcccctcagaagaaactttaaatgaaggagagattttagaatataccaaatccattgaaaagttaaattcatccctgcattttctacaacaagaaatgcaacgcttgtcacttcagcaggagatgttaatgcagatgagagagcaacaatcttgggtgatttcacctccacaaccctctccacagaaacagattcgagattttaagccttctaagcaggcaggcctgtcatcagccattgcaccattctcctcagactcccctcgtcctactcacccatctccacagtcttctaacaggaaaagtgcatctttttctgttaaaagtcaaaggactcctaggccaaatgagttaaaaataacacctttgaatcgaaccttgacacctcctcggtctgtggatagccttcctcggttaaggaggttttcaccaagtcaagttcctattcaaactaggtcatttgtatgttttggggatgatggagaacctcagttaaaggaatccaaacctaaagaggaagttaaaaaggaggaattggaatccaaagggactttggaacagcgtggacataatccagaagaaaaggaaatcaaaccttttgagtcaacagtctctgaagtcctatcactgcctgtcacagagactgtatgtctgacaccaaatgaggaccaattgaatcaacccacagaaccccctcctaaacccgttttcccacccactgctccaaaaaatgttaatctgattgaagtttccctctcagatttgaaaccccctgaaaaggctgatgtacctgttgaaaaatatgatggagaaagtgataaagaacaatttgatgatgaccagaaagtatgctgtggattcttttttaaggatgatcaaaaagcagaaaatgatatggcaatgaaacgggcagctttgttggagaaaagattaagaagggaaaaggaaactcagctccggaaacaacagttggaagcagaaatggagcataagaaggaggaaacaaggcgtaaaactgaggaagaacgtcagaagaaagaagatgagagagcacgcagagaatttattaggcaagaatatatgaggcggaaacaactgaaactaatggaagatatggatacagtaattaaaccccgtcctcaagtagtaaaacaaaaaaaacagcgaccaaaatctattcacagagatcatattgaatcccccaaaacaccaataaagggtcctccagtctctagcctttctttggcatcgctgaacacgggtgataacgagagtgtacattcaggcaagaggacgccaagatcagagtctgtagaaggcttcttatctccaagtcgttgtggcagtcgaaatggagaaaaagactgggagaatgcatcaacaacttcttcagtggcttctggaacagaatatacaggaccaaagctctacaaagaacccagtgcaaaatccaataagcacataatacaaaatgctttagctcattgctgtttggctggaaaagtaaatgaaggtcagaagaaaaaaatactggaggaaatggagaaatcagatgccaacaacttcttaatcttgttccgggattcaggatgccagttcagatctttatacacttattgcccagaaactgaagaaatcaataaactgactgggataggccctaaatctatcactaaaaaaatgattgaaggactttacaaatataattctgacaggaaacagtttagccacatacccgctaaaactttatctgccagtgttgatgcaattaccattcatagccatttatggcagaccaaaagaccagtaacacccaaaaaacttttacccactaaggcatagaagttgggaaatacttgcttcagaacattcatggtaaatttgcacttcatctttcctgcctatagaaaatctttctaattgccaacaagacttttattaattaaaactggacattaagctctgttgtcatgaacaactggaatgtaaaccacagtattttggagtgcagaacattctcaattaagtgataagtccaaatgatgaaggaaatgttttaattcacaaatggagatttgtatgtgttatcaggttcacctgcttgatattagatacattaaagcactgaattttcatggatattagttggatttatcattgaaatatggttaagattacaaattatgtgttttatttgttgcttttttttaaccttttaatgtatattcttgtcttcagatggtttgctatttttctctcctgggggtttattctaagatacctttgtattttatttcatgtggagatcatgaaagtaggaaatatacctttagaagtaactcgcacctttcttatgatgttaagagaaacactagtgtttagttttacagtaaccctcatattttaatggtgttacagcatttgcaaaaattattctgctaagtatttacaactctatttattattcactcaagtattaacattctctattaaataagaggaggtgttgtaaagagctgctagtaggttcgctttaaaccacatgagcttaaccaagaatatgttatgagaagttgctgattaaatcagtgctgtttttacaccacttctggccaactcagaataatttagattgttcttttaacaaaaaaggctttctatctcttttaaagtaagtcactttataagttggcagaagtgaatgacactttgagagtagtctttcaatctgaagatgtaagacttcctgaaacaagttctcaagaagtctttacattatatttataactcatataaaaattatatttagaatttttaaacatgtacaaagggctacattttaattttaaaatagcttcacattattttacttatattgggtttttcttcattttaatccttttcaagtggaatggcttagaataagtatacacttgaaatctcctctacatgatctttgttctttaacagtgtataccagagggttagttggggaaaaacttcattctcaggaaaagacttgaatgattatgtgaccctgttatatttcagtgttgtgacaaatgtgtaaactagcgggggaagacagtattgtatcataaatgagatgcgtagtttgttttctttcatgggaagtagagataaaaatatatacatttctctaattgagttgtttagagaaagaactaatgtctcatatgatgtatttacttattttaaaaaaaagaataggaatgagatgtccctgagctgtacttttctattattataaggcctttaggcatcagtgcatctgggttatcaacattttctcaaatgctgtcaatattttactgtaatttatgttcttatatttatgtatatttgttaaaactgtaaaaaaatttcacagatttttttccaatacctgtgcaagatacatgtgtagctcaaaactatttgtgatctactgtttgcatgtaagagaccaggatatgtaactcttatattttaagtgtatacatattgtgtatataacatatggatattaaaaatggggaattgcacattttaccttttggacagtaatttctatcacagttagaaggaaatgatagtcaaatacacgtttagattaaaactagtttaaaaaattataaatgaatctaatcaaaatgtgaatagtagtcaaaaggataatttaataagcattttacgttactaaatttgttcatttcaatattaactaaatttccctcatcaaagcaatctttgtgatattacttcgctattaaataaagaaaattggatgcaagacaatggagaaactttaaaactaaacaggaccaccctttattcttaaatttgtgtgtgtccaacagttgaattgaatgtctataaggtctaaaggtagaatgtgaatattgccacagagttcattgctctcagtataagattttactttattaatgcagaaggaatatggatatatttctttaagtctgcagatttttttattatggtgcagcttttttttaattatgtttttaaaattatacagttgaaaaatatgccatttcataaagtctgaggattttcgtcaaccttactgaaacacactggtgctttcatcatcagaggtcaaattattatgataactattccattaagtttgccaaacatttgtcgtggttaccagtgcagcctgtcaaattctgctatttgacacagctttggaaagatttagttcttggtttttccgttttgtattagaatgactgttacagttttatttggctgtttaaagccaaattcagctatttaattatggtttcatggacactgttgagcaatgtacagtgtatggtgtgcttacctgtccactctagagcattgcttacaggttttttgttttttaagatgctgtgctgtaaaatactgtcatacttgctatttcctggtacagtgtagtttttcccctttcatttgaataaaagcatggcaccaaaaaaaaaa

SEQ ID NO: 31747 - DNA, 6259 bp, Homo Sapiens
gggcgggagcagcggcggcggcggcacaggctcggggccagccgggcgcgcatccccgggcgccctgcgcggtggagagcttggcgggctgcgggtgccgcaggacaggagtggacaaagcaagatggcagggatcttagcctggttctggaacgagaggttttggctcccgcacaatgtcacctgggcggacctgaagaacacggaggaggccaccttcccgcaggctgaggacctctatctcgcttttcccctggccttctgtatcttcatggtgcggctcatcttcgagagatttgtagccaaaccgtgcgccatagccctcaacattcaggccaatggaccacaaattgctccgcccaatgccattctggaaaaggtcttcactgcaattacaaagcatcctgatgaaaagagattggaaggcctctccaagcaactggactgggatgttcgaagcattcagcgctggtttcgacaaagacgcaatcaggagaagccaagcacgctgacgaggttctgtgagagcatgtggagattttcattttacctttatgtatttacctacggagtcagattcctgaaaaagaccccctggttgtggaatacgaggcattgctggtacaactacccctatcagccactcacaactgaccttcactactattacatcctggagctgtcgttttattggtctttgatgttttctcagttcactgatatcaaaagaaaggactttggcattatgttcctgcaccaccttgtatctattttcttgattaccttttcatatgtcaacaatatggcccgagtaggaacgctggtcctttgtcttcatgattcagctgatgctcttctggaggctgccaaaatggcaaattatgccaagtttcagaaaatgtgtgatctcctgtttgttatgtttgccgtggtttttatcaccacacgactgggtatatttcctctctgggtgttaaataccacattatttgaaagctgggagatcgttggaccttacccttcctggtgggtttttaacctactgctattgctagtacaagggttgaactgcttctggtcttacttgattgtgaaaatagcttgcaaagctgtttcaagaggcaaggtgtccaaggatgatcgaagtgatattgagtctagctcagatgaggaggactcagaacctccgggaaagaatccccacactgcgacaaccaccaatgggaccagtggtaccaacgggtatctcctgactggctcctgctccatggatgattaattactcaaaactacaagtcccaagcaaagtgaactatttgttcctggaagtatttaataagttgcaaatgcagttcctttcataatatctcagcaccagaaacaaaaattaagattatcaaagcattttgaatagtgcactgccatgtgtcctgtctgtgaatgaagaagaattaccattctctctttgtaggcatgctgtatgtaattgacacaagggaacagtatttgcatttgtactgtcttagaatattatttatttttttgtatttgtaaatctgtggacaaaagagggtttcctcactccttttactcactgggctcatgacagtgaaggagatgctccatctgcttctccccctttctcttgctgtagtccaatgtgctatgagcatcagcttactttgtcacttagagcaagcaaaacccagtgcaagagtctcgttcagctctaaataggtttgctttcttttagttacagtgcccattttgaaattgcctatacagtcttagtgaccatttaaaccggacgaactaggtgtttaattttcactcttcatgttcaattagcagttcaaattaaagaagatggttattggagaacttttttgaatggttttgtattaaattgctttgaaatagatttcatttcttgtgcacacagccaagatttcttcaatgggtgtgagctagttgagggttaaccttgtaggttgcagagtgtatttgtttgtttgtttgtttttctctgtgatgaggtcagtgctctgattttgaaggaggatattcactgaagctcatagttataaacaaggaaatcactgttaagaatgggaatttgtcctgtgttctgggaataacataaagagagcaactgatttcagccaggttttgccactaccctataattagtgcagtcttatgttataaaagaaagaagttaactatatttggggacaaaaaaatatttcaagagttgataaagattacctgtgcagtgcagagcactttaatgcaaccagctttcaagaaaaagccctatctagtacttgatgttgatgtttttattttgctgagcaaaataaagccaatgggagaaagactattttaccctttgcttttctccttaaacgtaatccagatgactttcctgttactaaacactgagcagcattacactacaatgcttctttggtttccaggaatttttttcaaatggggctgtttctggaaaaatgaaaaattctattggacaatggcaatatcaacaatgaggaaaattactgaagaataagtttccataagtctcctacatagcagtgttatttatgtacagataagaaaaccatatgtcagccaaagattttatctcttcttctaacttttagtaagaggaaaaagggattataaaacccttcataaatcaagaaggccatcacttagaacgaaccccaaacaaaaatgccataatataaatgtgtgaatcagggctgtgaagacaacagcagaaatgctaacaagcgtgcagaaacaccagagagtgcgtatcctgctcagaaccattcacatttaattcaattcttggaaaaaattaaagctttttgcccacaatttgcaatctgtgggttaatagttaaaagaatgttcccaaccaaaaaattcttaccgtaatattatatcttgccctacttatttacaaaataatatgtttctgttatggtccttagtaataattgaagaggcttagaaatacatctgcttgtttattgagaaaacgatgcaaataattctgcttttagagccttgttattttatttcacaaaacaggcatatgtctaggagtgtaatttgtggatggttgagtttgtaagaacaatcataaaaggacttgttagtctccagaacatctgctaaaatgcaagtatatgtataaggtaatagcatattacagctgaaaattttgagaaggtaaaagtttcttaattaaaatatgaacatatttagcttgctttagtgtctggggcaagtcctctcaatggctaaaattaactttagagatccatgtgttcaggtttagatcatatgacactcgagcacagaagaataatttcaaggaggtcatcttgtaaattaaaggtttagaagaattgcataaaacgtagtaaatggggtctgtcattagcaaaggcaaatctaagcaatcatttttccccccagaagttacttagaaggagaactgggaacacttggggtctctctaactgatggcattcacttcacacagtcgtctatgttatccagagatttttatttcattttacattttagggcacagttctttggggctaattaaaatggggtttgcaggctttttatggtgaagaataatatatctctgtctatagctttcccatggtagcctgataaggctgagagagaaaaatatgtgcagtatctcatcctccccctgtaccaggccatagctttgaagtgtattttgtaaattcaactataggttagtcagaatgctgtttttcgttaattaacttagcctgtgttgatatctcctccttcctggtcacattcaaaccttcccagagtacaaaggggtatgtagaaaggattccagaagaagtaatactttattctctaatgttaatagcttttctggatctcttagtagggggaaagtagaaaatcgagtagaatttggcctcaggtcaataaatgatataaaaacatgtgttctatttatgtatatatatgtatgtttctccaaaaagtgataaaaccaaaatatcactgactcatccctacccatattcttttcataaaacccactcaccaggtacaatagaaacttccctccttgtttgtcagcctcctgttcatgttccccacacacctgaaggtggtagaatcttttcagcctcttagccagtgagctaaatatggctaagcacaggtcataagagcacctaaggccagcatataagccaactacagttcacctttccaaatttggtcctatggatgttgagcatagggaagcaactctcagtattttggattattcaagtgtatgtggtaaaaatgcagatgattgctgctttaccccagggtttattagcatcctacttctgctgggctgcatcattatataatgccacaggcatctagtcaaggtaaagaagccagaaaggttaggcaagaagtgagataaaatcagatcacctttgatcaaaatggttggtgaacctccacatgtccagttctgttgccaaactttccattcagagtatttggtggagtttgaatttgagcaaactaaatgccttcatcttaggtagaaagggcctgaatcttccattttatattcaaacctcattgttatttggcctaagtaaaaagtcagatttcatttccatttacctgagttcgctttaaagagcttttcaaagagagctttatagacacccacaattgtccccaatctcttcatgatgttgcattaatagttgtttttgtccctttcttggaaatgttaatgccaaagttgcctgaacattgggcggttttcttaatttgaagtataaaaattataaagagtaattccaaaggtattaaaagattgtttaacagtatgtgtggtgatgtcattatctccagagaggcttcaagaaatcctttggaaataaaaagttaaatgtttacatttcatgtggtatttcaggtcttcaggttctgattagcttacttttttcctttgtctttggctgatttctgctttgtagataaataataatagccctgagatgtttctaacatttaaataagaaaaaaatcaaatcgaagtcagcctgctggaaaagtgatcacatggcagttgcagtaacttgtatggaaagagaaaatgcaatgagcccagttactgcacttgccactaccatgctgtccatggaaggaataatcagcagttcagttgtcacaagccgcccttgaagaaaacgcagcaaaatattttaaaatgaagatattgcagtccccagagccagtgaaggtttcttttggtaaaatgaaattgtgccattgtcaaagtaccccgtagtgatgagcactgactggttcactggccacattttagttcttcataataataggccacaaaagggctctgtggtttgcctccatgtgcactggcccctccccacccctagggggcactcagtagctgctgagaaggcctgtccacgaggctgttggaacccctccaataaatacttagaggtagtgtatctgatgcttgttttcgtggagaaaattgtattggagaacttaaaacatcacgaatatttttaataggatccgcagacacccaaaggagaagcttggtcttttccaggtatttccaacttgagttcaacccaaagcctttgaaaggaatgcattaccacatgaccacatgctgagaccccatggggtctaacacgggacctaagaaagtctctgcagccagatagtacatggtgtctccacaaaactaggcattctggagattgcccagaaagggatgtgaggggaccgttaagatctgtcttgcttatctcatgcactcacattccttcagcctcctggagttcctgataaaaggaagccagggtgttgacattttttagctattgatttcccaatagcttgtggatcagttgtacacccacacttccttctctgcctaattccgtttttctggaaaaagtagtatgcccatgtatgtgtgtttttcttaacacaggtccatgaaagtttggcttcctggtttgatgtctgttgcgtggcctggaaaccagggagcagcaactattgagatggtttctgtgttcagtgaaaaattctatttcattgagacaattttttctttatccacagtaattttttgacactgtcatcatgaaactacccttaggaaaataagattacctgc

SEQ ID NO: 31748 - DNA, 2100 bp, Homo Sapiens
ccggctccccgcactctccgggtccacgcatcgtcctcccgcgcgcccgcccgcccatggccgggaaggtgcggtcactgctgccgccgctgctgctggccgccgcgggcctcgccggcctcctactgctgtgcgtccccacccgcgacgtccgggagccgcccgccctcaagtatggcatcgtcctggacgctggttcttcacacacgtccatgtttatctacaagtggccggcagacaaggagaacgacacaggcattgtgggccagcacagctcctgtgatgttccaggtgggggcatctccagctatgcagacaacccttctggggccagccagagtcttgttggatgcctcgaacaggcgcttcaggatgtgcccaaagagagacacgcgggcacacccctctacctgggagccacagcgggtatgcgcctgctcaacctgaccaatccagaggcctcgaccagtgtgctcatggcagtgactcacacactgacccagtacccctttgacttccggggtgcacgcatcctctcgggccaggaagagggggtgtttggctgggtgactgccaactacctgctggagaacttcatcaagtacggctgggtgggccggtggttccggccacggaaggggacactgggggccatggacctggggggtgcctctacccagatcacttttgagacaaccagtccagctgaggacagagccagcgaggtccagctgcatctctacggccagcactaccgagtctacacccacagcttcctctgctatggccgtgaccaggtcctccagaggctgctggccagcgccctccagacccacggcttccacccctgctggccgaggggcttttccacccaagtgctgctcggggatgtgtaccagtcaccatgcaccatggcccagcggccccagaacttcaacagcagtgccagggtcagcctgtcagggagcagtgacccccacctctgccgagatctggtttctgggctcttcagcttctcctcctgccccttctcccgatgctctttcaatggggtcttccagcccccagtggctgggaactttgtggccttctctgccttcttctacactgtggactttttgcggacttcgatggggctgcccgtggccaccctgcagcagctggaggcagccgcagtgaatgtctgcaaccagacctgggctcagctgcaagctcgggtgccagggcaacgggcccgcctggccgactactgcgccggggccatgttcgtgcagcagctgctgagtcgcggctacggcttcgacgagcgcgccttcggcggcgtgatcttccagaagaaggccgcggacactgcagtgggctgggcgctcggctacatgctgaacctgaccaacctgatccccgccgacccgccggggctgcgcaagggcacagacttcagctcctgggtcgtcctcctgctgctcttcgcctccgcgctcctggctgcgcttgtcctgctgctgcgtcaggtgcactccgccaagctgccaagcaccatttaggggccgacgggggcagctgccccatccctcccccaacccctgtatccccaccccgtactcccacccctcccacaacccctgtacctcccacccctgtatccccacccctccacccacccctctcccaacctctctccccgcccctgtatcctgcattcctccacccaccctctatcccccaccgctccaccccaccactgtcttctccatccttccaccccaccctcagcgtctctgcccctaaggcagcccaggaaataggaactgagactctggtacccacaggagcctgggtgggcaaagagcgctcaatccagctccttgaacccctccagcccgcttcagcctgggcatcactgcaggccccgtgctcctcctcctcctcctcagggctgggtctccagagagtggggccttggtcctgagaatcagcccttagaggctccttctgtgtagtctgggtctgtactggggagggtcacagcccacgggctggcagccagcccagcacctacttgtaaaaattttgtaataaaaagtttttcctagagacgtg

SEQ ID NO: 31749 - DNA, 2022 bp, Homo Sapiens
actcccgagacccccccaccagaaggccatggtctccccacggatgtccgggctcctctcccagactgtgatcctagcgctcattttcctcccccagacacggcccgctggcgtcttcgagctgcagatccactctttcgggccgggtccaggccctggggccccgcggtccccctgcagcgcccggctcccctgccgcctcttcttcagagtctgcctgaagcctgggctctcagaggaggccgccgagtccccgtgcgccctgggcgcggcgctgagtgcgcgcggaccggtctacaccgagcagcccggagcgcccgcgcctgatctcccactgcccgacggcctcttgcaggtgcccttccgggacgcctggcctggcaccttctctttcatcatcgaaacctggagagaggagttaggagaccagattggagggcccgcctggagcctgctggcgcgcgtggctggcaggcggcgcttggcagccggaggcccgtgggcccgggacattcagcgcgcaggcgcctgggagctgcgcttctcgtaccgcgcgcgctgcgagccgcctgccgtcgggaccgcgtgcacgcgcctctgccgtccgcgcagcgccccctcgcggtgcggtccgggactgcgcccctgcgcaccgctcgaggacgaatgtgaggcgccgctggtgtgccgagcaggctgcagccctgagcatggcttctgtgaacagcccggtgaatgccgatgcctagagggctggactggacccctctgcacggtccctgtctccaccagcagctgcctcagccccaggggcccgtcctctgctaccaccggatgccttgtccctgggcctgggccctgtgacgggaacccgtgtgccaatggaggcagctgtagtgagacacccaggtcctttgaatgcacctgcccgcgtgggttctacgggctgcggtgtgaggtgagcggggtgacatgtgcagatggaccctgcttcaacggcggcttgtgtgtcgggggtgcagaccctgactctgcctacatctgccactgcccacccggtttccaaggctccaactgtgagaagagggtggaccggtgcagcctgcagccatgccgcaatggcggactctgcctggacctgggccacgccctgcgctgccgctgccgcgccggcttcgcgggtcctcgctgcgagcacgacctggacgactgcgcgggccgcgcctgcgctaacggcggcacgtgtgtggagggcggcggcgcgcaccgctgctcctgcgcgctgggcttcggcggccgcgactgccgcgagcgcgcggacccgtgcgccgcgcgcccctgtgctcacggcggccgctgctacgcccacttctccggcctcgtctgcgcttgcgctcccggctacatgggagcgcggtgtgagttcccagtgcaccccgacggcgcaagcgccttgcccgcggccccgccgggcctcaggcccggggaccctcagcgctaccttttgcctccggctctgggactgctcgtggccgcgggcgtggccggcgctgcgctcttgctggtccacgtgcgccgccgtggccactcccaggatgctgggtctcgcttgctggctgggaccccggagccgtcagtccacgcactcccggatgcactcaacaacctaaggacgcaggagggttccggggatggtccgagctcgtccgtagattggaatcgccctgaagatgtagaccctcaagggatttatgtcatatctgctccttccatctacgctcgggaggcctgacgcgtctcctccatccgcacctggagtcagagcgtggatttttgtatttgctcggtggtgcccagtctctgccccagaggctttggagttcaatcttgaaggggtgtctgggggaactttactgttgcaagttgtaaataatggttatttatatcctattttttctcaccccatctctctagaaacacctataaaggctattattgtgatcaaaaaaaaaaaaaaaaaaa

SEQ ID NO: 31750 - DNA, 958 bp, Homo Sapiens
gggggcgttctctcgagtccgggccgcaagtcccagacgctgcccatggaggcgtccagcgagccgccgctggatgctaagtccgatgtcaccaaccagcttgtagattttcagtggaaactgggtatggctgtgagctcagacacttgcagatctcttaagtatccttacgttgcagtgatgctaaaagtggcagatcattcaggccaagtaaagaccaagtgctttgaaatgacgattccacagtttcagcctcagctcctggcaacctccagtctcctttctgcttctaatttctacagacagttcaaggaaattgctgcagttattgaaacggtgtgaagacggattctttggttgataaattgctatcattctaaagtcatggacttcactttcggcaacaaaactaaataaggatggaacatttattgaatgaaaaatgcacttttgtttttccatttttttaaataataaaaatcagacaaacaggaactgggtagtggtgatgaatgcaaaactttgtgaatgtgctttataaaagtgataattagacactttagaggatatacttggtgataatgtgaatgatgtaatcagactaacagttgaatcattgctgttggaggcagcacaaatttatgtgttacaacagtagtttaaaaacttgtactggatggaacccattttataaacagtcttatttggagtcatgtatataaaaatatatataaattagaaaagtagtatttgattaggataactttacaaattcaatagtatagccatcacttattataatggcaatcagaagagtgaggcttcttttttcaaacttttgtaatcagattaagattgaccattgctcctttacacagtattagtctagcattcaattatttctgttattaatggttgtagaaagttcaaatacatacgcagagttggaaaaaaaaaa

SEQ ID NO: 31751 - DNA, 958 bp, Homo Sapiens; identical to SEQ ID NO: 31750

SEQ ID NO: 31752 - DNA, 1759 bp, Homo Sapiens
atgcgccaggccgctaggggcaggacgtggaagcggaagcgctggtctgggggcgttctctcgagtccgggccgcaagtcccagacgctgcccatggaggcgtccagcgagccgccgctggatgctaagtccgatgtcaccaaccagcttgtagattttcagtggaaactgggtatggctgtgagctcagacacttgcagatctcttaagtatccttacgttgcagtgatgctaaaagtggcagatcattcaggccaagtaaagaccaagtgctttgaaatgacgattccacagtttcagcctcagctcctggcaacctccagtctcctttctgcttctaatttctacagacagttcaaggaaattgctgcagttattgaaacggtgtgaagacggattctttggttgataaattgctatcattctaaagtcatggacttcactttcggcaacaaaactaaataaggatggaacatttattgaatgaaaaatgcacttttgtttttccatttttttaaataataaaaatcagacaaacaggaactgggtagtggtgatgaatgcaaaactttgtgaatgtgctttataaaagtgataattagacactttagaggatatacttggtgataatgtgaatgatgtaatcagactaacagttgaatcattgctgttggaggcagcacaaatttatgtgttacaacagtagtttaaaaacttgtactggatggaacccattttataaacagtcttatttggagtcatgtatataaaaatatatataaattagaaaagtagtatttgattaggataactttacaaattcaatagtatagccatcacttattataatggcaatcagaagagtgaggcttcttttttcaaacttttgtaatcagattaagattgaccattgctcctttacacagtattagtctagcattcaattatttctgttattaatggttgtagaaagttcaaatacatacgcagagttggaaagacgagttttagtctgagttctgtacgacggagttaacccgttagcacaagttattgcattagatgatctctgttgaatttaaatacataaacctgttgttaaacgcttttatactataaagccaccacattgtatggcatttgtttagaagtaagcaaatagaccaccggaatagaatagatggcctagaaatagatcaagacattctggtccgccatattagaaatttaaaccctcttcacaccctgtctgcatttctgcaggtctgtgtgagtccactttcttttttgttccctgctaggtagcacacagctgtgaggagcccaggactgctgcctgccgcagcccacctgtgcgctcagattcctaccagcttgatgagttagctgatgggccatttgtgcataccaactacccacagacatttctattacccaccctctggatgccagtgcattaatgattctagaattaggagaaaccaaagatcccttctctctccctcccacaaccagtgtcgtcgtgttcctagaaataagagtagaaacccctctatctgggttaaaacagcaaacctgccttctgtaactgtgcatgaggttcctctgtctcccacttacttcggattaacaccttcctctttccccttccctgtttgcagggtagcatttctaggtttaaggcaatatgcaaaaagacccaaagttaggccctggctcaaacactgtgggtagcagatttgaaataaatttaaattgc

SEQ ID NO: 31753 - DNA, 3139 bp, Homo Sapiens
gaccgggcggcggcagcggcggcggcggctgtggcagagtctgtgcctgtggcggtgacggcggcgggagcaagcgctgccctcgcagagcagccttggggtcgccggccgctcgcagcgttgtggaggggcgggccggacgctgagcggagcagctgcgccacgggtggcattgtgtgtcccagagtgccggagcgagtcccagaagagaggcgaggctaagcccagagcgctgggttgcttcagcagggaagactcccttccccctgcttcaggctgctgagcactgagcagggctcagaatggaagccatcgccaaatatgacttcaaagctactgcagacgacgagctgagcttcaaaaggggggacatcctcaaggttttgaacgaagaatgtgatcagaactggtacaaggcagagcttaatggaaaagacggcttcattcccaagaactacatagaaatgaaaccacatccgtttggaaacgatgtgcagcacttcaaggtgctccgagatggagccgggaagtacttcctctgggtggtgaagttcaattctttgaatgagctggtggattatcacagatctacatctgtctccagaaaccagcagatattcctgcgggacatagaacaggtgccacagcagccgacatacgtccaggccctctttgactttgatccccaggaggatggagagctgggcttccgccggggagattttatccatgtcatggataactcagaccccaactggtggaaaggagcttgccacgggcagaccggcatgtttccccgcaattatgtcacccccgtgaaccggaacgtctaagagtcaagaagcaattatttaaagaaagtgaaaaatgtaaaacacatacaaaagaattaaacccacaagctgcctctgacagcagcctgtgagggagtgcagaacacctggccgggtcaccctgtgaccctctcactttggttggaactttagggggtgggagggggcgttggatttaaaaatgccaaaacttacctataaattaagaagagtttttattacaaattttcactgctgctcctctttcccctcctttgtcttttttttcatccttttttctcttctgtccatcagtgcatgacgtttaaggccacgtatagtcctagctgacgccaataataaaaaacaagaaaccaagtgggctggtattctctctatgcaaaatgtctgttttagttggaatgactgaaagaagaacagctgttcctgtgttcttcgtatatacacacaaaaaggagcgggcagggccgctcgatgcctttgctgtttagcttcctccagaggaggggacttgtaggaatctgccttccagcccagacccccagtgtattttgtccaagttcacagtagagtagggtagaaggaaagcatgtctctgcttccatggcttcctgagaaagcccacctgggctgggcgcggtggctcacgcctgtaatcccagcactttgggaggccaaggtgggcggatcacaaggtcaggagttcgagaccaacctagccaacatggtgaaaccccgtctctactaaaaataagaaattagccgggtgtggcacgcacctgtagtcccagctacttgggagcctgaggcaggagaatcgcttgaacctgggaagtggaggttgagtgagccgggaccgtgccattgtactccagcctgggtgacagagcgagattccgtctcaaaaaaaaaaaaaaaaagcccacctgaaagcctgtctctttccactttgttggcccttccagtgggattatcgagcatgttgttttttcatagtgcctttttccttatttcaagggttgcttctgagtggtgttttttttttttttttaatttgttttgttttaaaataagttaaaggcagtccagagcttttcagccaatttgtctcctactctgtgtaaatatttttccctccgggcaggggagccagggtagagcaaaggagacaaagcaggagtggaaggtgaggcgttctcctgcttgtactaagccaggaggctttaagctccagctttaagggttgtgagccccttgggggttcagggaactgcttgcccagggtgcagtgtgagtgtgatgggccaccggggcaagagggaaggtgaccgcccagctctcccacatcccactggatctggcttacaggggggtcggaagcctgtcctcaccgtctcgggggttgtggcccccgccccctccctatatgcacccctggaaccagcaagtcccagacaaggagagcggaggaggaagtcatgggaacgcagcctccagttgtagcaggtttcactattcctatgctggggtacacagtgagagtactcacttttcacttgtcttgctcttagattgggccatggctttcatcctgtgtcccctgacctgtccaggtgagtgtgagggcagcactgggaagctggagtgctgcttgtgcctcccttcccagtgggctgtgttgactgctgctccccacccctaccgatggtcccaggaagcagggagagttggggaaggcaagattggaaagacaggaagaccaaggcctcggcagaactctctgtcttctctccacttctggtcccctgtggtgatgtgcctgtaatctttttctccacccaaaccccttcccacgacaaaaacaagactgcctccctctcttccgggagctggtgacagccttgggcctttcagtcccaaagcggccgatgggagtctccctccgactccagatatgaacagggcccaggcctggagcgtttgctgtgccaggaggcggcagctcttctgggcagagcctgtccccgccttccctcactcttcctcatcctgcttctcttttcctcgcagatgataaaaggaatctggcattctacacctggaccatttgattgttttattttggaattggtgtatatcatgaagccttgctgaactaagttttgtgtgtatatatttaaaaaaaaaatcagtgtttaaataaagacctatgtacttaatcctttaactctgcggatagcatttggtaggtagtgattaactgtgaataataaatacacaatgaattcttcaaaaaaaaaaaaaaa

SEQ ID NO: 31754 - DNA, 1841 bp, Homo Sapiens
gcgccctggagaacgcgtcggggctgagccggggtccagcagccgccgctatggacatcccgccgctggccggcaagatcgcggcgctgtcgctgagcgccctcccggtgtcctacgcgctcaaccacgtctcggcgctctcgcaccccctgtgggtggcattgatgagcgccctaatcctgggtctgcttttcgtggcggtctacagcttgtcccatggcgaggtctcctatgacccactctatgctgtcttcgctgtcttcgccttcacctcggttgtggacctcatcatcgctcttcaggaagacagctatgtggtgggcttcatggagttctacaccaaggaggtacttgggggacgaccagggagccccctaccgcactgcccgtctgagtctcccacctgcccccacagggagagccatacctgcgcacagcgcacggagtcttcatctgctactgggatggcactgttcactacctcctctacctggccatggccggcgccatctgcagaaggtgcaggaggcagggagagggtggcccctgaccctgggagagaagttgcatcctcagatggggtcccagggcagggtggagccagaagtgtctgtaggagaaatcaggacgcctctctagggctccagccaggggtggccaggagaaggttccagggaacgtctcaggtgtaggtggtggcctagcattgcttacatccaccctgtgcctgggcagccacttctgttcttggacagagggtctcactgttatttccccgttcaactccctgttgtcccttccatcctgggcaaaactgaaagggacccggagctgggaaacccacggtggtctccaggccctggctggggctctgagattacggagtgactacctgctggtcacccctccatcccctgctcaggaagagataccggaattttggactctactggctgggttccttcgccatgagcatcctggtgttccttacaggaaacattcttggtgcaagaggaacaaagaaagggactcctgcagcgtccggctgacctggcccttgtcatatatctcatccttgctggcttcttcactctgttccggggcctggtggtgcttgattgccccacagatgcctgctttgtctatatctaccagtatgagccatacctgcgggaccctgtggcctaccctaaggtgcagatgctgatgtacatgttttatgtcctgcctttctgcggcctggctgcctatgctctcaccttccctggttgctcctggcttccagactgggccttggtgtttgctggaggcatcggccaggcacagttctcgcacatgggggcttccatgcacctgcgcacacccttcacctaccgtgtgcctgaggacacctggggctgcttcttcgtgtgcaatctgctgtatgcgctgggcccccacctgctggcctaccgttgccttcagtggcccgcattcttccaccagccaccaccctccgaccccctagccctccacaagaagcagcattgagagagctgtggactcaggacccaggactctgtttacgtgcccagtcagccctacctggggaagcgggggttgggtgttttagagacaggagggacatctccgggtgtctttagtcttggctatggtagtttcagtccagtgggtgggatggagaccaacgaccaagtgttcctgcaaggagagcctcccacagctgtcaccatgctccaactcccacacaaacgcttctaccccttccagaacttacccatcatccccccatggatcctttcagtaaaaaccctttcaatttccaaaataaaaaaaaaaaa

SEQ ID NO: 31755 - DNA, 1836 bp, Homo Sapiens
ggcggcggcgggcaggcggcaccatgcggcgggcgctcggaacgctgggctgctgcctggcgctgctcctcccgctgctgcccgcggcgcgcggggtcccgcaccgccatcgccggcagccgctgggcagcggcctggggaggcacggagcggcagacactgcctgcaagaaccgtcccctcgacctcgtcttcatcatcgacagctcccgcagcgtccgacctgaagagtttgagaaagtgaaaatctttctgtcaaaaatgatcgatactctggatgttggtgaaagaacaacccgcgtggcagtcatgaattacgccagcaccgtcaaggtagagtttcccctccggacctactttgataaagcctccatgaaggaggccgtgtctcgcattcagcccctgtctgctggcaccatgactggccttgccatccaagctgccatggacgaagtcttcactgaggagatgggtacccggccagccaacttcaatatccccaaggtggtcattattgtgacagatggacggccacaagaccaggttgaaaacgtggcagcaaacgcccgcacggctggcattgagatctacgcagtgggggtaggccgtgctgacatgcagtccctgaggataatggccagcgagccgctggatgaacacgtcttttatgtggagacctacggtgtgatcgagaagctgacatccaagttccgagagacgttctgtgctgcaaatacatgtgcacttgggacccatgactgtgagcaggtctgcgtgagtaacgatggatcctacctctgtgattgctatgaaggctacactctgaatccagataagagaacttgctcagctgtggatgtgtgtgcacctgggaggcatgaatgcgatcagatctgtgtgagtaacaacggatcctatgtctgtgaatgctttgaaggctacaccctgaatccagataagaagacttgctcagccatggacgtgtgtgcacctggaaggcatgattgtgcccaagtctgtcggagaaacggtggatcttacagctgtgactgctttgagggattcactctgaatccagacaagaagacttgctcagccgttgatgtgtgtgcacctggaaggcacgactgtgagcaggtctgtgtgagagatgatctgttctatacatgcgattgctatcaaggctacgtcctgaatccagacaagaagacttgctcaagagccacaacaagcagtcttgtgacagatgaagaggcctgtaagtgtgaagccatagctgcattgcaggattcagtcacctcacgcctcgaagctctgtccacaaaactagatgaagtgtctcagaagctgcaagcctatcaagacagacagcaggttgtctgagccagcgttctactcaccttccaaatgatctttcataagcaattgttttcattgtgttcagcaagctttattttgttgcgcagcttacagaagagcagttggttgttattcttggcaagtgtcaagaagacttcaggaagacaacagcgctgaaagtacagtgaccctgaggatcttcatgtacgttcattttgtaaccataaagccacctatacctgctttggtctgtactgcaaggagtacagcaggtatttctgttctgcagtaactgcgtttttattgtcttatttaaaagaaatacaggtataaaaatgaatgggtacagtattcgctcatataaagctgtgaaatggcaaggcagagtaaaagtgtgcctatggaatctgtccattaaaagggaaattaatttggggtcttgtaacttattttggtaaaataaagtatgatcaagcac

SEQ ID NO: 31756 - DNA, 2401 bp, Homo Sapiens
ccccccctcgccggggaccgagcgcgctcgctccggcgccggcctcgcctcctcgcagcagcgccatggatgagttccacccgttcatcgaggccctgctgcctcacgtccgcgccttcgcctacacctggttcaacctgcaggcgcggaagcgcaagtacttcaagaagcacgagaagcggatgtcgaaggacgaggagcgtgcggtcaaggacgagctgctgggcgagaagcccgaggtcaagcagaagtgggcgtcgcggctgctggccaagctgcgcaaggacatccggcccgagtgccgcgaggacttcgtgctgagcatcaccggcaagaaggcgccgggctgcgtgctctccaaccccgaccagaagggcaagatgcggcgcatcgactgtctccggcaggcggacaaggtgtggcggctggacctggtcatggtcatcctgttcaagggcatcccgctggagagcaccgacggcgagcgcctggtcaaggctgcgcagtgcggtcacccggtcctgtgcgtgcagccgcaccacattggcgtggccgtcaaggagctggacctctacctggcctacttcgtgcgtgagcgagatgcagagcaaagcggcagtccccggacagggatgggctctgaccaggaggacagcaagcccatcacgctggacacgaccgacttccaggagagctttgtcacctccggcgtgttcagcgtcactgagctcatccaagtgtcccggacacccgtggtgactggaacaggacccaacttctccctgggggagctgcaggggcacctggcatacgacctgaacccagccagcactggcctcagaagaacgctgcccagcacctcctccagtgggagcaagcggcacaaatcgggctcgatggaggaagacgtggacacgagccctggcggcgattactacacttcgcccagctcgcccacgagtagcagccgcaactggacggaggacatggaaggaggcatctcgtccccggtgaagaagacagagatggacaagtcaccattcaacagcccgtccccccaggactctccccgcctctccagcttcacccagcaccaccggcccgtcatcgccgtgcacagcgggatcgcccggagcccacacccgtcctccgctctgcatttccctacgacgtccatcctaccccagacggcctccacctacttcccccacacggccatccgctacccacctcatctcaacccccaggacccgctcaaagatcttgtctcgctggcctgcgacccagccagccagcaacctggaccgttaaatggaagtggtcagctcaaaatgcccagccactgcctttctgctcagatgctggcacctccgcccccggggctgccacggctggcgctcccccctgccaccaaacccgccaccacctccgagggaggagccacgtcgccgacctcgccttcctactctccgcccgacacgtcccctgcaaaccgttcctttgtgggattaggaccaagggatcctgcgggcatttatcaggcacagtcctggtatctgggatagcaaaggtcttcttccctcgccccttctccatcgtcccaggaatcccagggggcagcacagccggcccccggcccacgttttcggtggaaaattagagtgaacaagaacacccctgccgactcccagcccggccaaaaagacaaaacacatagacgcacacactcaggaggaaaagaaaaaacaaaggcagaagaagaagaagaagaaataaaaacccacccaagcaagaagacaaaaggtaaagacgcaacgtttccaactctcgggacgccaaggccgcaggactggagggccaggccccgccacccccacgggagacccgggacagggcgtcttcctaagttattcatctcctctccgcctgctgctcgggaaggacagacgccggccgcccgcccgcgccccggaggccctggctctgtccggagaccaggtgagcacagcctggagcctgtgcccagggccgacaggcgcgacacccagcaaggccacctctccccgggcccccgcgcctctgccggacacggaccggcccctcagcccccaccgaggacgcagccactggggggaaagggagacacagcggaccccggccgggcagcggagaccgcagaggcgggcagggtggggcaggcgagtggtgtcgcgggggtgcgtggcgcttgcgagccctggccaggggaggaagtgaggcccaggcacctgctgcccctcgagggggccctgcctgccgcggggcctccccacaagcccctcccaaagcgccggccgactcgctgtctcgctggggactctttcagccctcgcgcccgcccgtttgggaggagaagtctcta

SEQ ID NO: 31757 - DNA, 1617 bp, Homo Sapiens; identical to SEQ ID NO: 23635

SEQ ID NO: 31758 - DNA, 732 bp, Homo Sapiens
ggcagcaacagagttgcaggtgtaaaataacgggaaggcgggatgcgtggctaaattgctctgcgtgcacaaagagtaggagagcccagagttccagaatgcccctaattccgaacaccacagggtgagtctggagcaagtcacctgggagggcttacaggtgccataatgaaggcctggggcactgtggtagtgaccttggccacgctgatggttgtcactgtggatgccaagatctatgaactctgcgagctggcggcaagactggagagagcagggctgaacggctacaagggctacggcgttggagactggctgtgcatggctcattatgagagtggctttgacaccgccttcgtggaccacaatcctgatggcagcagtgaatatggcattttccaactgaattctgcctggtggtgtgacaatggcattacacccaccaagaacctctgccacatggattgtcatgacctgctcaatcgccatattctggatgacatcaggtgtgccaagcagattgtgtcctcacagaatgggctttctgcctggacttcttggaggctacactgttctggccatgatttatctgaatggctcaaggggtgtgatatgcatgtgaaaattgatccaaaaattcatccatgactcagattcgaagagacagattttatcttcctttcatttctttctcttgtgcatttaataaaggatggtatctataaacaatgc

SEQ ID NO: 31759 - DNA, 5054 bp, Homo Sapiens
aaaaagtacagagtccagggaaagacttgcttgtaactttatgaattctggatttttttttttcctttgctttttcttaactttcactaagggttactgtagtctgatgtgtccttcccaaggccacgaaatttgacaagctgcacttttcttttgctcaatgatttctgctttaagccaaagaactgcctataatttcactaagaatgtcttctaattcagatactggggatttacaagagtctttaaagcacggacttacacctattggtgctgggcttccggaccgacacggatcccccatccccgcccgcggtcgccttgtcatgctgcccaaagtggagacggaagccctgggactggctcgatcgcatggggaacagggccagatgccggaaaacatgcaagtgtctcaatttaaaatggtgaattactcctatgatgaagatctggaagagctttgtcccgtgtgtggagataaagtgtctgggtaccattatgggctcctcacctgtgaaagctgcaagggattttttaagcgaacagtccaaaataataaaaggtacacatgtatagaaaaccagaactgccaaattgacaaaacacagagaaagcgttgtccttactgtcgttttcaaaaatgtctaagtgttggaatgaagctagaagctgtaagggccgaccgaatgcgtggaggaaggaataagtttgggccaatgtacaagagagacagggccctgaagcaacagaaaaaagccctcatccgagccaatggacttaagctagaagccatgtctcaggtgatccaagctatgccctctgacctgaccatttcctctgcaattcaaaacatccactctgcctccaaaggcctacctctgaaccatgctgccttgcctcctacagactatgacagaagtccctttgtaacatcccccattagcatgacaatgccccctcacggcagcctgcaaggttaccaaacatatggccactttcctagccgggccatcaagtctgagtacccagacccctataccagctcacccgagtccataatgggctattcatatatggatagttaccagacgagctctccagcaagcatcccacatctgatactggaacttttgaagtgtgagccagatgagcctcaagtccaggctaaaatcatggcctatttgcagcaagagcaggctaaccgaagcaagcacgaaaagctgagcacctttgggcttatgtgcaaaatggcagatcaaactctcttctccattgtcgagtgggccaggagtagtatcttcttcagagaacttaaggttgatgaccaaatgaagctgcttcagaactgctggagtgagctcttaatcctcgaccacatttaccgacaagtggtacatggaaaggaaggatccatcttcctggttactgggcaacaagtggactattccataatagcatcacaagccggagccaccctcaacaacctcatgagtcatgcacaggagttagtggcaaaacttcgttctctccagtttgatcaacgagagttcgtatgtctgaaattcttggtgctctttagtttagatgtcaaaaaccttgaaaacttccagctggtagaaggtgtccaggaacaagtcaatgccgccctgctggactacacaatgtgtaactacccgcagcagacagagaaatttggacagctacttcttcgactacccgaaatccgggccatcagtatgcaggctgaagaatacctctactacaagcacctgaacggggatgtgccctataataaccttctcattgaaatgttgcatgccaaaagagcataagttacaacccctaggagctctgctttcaaaacaaaaagagattgggggagtggggagggggaagaagaacaggaagaaaaaaagtactctgaactgctccaagtaacgctaattaaaaacttgctttaaagatattgaatttaaaaaggcataataatcaaatacttaatagcaaataaatgatgtatcagggtatttgtattgcaaactgtgaatcaaaggcttcacagccccagaggattccatataaaagacattgtaatggagtggattgaactcacagatggataccaacacggtcagaagaaaaacggacagaacggttcttgtatatttaaactgatctccactatgaagaaatttaggaactaatcttattaattaggcttatacagcgggggatttgagcttacaggattcctccatggtaaagctgaactgaaacaattctcaagaatgcatcagctgtacctacaatagcccctccctcttcctttgaaggccccagcacctctgccctgtggtcaccgaatctgtactaaggacctgtgttcagccacacccagtggtagctccaccaaatcatgaacagcctaattttgagtgtctgtgtcttagacctgcaaacagctaataggaaattctattaatatgttagcttgccattttaaatatgttctgagggttgttttgtctcgtgttcatgatgttaagaaaatgcaggcagtatccctcatcttatgtaagtgtgaattaatattaagggaaatgactacaaactttcaaagcaaatgctccatagctaaagcaacttagaccttatttctgctactgttgctgaaatgtggctttggcattgttggatttcataaaaaatttctggcaggaagtcttgttagtatacatcagtctttttcatcatccaagtttgtagttcatttaaaaatacaacattaaacacattttgctaggatgtcaaatagtcacagttctaagtagttggaaacaaaattgacgcatgttaatctatgcaaagagaaaggaaaggatgaggtgatgtattgactcaaggttcattcttgctgcaattgaacatcctcaagagttgggatggaaatggtgatttttacatgtgtcctggaaagatattaaagtaattcaaatcttccccaaaggggaaaggaagagagtgatactgacctttttaagtcatagaccaaagtctgctgtagaacaaatatgggaggacaaagaatcgcaaattcttcaaatgactattatcagtattattaacatgcgatgccacaggtatgaaagtcttgccttatttcacaattttaaaaggtagctgtgcagatgtggatcaacatttgtttaaaataaagtattaatactttaaagtcaaataagatatagtgtttacattctttaggtcctgaggggcagggggatctgtgatataacaaaatagcaaaagcggtaatttccttaatgttatttttctgattggtaattatttttaacagtacttaattattctatgtcgtgagacactaaaatcaaaaacgggaatctcatttagactttaatttttttgagattatcggcggcacaatcactttgtagaaactgtaaaaaataaaagtatctcctagtcccttaattttttcataaatatttctggcttttgagtagtgtatttatattgtatatcatactttcaactgtagacaattatgatgctaatttattgtttcttggtttcacctttgtataagatatagccaagactgaagaaaccaaatatatgtgtttactgtagcatgtcttcaaattagtggaacttagttcagggacatagaagagtcttaatgaattaaaatcattcacttgattaaatgtctgtaaatcttcatcattcctactgtagtttatttaatatctattgtaaattatgtgacttgtagcttcctctggttttcaagtaaactcaacaaggtggagtcttacctggttttcctttccaagcattgtaaattgtataccaaagatattagttattacttctgtgtgtacaaagaggattattttattatgtttattaatcacctctaatactcatccacatgaagggtacacattaggtaagctgggcgttgactcatgcgcagtctcagtcacccgtgttatcttcgtggctcaaaggacaatgcaaaatcgccgatcagagctcatacccaaagcattacagagaacagcagcatcattgccctccccagctgaaaaacaagttggctagaagatacatggagaggaatggtgtggtcaacagttaatgaaacggttctatcatgcatgtgtaatgtggatggagacaattataagatttgactataactatttggagggtctttaacattgccaaaaaaacaaatatgttgatttttattttattttattttttattttaagaggcgggatcttgatctcacatgttgcccaggctggccttgaactcctgggctcaagcattcctcctgcctcagcctcccccatagctgggactaggggtgcatgccagcatacctggctacgttgactcttaaaatctatgttctcttattttaaagatacagtgctccccactgaaaattaaacctaaaaaatgtcacatattggtatgttgttaacctggtagattaaatcatgagaatgattagaaagacgggcaacacagcgggttacatccacactgctgatcacaccaacgacaggagctgataagcaagaaagcgtcacagccagcgtctgttcacccaaggttgacaagtgaagtttctctaatgttgattgttagccgatttgtaacctggcatttacttagcaactgccttatcaattacaggatttgccggtaaaagcagactcaaatataaaggtttttggcttaacttggtttattatagttgctctatgtttgtaaacagacaatctctaatgtctgattatttgtatcacagatctgcagctgccttggacttgaatccatgcaatgtttagagtgtgaagtcagttacttgttgatgttttcttactgtatcaatgaaatacatattgtcatgtcagttcttgccaggaacttctcaacaaaatggaattttttttttcagtatttcaataaatattgatatgcccagcctgataatttttaaaaaaaaaaaa

SEQ ID NO: 31760 - DNA, 1224 bp, Homo Sapiens
cgcgcgtcgggaagatggcgctacgtctgctccggagggcggcgcgcggagctgcggcggcggcgctgctgaggctgaaagcgtctctagcagctgatatccccagacttggatatagttcctcatcccatcacaagtacatcccccggagggcagtgctttatgtacctggaaatgatgaaaagaaaataaagaagattccatccctgaatgtagattgtgcagtgctcgactgtgaggatggagtggctgcaaacaaaaagaatgaagctcgactgagaattgtaaaaactcttgaagacattgatctgggccctactgaaaaatgtgtgagagtcaactcagtttccagtggtctggcggaagaagacctagagacccttttgcaatcccgggtccttccttccagcctgatgctaccaaaggtggaaagtcctgaagaaatccagtggtttgcagacaaattttcattccacttaaaaggccgaaaacttgaacaaccaatgaatttaatcccttttgtggaaactgcaatgggtttgctcaattttaaggcagtgtgtgaagaaaccctgaaggtcgggcctcaagtaggtctctttctagatgcagtcgtttttggaggagaagactttcgagccagcataggtgcaacaagtagtaaagaaaccctggatattctctacgcccggcaaaagattgttgtcatagcgaaagcctttggtctccaagccatagatctggtgtacattgactttcgagatggagctgggctgcttagacagtcacgagaaggagccgccatgggcttcactggtaagcaggtgattcaccctaaccaaattgccgtggtccaggagcagttttctccttcccctgaaaaaattaagtgggctgaagaactgattgctgcctttaaagaacatcaacaattaggaaagggggcctttactttccaagggagtatgatcgacatgccattactgaagcaggcccagaacactgttacgcttgccacctccatcaaggaaaaatgatctgttaaatgaagctgtcatcaggctaaagggtattgaagctgcagagggatcaacttgtgcttgccagaggacgccaatgaagtttgaaacaccaacaatcagagattttgtttctgttcctcattaaatcatgagcttttgtgccgagaaaaaaaaaaaaaaaaaaaaaaaaaaaaaaaaaaaa

SEQ ID NO: 31761 - DNA, 6972 bp, Homo Sapiens
tgaactgaggcgaactccgccgccaagtgagtgaggaggaggaggaggagaaggaggaggaggaagaggaggagcgcagtcggagcgcggcggcagcggcagaggcgccgcggcggggaccagcccagagagaccccccgagcccgcggcacaggcggcggcggcgctgagcgggctcgaccagccgagcgagcggcggccccggctcctcctcgtccggcgccagcagcccgcgccccgcgcccgcactcggccagccgagacccgcctcccgcccgcccgccggcctcgtgagggacgcgccgagccgggcggccgagagcggcggcggctgggagcgcgtcgggcccgggcggaaagtgcctgcggggggcgggcgagcgcgcggtgccggccgccccggggctcggcgcgggagccagagcgggagccggcgcggagcgggacgccgggtcccgagcggcccgcggccggggctcgcccccgcccctccctcctctccggcggcggcggcggcggcggcgggcggagtgagctgcggagcctggaatatggtcggggaaatggaaacgaaggagaagccgaagcccaccccagattacctgatgcagctgatgaacgacaagaagctcatgagcagcctgcccaacttctgcgggatcttcaaccacctcgagcggctgctggacgaagaaattagcagagtacggaaagacatgtacaatgacacattaaatggcagtacagagaaaaggagtgcagaattgcctgatgctgtgggacctattgttcagttacaagagaaactttatgtgcctgtaaaagaatacccagattttaattttgttgggagaatccttggacctagaggacttacagccaaacaacttgaagcagaaaccggatgtaaaatcatggtccgaggcaaaggctcaatgagggataaaaaaaaggaggagcaaaatagaggcaagcccaattgggagcatctaaatgaagatttacatgtactaatcactgtggaagatgctcagaacagagcagaaatcaaattgaagagagcagttgaagaagtgaagaaattattggtacctgcagcagaaggagaagacagcctgaagaagatgcagctgatggagcttgcgattctgaatggcacctacagagatgccaacattaaatcaccagcccttgccttttctcttgcagcaacagcccaggctgctccaaggatcattactgggcctgcgccggttctcccaccagctgccctgcgtactcctacgccagctggccctaccataatgcctttgatcagacaaatacagaccgctgtcatgccaaacggaactcctcacccaactgctgcaatagttcctccagggcccgaagctggtttaatctatacaccctatgagtacccctacacattggcaccagctacatcaatccttgagtatcctattgaacctagtggtgtattagagtggattgaaatgccagtcatgcctgatatttcagcccattgacttgctggatgaaggactagaatacagcagctgttataacacgaccagtcaatgtggaacaaactgtttctgtgcaacccctttgttttaccagacaaaatttgaatactttttttcctgaattgtatatgaccttggtgctgcatgcatgctgttgacttttaggactttgatcttttaaggttttttttccccagcattaatattgatttataaagatttgaaaatctttaatgaactggagaacactaagatttaaactcgaaaattcgttgttcaagtaaagaaagccatgatgctctgtatgttatctgtgtgtgtgcatgcactcaggtgccctttgtttcatgaacaaatacatttcattgtacatgttttctgtttaaatcattgtataaagtaattgcaggtcagaattataccacagaactgtttatgagaggcttgtgtctgttgcacatttcttgaagcatttttaaaataacatgtaacctgtaaccttgttgtttaagttttcttttctattaatactctgtcctgtggtcccgtgcatgctccttttcccagaactcctctctgctgcacccacagcatctgttcccgaggagttatgactcttgacttcctgcagggctggggctcttagccaccagctgctgttccagcactttcagcgcaagatctccctgattttgccacgtggaattgtacttgtatatgattaccttatctaaaatgaataagaggtgatggaccagtttactgcttagaaatagcaagaggcactgcagtaaaacttgtttctcattgtaaagcttcatgtcttttgtttgttggaaaatttttacttatagaaacttaattattagactggtaaaataaagaccaaaatatgcagatttctaattggcattcataaggtgaataataataagtgcccaatgaaaaaatctattatggttaatttcatttcttgctttgccacctaagcagtaaaacatgatattgaccacttggagaactcagaaaattattttaaatttctaagttataataaatttgcacacagataacatgcatgctatttatgtcacatctcacattaaattattttaaaataagcagtgcccttcaaaacagatgcagacatgtgtgttggtagtagtgaggagattggtattagcatcaagtcttcattgatgactaatttttaattcccttccttttatctttaggtatggctttcccaacgaaaggctaagaattcaagaacggtcttaactgaaccctcatcagatctgaatttaacaaatgcttagtctcagcagcctccgggggaaaaaagcttagcctagcagtcagtgacttacttgcactttttgcacatagatataaagtaaaattatgttattaatttggtttagtctgtaatattacacagtaatggtaatttataaaggagtgtatagtagtatactgactgctaagtgtactatactgtttgctttactaatcacctaattcattgcagttcatacttattgactcagagtttaaaaccacaatctgtaggctttaagaattgcttttaaacctttttaagtgataaactcttgaagtggtcttaaggttagcaaataattgtctgtattaaacatggcgttatttaagtagtcctgctgcaagaaaggcacttcagtgaatatgtgactagtaaagcttaaatatgtttggatctaatagagctcatgaaatactgtaacttggggattgtaaatgaatggatacaataggttaaggcccaagatgtttgaaatgaatgcaatattaatagatgcatatatacatgacatattgtggttaattttaaaactactgtgccttaacgtgtttcttaaacttttgtagtaaatgaacatttgaaatccattttgataaacctgctgttaatgttttttccccccttgtgaatgttttctaactttgtcttggtaattgcaatttaactaggtgcggtggctactaaagttcgaaggcacgatatgcgtgtccatccttaccaaaggattgtgaccgcagaccgaggttagtttagttctgcagttcttgtctataagaaatgcgttgggtgtccataaaatttgcaacaccacacctgatggaaaaatgtaattgcttacctgcacacagttttttttccttttctaaatttgtttgtgatcattgacagatttaagggttgggttttttgttttggtttggttttttctcccttcatattttaacttattaaatcttctattattatgtactatgatttattcctactaaaacataaattagtcaatttggggagctattaaattttgatgttgcctcagttattttcattaataacttttgctaaaatttaccttttaaaagttctgaaatttggggttggtattgcaaaatgaattgaacggatggtgctttaatgagagaagtaaaggaatatatgcctcctgtgtacttttggagaaaactgaagatttagtttccatttttctttataataaaatatttgagccactgtataaacatgagggtgcacatgtcaagtacttagctaaaatcaacaaagtgaggactgtgaagataactttcatgtagttggatttttttatataaattagagcgtcaattcccttttattcttacattctcttgccaaaatggatcctttgatttttgtcatttgctgctaaaatatattatctgaaggtaaactgtctcttgaagttctgtggtggtatgagatccagctgtgtgaatataatttttgactaacctgtgactggaaaataagtcttcatttttctcctttacaacttttataatttgtgtcctgtatatgcccttggacccttttataaattatttttgcttattgaggaatggtattttcggtttattgacattgaattgttttctaagtttttccatcacaagataggaatatcaagcatggtagtaaaaaaggattttttacaagtttctattatggcacatttgtttcctacaaattaaattgatcaaagtctcaaatattagtggaggaaaaagtgctggatttgtacttcaattgtacatcttctatgaatttatgaaggacctacctgctttatgtgattaccttgagtactgatgataaatactagacacagctgttgtccacatcagaaataacatgcctttcccaaagacattgttaatatttgtttagcataatccataaagaacgttgaagacttttaaactaatgtattcatcactaacagtgattgttcagtgaacaaaatagaccccagctccgtggtcgtctatgaggatggtattccttgtaagtgttctgtatgagcacgtctcatagggatggggaagttttttggaaagtcacttgagttttaaagaaactggacaattccatgaataatttgaggttttattcatattgctaatgtctacaattgttctaaagagtattttaaagtagtttttttcccccagctaatctttccctatgtatgcccccttttaggagatttctcaccattttgctttaacacaataattattggcctacttaatactccagtgccttgagatagttggacatattttaggaagattttattgtatttggaaaattacgacacattccatgcatggatcttttgtagttacgtgttttgattagtcctgtcactgtttttatttaaaatgcagtgtcagcaaaccgaaatgctcatttcttttttagtaacagagtactcgtatacttatcactgtatgcactcattgggtctaagggagatgtctgaagtccttcacttaaattattttatgatactactgttttctctatttttgaggttaaaattattttaaaaaaatattttgaagagaagtttattagtataagcattcatttaatgcaaaaaaactcagcccttggacatataaccatgtaattctatatgaacgtttagagtactacatggttgaccaatatctagttctttactaaaagtaaactcacctctttatatatatttcaaaactgaatttgaagcctattagagaccaactgaccttttagttgtaatgaactgtatggtcttgcatggtgacacacctgtgtaggaggccaagacttggcagaggatgtagtctaggtgtcctggtatatataaatggtcactcacttcgtttatatattccacactcagaaaagaagtcagagttttttctgagtaatacaaaaaccatcacttacataatttgtataagaaactttaaacagttttaatcaaaactatgagtaacatcaaaaatgctttaagattctatattttggaatacctgtgaagtagtatgactacatcatgttaaatatttattttcttctatgattttggagcagcaatttttattttaaataaaattccacttttaagaaattcagggaagatttggtcacattgaagatacagtatttttgtagtatttataaactgttctaaatgatagactatagaaaacatttttgtcatatgaaggtaaatcagtccattattttggatcatttaaactgaacattacaccttctgggctttgatttatgaagtggcacagaatctaactttgcactgaatatcttttcattcacatctcctctgccttagtcacaatggcaacagtacagaaaattctatcaaacctcagaatatagtagaaataattaagctgttgaatgagtcttaaaaattatactactgttaagtggaccaagtttggtgaagcagaatgtgacaaaggttgattaaggaaggaacaactcaaggacattgggaatgataacttttccacttgagaactactttatgttttactgtaatttttaaagtttttttgtcctttttgttattttgcaaaagaaaatagtatttacaggtggcttcttttaaaatataaaaatataaagcaggaatgtatatgaaatgtcagattttattgtatttgcagagtattagctttgaaattgaataaagaaagctgtttgtagttttaaaatgccttattggtatcaattagaaatttcttctattttttgatgtacttagagctttttgagtgtagaattttaaatggcaggattttacagtgtttacatgcaagtgcattttataagtgttctatatgtgtaaaatagtattttcaactggaaagtgttggctagtgcaaaaggcctggccattttctggttcccatgatgttgcctacactgctagactacagtttagtatcgctttgtatcatgaggccaagaaattccatgttgtttgtaaatagaataattgaaaaagcaataaacatttattgaacaaaagaaaaaaaaaaa

SEQ ID NO: 31762 - DNA, 5770 bp, Homo Sapiens
gtctactcagcccggtggctgtcgcgcgtggaatcgcgtaagaaaagccgagtttgtggctggggagagaaggccaccgtgctgagctggatttagcgaagactggttttggggaccggagagcccaggactccctttgttggagttttgcccacgcgttgtaattaagcctcgcacaatatggttgatgataattagaagcatgctttccactgaacttcccgacaacatttgttatgcagaatgtctctgagtgagaactcggtttttgcctatgaatcttctgtgcatagcaccaatgttttactcagccttaatgaccagcggaagaaagatgtgctgtgcgatgtcaccatctttgtggagggacagcggttccgcgctcaccggtccgtgctggcggcatgcagcagttacttccactcaagaatcgtaggccaggctgatggagagctgaacattactcttccagaagaggtgacagttaaaggatttgaacctttaattcagtttgcctacactgctaaactgattttaagtaaagagaatgtggatgaagtgtgcaaatgtgtggagtttttaagtgtacataatattgaggaatcctgctttcagtttctgaaatttaagtttttggactccactgcagaccagcaagaatgcccaagaaaaaaatgcttttcatcacactgtcagaaaacagaccttaaactttcacttttggaccagagggatctagaaactgatgaagtggaggaatttctggaaaataaaaatgttcagactcctcagtgtaaactccgcaggtatcaaggaaatgcaaaagcctcacctcctctacaagacagtgccagtcagacatatgagtccatgtgcttagagaaggatgctgctctggccttgccttctttatgccccaaatacagaaaattccaaaaagcatttggaactgacagagtccgtactggggaatctagtgtcaaagacattcatgcttctgttcagccaaatgaaaggtctgaaaatgaatgcctgggaggagtcccggagtgtagagatttgcaggtgatgttaaaatgtgacgaaagtaaattagcaatggaacctgaagaaacgaagaaagatcctgcttctcagtgcccaactgaaaaatcagaagtgactcctttcccccacaattcttccatagaccctcatggactttattctttgtctcttttacacacatatgaccaatatggtgacttgaattttgctggtatgcaaaacacaacagtgttaacagaaaagcctttgtcaggtacagacgtccaagaaaaaacatttggtgaaagtcaggatttacctttgaaatccgacttgggcaccagggaagatagtagtgttgcatctagtgataggagtagtgtggagcgagaagtggcagaacacctagcaaaaggcttctggagtgacatttgcagcacggacactccttgccaaatgcagttatcacctgctgtggccaaagatggctcagaacagatctcacagaaacggtctgagtgtccgtggttaggtatcaggattagtgagagcccagaaccaggtcaaaggactttcacaacattaagttctgtcaactgcccttttataagtactctgagtactgaaggctgttcaagcaatttggaaattggaaacgatgattatgtttcagaaccccagcaagaaccttgcccatatgcttgtgtcattagcttgggagacgactctgagacggacaccgaaggagacagtgaatcctgttcagccagagaacaagaatgtgaggtaaaactgccattcaatgcacaacggataatttcactgtctcgaaatgattttcagtccttgttgaaaatgcacaagcttactccagaacagctggattgtatccatgatattcgaagaagaagtaaaaacagaattgctgcacagcgctgtcgcaagagaaaacttgactgtatacagaatcttgaatcagaaattgagaagctgcaaagtgaaaaggagagcttgttgaaggaaagagatcacattttgtcaactctgggtgagacaaagcagaacctaactggactttgccagaaagtttgtaaagaagcagctctgagtcaagaacaaatacagatactcgccaagtactcagctgcagattgcccactttcatttttaatttctgaaaaagataaaagtactcctgatggtgaactggcgttaccatcaattttcagtttatctgaccggcctccagcagtgctgcctccctgtgccagaggaaacagtgagcctggctacgcgcgagggcaggagtcccagcagatgtccacagccacctctgagcaagctgggcctgcggaacagtgtcgtcagagtggtgggatctcagatttctgtcagcagatgactgataaatgtactactgatgagtaaacttgcattcacttccttcaaaccatctaattttctcctgaagttttggcagcgtcttgaaagcctaatatgaccatctgttgctcaacaatactgtttttttcctttagtagtttaccataagggaatttcctttaagtcaaccatgatttctccttgatttctacaagagacaaagaaatgattttgcctcctggatatcagaaaaatccatgtgaaaatgtagtaaacctttaaaactcatgttttaaagaataataactctagtaataactcttcctgctattcagaataagtaggagaatgaaaactgcagcatatcagacagcaatttaacagcttgaaacatctacagatagttcctactaaaagaagtggcctgcagaagtttaataatttgacttttttctaatattttagtttgaaagaaaatttcttcccaagcaatgctaatagagttctattcttagaagcagggtgtcagctactgggaatatttttgtagagctgcattgtgaaaaaaagatggtcttacctgaatcttagggctttgttcttcggctcctaaaatcaggctttaagctacattgggaagatttagtaaataggcaagtggttggcctaagacgggggctgcttctcctcttcagtatggactctagaaagtctggctacatgaatagatttaagtgtcactttccctccctgccccccgcttcagtctctaccatatctggtcccatcatggacttcctatttcctggcatttttgtccctttggaagaagaaataggactcagaatacagtggcatgagtgattacactggcagcattatctcaggctccctagaatctggagagcttaccaacatgtaaagctgttcatttttccaccgtgggtcaccaatgccagaaaaccagacatcacggggaaagaatgttgcttactttttaccaggagtgcagttcatttttttcaccctgtttttgaagtcgtattattcacttgtaaaaatgattgtaacagataaaaaatgtatctgcagcaactctgcaggtttgtgaaataggatgaaactcaatctttttctattgtgggtttgcatttgaaaagcaggttgaatccttgctctcttctccaaatttggtgtggtataaagacacacaaatcattttaacttggacatttaaagatcagtcttagtgtttgttcagtcctgttacaaaatagataactgagcacctatcgcataacattttgcggtggcttttagccatgctggggttagatgtgtttgagagtcaaatgaaagctatggatcttctcagcaattaaaaaaaatgcatatattcacattcacagaaacattggcagaacccagttttaatggtacagaggagtagtttatagtgttgatttcaccaaaatcagagggctgaaagagacacttctatagactgcatcctgagcctagtgcagggcttgtctagctaatgtgggcagccaccacccactgtgtatgaacaagtctgaagcaagttggccttgcccttgagagtatatggggaccagtcttcatgtcttggagtaatttgtcaaatgttaccctttttgatcagggtgtagggggaggatattgctagtatattttcagtggtttgtatgttctctctgtcactgacttatttgtaagagaaaattagttggacttgtttattttctagtagcttttataagtacactcaagaatttgtcagggagaataattctgatagtgcatcccatactgcaaaagaatttgtgtgtgtgtgtgtgtgtgtgtgtgtgtgtgtgtatgtgtatgtatacatatatatctctccatataggtatttctttgatacttgtaattttaaatttcagcttcacgatataaaataatataagaacttctggtttacaaaatgtaaaatcttaagccaatggaacccttgatttcctacctcagtgtacacccaactattggttgtatcagtttgtgtatgtgcaaatgtcaaataatcttttgctttaattgctactgtacttgctttgaaagattacctactattttatgataaaatgtagttgtctccagagcttaaatataatttgtaaagcacttggtttaaatttctctctacctataaacagtttagcattaagggtttctattaatgacacagaattattggccaagtgtaatttcttaaaatttagcattactttaaatagccagcatgtaatacaagtaactacactacctcatatctacatgattttcaagttgtaatgcagatggacagataaaaaagattttacgtttgtcttttggccataagtgggaaagttttctgtatattgcatagcattacacatttatgcctattttaacattaacttctaaagaagttttttctaagaaaatgtttcaaggcaatattttttttgaggctgccgaagacaaatgacaggattatgagtatacagtgtatgccttttccttcatgcagaattttgaaatgttttcagtttgtatattgcatattcacatgatcattgttcactattttatgaactggccttctcaatgtttgatgattttttaaaagctgttatgttgaattcagtaaaataacattaccttattttttttcttattcaaattctggaactatagcaaataattcgttaaattgtcatattcaaaacaaatgtggatacagtcttggttctccatctgtaattttttttaacagtttgctatagcttactgcttaactaattttaaataaggaaataagtatgttagatgcagtagacgatacaggttgcatgtggacactcagtcacattaacaacttgggaaaaaaatggcaatgttacggtgaattctcaggtgaacttttttcagttataaaacatctattttgaatctgtaaatattttaaatgttttattaaggcatgtaataaactattctttgaaacttgttgggtagaatgaaaattaaagccataatggtagaagatggcatactgattataaaagaagcagaaaaacattgatttttttatatctttcataatataattttctaacaatgcaataaaaccactaaacttttgtgtccatattttactgagaccatgtttcattaaaagcatagtttcatagtatttaatttacatttctccctaatgttcttacccaaatgtacctgaactaaaaaatgttagatgttggtgataagttgacagttaaataaaattctctaaaattgcttctaattgaaa

SEQ ID NO: 31763 - DNA, 4288 bp, Homo Sapiens
gctgcgtgacgcggcggcgcgcaagggacgtgcggagtgagtggcgctgcgggtggggccgtcggcggcgctggtgagctttgcggagctgggcggtgccgaggaggaggaggtggcggcctgggtctgacgcggccctgttcgagggggcctctcttgtttatttatttattttccgtgggtgcctccgagtgtgcgcgcgctctcgctacccggcggggagggggtggggggagggcccgggaaaagggggagttggagccggggtcgaaacgccgcgtgacttgtaggtgagagaacgccgagccgtcgccgcagcctccgccgccgagaagcccttgttcccgctgctgggaaggagagtctgtgccgacaagatggcggacggggagctgaacgtggacagcctcatcacccggctgctggagcagccattgtggatgagaagatcttctgttgtcatggaggattgtcaccagacctgcaatctatggagcagattcggagaattatgagacctactgatgtccctgatacagatattgaaaccatctgaaaagaaagctaaataccagtatggtggactgaattctggacgtcctgtcactccacctcgaacagctaatccgccgaagaaaaggtgaagaaaggaattctgtaaagaaaccatcagatttgttaaggacatacttcataatatataagtgtgcactgtaaaaccatccagccatttgacaccctttatgatgtcacacctttaacttaaggagacgggtaaaggatcttaaatttttttctaatagaaagatgtgctacactgtattgtaataagtatactctgttatagtcaacaaagttaaatccaaattcaaaattatccattaaagttacatcttcatgtatcacaatttttaaagttgaaaagcatcccagttaaactagatgtgatagttaaaccagatgaaagcatgatgatccatctgtgtaatgtggttttagtgttgcttggttgtttaattattttgagcttgttttgtttttgtttgttttcactagaataatggcaaatacttctaatttttttccctaaacatttttaaaagtgaaatatgggaagagctttacagacattcaccaactattattttcccttgtttatctacttagatatctgtttaatcttactaagaaaactttcgcctcattacattaaaaaggaattttagagattgattgttttaaaaaaaaatacgcacattgtccaatccagtgattttaatcatacagtttgactgggcaaactttacagctgatagtgaatattttgctttatacaggaattgacactgatttggatttgtgcactctaatttttaacttattgatgctctattgtgcagtagcatttcatttaagataaggctcatatagtattacccaactagttggtaatgtgattatgtggtaccttggctttaggttttcattcgcacggaacaccttttggcatgcttaacttcctggtaacaccttcacctgcattggttttctttttcttttttctttctttttttttttttttttttttttgagttgttgtttgtttttagatccacagtacatgagaatccttttttgacaagccttggaaagctgacactgtctctttttcctccctctatacgaaggatgtatttaaatgaatgctggtcagtgggacattttgtcaactatgggtattgggtgcttaactgtctaatattgccatgtgaatgttgtatacgattgtaaggcttatgtcactaaagatttttattctgattttttcataatcaaaggtcatatgatactgtatagacaagctttgtagtgaagtatagtagcaataatttctgtacctgatcaagtttattgcagcctttcttttcctatttcttttttttaagggttagtattaacaaatggcaatgagtagaaaagttaacatgaagattttagaaggagagaacttacaggacacagatttgtgattctttgactgtgacactattggatgtgattctaaaagcttttattgagcattgtcaaatttgtaagcttcatagggatggacatcatatctataatgcccttctatatgtgctaccatagatgtgacatttttgaccttaatatcgtctttgaaaatgttaaattgagaaacctgttaacttacattttatgaattggcacattgtattacttactgcaagagatatttcattttcagcacagtgcaaaagttctttaaaatgcatatgtctttttttctaattccgttttgttttaaagcacattttaaatgtagttttctcatttagtaaaagttgtctaattgatatgaagcctgactgattttttttttccttacagtgagacatttaagcacacattttattcacatagatactatgtccttgacatattgaaatgattcttttctgaaagtattcatgatctgcatatgatgtattaggttaggtcacaaaggttttatctgaggtgatttaaataacttcctgattggagtgtgtaagctgagcgatttctaataaaattttagttgtacacttttagtagtcatagtgaagcaggtctagaaaataagcctttggcagggaaaaagggcaatgttgattaatctcagtattaaaccacattaatctgtatcccattgtctggcttttgtaaattcatccaggtcaagactaagtatgttggttaataggaatccttttttttttttttaaagactaaatgtgaaaaaataatcactacttaagctaattaatattggtcattaaatttaaaggatggaaatttatcatgtttaaaaattattcaagcactcttaaaaccacttaaacagcctccagtcataaaaatgtgttctttacaaatatttgcttggcaacacgacttgaaataaataaaactttgtttcttaggagaaaatgattctgtaattccagtgtcactaatttatattgttctttcctctgatttttttcaggttagtgatttttttgtatacaatttaatccaaatgttatgacattcagaaatcatgaaacacagtagatatctgttataatgtggtgtatcacatggattataaagcaaagttatggtcgatttctattcttgaaagaatcaactacagtgaatcctttgcatttgaagccttaacatgcattgctttaattttgcccagggacaaattttaataatcagcaagactggtttgtgcaaagcgttgagtcatcaggtatttagagcctagccagctacccagtatccatgctgccatatcccttcattgtaaaaagtacctaaacattcgtgaaatgattttttttagctgaaaaatgctggcaagaagaattttaaagcttaaaataggtggtaaatttgaagtatgagtgtgttcacgagaaacataggcttttcaaaaaaatttttattcaaggcaaagcaaggaacatcttgagatatgtctcaagaatataaagatgtattattttaagccaaggagctgaaatatatctcagtttataaattcaggtatattctttttgtctccatggcaaccataacttttgaaccaaaaaaaattgtttttacatctttatgctgaaaatgtgtttagattaggaatatggtcgggctgaatttgctgttgctccctaaccaaatccacctcttgttttccttgtgagtccatggctaaatcaaagctgcccctgagaagagacttaatccaagcctgattgtactagtggcatcacttagaagtaggctttccctcttcctagtagatctcaatgttttataattccttaaaacagctgaaaattgggacaacatactttacgcaatgaacagtagttaaataggaaataaactagttccatataagtatacacctagagttttaattacctttataatgtttcttaaaagtgaaacttagatacaattgtgattggatacttagatactaagtgaaacttagtgtaacaattttgatctgttaaattggattttacatgtacatttgaatgccagaatttctaaataaatcccctggttaggaaattttaaaagtcaaagcttgttttcttcaaccactaccttctacattggttgacttagaccgtaagctttttaagtttctcattgtaatttaccttctcatgcagattgctgatgttttattaaaccttatttttacaaaaatgaaaaaaaa

SEQ ID NO: 31764 - DNA, 4786 bp, Homo Sapiens
gctgcgtgacgcggcggcgcgcaagggacgtgcggagtgagtggcgctgcgggtggggccgtcggcggcgctggtgagagaacgccgagccgtcgccgcagcctccgccgccgagaagcccttgttcccgctgctgggaaggagagtctgtgccgacaagatggcggacggggagctgaacgtggacagcctcatcacccggctgctggaggtacgaggatgtcgtccaggaaagattgtgcagatgactgaagcagaagttcgaggcttatgtatcaagtctcgggagatctttctcagccagcctattcttttggaattggaagcaccgctgaaaatttgtggagatattcatggacaatatacagatttactgagattatttgaatatggaggtttcccaccagaagccaactatcttttcttaggagattatgtggacagaggaaagcagtctttggaaaccatttgtttgctattggcttataaaatcaaatatccagagaacttctttctcttaagaggaaaccatgagtgtgctagcatcaatcgcatttatggattctatgatgaatgcaaacgaagatttaatattaaattgtggaagaccttcactgattgttttaactgtctgcctatagcagccattgtggatgagaagatcttctgttgtcatggaggattgtcaccagacctgcaatctatggagcagattcggagaattatgagacctactgatgtccctgatacaggtttgctctgtgatttgctatggtctgatccagataaggatgtgcaaggctggggagaaaatgatcgtggtgtttcctttacttttggagctgatgtagtcagtaaatttctgaatcgtcatgatttagatttgatttgtcgagctcatcaggtggtggaagatggatatgaattttttgctaaacgacagttggtaaccttattttcagccccaaattactgtggcgagtttgataatgctggtggaatgatgagtgtggatgaaactttgatgtgttcatttcagatattgaaaccatctgaaaagaaagctaaataccagtatggtggactgaattctggacgtcctgtcactccacctcgaacagctaatccgccgaagaaaaggtgaagaaaggaattctgtaaagaaaccatcagatttgttaaggacatacttcataatatataagtgtgcactgtaaaaccatccagccatttgacaccctttatgatgtcacacctttaacttaaggagacgggtaaaggatcttaaatttttttctaatagaaagatgtgctacactgtattgtaataagtatactctgttatagtcaacaaagttaaatccaaattcaaaattatccattaaagttacatcttcatgtatcacaatttttaaagttgaaaagcatcccagttaaactagatgtgatagttaaaccagatgaaagcatgatgatccatctgtgtaatgtggttttagtgttgcttggttgtttaattattttgagcttgttttgtttttgtttgttttcactagaataatggcaaatacttctaatttttttccctaaacatttttaaaagtgaaatatgggaagagctttacagacattcaccaactattattttcccttgtttatctacttagatatctgtttaatcttactaagaaaactttcgcctcattacattaaaaaggaattttagagattgattgttttaaaaaaaaatacgcacattgtccaatccagtgattttaatcatacagtttgactgggcaaactttacagctgatagtgaatattttgctttatacaggaattgacactgatttggatttgtgcactctaatttttaacttattgatgctctattgtgcagtagcatttcatttaagataaggctcatatagtattacccaactagttggtaatgtgattatgtggtaccttggctttaggttttcattcgcacggaacaccttttggcatgcttaacttcctggtaacaccttcacctgcattggttttctttttcttttttctttctttttttttttttttttttttttgagttgttgtttgtttttagatccacagtacatgagaatccttttttgacaagccttggaaagctgacactgtctctttttcctccctctatacgaaggatgtatttaaatgaatgctggtcagtgggacattttgtcaactatgggtattgggtgcttaactgtctaatattgccatgtgaatgttgtatacgattgtaaggcttatgtcactaaagatttttattctgattttttcataatcaaaggtcatatgatactgtatagacaagctttgtagtgaagtatagtagcaataatttctgtacctgatcaagtttattgcagcctttcttttcctatttcttttttttaagggttagtattaacaaatggcaatgagtagaaaagttaacatgaagattttagaaggagagaacttacaggacacagatttgtgattctttgactgtgacactattggatgtgattctaaaagcttttattgagcattgtcaaatttgtaagcttcatagggatggacatcatatctataatgcccttctatatgtgctaccatagatgtgacatttttgaccttaatatcgtctttgaaaatgttaaattgagaaacctgttaacttacattttatgaattggcacattgtattacttactgcaagagatatttcattttcagcacagtgcaaaagttctttaaaatgcatatgtctttttttctaattccgttttgttttaaagcacattttaaatgtagttttctcatttagtaaaagttgtctaattgatatgaagcctgactgattttttttttccttacagtgagacatttaagcacacattttattcacatagatactatgtccttgacatattgaaatgattcttttctgaaagtattcatgatctgcatatgatgtattaggttaggtcacaaaggttttatctgaggtgatttaaataacttcctgattggagtgtgtaagctgagcgatttctaataaaattttagttgtacacttttagtagtcatagtgaagcaggtctagaaaataagcctttggcagggaaaaagggcaatgttgattaatctcagtattaaaccacattaatctgtatcccattgtctggcttttgtaaattcatccaggtcaagactaagtatgttggttaataggaatccttttttttttttttaaagactaaatgtgaaaaaataatcactacttaagctaattaatattggtcattaaatttaaaggatggaaatttatcatgtttaaaaattattcaagcactcttaaaaccacttaaacagcctccagtcataaaaatgtgttctttacaaatatttgcttggcaacacgacttgaaataaataaaactttgtttcttaggagaaaatgattctgtaattccagtgtcactaatttatattgttctttcctctgatttttttcaggttagtgatttttttgtatacaatttaatccaaatgttatgacattcagaaatcatgaaacacagtagatatctgttataatgtggtgtatcacatggattataaagcaaagttatggtcgatttctattcttgaaagaatcaactacagtgaatcctttgcatttgaagccttaacatgcattgctttaattttgcccagggacaaattttaataatcagcaagactggtttgtgcaaagcgttgagtcatcaggtatttagagcctagccagctacccagtatccatgctgccatatcccttcattgtaaaaagtacctaaacattcgtgaaatgattttttttagctgaaaaatgctggcaagaagaattttaaagcttaaaataggtggtaaatttgaagtatgagtgtgttcacgagaaacataggcttttcaaaaaaatttttattcaaggcaaagcaaggaacatcttgagatatgtctcaagaatataaagatgtattattttaagccaaggagctgaaatatatctcagtttataaattcaggtatattctttttgtctccatggcaaccataacttttgaaccaaaaaaaattgtttttacatctttatgctgaaaatgtgtttagattaggaatatggtcgggctgaatttgctgttgctccctaaccaaatccacctcttgttttccttgtgagtccatggctaaatcaaagctgcccctgagaagagacttaatccaagcctgattgtactagtggcatcacttagaagtaggctttccctcttcctagtagatctcaatgttttataattccttaaaacagctgaaaattgggacaacatactttacgcaatgaacagtagttaaataggaaataaactagttccatataagtatacacctagagttttaattacctttataatgtttcttaaaagtgaaacttagatacaattgtgattggatacttagatactaagtgaaacttagtgtaacaattttgatctgttaaattggattttacatgtacatttgaatgccagaatttctaaataaatcccctggttaggaaattttaaaagtcaaagcttgttttcttcaaccactaccttctacattggttgacttagaccgtaagctttttaagtttctcattgtaatttaccttctcatgcagattgctgatgttttattaaaccttatttttacaaaaatgaaaaaa

SEQ ID NO: 31765 - DNA, 4991 bp, Homo Sapiens
ggcggcgcgcaagggacgtgcggagtgagtggcgctgcgggtggggccgtcggcggcgctggtgagctttgcggagctgggcggtgccgaggaggaggaggtggcggcctgggtctgacgcggccctgttcgagggggcctctcttgtttatttatttattttccgtgggtgcctccgagtgtgcgcgcgctctcgctacccggcggggagggggtggggggagggcccgggaaaagggggagttggagccggggtcgaaacgccgcgtgacttgtaggtgagagaacgccgagccgtcgccgcagcctccgccgccgagaagcccttgttcccgctgctgggaaggagagtctgtgccgacaagatggcggacggggagctgaacgtggacagcctcatcacccggctgctggaggtacgaggatgtcgtccaggaaagattgtgcagatgactgaagcagaagttcgaggcttatgtatcaagtctcgggagatctttctcagccagcctattcttttggaattggaagcaccgctgaaaatttgtggagatattcatggacaatatacagatttactgagattatttgaatatggaggtttcccaccagaagccaactatcttttcttaggagattatgtggacagaggaaagcagtctttggaaaccatttgtttgctattggcttataaaatcaaatatccagagaacttctttctcttaagaggaaaccatgagtgtgctagcatcaatcgcatttatggattctatgatgaatgcaaacgaagatttaatattaaattgtggaagaccttcactgattgttttaactgtctgcctatagcagccattgtggatgagaagatcttctgttgtcatggaggattgtcaccagacctgcaatctatggagcagattcggagaattatgagacctactgatgtccctgatacaggtttgctctgtgatttgctatggtctgatccagataaggatgtgcaaggctggggagaaaatgatcgtggtgtttcctttacttttggagctgatgtagtcagtaaatttctgaatcgtcatgatttagatttgatttgtcgagctcatcaggtggtggaagatggatatgaattttttgctaaacgacagttggtaaccttattttcagccccaaattactgtggcgagtttgataatgctggtggaatgatgagtgtggatgaaactttgatgtgttcatttcagatattgaaaccatctgaaaagaaagctaaataccagtatggtggactgaattctggacgtcctgtcactccacctcgaacagctaatccgccgaagaaaaggtgaagaaaggaattctgtaaagaaaccatcagatttgttaaggacatacttcataatatataagtgtgcactgtaaaaccatccagccatttgacaccctttatgatgtcacacctttaacttaaggagacgggtaaaggatcttaaatttttttctaatagaaagatgtgctacactgtattgtaataagtatactctgttatagtcaacaaagttaaatccaaattcaaaattatccattaaagttacatcttcatgtatcacaatttttaaagttgaaaagcatcccagttaaactagatgtgatagttaaaccagatgaaagcatgatgatccatctgtgtaatgtggttttagtgttgcttggttgtttaattattttgagcttgttttgtttttgtttgttttcactagaataatggcaaatacttctaatttttttccctaaacatttttaaaagtgaaatatgggaagagctttacagacattcaccaactattattttcccttgtttatctacttagatatctgtttaatcttactaagaaaactttcgcctcattacattaaaaaggaattttagagattgattgttttaaaaaaaaatacgcacattgtccaatccagtgattttaatcatacagtttgactgggcaaactttacagctgatagtgaatattttgctttatacaggaattgacactgatttggatttgtgcactctaatttttaacttattgatgctctattgtgcagtagcatttcatttaagataaggctcatatagtattacccaactagttggtaatgtgattatgtggtaccttggctttaggttttcattcgcacggaacaccttttggcatgcttaacttcctggtaacaccttcacctgcattggttttctttttcttttttctttctttttttttttttttttttttttgagttgttgtttgtttttagatccacagtacatgagaatccttttttgacaagccttggaaagctgacactgtctctttttcctccctctatacgaaggatgtatttaaatgaatgctggtcagtgggacattttgtcaactatgggtattgggtgcttaactgtctaatattgccatgtgaatgttgtatacgattgtaaggcttatgtcactaaagatttttattctgattttttcataatcaaaggtcatatgatactgtatagacaagctttgtagtgaagtatagtagcaataatttctgtacctgatcaagtttattgcagcctttcttttcctatttcttttttttaagggttagtattaacaaatggcaatgagtagaaaagttaacatgaagattttagaaggagagaacttacaggacacagatttgtgattctttgactgtgacactattggatgtgattctaaaagcttttattgagcattgtcaaatttgtaagcttcatagggatggacatcatatctataatgcccttctatatgtgctaccatagatgtgacatttttgaccttaatatcgtctttgaaaatgttaaattgagaaacctgttaacttacattttatgaattggcacattgtattacttactgcaagagatatttcattttcagcacagtgcaaaagttctttaaaatgcatatgtctttttttctaattccgttttgttttaaagcacattttaaatgtagttttctcatttagtaaaagttgtctaattgatatgaagcctgactgattttttttttccttacagtgagacatttaagcacacattttattcacatagatactatgtccttgacatattgaaatgattcttttctgaaagtattcatgatctgcatatgatgtattaggttaggtcacaaaggttttatctgaggtgatttaaataacttcctgattggagtgtgtaagctgagcgatttctaataaaattttagttgtacacttttagtagtcatagtgaagcaggtctagaaaataagcctttggcagggaaaaagggcaatgttgattaatctcagtattaaaccacattaatctgtatcccattgtctggcttttgtaaattcatccaggtcaagactaagtatgttggttaataggaatccttttttttttttttaaagactaaatgtgaaaaaataatcactacttaagctaattaatattggtcattaaatttaaaggatggaaatttatcatgtttaaaaattattcaagcactcttaaaaccacttaaacagcctccagtcataaaaatgtgttctttacaaatatttgcttggcaacacgacttgaaataaataaaactttgtttcttaggagaaaatgattctgtaattccagtgtcactaatttatattgttctttcctctgatttttttcaggttagtgatttttttgtatacaatttaatccaaatgttatgacattcagaaatcatgaaacacagtagatatctgttataatgtggtgtatcacatggattataaagcaaagttatggtcgatttctattcttgaaagaatcaactacagtgaatcctttgcatttgaagccttaacatgcattgctttaattttgcccagggacaaattttaataatcagcaagactggtttgtgcaaagcgttgagtcatcaggtatttagagcctagccagctacccagtatccatgctgccatatcccttcattgtaaaaagtacctaaacattcgtgaaatgattttttttagctgaaaaatgctggcaagaagaattttaaagcttaaaataggtggtaaatttgaagtatgagtgtgttcacgagaaacataggcttttcaaaaaaatttttattcaaggcaaagcaaggaacatcttgagatatgtctcaagaatataaagatgtattattttaagccaaggagctgaaatatatctcagtttataaattcaggtatattctttttgtctccatggcaaccataacttttgaaccaaaaaaaattgtttttacatctttatgctgaaaatgtgtttagattaggaatatggtcgggctgaatttgctgttgctccctaaccaaatccacctcttgttttccttgtgagtccatggctaaatcaaagctgcccctgagaagagacttaatccaagcctgattgtactagtggcatcacttagaagtaggctttccctcttcctagtagatctcaatgttttataattccttaaaacagctgaaaattgggacaacatactttacgcaatgaacagtagttaaataggaaataaactagttccatataagtatacacctagagttttaattacctttataatgtttcttaaaagtgaaacttagatacaattgtgattggatacttagatactaagtgaaacttagtgtaacaattttgatctgttaaattggattttacatgtacatttgaatgccagaatttctaaataaatcccctggttaggaaattttaaaagtcaaagcttgttttcttcaaccactaccttctacattggttgacttagaccgtaagctttttaagtttctcattgtaatttaccttctcatgcagattgctgatgttttattaaaccttatttttacaaaaatgaaaaaa

SEQ ID NO: 31766 - DNA, 3042 bp, Homo Sapiens
gctgtcctggccgcgcccctgtcccgccgcctcccgctcctcgcctggcggatgtaggttgttggcctgaggggagctacgtagccgaggtttgcgctgccgccgccaggcccggtccggttccagcctctgcccggacgctagccggcctggccatggctgaccgcgggtgcccgctggaggcggcgccgctgcctgccgaggtgcgggagagcctggctgagctggagctggagctgtcggaaggtgacatcactcaaaaaggatatgaaaagaaaagggcaaagctgcttgcacgttatataccgcttattcaaggaatagacccatctctgcaagcagagaatagaattcctgggccctcacaaaccacggccgctgcacccaagcagcagaagtctcggcccaccgcctcgagggatgagcgcttccggtcagatgtccacactgaagccgtgcaagcagctttggccaaatacaaagagaggaagatgcctatgccttcgaagagacgttctgtccttgtgcattcgtctgtggaaacctacacccctccagacacgtcgtctgcctcagaagatgagggctctttacggcgacccgggcgactcacctccactccgctccagagccattccagcgtcgagccctggctcgaccgggtcattcagggctcgtccacctcatcctctgcatcctccacctcatctcacccgggagggagacccaccactgctcccagtgctgcagccacgccgggggccgccgctaccactgcactcgcaggcctcgaggcccacacccacatagatctgcattctgcccctcctgatgtcaccacgggcctcgtggagcattcgtactttgagcgtccacaggtggcttctgtgagaagtgttcctcgggggtgcagcgggagcatgctggaaacagcagatggtgtccctgtgaacagcagagtgtcctccaaaatccagcagcttctgaacaccctgaagaggccaaagcgccctccactgaaggagttctttgtggatgattttgaggaattgttggaagttcagcaaccagatccaaatcagccaaagcctgagggaagcgagacgagtgtgctgagaggggagcctctcactgcaggtgtcccccgaccgccgtcgctgttggccaccttgcagcgctggggcacaacacagcccaaatccccctgtctgactgccttggatacaactgggaaagccgtctacactctcacctatggtaaactttggagtcggagtttaaaactagcttatactctacttaataaactgacaagtaagaatgaacctctacttaaacctggagacagagtggcgctcgtgtttccgaatagtgaccctgtgatgttcatggttgcattttatgggtgtctcctggcagagctggttcctgtccccatagaagtgccattaacaagaaaggatgcaggcagccagcaggttgggtttctgctgggcagctgtggagtcttcttggccctgaccacagacgcttgtcagaaaggcctccccaaggcacagacaggagaggtggcagctttcaaaggttggcccccgctctcctggctagtgattgatgggaagcatctagccaagcccccaaaggactggcaccctctggcccaggacacagggactgggactgcctacattgagtataaaaccagcaaagaaggcagtacggtgggggtcacagtgtcccacgcatccctgctggcacagtgccgggctctgacccaggcgtgcgggtactcagaagctgaaacattaacaaacgtgctggatttcaaaagggatgctggtctgtggcatggcgtgttaacaagcgtcatgaacaggatgcacgtggtcagcgtcccctacgcgctgatgaaggcgaacccactctcctggatccagaaagtgtgcttctataaagctcgggccgcgctggtgaagtcgcgagacatgcactggtctctcctagctcagcggggccagagggacgtcagcctcagctcactgcgcatgctgattgtggccgatggtgccaacccgtggtcgatctcctcctgtgacgccttcctcaacgtcttccagtccagaggtctgaggccagaggtcatctgtccttgtgcaagttctcctgaggcgctgactgtcgccatccgcaggccacctgatctgggaggaccacctccaagaaaagcagtcctgtcgatgaacggtctaagttatggtgttatcagagtggatactgaagaaaagttgtcagtccttactgttcaggacgttggtcaggtgatgcctggagctaatgtatgtgttgtgaagttagaaggtaccccttatctttgtaaaactgatgaagtgggagaaatatgcgtcagttccagtgcaactggcacagcgtactatggattgcttggaatcacgaagaatgtgtttgaggcagttccggtcaccacaggaggagcacccatctttgacaggccattcaccaggacaggcctgctgggcttcatcgggcctgacaacctggtcttcatcgtgggcaaactggacgggctgatggtcactggagttcgcagacacaatgcagatgacgttgtggccaccgcactggccgtggagcccatgaagtttgtctacagaggcaggatcgctgtgttctctgtgaccgtgctgcacgacgaccggattgtcctggtggctgagcagcggccggatgcctcggaggaggacagcttccagtggatgagccgtgtgctgcaggtgggcgccccggcacggcctatggttcggtgaatctcccaagctggcacccccactccactccaagtgccaagtggttggcttgtcccgcccggtcctccctggctccagctttgtttatctgtatttttcattgcaaattgacaaattacagctgtatgtatttacgggatacaaagtgatgttataatttatgaatacaatatagaataattaatatatccaaaaaaaaaaaaaaaaaaaaaaaaaa

SEQ ID NO: 31767 - DNA, 5138 bp, Homo Sapiens
gcgcagactcagttcctggagaaagatggcgacagccgagaagcagaaacacgacgggcgggtgaagatcggccactacattctgggtgacacgctgggggtcggcaccttcggcaaagtgaaggttggcaaacatgaattgactgggcataaagtagctgtgaagatactcaatcgacagaagattcggagccttgatgtggtaggaaaaatccgcagagaaattcagaacctcaagcttttcaggcatcctcatataattaaactgtaccaggtcatcagtacaccatctgatattttcatggtgatggaatatgtctcaggaggagagctatttgattatatctgtaagaatggaaggaaatctgatgtacctggagtagtaaaaacaggctccacgaaggagctggatgaaaaagaaagtcggcgtctgttccaacagatcctttctggtgtggattattgtcacaggcatatggtggtccatagagatttgaaacctgaaaatgtcctgcttgatgcacacatgaatgcaaagatagctgattttggtctttcaaacatgatgtcagatggtgaatttttaagaacaagttgtggctcacccaactatgctgcaccagaagtaatttcaggaagattgtatgcaggcccagaggtagatatatggagcagtggggttattctctatgctttattatgtggaacccttccatttgatgatgaccatgtgccaactctttttaagaagatatgtgatgggatcttctatacccctcaatatttaaatccttctgtgattagccttttgaaacatatgctgcaggtggatcccatgaagagggccacaatcaaagatatcagggaacatgaatggtttaaacaggaccttccaaaatatctctttcctgaggatccatcatatagttcaaccatgattgatgatgaagccttaaaagaagtatgtgaaaagtttgagtgctcagaagaggaagttctcagctgtctttacaacagaaatcaccaggatcctttggcagttgcctaccatctcataatagataacaggagaataatgaatgaagccaaagatttctatttggcgacaagcccacctgattcttttcttgatgatcatcacctgactcggccccatcctgaaagagtaccattcttggttgctgaaacaccaagggcacgccatacccttgatgaattaaatccacagaaatccaaacaccaaggtgtaaggaaagcaaaatggcatttaggaattagaagtcaaagtcgaccaaatgatattatggcagaagtatgtagagcaatcaaacaattggattatgaatggaaggttgtaaacccatattatttgcgtgtacgaaggaagaatcctgtgacaagcacttactccaaaatgagtctacagttataccaagtggatagtagaacttatctactggatttccgtagtattgatgatgaaattacagaagccaaatcagggactgctactccacagagatcgggatcagttagcaactatcgatcttgccaaaggagtgattcagatgctgaggctcaaggaaaatcctcagaagtttctcttacctcatctgtgacctcacttgactcttctcctgttgacctaactccaagacctggaagtcacacaatagaattttttgagatgtgtgcaaatctaattaaaattcttgcacaataaacagaaaactttgcttatttcttttgcagcaataagcatgcataataagtcacagccaaatgcttccatttgtaatcaagttatacataattataaccgagggctggcgttttggaatgcaatttgcacagggattggaacatgatttatagttaaaagcctaatatgcagaaatgaattaagatcattttgttgttcattgtgcagtatgtatatagcataatatacacagtgaattataggtctcaggcttacttgatttttggctattttatatttagtgtacacagggctttgaaatattaatttacataaaggccttcatatattattacgtgttatatattacgtgttataaatttattcaataaatatttgcctagaattcccaagacctttataggtgattttgttttctgggctccttaacttcataaatagctagtatcttccagcagtagtaacagtctggataacttcttccatatccctccctctttgtttttttgagacagtgtcactttgtcacccaggctggagtgcaatggtgtggtctcggctcactgcaacctccacctcccgggttcaagtgattctcccgcctcagcttcctgagtagctggaactacaggcgtgtgccaccacacccggctaatttttcgtatttttagtgtagacggggtttcactatgttgcccaggctggtctcgaactcctgaccgcgtgatccaccacctcagcttcccaaagtggtgggattacaggcgtgagccaccgcacccggcctccatatcccccttttaaaattctgtagtgtatggtaagtcatatcagatatcagacctaatttaaatttcattttagctttacaagtccaaaaacacagaatttatatattcagatactctagcactaattttagtcttaaaatattcccacgatattctgtacacaaaatgttctttttgttacaagagctgagttgcatatactgtagataaatcatattatttttgccaatttcacaaattcctctggcccatcatgtcagtcattattgagtatatgcacacattgctacttatttgattatgtatcttttaaattgattcagtgcatagaaaactatctcttacaaactttaagtgctctgatatgacttcccccccaaattttattatgaacatttttaaaaacagaaaaattgaaaaactgtttggtaagcacatgtatatctaccatttagattcagcagttgttaatgttttgtcatttgttttctctatacctatatatgtatagatacagctagttatgcatatatatgcatatatgtgtttgtttgtgtatgtatatatgcttttttccccctgaaccatttggatgttacagacatacttatcaccgtgaaaatacttcaagtatctcctacagataatgacattctcctaaaaatccgtaataccattgtaaaagtaataattccccaatatcatctaatcaagccatatttaaatttctgaagttaactccaaatttctttatagctgattatttcaaactaggatccaattaaagtttacatatgacacttggttataactctttagttggatataacattattattattttgataaaatatggaacaaatcaattctattaataagtggtcacatttgttttgggcttaaattactttttaaagatactggattttcctaagatttctgatttacactgatatttttttttgtcattcttaattgcatcacacaatagatgtaaatgaagatgtagtcacctcagataaaattggtatcgtgtatgataatattgtatcatttatatttgccttatgttaactttaagaaattgatttttttgtattaatcattttcccattgcaacagagctatattttttctattttaagaatcatattttaggattatttttggcaaatacagtgagcacttatgtaaccagatgataatgaactcaaatgtcatgatagcttgcataaatggtgactctagtagatttgactcaagcacttctagaatcatgcactgaattcaaaagaaaaatcttgctgctttttgtccagggcttgttctattcaacttctaatttgaaagctgtacaaagtaatagaagttccatttaaatatgagttcaaaactgtatttactttttatgtggccctctctttaggggattctaattttacttagggtctctaagtgcagcataatgttcctgatgttaacagaagactgtatttttaaagttacaaatttgtatatggaattaagtaatggcgctatatacgctgttgtggggaggggggaagaaaaggaggaaccaattaaataggaccttttaaaaattgttaattttgtaaactttgcttctcttataagttattgtgattcattttagttactgtgttttattttgaaaatatttaaatattgcacttctataaatagtatgataaatgcacagacaattgcagtaaattcttttttaagctaggatatttgaaatgacaacctttggttaagtgtgtcaaggttgcaacagaattttcacaatttttttgttgtttgcaaattgttactaatattgaagaggtaagggaggcaatgcaaatgatttttaatctttttttattatcttttcagcagtttatattttttgtgactttatgcaaccatatttttactttgtcttgacaactgaaagatgtataaggttttttgccagaaatgtactgtatacatagttttaagtataacagattttactgatatgtaaaaattttgccattaaaataaatgatttctcactgagaggaacttttctaccaggttggggcatatgggagcttaatatatcatatctaatttaaaataatttcactgaaataaactccattgcttttacctaatttttttcttgagatgcttttgtagtttttcagagttttagatgattttatacaaaatcctctgcctagcactgctctttttgatgttgtagtgacaccatttacattgaattaatgcttggtagcctggggctagatgtggaactccatggatctgtgttctgactggcacctttggaatgaaagaaaagtgtgtgctgtccaaattttttccccttaattctttccctcatcttctcacccataatagaaattttatttccattgtgagttctgacaagaatgaaattccacatacaacataactgtaaattgttggtaggtagaagttaatatttgtggttcatgtatattttgaccagagtatatttaagtatataatttcagcttccttgatttagaaatatgatataataaagaaaaactccatttatcatctgttaaaaaaaaaaaaaaaaa

SEQ ID NO: 31768 - DNA, 1434 bp, Homo Sapiens
ccggccgcgctccgaacggcgcctcccgccccaccatgggcaacagcgcgagccgcagcgacttcgagtgggtctacaccgaccagccgcacacgcagcggcgcaaggagatactggccaagtacccggccatcaaggccctgatgcggccagacccgcgcctcaagtgggcggtgctggtgctggtgctggtgcagatgctgacctgctggctggtgcgcgggctggcctggcgctggctgctgttctgggcctacgcctttggtggctgcgtgaaccactcgctgacgctggccatccacgacatctcgcacaacgcggccttcggcacgggccgtgcggcacgcaaccgctggctggccgtgttcgccaacctgcccgtgggtgtgccctacgccgcctccttcaagaagtaccacgtggaccaccaccgctacctgggcggcgacgggctggacgtggacgtgcccacgcgtctggagggctggttcttctgcacgcccgcccgcaagctgctctggctggtgctgcagcccttcttctactcactacggccgctctgcgtccaccccaaggccgtgacccgcatggaggtgctcaacacgctggtgcagctggcggccgacctggccatctttgccctttgggggctcaagcccgtggtctacctgctggccagctccttcctgggcctgggcctgcaccccatctcgggccacttcgtggccgagcactacatgttcctcaagggccacgagacctactcctactatgggcctctcaactggatcaccttcaatgtgggctaccacgtggagcaccacgacttccccagcatcccgggctacaacctgccgctggtgcggaagatcgcgcccgagtactacgaccacctgccgcagcaccactcctgggtgaaggtgctctgggattttgtgtttgaggactccctggggccctatgccagggtgaagcgggtgtacaggctggcaaaagatggtctgtgagcccaggctgcctcctggtggtggccattgtcccccatcggcccctcagccttgcaccccagcactgagaagctacatttccttcctgtgctctggactgctgcccttgtccccgaggagtgtcccgcgcagccacacctggcaacagcagtgtgggctgcagggctccgtctgcacgtggacttgccctggaccttgagtgtggccctccctttctgggcctccccaggtgaggcctggccctgccccaccatgacctgggtgctctgagcccacggttcccacggagctgacttctccggggtgcctgtgccctacattaaacccggcgtttgtttcacaaaaaaaaaaaaaaaaaaaaaaaaaaaaaaaaaaaaaaaaaaaaaaaaaaaaaaaaaaaaaaaaaaaaaaaaaaaaaaaaaaaaaa

SEQ ID NO: 31769 - DNA, 1545 bp, Homo Sapiens
tttccgcgagcgccggcactgcccgctccgagcccgtgtctgtcgggtgccgagccaactttcctgcgtccatgcagccccgccggcaacggctgcctgctccctggtccgggcccaggggcccgcgccccaccgccccgctgctcgcgctgctgctgttgctcgccccggtggcggcgcccgcggggtccggggaccccgacgaccctgggcagcctcaggatgctggggtcccgcgcaggctcctgcagcaggcggcgcgcgcggcgcttcacttcttcaacttccggtccggctcgcccagcgcgctacgagtgctggccgaggtgcaggagggccgcgcgtggattaatccaaaagagggatgtaaagttcacgtggtcttcagcacagagcgctacaacccagagtctttacttcaggaaggtgagggacgtttggggaaatgttctgctcgagtgtttttcaagaatcagaaacccagaccaaccatcaatgtaacttgtacacggctcatcgagaaaaagaaaagacaacaagaggattacctgctttacaagcaaatgaagcaactgaaaaaccccttggaaatagtcagcatacctgataatcatggacatattgatccctctctgagactcatctgggatttggctttccttggaagctcttacgtgatgtgggaaatgacaacacaggtgtcacactactacttggcacagctcactagtgtgaggcagtggaaaactaatgatgatacaattgattttgattatactgttctacttcatgaattatcaacacaggaaataattccctgtcgcattcacttggtctggtaccctggcaaacctcttaaagtgaagtaccactgtcaagagctacagacaccagaagaagcctccggaactgaagaaggatcagctgtagtaccaacagagcttagtaatttctaaaaagaaaaaatgatctttttccgacttctaaacaagtgactatactagcataaatcattcttctagtaaaacagctaaggtatagacattctaataatttgggaaaacctatgattacaagtaaaaactcagaaatgcaaagatgttggttttttgtttctcagtctgctttagcttttaactctggaagcgcatgcacactgaactctgctcagtgctaaacagtcaccagcaggttcctcagggtttcagccctaaaatgtaaaacctggataatcagtgtatgttgcaccagaatcagcattttttttttaactgcaaaaaatgatggtctcatctctgaatttatatttctcattcttttgaacatactatagctaatatattttatgttgctaaattgcttctatctagcatgttaaacaaagataatatactttcgatgaaagtaaattataggaaaaaaattaactgttttaaaaagaacttgattatgttttatgatttcaggcaagtattcatttttaacttgctacctacttttaaataaatgtttacatttctaaataaaaaaaaaaaaaaaaaaaaa

SEQ ID NO: 31770 - DNA, 2143 bp, Homo Sapiens
gatctccacgtcttggaggccgccggcataggtgtgcgcctggcagaacctcacaaatacacatgcacgcaggccccgactgaatccagggctgtaggggctaaagaggtctaggtcagtagaggcctgaagcccaggctggtctgtccaaggaaaaaggagcgtgattggtaccagatcttcgttccctgcagaaccttgacagttgaacaagtgacctcctccagaacagatggagagtctccagaagcagaggctttagtgaacgaaattcgcaataatcagctccagatcctgaaaaggagggcgaagaatcagtggccaaagctaaccgcttcatacccacacttcatcctcctcagtttctctccaggccaccatgtctgcaggcaacggcaccccttggggtcagcagcgggggaggaggtctgggctggatcaggagtggaggtggagggctcagagctgcccaccttctcggcagcagccaaggtccgagtgggagtgaccattgtgctgtttgtttcttcggctggagggaacctggcagtcctgtggtcagtgacacggcgggaacccagccagctccgcccctctccggtcaggagactcttcatccatttagcagccgccgacttactagtcacttttgtggttatgcccctagatgccacctggaatatcactgttcaatggctggctgtggacatcgcatgtcggacactgatgttcctgaaactaatggccacgtattctgcagctttcctgcctgtggtcattggattggaccgccaggcagcagtactcaacccgcttggatcccgttcaggtgtaaggaaacttctgggggcagcctggggacttagtttcctgcttgccttcccccagctgttcctgttccacacggtccactgagctggcccagtccctttcactcagtgtgtcaccaaaggcagcttcaaggctcaatggcaagagaccacctataacctcttcaccttctgctgcctctttctgctgccactgactgccatggccatctgctatagccgcattgtcctcagtgtgtccaggccccagacaaggaaggggagccatgcccctgctggtgaatttgccctcccccgctcctttgacaattgtccccgtgttcgtctccgggccctgagactggccctgcttatcttgctgaccttcatcctctgctggacaccttattacctactgggtatgtggtactggttctcccccaccatgctaactgaagtccctcccagcctgagccacatccttttcctcttgggcctcctcaatgctcctttggatcctctcctctatggggccttcacccttggctgccgaagagggcaccaagaacttagtatagactcttctaaagaagggtctgggagaatgctccaagaggagattcatgcctttagacagctggaagtacaaaaaactgtgacatcaagaagggcaggagaaacaaaaggcatttctataacatctatctgatcctaacagagtatgtaggaacagaatagtaagtctttagtgccataagatcttaacatctcacttctactcctgctctcctagttccccccaaaaaagaaatactgaccagtgtctctactttaaaccctacctgaaacttgagactatgtctaatatagaaactcacataactagcccaggtaacacagcaagaccccatctctacaaaaatattaaaaatttagctgggcatggtggcatgtgcctgtaatcccaactactagggacagtgaggcagaaggatggcttgagcccaagagtttgaagctgcagtgagctatgatcagctgcaatccaccctgggtaacacagcaagactctatctcaaaaaaaagaaaaaaaagaaatacatagagttcagtccctagaagtatcttcacaatgatccatacagccttgctatgctttagaactttcaattttaggacaggaaagtaacattaaatgtagaaaacaaaaatggaacatttattcgcaactcaaatactacgcatatacggtaagagattaaatataaacacagcaagttccaccccagtcctatttgtccaaggctgcatggtcaaatggaatcttgaagaga

SEQ ID NO: 31771 - DNA, 1800 bp, Homo Sapiens
aacatggccgcgggctggaagtgcgcatgagcagctgtctatggagatacctaggccgggagagggagaacacagttggagaaaatcggcagctgagacggccttggccggacttagcactcaggcctgtgaatcaggagatacaaagacctccaaaaaaggaccagttcctcggatgtgccccctcacagagagatgaaggggcagcagaaaacagctgaaacggaagaggggacagtgcagattcaggaaggtgcagtggctactggggaagacccaaccagtgtggctattgccagcatccagtcagctgccaccttccctgaccccaacgtcaagtgatgtacagggtgatccaggtgtctgaggggcagctggatggccaaactgagggaactggcgccatcagtggctaccctgccactcaatccatgacccaggcggtgatccagggtgctttcaccagtgatgatgcagttgacacggaggggacagctgctgagacgcactatacttacttccccagcacggcagtgggagatggggcagggggtaccacatcggggagtacagctgctgttgttactacccagggctcagaggcactgctggggcaggcgacccctcctggcactggtcaattctttgtgatgatgtcaccacaagaagtactgcagggaggaagccagcgctcaattgcccctaggactcacccttattccccgaagtcagaagctccccggacgactcgggatgagaaacgcagggctcagcataatgaagtggagcgtcgccgccgagacaagatcaacaactggatcgtgcagctctccaagataatcccagactgctctatggagagcaccaagtctggccagagtaaaggtgggattctatccaaagcttgtgattatatccaggagcttcggcagagtaaccaccgcttgtctgaagaactgcagggacttgaccaactgcagctggacaatgacgtgcttcgacaacaggtggaagatcttaaaaacaagaatctgctgcttcgagctcagttgcggcaccacggattagaggtcgtcatcaagaatgacagcaactaactatggggattcaggggctttgggcccaagaactgcagatagcccaggagcaacagcctaatcccgtgcccctttccttcactgccccacttctggcatgggacagggggaagttcagaaggtgtgtccttgaactgaggccctgtgatatggcggcctgcagtggtgtgaaacacacaatgtggacgtgcactgacagccttgcccacccccaccatgcagcccctgggcccttgtgctcctctcgcacaatgcatgtgctgtctccatgctggatactggacacactaaactctggggcttgtcctgtgcttgcttagagtgcccagcagaggtttgctgacaggtgatgctctggcttgccccaggactctggcacttccattggttcttcctttccctggagctgaggtttagatgtgcaacctgtggctcaggggagcaagcttacacaagaagtgagggaaggatgtttagcagtggctggtgcccatgaagaggagattggccagtgagaagctgaggcctatgcagacatctctggagccagagagaacaacaggcaggggcccacttggggccttcccccttgtgggggtcgttttttttttttcttttcttttttttttttttttttttttttttttaagataaaattgttcaaagccaaaaaaaaaaaaaaaaaaaaaaaaaaaaaaaaaaa

SEQ ID NO: 31772 - DNA, 2931 bp, Homo Sapiens
tcgcaacgtcacgggcaagggccgccattttgactgagcaaccctagtgacaggagccgaagcagcagcgcaggttgtccccgtttcccctcccccttcccttctccggttgccttcccgggccccttacactccacagtcccggtcccgccatgtcccagaaacaagaagaagagaaccctgcggaggagaccggcgaggagaagcaggacacgcaggagaaagaaggtattctgcctgagagagctgaagaggcaaagctaaaggccaaatacccaagcctaggacaaaagcctggaggctccgacttcctcatgaagagactccagaaaggggattataaatcattacattggagtgtgcttctctgtgcggatgaaatgcaaaagtactttgactcaggagactacaacatggccaaagccaagatgaagaataagcagctgccaagtgcaggaccagacaagaacctggtgactggtgatcacatccccaccccacaggatctgccccagagaaagtcctcgctcgtcaccagcaagcttgcggggtaacctgagcccccctctcctccccttcctcaaccactggacgtttatatattataggcagggatgaaatgggcacctagtcagatcttctcagcttgctagccagaaatgactgtgattctgctgggggctgctgagaaggtaatgtaggttgaaaaggggctctaagtttatttatttcgttagattgacacttccacacactccctgtagtccaggtagggcccagaaataggaaaggctaggattggataatgctgcaaatgctttttttgtgtgagaaactggagagatgtgatttctccttttgggagagaatgtcccaaaattgattaggctgagccttgggaatagtttggcaggtttaacatcccaaggctaacctaacgtagttgggaaaggtagattgaatgagacatgttttctgtgcttctaagtgttctgtcccttaggctgctattgcttcatgtttccattatggcaggtttagagaatccttaaaaagaaaaattgacttgcttgcctaaaactacagtgcccccttagcctccattacttagtatctcttacagtttgctctggctctcaaataatataaagattgatgaacattattcacagaaaatgggcaccttctctctctcttccagcatgttgcttttgaaagtatcatgggatagtgggacgagcactggtttaggagtcaagatatctgggttctcactctactcagtcccagcagagctgttgtataaccttgattaagtcatttagcctctctggatttctatttcctcatctgtaaaatagagttaaatgtatgtaagattgattctgattctgaagtcttaactgccagcagaaaaactccatactgttcattgtaaaactaaaagtgaggaaggctcgtgggtggtgaacctctgctctgtaatactgggaaagtactacagaggggaaccatttgagggatacatgaggagagagtaaattgaggtttggggattataaattcaggcaagagaaccttatagatatcacagtcttgagggtcaaaaaaaaatacttaggaagctagccatggaagcttcttgcctctgacccagcccactttcccagcctacctctgggccttagctgctaaaaagcttctctggcagcggagctgcaggcctgaggaaacatgctcagtcatgcacatgtgttgacccatgtttcagatgcagtctgatgccaggtatattgttagggaaagaggaagaagggtaaactgagctagcccctggggctgagtactcctgcagggctggaggaacaggttcttagaagatgattcaccttggaggaagctggggaaagtggttagggagggagaggaggaagactgagaaatctctgcatccccagaactcagcaacccagctcttttatcatgaggagaggtagccatgctgactcatgaacaggtggaggaaaggggttgcaggtgaccagcatcttcaatctagttaccaccagcttggctagaattttattgaacgcaacttgctagttatgacagagaggaccagggtgagaactaatgctcaagagagcaagattctgtaatcctcttgccctctcacatcacaaattctgatatgccaaacatttggcccaatgagaatgactgatagacttgctgatgtgcatgtggggggatgaggtgtgtatatgcctttctcctgactggccattcagtgttcaggctgtcattcaaattggataggagaaagttggtgaggaaggaatggagagagcaggatccctggactccctggtccccaaactccttgactgtcacttgtaattgtatataatttttgtgtttcttgctccatttcctcatgctgtcatccttaaagtccatctgggaaggggaaaatgctgaacaccattgtatagtttcttcaactgtcccagccatgttgtacatagatatgtcatgttattatatatataaatatatatataattttgtacgttttcttcatctccgatcttctcaaattctgtactttttttcttttctgtctgagctgccttctctatcattcagcttgagtcctcaagactactggtcacaatgagtctgatttttaggaaggaataggaggagcagggaaatcagaaaaactgttggtctcactctgtctctctacctggtcatcttcaaggctaagaaaacaaacaagctacattctgtatttgccagtttccacagcatgaagtacatagcttccttagcaaggagtggtcattccaaaatccaaatgcaaattgctttgattaaacctagattattaaatccattcagaacagcaaaaaaaaaaaaaaaaaa

SEQ ID NO: 31773 - DNA, 925 bp, Homo Sapiens
tgaaggcctgtgagtgaggaatgcctctcaccagctgtgcctgagctgcagcactccagccactgctgtctccttagctgctcacatatggatactttcacagttcaggattccactgcaatgagctggtggaggaataatttctggatcatcttagctgtggccatcattgttgtctctgtgggcctgggcctcatcctgtactgtgtctgtaagtggcagcttagacgaggcaagaaatgggaaattgccaagcccctgaaacacaagcaagtagatgaagaaaagatgtatgagaatgttcttaatgagtcgccagttcaattaccgcctctgccaccgaggaattggccttctctagaagactcttccccacaggaagccccaagtcagccgcccgctacatactcactggtaaataaagttaaaaataagaagactgtttccatcccaagctacattgagcctgaagatgactatgacgatgttgaaatccctgcaaatactgaaaaagcatcattttgaaacagccatttcttctttttggcaaaactgaagagggttcacacaacttattttaaaacaatcaagaatggttgaacttcagtaggtctctgggccctgaaagccagtggtgattttatgaagctctataagataaagcacttcccaaaccttagatgaagacacccctgcgatcggatgactgcagccagaggagacacatgggtgctcggctctgaggacttagaggggtcagccttgtgctgttgaggaaactttccatgggaaggaccacggggctccatggctcccacctgtgggaaactactcatttcttggcattctttcccccttcattccctttggtttgcatggttctgagtgatattaaatctcagcatttggttgtgcaaaaaaaaaa

SEQ ID NO: 31774 - DNA, 5793 bp, Homo Sapiens
ggcagggccggaaggagtgcagcggctgccacggagctcgcagctgcggcttctgaggagtaagcggcgcggtagcgaaggccgccgaacctgcctggctagccggcgacttgagtgacgactcttttgaaacagatggtcaccatgtttagatattagcagtcccatatatgcatgtctgcatttgaaaatggaagagggaaacaacaatgaagaggtaattcacttgaacaactttcactgccatcggggacaagagtggatcaatctccgagatgggcccatcaccatatctgactcctcagatgaggaaaggattccaatgctggtcaccccagctcctcagcagcatgaagaagaggacctggatgatgatgtcatcctgacagaaacaaataaacctcagagatcacgacccaatctcatcaaaccagctgcccagtggcaagatctgaaaaggttgggagaagaaaggcctaaaaagtctagagcagcatttgaatcagataagagcagctatttttcagtgtgtaacaacccattgtttgattctggggcacaggatgattctgaggatgactacggtgaatttctggatcttgggcctcctggaatctctgaattcactaagccaagtggccaaacagaaagagaacccaagcctggaccgagtcataaccaagcagcaaatgacattgtcaaccccagatcagagcagaaagtcatcatcttggaagaaggtagccttctttacacagaaagcgatcctttggaaactcagaaccagtcatccgaagactcagagacagagctgttatcaaatctaggagagtcagctgctctagcagatgatcaggccatcgaagaagactgctggttagatcatccttacttccagtctctgaaccaacagccccgtgaaataacaaaccaggtcgttcctcaggaacggcagcctgaagcagaactgggccgcttgttgtttcagcatgaattcccagggcccgcttttccaaggccggaaccccagcaaggtgggatttcaggcccctcttctcctcagcctgcccatcctctaggagagtttgaagaccagcagttagcaagtgatgatgaagagccaggtccagcctttccaatgcaagaatctcaagagcccaatttggaaaacatttgggggcaagaagctgcagaggtagatcaagagctcgttgaactactagtgaaagaaacggaagcaagatttccagatgtagcaaatgggtttattgaggaaataattcattttaagaattattatgatctgaatgtactttgtaattttcttctggaaaacccagattatccaaagagagaagacagaatcattataaatcccagtagcagtctgctggccagccaagatgagacaaagttgcctaaaatagacttttttgactattctaaattgacccctcttgaccagcgctgcttcatccaagctgctgacctcctcatggccgacttcaaagtgctcagtagtcaggacatcaagtgggccctgcacgagctcaaaggacactatgcaatcacccgaaaggccttgtctgatgccattaaaaaatggcaggagctgtcaccagaaaccagtggaaaaaggaagaagagaaaacaaatgaaccagtattcttacattgatttcaagtttgaacaaggtgacataaaaatagaaaagaggatgttctttcttgaaaataagcgacgacattgtaggtcctatgaccgacgtgctctccttccagctgtgcaacaagagcaggagttctatgagcagaaaatcaaagagatggcagagcatgaagactttttgcttgccctacagatgaatgaagaacagtatcaaaaggatggccagctgattgagtgtcgctgctgctatggggaatttccattcgaggagctgacgcagtgcgcagatgctcacttgttctgcaaagagtgtctcatcagatatgcccaagaggcagtctttggatctggaaagttggagctcagctgcatggaaggcagctgcacgtgttcgttcccaaccagtgagctggagaaggtgctcccccagaccatcctgtataagtactatgagcgaaaagccgaggaggaggttgcggcagcctacgccgacgagcttgtcaggtgcccgtcctgtagctttccggctctgttggacagtgatgtgaagaggttcagctgtcctaatcctcactgccgaaaggaaacctgtaggaagtgtcagggactctggaaagaacataatggcctcacctgtgaagagctggctgaaaaagacgacatcaagtaccgtacctctattgaagaaaaaatgactgctgcccgcattagaaaatgccacaagtgtgggactggcctcatcaaatctgaaggctgcaaccgcatgtcttgccgctgtggtgcccagatgtgctacctctgtcgagtttctattaatggatatgaccatttctgccaacatccccgctcaccaggagccccttgccaggagtgttcaagatgctctctctggaccgatcccactgaagatgatgagaagcttattgaggaaatccagaaggaggctgaagaggaacagaaaagaaagaatggagagaacaccttcaaacgcattggacccccgctggagaagcctgtggagaaggtgcagagggtggaggccctcccgaggcccgttccgcagaacctgccacagccacagatgccaccctatgccttcgcgcacccacccttccccctgcctcccgtgcggcctgtgttcaacaacttcccactcaacatggggcctatcccagccccgtacgtgccccctctgcccaacgtgcgggtcaactatgacttcggtcccatccacatgcccctggagcacaacctgcccatgcactttggcccccagccgcggcatcgcttctgatggccccgaatccccattgagcagcacaaagcccgtttggggtaggagtgtggatggagaaccctcccccaaggctggtgtctgtaccattgcatcctaagtcagcttgaagggtaggctggttttcttcccacccctttcctagaagggctactgctcctggaagagtggacggatccataataaagacgtcccaaatggtggagttcggagagagctgcgatgtgaactgcccctcccctcgcatcccccaggccaccaacggcagtccttctgccttgtccatggcataggccatagaccaggtccctgctgctcacacctgggcctctcctcggagccgacccctgggtagcaaggcagccgagagcatctccctggaggggcccacggttgggccaagggcagagggggctgcacctgcgggcctgggaagcattgctcagggtggggggctgggaccatggcccgcagaggcactgccacagctgtgagggccaagatgctgtccccccatccaaaacccgtgcgccactgcagtgagtgttgagggcacctctcctcccctcttacacctactcagatgaggcagcagcagacccatctcgcggcgggggttttgttctgttgccgcctaactttctcatcctcggtctctggaaagtcaggctgagaaatcctttcccaggccaggccgctgcggtacactggatggttctgaagctggcccattgaaagagcctcttaaggcagctgggacagaggcctggtggccctgctgggcagcccaactgctgggggagacgtttctgccaccctgggtgatgagcagcttttcccccctggctttctgggggaggagtgggcctccttagggagacaggtgaccctgggtgccacccctgccccgtgtgtgccccgggtgttctcagtggttgctgaaggcaggtagagggtgctgtccagtatcccccatgtgaaggtcacttcccttctcatggagtcagctgagcatcagctcagccctgccatgtccccactcaccctcctcgcctcctgtccggccctgggtttctagcggtgcctgaggcatcactctggcccattgacagatgagaggtctgaagccttcctggccacaggcatcactttctcctcctcctcatgccctgccttgtccttgtcgtgttgccatggggttctgagaggctgggagttcacagacctcagacacagctgagtccgacaaccattggggtggggctgcatcagtctccggagtggcccgccacctcctgaagcagggcctggcccacccaaggtgcctggggcaggcgggcaccgtcattcgctgccattggcttctcagatgtatttcaaggactaaagtgggctctaagatctaagatggcccggcgcggtggctcccgcctgtaatcccagcactttgggaggccgaggcgggcggatgagttgaggtcgggagtttgagtccccgtctctactaaaaatacaaaattagccggacaaggtggcgcatgcctataatcccaggtactcaggaggctgaggcaggagaatcacttgaacctgggaggcagaggttgcagtgagccaagattgtgccactgcactccagcctgagcaacaaaagcaaaactctatctttaaaaaaaaaaaaaaaaaaactaagatacccattctttctgcctttgcccaggatggaggctttgaagacaggtggtcacctggacctggggtaagggtgcgcagggaggccgggcttgggggcagcctgctgctatgtccttgctggcgcccatacctgttggactgcctgaactttgctactagcctgaacgacagtgccttggaaaggcaggctccatgcggcagcaacaggattgtcttcggtaccttaaatatgctccctgtgcttccccagggaggatctctgggagcagagggcggctgtagacatcacagctgaagaggtgacctcaggccctgggagcctcagctccctctgccctgtaccctaggcacgtggctccagcaagagccccaggcaggacaaagggagcaggcagcagctgcagaaacagccctagacaggtgctggcctcaaccctggcaggggagggggagcccagagtgatgtttctcctaaggccaaaccccaggggtgggtcatttgagaggagttccagctgttctggccacactgggctggtggggaaggagcggcggcctctttccttggagggtccctgattcctgaggatcctccccgagccaggcacgggggaccacagggctgccgtgagcacccaccctggttctccaggcccctctgtccagaggcagggcctgaacctcgggctcctgcctggaccagtgacagcattggggagagaagcactgggggtcttcagaccagccagcaaggggccgtgccagtgcccagagagcaggtcagacaacaggcaaccctgaggcagctggctccctctctctgccctgcagggcttgccgcagggcgtgaggctccccagccacagccccctcttacttgccttaaaactggagagaggaatctagtatttgcacttagcaaaatatttaaaaactgaaaaaaatgtgcatgatctgtcactttgtataaaaacaagaaacgattagttcattaaactttttctttaccttctggtagtaaaaatagataaaataattccgtttcaactactgtgtgtaaaaagcctgtatcatatgtaactgggacttttgtaaataaatgtttgtgcgctctgctcaaaaaaaaaaaaaaaaaa

SEQ ID NO: 31775 - DNA, 1152 bp, Homo Sapiens
cccctcgcacccccgcgcccccagtccccgcgtccccggcgccgccggcccggagctgcccggaagtctcggttccgccgccggcgctcgccaggggaagcccggggccgcccgggacctcggcccgttcctccggacccgagaggccgccgcacgggctgccgctccagatgctgctgctgccgccgcggccaccccaccctcggtcctcctctccggaggccatggacccaccgccccccaaggctccccctttccccaaggcggaaggcccctcctccactccttcctcggcggcggggccccgacccccgcggctgggccgccacctcctcatcgacgccaatggggtcccctacacatacacggtgcagctggaggaggagccccggggcccgccccagcgcgaggcgcccccaggagagcccggccctcgcaagggctacagctgcccggagtgcgcccgtgtctttgccagccctctgcggctgcagagccaccgcgtgtcgcactcggacctcaagcccttcacgtgcggcgcctgcggcaaggccttcaagcgctccagccacctgtcgcggcatcgcgccacgcaccgcgcccgcgccgggccgccgcacacctgcccgctctgcccacgccgcttccaggacgccgcggagctggcgcagcacgtgcgcctccactaagctcgagacccggcctgtgctgccctgcccgtctcagggccaccaagtctgacccacacagcgtcactcactcccacacacaccccctggctctgctgaggttactgccttaccctgggcctcagtttccccaccttccaaagggaggagcatcattccttccttaccccctttctagctgtgtgatgtagaccaaagtcgttgcccctccctgggcctgggaaccagtcggaactgggttccagtccagctgtgctgtgtgagcctgtgcaagtgacatgacctctctaaaccttggttttctgctctctggagcggtgaaccggtggttgtctgcggggaagagatgataaagagcacgggcacggtctggttcatttctgtatctaccccccttccgcccacgcccccgaccctttgctcaataaacattccgcactccaaaaaaaaaaaaaaaaaaaaa

SEQ ID NO: 31776 - DNA, 3176 bp, Homo Sapiens
gcttgcacacatggctccggaggctccggttgcccatccgagcccctgccaggctctaacgttcccaactgacaacaccagtaactaaatataggagcagatggtggggacgggctgtcgcagcggctcctttgcagaggtctccggactgcagataaggctcaggcccttttgtgagaagcagaccagcctgggggctggcggcaggacacctgtgtctgcatgctgaagaagatgggtgaggccgtggccagagtagcaaggaaggtcaacgagacggtggagagcggctctgacactctggacctggccgagtgcaagctggtctcctttcccattggcatctacaaggtcctgcggaatgtctctggccagatccacctcatcaccctggctaacaacgagcttaagtccctcaccagcaagttcatgaccacattcagtcagctccgagagctccacctggaggggaacttcctacaccgcctccccagcgaggtcagtgccctgcagcacctcaaggccattgacctgtcccggaaccagttccaggacttccctgagcagcttaccgccctgccggcgctggagaccatcaacctggaggagaacgagatcgtagatgtgcccgtggagaagctggccgccatgccagccttgcgcagcatcaacctccgcttcaacccactcaacgccgaggtgcgcgtgatcgccccgccgctcatcaagtttgacatgctcatgtctccggaaggcgcaagagcccccctaccttaggccaccctcctcatgcccacccagcaaggggcagaggccacaggcctggaaccctggaagggagggaggcccatgggaggccaagcctgggggctgggggcgggtgggccgagcagcacgtggtgggtggggtgcagctggtctggatagatagcttacagcagtagtgggctctggaatgcccaagggaagaggcaaggtggggcctgcagcctggactcggcactcacagctgctgtgcaaactcaggcagatctcctgccctctctgagccttgtcacttgaaaaaaacaggaccctttccctcctttgggctccctggaggtttttaagcagtacgtgcctccaagttacctccagatcagcaggcacaggtgggcattgccaggtattttctgagcccctgcgggtttgaggccttgtttttagtgctgagagccagttgctgccctgagaagagaagacaacctccatctatttattgcttcctgagaactgacctggatgcggccctctgcagggcccagtcttcagtcctgtggtccctggactggtgggaacctgaactaggagtcctgggagagctgtggtgggaatatgggctggcactgctgcagggcaagaacattcatgtaggagcccgaggaccagcaggctgggaatggggagcaagtcacgtcagctctgtcattccccacagttaacaaattggcggggtgggaagtcctgagtgctccgtccctctagcatcactcctgagctgcgggagaggtggcccagagaacagcagagtcagttacacctgcagctcttgtctaaagtgattagatggccaccctcaccactgtccagtccagcagcagcctggctgccttgtcatggcctcctgggggcagaaggcgatgtggaccacgggatttgtagccagccagctcccaggccaacgcccaaagccctgatgacctggttcttctgaggccctcaacctggcatcttagggtatggtcaggcaacagggtgaccagctgtcctggtttcccaggacatggaactttcaatgctaaaactgggacagtacccagcaagtggggatggttggtcccctaccaggagagggcctggggctcttgcttcccgagaacgcctgtggcttgaagaaccttgactgcttggtcctcaggtatctacctcccaccttctcctcatctgtggagcaagccaactcagtgccccagaccccacctgatctgcatctttgtttgcatctccagagacacctgaggccccagagcttgaggcaaagccaggccgtccaaatcctgtgtgccgtggacgagtggccactttactactcctaaggctaagatgttgagagctcagaccactgctcagagcagtaatccctgctcagaatgctcccagttccctcgtccctgcccaggtctcttgtctcttgggaaggaactgataggtcgggccattgttgggccatcactgagcgctcagtatctcaagagactctgttcattctgctcgtatcccaaggcctggttggtcaaactctgggcaaagggttttcaggatgaggaggtcaagacaggatctccagagctaccgagttcatctgtgggtgttgggggcaagtgggggctgaagtcctgtgcaggctgcgctggccccacctgccttgtgccctggagtggggtttctccttgttgaagaagaggcatccttctctgatgtgcacaaacacaatgtatgaccagagccttgcaactcaaagtgtggtctgtggaccagcagcggcagtgacacctgggagcttgttaggaatgcagagtctaggcctcaccctatacctcccgactcagaccctgcattttagcaagacccccagctgattcctataagcactttagagtttgagaagcaaggacctaggctggggatgtcctccgagcagagggtgaagtttctctcagttctctccctgccacttccagggatctgagcctgtgctcagcctcctccctaacccaccctgggagacacttggcctgttagattgttccagagtctgcatggcactcctgaagaagggagtgtgacctgcagtcaccaggagatgagggttaggtgtgcccagccctccagacccggcctttctggttaacccctgcatgccaagctgcctgctgccccaggtcctcacctcaggcctttgaaggggcagcttctggaagttgttttctcctctgcttggagagtttgcccttgtctgtcttggaaagtgtgggcagccacagatgcccccaaatcagagctcacagtgagtgagcccctaagcttcagtctgcaataaagaatgcattggtttcatcaaaaaaaaaaaaaaaaaa

SEQ ID NO: 31777 - DNA, 3413 bp, Homo Sapiens
gctgctgaggcagctggcgttctgttcaggttcgtgggcctgcagaggagagactcgaactcgtggaacccgcgcaccgtggagtctgtccgcccagtccgtccggggtgcgcgaccaggagagctaggttctcgccactgcgcgctcggcaggcgtcggctgtgtcgggagcgcgcccgccgcccctcagctgcccggcccggagcccgagacgcgcgcaccatgagcggtggtgaagtggtctgctccggatggctccgcaagtcccccccggagaaaaagttgaagcgttatgcatggaagaggagatggttcgtgttacgcagtggccgtttaactggagatccagatgttttggaatattacaaaaatgatcatgccaagaagcctattcgtattattgatttaaatttatgtcaacaagtagatgctggattgacatttaacaaaaaagagtttgaaaacagctacatttttgatatcaacactattgaccggattttctacttggtagcagacagcgaggaggagatgaataagtgggttcgttgtatttgtgacatctgtgggtttaatccaacagaagaagatcctgtgaagccacctggcagctctttacaagcaccagctgatttacctttagctataaatacagcaccaccatccacccaggcagattcatcctctgctactctacctcctccatatcagctaatcaatgttccaccacacctggaaactcttggcattcaggaggatcctcaagactacctgttgctcatcaactgtcaaagcaagaagcccgaacccaccagaacgcatgctgattctgcaaaatccacctcttctgaaacagactgcaatgataacgtcccttctcataaaaatcctgcttcctcccagagcaaacatggaatgaatggcttttttcagcagcaaatgatatacgactctccaccttcacgtgccccatctgcttcagttgactccagcctttataacctgcccaggagttattcccatgatgttttaccaaaggtgtctccatcaagtactgaagcagatggagaactctatgtttttaataccccatctgggacatcgagtgtagagactcaaatgaggcatgtatctattagttatgacattcctccaacacctggtaatacttatcagattccacgaacatttccagaaggaaccttgggacagacatcaaagctagacactattccagatattcctccacctcggccaccgaaaccacatccagctcatgaccgatctcctgtggaaacgtgtagtatcccacgcaccgcctcagacactgacagtagttactgtatccctacagcagggatgtcgccttcacgtagtaataccatttccactgtggatttaaacaaattgcgaaaagatgctagttctcaagactgctatgatattccacgagcatttccaagtgatagatctagttcacttgaaggcttccataaccactttaaagtcaaaaatgtgttgacagtgggaagtgtttcaagtgaagaactggatgaaaattacgtcccaatgaatcccaattcaccaccacgacaacattccagcagttttacagaaccaattcaggaagcaaattatgtgccaatgactccaggaacatttgatttttcctcatttggaatgcaagttcctcctcctgctcatatgggcttcaggtccagcccaaaaacccctcccagaaggccagttcctgttgcagactgtgaaccaccccccgtggataggaacctcaagccagacagaaaaggtcaaagtcctaaaattttaagactcaaaccccatggtttagagcgaactgattcacaaaccataggtgactttgctacaagaagaaaggtcaagccagcgcctttagaaataaaacctttgccagaatgggaagaattacaagccccagttagatctcccatcactaggagttttgctcgagactcttccaggtttcccatgtccccccgaccagattcagtgcatagcacaacttcaagcagtgactcacacgacagtgaagagaattatgttcccatgaacccaaacctgtccagtgaagacccaaatctctttggcagtaacagtcttgatggaggaagcagccctatgatcaagcccaaaggagacaaacaggtggaatacttagatctcgacttagattctgggaaatccacaccaccacgtaagcaaaagagcagtggctcaggcagcagtgtagcagatgagagagtggattatgttgttgttgaccaacagaagaccttggctctaaagagtacccgggaagcctggacagatgggagacagtccacagaatcagaaacgccagcgaagagtgtgaaatgaaaatattgccttgccatttctgaacaaaagaaaactgaattgtaaagataaatcccttttgaagaatgacttgacacttccactctaggtagatcctcaaatgagtagagttgaagtcaaaggacctttctgacataatcaagcaatttagacttaagtggtgctttgtggtatctgaacaattcataacatgtaaataatgtgggaaaatagtattgtttagctcccagagaaacatttgttccacagttaacacactcgtagtattactgtatttatgcactttttcatctaaaacattgttctgggttttcccaatgtaccttaccataattcctttgggagttcttgttttttgtcacactactttatataacaatactaagtcaactaagctacttttagatttggaaattgctgtttacagtctaacaacattaaaatgagaggtagattcacaagttagctttctacctgaagcttcaggtgataaccattagcttatacttggactcatcatttgttgccttccaaaatgctgaggataatgtatgtactggtgtcaggacctagttctctggttaatgtacatttagtttttaatggtggaactttgttatattttgttaattacagtgtttttggttcattgagtgaagattctgccgggtgggatcttgcacctttgaaagactgaataattacactaccaagtaagcctgcaaatcattgatggcatgcagtgatgatgtgctcttacacttgttaacatgtattaagtgttatttgcaaaaggtagattatgtaaccaatcaggtacgtaccaggcagtgatgtgctaatacactgatcaggtttagacaatgagctttggttgtgttcttgttagtcctaatattggttttcagtttggaattaataaagcagttgacattcaaaaaaaaaaaaaaaaaaaaaaaaaaaaaaaaaaaaaaaaaaaaaaaaaaaaaaaaaaaaaaaaaaaaaaaaaaaaaaa

SEQ ID NO: 31778 - DNA, 6459 bp, Homo Sapiens
cggcgtctctctcccccgcgccagctcccgtacacggagccgcattccttggcccccccacccccctccctcggggcccccccgcccccctcgggaaaaaaatccaccccgaatcactcgaacccgagggaggcttcctttcacccttggggagacgagctttcaacggttacctcttcttcgtctccccccaagcccccgtcccctccccctgctcccacccccttctggcgccgggtgtaaggtccctttaaggcgacggcgccttcctcgggtcagactaccggcggcgacgaccacaggagcatggcggacaccgacctgttcatggaatgtgaggaggaggagttggagccatggcagaaaatcagtgatgtcattgaggactctgtagttgaagattataattcagtggataaaactaccacagctggcaatcctttggtccagcaaggtggacagccactcatcctgacccagaatccagccccaggtctgggcacaatggttactcaaccagtattgaggcctgttcaggtcatgcagaatgccaatcatgtgactagttcccctgtggcctcacaaccaatatttatcactacgcagggatttcctgtaaggaatgtccggcctgtacaaaatgcaatgaatcaggttgggattgtgctgaacgtacagcaaggccaaacggttagaccaattacactagttccagccccaggtacccagtttgttaagccgacagttggagttccacaagtgttctcccagatgacccctgtgaggccaggctccacaatgcctgtgaggcccaccaccaacaccttcaccaccgtcatcccggccactcttaccattcgaagcaccgtcccacagtcccagtcccagcagaccaagtccactcccagcacttctaccactcccactgccacacagccaacctcactggggcaactagctgttcagtctccaggccagtcaaaccagaccacgaatcccaagctagctccctccttcccctctccacctgcagtgagcattgccagctttgtcactgtgaagcgacctggtgttacaggcgaaaatagcaatgaagtggccaaattggtgaatacccttaacaccatcccttccctgggccagagtcctgggccagtggtggtgtccaacaacagctctgctcatggctctcaaagaaccagcggacctgagtcttcaatgaaagtgacctcttccatcccagtatttgacctccaggatggtggacggaaaatatgtccacgatgtaatgctcaatttcgtgttactgaagctttgagaggtcacatgtgttactgttgcccagaaatggttgaataccagaagaaaggaaagtccctggattcagaacccagtgtcccatcagcagcaaagcccccatcccctgagaaaacagctcctgttgcttccacaccctcttctacacctattcctgctctgtcaccgcctaccaaagtaccagaaccaaatgagaacgtgggcgatgccgtccagaccaaactcattatgcttgtagatgacttctactatggacgggatggtggcaaagtagcccagctcacaaatttccctaaggtcgccacatctttccgatgcccacattgtaccaaaaggctaaaaaacaatattcgattcatgaaccatatgaaacaccacgtagaactcgatcagcagaacggtgaggtagatggtcacactatctgccagcactgttaccgccagttttccactcccttccagcttcagtgccacttggaaaatgttcatagtccctatgaatctactaccaagtgcaagatctgtgaatgggcgtttgaaagtgagccactatttctccagcatatgaaggatactcataagcctggagagatgccttatgtttgccaggtgtgtcaatatcgctcctcactctactctgaggtagatgtccattttcggatgatccatgaggatacccggcatctgctctgcccttattgcctgaaggtcttcaaaaatggcaatgcattccaacagcattacatgaggcaccagaagagaaatgtttatcactgcaacaaatgccggctgcagtttctctttgccaaggacaaaattgaacacaagcttcaacaccataaaaccttccgtaaacccaagcagctggagggcttgaaaccaggcaccaaggtgacaatccgggcttcccgagggcagccacgaactgttcctgtatcctctaatgatacacctcccagcgccttgcaggaggcagcaccgctgacctcctcaatggaccctctgcctgtcttcctttatccccctgtccagcgcagcatccagaagagagctgttaggaaaatgagtgtcatgggccggcagacatgcctggagtgcagcttcgagatcccagacttccctaatcatttccctacttacgtacactgctctctgtgtcgctatagcacctgctgttctcgagcttatgccaaccacatgatcaacaatcatgttccacggaagagccccaagtatttggctttgtttaaaaattctgtgagtggaatcaagctggcctgcacttcatgtacctttgttacctctgtgggcgatgctatggccaagcatttggtattcaacccctctcacagatccagcagcatcctgccacggggactcacttggatagctcactcaaggcatggccagactcgtgaccgagtgcatgaccggaacgtgaagaatatgtaccctcctccttccttccccactaacaaagctgccactgtgaaatctgcgggggccaccccagctgagcctgaagagctactaactcccttagccccagcactcccatcaccagcctcaactgcaaccccaccaccaacccccactcacccgcaggctttagcccttccaccgctggctacagagggagccgaatgtctgaatgttgatgatcaggatgaagggagcccagtcacccaagaacctgagctagcatcaggtggtggtggtagtggtggagttggcaaaaaggagcagctgtctgtgaagaagcttcgagtagtactgtttgctctatgctgcaatacagaacaggcagctgaacacttccgaaatccccagcgacgtattcgccgttggcttcgacgtttccaggcctcccagggggagaatctagagggcaaatatctgagctttgaggcagaagagaaactggctgagtgggtgctaacccagcgcgaacaacagctacctgtaaatgaggagaccttgttccagaaggccaccaaaataggacgttctttggaaggggggtttaagatctcctatgagtgggctgtgcgtttcatgctgcggcaccacctgactccccatgcccggcgagctgtggcccacaccctacctaaggatgtagcagagaatgcaggactcttcattgattttgtacaacggcagattcacaaccaggacttacccttgtctatgattgtggctattgatgagatctctttgttcctggatacagaggtgctgagcagtgatgatcgaaaggagaatgccctgcagacagtgggcacaggggaaccttggtgtgatgtagtcctagccattctggcagatggcactgtccttcccaccctggttttctacagagggcagatggatcagcctgctaacatgccagactccatattgctagaggcaaaggagagtggctacagtgatgacgagatcatggagctgtggtcaactcgagtgtggcagaagcacacagcttgccagcgcagcaaaggcatgcttgtgatggactgtcatcgcactcacttgtcagaagaggtactggctatgcttagtgcctctagcactttgcctgcagtggtcccagcaggctgtagctccaaaattcagccattagatgtatgcatcaaaagaactgtcaagaacttcctgcataaaaaatggaaggaacaggctcgggaaatggcagatactgcatgtgattctgatgtcctgcttcagctggtgcttgtctggctgggtgaagtgctaggtgtcattggggactgtccagagctagttcagcgctccttcctggtggctagtgttctgcctggccccgatggcaacattaactcacctacaagaaatgctgacatgcaggaggagctaattgcctccctagaggagcaactgaagctgagtggggaacattctgagtcttccactccacgacccagatcatctcctgaagagacaattgagcctgaaagtcttcaccagctctttgagggtgaaagtgagaccgagtctttctatggctttgaagaagctgacctagatctgatggagatttgagtgttggggtcatgagggggtgtggagtgagggtgggaacatgtgagggagggtaaaggggcttagggaaaagggggcataccaggtggggtatttggtttctattttttaattttataccaccactcccccctgaagttgacttacacttccctgtggatttgtggattaattaggaaaaccaatagtaatcacgtctgagccaaggagctggcccattggtcattcacttctgctaaaaacaggtttttgtgactttttttttttttaaatttaaatcactgtgtttggtatttttctgacaaaattaagaaaaagaaaaaaaattatttgtgggcaaatgttaaatttttttgtttccccttttacctcaattgtatcatagtactgggtttttttgtttgttttattgtgtggccaatgtctttgggcatgatgctatctaatcattgttaatgtgagaacatttctgaagatgggaaagacaaattatgtagctcacaaactggtttattatatatatggataaaaaacttttttcattgtggtcttaacacttttatataaaaatgaaaatggaaaaaaagtcccactgaactctctcttccttctccttttctttccttccctctccagagatgttggtttctacagcaaccctagatataaaattgtggctttaaaaatgcatgaaaccacctttaattatccagaatgaatagatttgtcttttcctcaccaccttccctccaaaacatgacataaacaatattttttgcacttgtgatccttggcccctttccccattctcaacaccatccatccctctggacaaaggatcatacaggtgttattagcaagcaagagatactgaagcgatcaaacagttttagggtggaagccattcccagtttgagtcttcatcctgtaagcccccaggggcagtccctgctttactgaacttcatcctgttagatggagagcatgcctgtttaagggattactggtcctacagccaggagctaattgttcaagaagtgttgaactttaaaaagacaagaccacttgttgaaatccagcgtgctctgtggctttcccctatttctcttaatacttagggaagaatctgacaggaagaagcgcacaggggtgtgcacaaagaaaatgacatgaatctttatttttcactgccagcttcaaggaaagaaaattttttctacaatttgcatgagggatttttttaattgtatgtactcatggttgtaaaccaaaacgtactgtaccgtacagagaaaaggagcaaaaaaccaagtcttctgtttatcctgaggctttccacaatgttcccctcctgtgagccaaggaggcaaactgcacaagcttgtaaatggttcgtctttaaaatgtacataagtggaacatttaataaaatgaggggaaatggatttataaacttgttttttttctaggtgaccctgtttaataggctttcacagactggggaatgctcaagatgtgatgggcctggtggtacaggtgtgacatttgttaccacccatttctcccaccccaccctgcttttttgtttgtttgttttttcatcccccagcacactataatatagtgaactggaaaagtcccttccagaaacagcttggccagctttgtgaacctttgacatctgaaaacaaccaaggatccatctgggcttctcttccccagctttttgcctgatgccattttattgacagacaatggactttgaagtcagcctttgcctttgagaaagttcaagaactatggttggtcacgtctatctacaacctaatcctactctttggtagtctctgcagcagccacagccttagcagagctggggttcctgtcttctgcacacgattgactttcttgatgggtaattttttttaagattataccaacagtggatcagctgggttttggccaggaagttgtctttgtggactctgcctgcatggcttagtagtagaaggaaatttttttttggttttgttttttataattcagtttaatcaataaacatgtatttattgactgtta

SEQ ID NO: 31779 - DNA, 3201 bp, Homo Sapiens
gtaccgtgtggggctgcccagccggaagaccctgtaccagctgcaggcggagcggattcggcgggtggagcagctggccggtgagcgccacgggacccgctgcaccgtcccctggtgtgtcctgcctgccctacctcggcccggaggtacccttccccacgcccccccacatccccgctccagacgcgagccccaaccccggcacagaccgggacattgcccagaaccggcccaaaatggggcctggccccagccccaactggacactggaccccgaaccccgatgccggctctggtccgagccccgtctgcctgcagggccaggcgtactcgcggccggctcaccgcgcctcccttgcaggtacgtcatgaccagcgagttcactctggggcccacggccgagttcttcagggagcacaacttcttccacctggaccccgccaacgtggtcatgtttgagcagcgcctgctgcctgctgtgacctttgatggcaaggttatcctggagcggaaagacaaagttgccatggccccagacggcaacgggggcctctactgcgcgctggaggaccacaagatcctggaggacatggagcgccggggagtggagtttgtgcacgtgtactgtgtggacaacatcctggtgcggctggcggaccctgtcttcatcggcttctgtgtgttgcagggcgcagactgtggcgccaaggtggtggaaaaggcataccccgaggagcccgtgggcgtggtgtgccaggtggacggtgtcccccaggtggtggagtacagcgagatcagtcctgagaccgcacagctacgtgtctccgacgggagcctgctgtacaatgcaggcaacatctgcaaccacttcttcacccgaggcttccttaaggcggtcaccagggagtttgagcctttgctgaagccacacgtggctgtgaagaaggtcccgtatgtggatgaggaggggaatctggtaaagccgctaaaaccgaacgggataaagatggagaagtttgtgtttgatgtgttccggtttgctaagaactttgctgccttggaagtgctgcgggaggaggaattttccccactgaagaacgcagagccagccgacagggacagtccccgcaccgctcgccaggccctgctcacccagcactaccggtgggctctgcgggccggggcccgcttcctggatgcccatggggcctggctcccagagctgcccagcttgcccccaaatggagaccctccggccatctgtgagatatcgcccttggtgtcttactctggagagggtttagaagtgtacctgcaaggccgggagttccagtccccgctcatcctggatgaagaccaggccagggagccgcagctgcaggagtcctgacccgcccagactgcccccagactcccccgagacctgccagccccggcatcctggaagtcccgactccccccagacctgccagccccggcgtcctggagctgggggctacagcccagcctgagctctgggtgggaaagcagcctgccccatgcttccagcctgcagaacacagaatgaaacatgctggtagactccacgagggcagggcctctcctgtcgcctctggacacaagtggcgacagcctgctgggggctctgtggctccattcctggctgtggggtctagtcaagaggcagagggacttgggacctgggagaatggggctgagaggaggcttcgggttggggcccaagggaggtgtggtgtcatctggggagaacaggagggcatgtccctttgggagcccgccttgtggatccaccacaccccaccgagcactagaagctgcataagctacacaggatgtgcttctgcagcctacagatgcagaaccagaatgagggggacaattccacccactcgagggctgccccctcttccttagcagacgaaccagtaatgggggcaaggctggggcatcccagcccacacaccctggatgcccagcaaggccacagaaagagcctgatgtccatgatccaggtggctctgagaagcttggcctggacacctgagcctgcggccggtactcctgccttctccccatctatccccaaggcctctgcctctcagcctcttccatggtcggtttaggctgctgagttttctgtgcttccccaagaaccagtgggatcaatgccggcggcctctgtgatggttgctgactaatccgggatttcatgagtcagaggcaccacccctcaccccagctgcctgctgcttctgacggatcttggtgctcaggctgcctggctctccgagtgaggacgcagcctccatatttggtgcactcaggcatggctgggacaagccagctgccccagggttcttcccctggtgattctcgcctgctttctcatctcaggggaggcagtggcacctccctctccctgctgacatgaagagagctatgatatgccactgctgccaactcatcctctgcccccacctcgaaacccacagtccccagtggagggccactactcatccccattggtttcccaggggaggggtgttgtctggaagggcaggttcagatgcagccttccagatttagaggcactgggaggacagtggctgagtggaggcgcccagacctgggcaggcagcaggctcaggcccacaccttgtgatttttgaaaccaaagcccagaagatgatgtttacttctctctccctggctctgcccttcttactgcaaaccatgctgtgccttagggcccttctcatagctgttcctcatggccatgactggaacagggatgcaacctctttctacacaagcacagttagttgggtgaagtctttttttttgtttgttttagacggagtttcactcttgttgcccaggctggagtgaagtggcgtgaccttggctcactgcaacctccaggccagcctcagcctccctagtagctgggactacaggcacccactaccacgcctggctaattctttgtatttttagtagagatggggtttgaccgtgttagccaggatggtctcgatctcctgacctcgtgatccacccacctcggcctcccaaagtgctgggattataggtgtgagccaccgcgccgggccggttgctggcatcttaatgttctgtaggtggaatatttccaataaacacaaggtgccgtaattgac

SEQ ID NO: 31780 - DNA, 2390 bp, Homo Sapiens
cggccgccccctccccccgctccgcccgctcagagcataatggcagcgtctgaggttgctggtgttgtggccaatgcccccagtcctccggaatcttctagtttatgtgcttccaaatcagacgaaggtctcccagatggtctaagcaccaaagactctgcacagaagcagaagaactcgcctctgttgagtgtaagtagccaaacaataaccaaggagaataacagaaatgtccatttggagcactcagagcagaatcctggttcatcagcaggtgacacctcagcagcgcaccaggtggtttttaggagaaaacttgatagccacagccctttgtctttctggcagtgggtctcagtctgatttgaaggatgtggccagcacagcaggagaggagggggacacaagccttcgggagagcctccatccagtcactcggtctcttaaggcagggtgccatactaagcagcttgcctccaggaattgctctgaagagaaatccccacaaacctccatcctaaaggaaggtaacagggacacaagcttggatttccgacctgtagtgtctccagcaaatggggttgaaggagtccgagtggatcaggatgatgatcaagatagctcttccctgaagctttctcagaacattgctgtacagactgactttaagacagctgattcagaggtaaacacagatcaagatattgaaaagaatttggataaaatgatgacagagagaaccctgttgaaagagcgttaccaggaggtcctggacaaacagaggcaagtggagaatcagctccaagtgcaattaaagcagcttcagcaaaggagagaagaggaaatgaagaatcaccaggagatattaaaggctattcaggatgtgacaataaagcgggaagaaacaaagaagaagatagagaaagagaagaaggagtttttgcagaaggagcaggatctgaaagctgaaattgagaagctttgtgagaagggcagaagagaggtgtgggaaatggaactggatagactcaagaatcaggatggcgaaataaataggaacattatggaagagactgaacgggcctggaaggcagagatcttatcactagagagccggaaagagttactggtactgaaactagaagaagcagaaaaagaggcagaattgcaccttacttacctcaagtcaactcccccaacactggagacagttcgttccaaacaggagtgggagacgagactgaatggagttcggataatgaaaaagaatgttcgtgaccaatttaatagtcatatccagttagtgaggaacggagccaagctgagcagccttcctcaaatccctactcccactttacctccacccccatcagagacagacttcatgcttcaggtgtttcaacccagtccctctctggctcctcggatgcccttctccattgggcaggtcacaatgcccatggttatgcccagtgcagatccccgctccttgtctttcccaatcctgaaccctgccctttcccagcccagccagccttcctcaccccttcctggctcccatggcagaaatagccctggcttgggttcccttgtcagcccccacggtccacacatgccccctgccgcctccatcccacctcccccaggcttgggcggtgttaaggcttctgctgaaactccccggccccaaccagtagacaaactggagaagatcctggagaagctgctgacccggttcccacagtgcaataaggcccagatgaccaacattcttcagcagatcaagacagcacgtaccaccatggcaggcctgaccatggaggaacttatccagttggttgctgcacgactggcagaacatgagcgggtggcagcaagtactcagccacttggtcgcatccgggccttgttccctgctccactggcccaaatcagtaccccaatgttcttgccttctgcccaagtttcatatcctggaaggtcttcacatgctccagccacctgtaagctatgtctaatgtgccagaaactcgtccagcccagtgagctgcatccaatggcgtgtacccatgtattgcacaaggagtgtatcaaattctgggcccagaccaacacaaatgacacttgtcccttttgtccaactcttaaatgacggacctgactggggaggaagaagaagagaaactgatgtgaacaggaagcgcgggttcaagatttctaaaactctatatttatacagtgacatatactcatgccatgtacatttttattatataggtaatgtgtgtatagaaagtctgtattccaatgttcgtaaatgaaactatgtatattatgcaaaaaaaaaaaaaaaaaaaaaaaaaaaaaaaaaaaaaaaaaaaaaaaaaaaa

SEQ ID NO: 31781 - DNA, 3172 bp, Homo Sapiens
caggcagccacaggcctgtcagaccaggacccttaccctctagacatggcctcggtcccctgcaaaccccagccccgtagccctgcgaggttacagacagcctaaacgccaccaccacagggcctgtgccgtgcccctgacccgggcacagaaggccactggcccggaggccatggagacggtgcccccagcagtggacctggtgctgggtgcttctgcctgctgcctggcctgtgtcttcaccaaccccctggaggtggtgaagacgcggctgcagctgcagggggagctgcaggcccggggcacctacccacggccctaccatggcttcatagcctctgtcgctgctgtggcccgagcagacgggctgtggggcctgcagaaggggctggctgccggccttctgtaccaaggcctcatgaatggcgttcgtttctactgctacagcctggcgtgccaggctggcctcacgcagcaaccaggtggcaccgtggttgcgggagccgtggcgggggcactgggagccttcgtggggagccctgcttacctgatcaaaacgcagctgcaagctcagacagtggccgcagtggccgtgggacaccagcacaatcaccagactgtcctgggtgccttggagaccatctggcggcagcaagggctcttggggctgtggcagggcgttggtggggctgtgccccgagtcatggtgggctcagctgcccagctggccaccttcgcctctgccaaggcctgggtacagaagcaacagtggctccctgaggacagctggctggtggccctggctgggggcatgatcagcagcatagccgtggttgtcgtcatgactcccttcgatgtggtcagcacgcggctatacaatcagccggtggacacagctggcaggggccagctctatgggggcctcaccgactgcatggtgaagatctggcggcaggagggccccctggcactctacaagggcctgggccccgcctacctgcgcctgggcccccacaccatcctcagcatgctcttctgggacgagcttcggaaactggctgggcgggcccagcacaagggcacctagacgacggccctcacccccacgtcctgacacggccggcacttggccggaagtgagagcctgctccaggacaactggctgtcccggggcgggccatgggcccaggccctgccagaggtcccgggagagtgtggacagctctggtccatccagccccttggcccacccaggtccagagcatccacttcaagttaccacccattctgtcttccagacagttctcttccttctctgtactgcgtactgggtcaccacatcccagagccttgctcagttatagcaactgctgcgggcgtgcacatggcataggcccagtaacttacatacatcggctcacttaggcctcagacagcagcacgaggcaggcacttttacttcttttaccattagaaagccaaggcctagagtggtgggctttgaccacagccacacaattttgaagtggcagagccaggactggagcttagccctgctcaccctagacctatgcgcttgacaagtgcgtgactgtgacaggcccatgggcccggactgcccataggggtcactgtaccatggcaaaggctgaggtgcaccaggaggctgtggcgtcgtcacctgccttatttgctggagaagctgtagcaaagaaccacagactgggcgacttagacaatagaaatgtattttctcacagttctggaggctggatgctggagaccaaggtgtcagtgggctggtttcttctgaggcctctgtccatggcttgcagatgctgctttctctctgtgtctgcacatggtggtccctcgatgtgcgtctgggtcctgatctcctcctcttataaggacacaaatcatgttggcttagggcccaccctcatgaccccactttaatttttttttttttttttgagatgaagtctcactctgccacccaagctggagtgcagtggcacgatctcggttcactgcaaccttggcctcctaggttcaagcaattctcctgccccagcctcctgagtagctgggattacaggtgtgtgccaccacacccggccaatttttgtatctttagtagagatggggttttgccatgttggccagactggtctcgaactcctgacctcaagtgatccactggccttggcctcccaaagtgctgggattacaggcatgagccacctcacttggcccaattttaacttaattatctctgtcaagagcctatctccatatacagtcacatcctgagctactagggggtaggacttcaacatgcacttctgcaggggccgcagttcagccaacatcatctttttttttgagatggagtctcgctttgttgcccaggctggagtgcggtggtgcaatctcggctcaccacaacctccacctcccaggttcaagtgattctcctgcctcagcctcccgagttgctgggactataggtgtgcgccaccatgcccagctaattttgtatttttagtagagacaggctttcgctgtgttggccaggctggtcttgaatgcctgaccttgccgcccgcctcggcctcccaaaatgctgggattacaggcgtgagccaccgcgcctggcctcagccaacatcatctaagggctctcacggagggcctcccagctgcccgccctgtgggcatttgcacatatcctgacaagcctgaaagaagctccgggtgcccattgttcagtccaggtgcccattgttcccgggactgaggcccgggaaagggaagcgacgtgatagggccagcagcagaccctgggcctttctctagactgagcaccattccccgtgggtgtgctctcagcgccgcaccgaccttcacactgcagagatggatgccaactccctggcaggggcaggactgctgccgagcagccccacctgccctcccagccacaccccaagtctgtaagggccgctcccaggaacacctgctactgcacactccaaaccaataaagttttatattttgtttacttaaaaaaaaaaaaaaaaaaaaaaaaaaaaaaaaaaaaaaaaaaaaaaaaaaaaaaaaaaaaaaaaaaaaaaaaaaaaaaaaaaaaaaaaaaaaaaaaaaaaaa

SEQ ID NO: 31782 - DNA, 4382 bp, Homo Sapiens
actttcccggagtgcaccccgcggccgccagccggggcgatggcggggctctggctggggctcgtgtggcagaagctgctgctgtggggcgcggcgagtgccctttccctggccggcgccagtctggtcctgagcctgctgcagagggtggcgagctacgcgctgctgatgaagccggacgggcgagaattttttcagcagatcattgagtacacagaggaataccgccacatgccgctgctgaagctctgggtcgggccagtgcccatggtggccctttataatgcagaaaatgtggaggtaattttaactagttcaaagcaaattgacaaatcctctatgtacaagtttttagaaccatggcttggcctaggacttcttacaagtactggaaacaaatggcgctccaggagaaagatgttaacacccactttccattttaccattctggaagatttcttagatatcatgaatgaacaagcaaatatattggttaagaaacttgaaaaacacattaaccaagaagcatttaactgctttttttacatcactctttgtgccttagatatcatctgtgaaacagctatggggaagaatattggtgctcaaagtaatgatgattccgagtatgtccgtgcagtttatagaatgagtgagatgatatttcgaagaataaagatgccctggctttggcttgatctctggtaccttatgtttaaagaaggatgggaacacaaaaagagccttaagatcctacatacttttaccaacagtgtcatcgcggaacgggccaatgaaatgaacgccaatgaagactgtagaggtgatggcaggggctctgccccctccaaaaataaacgcagggcctttcttgacttgcttttaagtgtgactgatgacgaagggaacaggctaagtcatgaagatattcgagaagaagttgacaccttcatgtttgaggggcacgatacaactgcagctgcaataaactggtccttatacctgttgggttctaacccagaagtccagaaaaaagtggatcatgaattggatgacgtgtttgggaagtctgaccgtcccgctacagtagaagacctgaagaaacttcggtatctggaatgtgttattaaggagacccttcgcctttttccttctgttcctttatttgcccgtagtgttagtgaagattgtgaagtggcaggttacagagttctaaaaggcactgaagccgtcatcattccctatgcattgcacagagatccgagatacttccccaaccccgaggagttccagcctgagcggttcttccccgagaatgcacaagggcgccatccatatgcctacgtgcccttctctgctggccccaggaactgtataggtcaaaagtttgctgtgatggaagaaaagaccattctttcgtgcatcctgaggcacttttggatagaatccaaccagaaaagagaagagcttggtctagaaggacagttgattcttcgtccaagtaatggcatctggatcaagttgaagaggagaaatgcagatgaacgctaactatattattgggttgtgcctttatcatgagaaaggtctttattttaagagatccttgtcatttacaatttacagatcatgagttcaatatgcttgaatcccctagacctaatttttccttgatcccactgatcttgacatcaagtctaacaaagaaaaagttttgagttttgtattttcttttttcttttttctttatttttttttttttgaaaccgtgtctcactctgtcgcccaggctggaggagtgcagtggtgtgatctcagctcactgcaacctccacctcccaggttcaagcaattcttctgcctcagcctcccaagtagctgggattacaggtgcctgccaccatgcctggctaatgtctttgtatttttagtagaaacagggtgtcaccatgttggccagactggtctcaaactcctgacctcaagtgatccacctgcctcagcctcccaaagtgctgggattatagtcgtgagccaccacgcctggccagagttttttatttttatcaccaccatagatgttacagttggctgtggtcacaaaagtagttaattgtgtcagcacccaaataaacatctaacaggtttctcaacagaggaatccacagtccaattccacttcaattgatagacccaaaaaatataatttaatcaaagttctagagtttttgtttgtttgtttgagatggagtcttgctctgtcgcccaggctggaatgcagtggtgacatcttggctcactgcaacctccacctcccaggttcaagtgattctcctgcctcagcctcctgagtagctgggactacaggcgcctgccaccacgcccagctaatttttgtatttttagtagagatggggtttcaccatgttggccaggatggtcttgatctcttgacctcgtgatctgcctgcctcggcctcccaaagtgctggcattacaggcatgagccaccatgcctggcccaaagttctagaattttttaaaggtattcatggtgactcaggaatacacacatacacacacacacacacacacacacacacacacacacacacacatacacacacacatataatttgaaagaggtgagtatgtactctgacttcagctctcaggttttaaaaattatattagtgggaccagttatgacaagaataatcattatagtacttttcagattttataacctggagcagattattttaagttgattagtaggttctgttacagtttttcttttgatcgtgcacttatagtcttcatttaattcctcatagaatcccagtcacctttatatatcatattattggaagagattcatcttcataatctccagttttttcacagtgcctcacagagttaatcatgccttttggagctagaaggactttagaacttatctagttatgctcctttatattataagtaagggaatagaatcaataagacagtttctgcccaaagtcatgttaccagttggtgacagagctggaaatacgtagagatctatacccttaaatctctccactcacatgctgatatactttctactacaatatgctatagctttatggaactcagggtgatgatcagacgtgtcattagaacatgagtcctctgcttctgattcaggcatacttttgggattcttccatctttaaaggaaaaaggaagccattcatctatatttagtaacccagtaatatctcacttagtttagggttagatctttagttaattcaaccttatagatcatacttatgaaggtgataactgacacgtgttccctgaattttaatttgataggcaatacatctacccactccattattttttaaaacttcatttaatagtttaaacaagattggttttgttttcaatttttattcactcttcatagaatcacaattacctttatatatcatatgttattggaagagattcctcagtaatctccaatctctcatagtgcctcacagggttggtcaatggcttttggaactggaaggaccttagaacttatctgttatgctcctgatagccaatagcagatagaagcttgcaatcaagagggtaggacatgtgttcttcaatggatatcaaaggaagaggttgcaaaccaaagccatttggcaagccctgtagcctgggccatttaagacaggggcggtctcagccaaattgcacccatttaactatcccaaagagccacagtgcctacaacccaggccctaagttgatgaagaaaaagtcaaggaaggaggtgatacaattggaaatattcccatcaaatggttaatcttatttagaaaatgggcatattagaaaaagtccttccaagatgattttggataataaaagttgtatttgtggaaattggtattatctctgttttatgcacttacatttatcccttacattttgtttttagtgaccctacatgacattaaatttaaagtaaaacattgtttaatgttaccttttggcttgagaatgtctttcagctccagaattattgttactcatattttaatcagtaagtcatttaagctatgacagagtaggaattgagaaattatttcatatgctacagtattgaaatgtggatgctgccttgttttataagaagatgatcaaggtttgtgtgcccattacctttcctctgcctgaaagacgtgtctcaagaaaaataaattctattttagatgcaggtactgcattttattctaagaattgatatcaattcaaaacatagaaaactgtaaaagataaatcaggagatggctgattcataatgggtaataaaataaatagcactttcg

SEQ ID NO: 31783 - DNA, 2784 bp, Homo Sapiens
attaaatggagtggcctggttgaggaacaagcagaggcaggtgggagaggtccctgcctctcagttcacctccacacagatgcgctgagaggcactgggttggtcgacaacttctgcatttgcgaagagtgcagcgtccctcgctgtctcatgtatgagatttacgtggagacctgtgggcaaaacactgagaaccaagtcaacccggccacctttgggaagatggccttccttgctgacgaatactgcaactattgtcgagacattttacgaaatgtgaggaactgagaacttgagagggtggaggacttgcttacttccttctggaagtctctgcagcaagacacagtcatgctgatgtcattgcctgacgtgtgccagctctttaaatgctacgacgtccagctgtacaagggaattgaggatgttctccttcatgacttcttggaagatgtttctattcagtacctgaaatctgtgcagttatttagtaagaaatttaagctgtggctccttaatgctttggaaggtgttccagccctcttgcagatctccaaactcaaaggtaggtttcgatgaaaaaaataaattctgggctggcacagtggctcatgcctgtaatcccagcactttggaaggccgaggcaggaggatcgcttgaggccaggagtttgagaccagcccgggcaacatggtgagatcctgtctctacaaaaaagttttaaaaattagctgagtgtggtggcacacacctgtggtcttagctactcagaaggctgaggcgggaagatcacttgagcccaggaggtcaaggctacagtgagccatgatcatgtcactgcactccagcctgggtgatggagcaagaccctgtttttaaagtaaagaaatacataaataaataaattctgtaagcgtagatgaagcatctgactttcaccctgggtggtagctttcagctgctgccccatgcactcagctacagtccggaaggcccagcctgctcagggtttctggcttttagtgctggtgatggatttttgtgctgatccagccacacccttttaagctatttctcttttgaataataacatggacttttggcaggtcaaggtgttctaggtgtggatattcaccagggtattctcacacctgaattgcaccatctctctgctgagtttctagaatgctttccccttctgtctggctgccaggcagcagtctctgaatgctgcttccaccaggctatttatctgttcaaggcctgcagtggcttccaagcgcgagcctgaactgctctgtcagctggtccagttccctataaatctatcctctttgtgtccctgcagctccatgctccttcaaaggccagcctgcacctgccatgccctgtcggatcatcctggaaatacccattttctccctcttgcctttgtgaagttttgctatcattgcctgcagctctcgaactccctacggggtcccaccctccttgccaggtcagggtcattttgtcaccaagctggcaccagttatttccccacatttctatgagtcttgcttcctttgcaattatttcctaggtagtgcagataggggacttctcaaagtgcctacagcataggaccatgtctaatcgccactcctcccgaccccacgcccccagctgtgttcactactaacactgggtaccctgatccagtttgtcccacttggaaattttagggacgttgcagaaggtgagactgggacttgctgcaaaagcggtccgaggagtggggagcagagcctccctccagttttcctgtgctcctttaacatctgcccgaattcaagcctctgtctcttcattctgtaggctacttcagcggtttcctagttggtcatccttcttccacccccctccccagccacactccctccacccccagtgatcattctaaagcagcagttaatcaattaccaaccttccctggcctccactgcccagatggcccactctcctccactgctgtgcagtcattcacagtttggcctctggccccatccctgtctccatctcccaagggactcccatgaccctctgccacagagatagttttggctcctggcatctgtttcacttgttgcttttggaatatatgattcatatacttcagtcatgcctagaggaggaagaggaggaggaggacatggggactgtcaaggaaatgctaccagatgacccgactctcggccagccagaccaggcacttttccattctctgaattcctcactgtcgcaggcgtgtgccagccccagcatggagccactgggggtgatgcccacacacatgggccagggccgatatcccgtgggtgtgagcaacatggtcctcaggatcctgggcttcctggtggacactgccatgggcaataagctcatccaggtgctgttggaagatgaaaccactgaaagcgcagttaaactcagccttcctatgggacaagaagccctcataaccctaaaagatggacaacaatttgtgattcagatatcagatgtaccccaaaactctgaagatatttatttcagagaaaacaatgctaatgtgtgagattatttatttgaatagagaataagaaaactgatagacttgcattcttaaaaatattaaatactaaagtttttctattgacgaaagatgatgttatgtatataatagatgtagcattgtctattttatgtttatatgtatttcaaggaggtggtttcgataaaatatgtaaactgatttggagaat

SEQ ID NO: 31784 - DNA, 3166 bp, Homo Sapiens
ttatctgtactactggttttctccctggcttcacgtgtctctgtgttcccctatgctggggtgtcctcccagtgctttcaggcttcatctccttcctaacctctcctttctatttttttttttttttttttgagatggagtcttgctcagtcgcccaggctggagtgctaacctctcctttcatgtggagatggacagggatggcaggagcactgagtgctcttgacaacaccattgaagatgatgctgacgatcagctaccctgtggagaaggcaggccaggctgggtgagaggggagctccttggaagtcagggggtctgtaaggacagcaaggatctctttgtcccaacctccagcagcctttatgggtgcttctgtgttggccttgtttctgggatggccatctcagtgctgttgctggctagcgatttcagaaaactagatttttctaggcctgagccctgttttgagaaagaagcttccctctggtttgtagctcaacattaatgagttttggttcctgttgtttctataattacaaaaccccagcacaggtatttaagagccaaaggccatgcttgtggaagtaagggaggatctttctaaatggatcctgcaaatcctccttacagatctgagtggatggtcaggcccagagcaaccctgagaccccaggtacccacagcattggctgttcttcataggagactcagagaagacttcataggagactcattattgtttactggacatcaggtgctatattgtatagcattcacattccacaggtgaggaaacaggctcagaggaataagtggcatgccaagatcattgagtatatcagtagcagaattaggattcagactttgttaggcctaactccaaagccctggcttttttttttttgagatggaatcttactctgtcaccgggctggagtgcagtggcatgatctcagctcactgcaatctctgcctcctgggttcaagtgattcccctgccttagcctcctgagtagctgggactacaggcatgcaccaccacgcccagctaatttttgtatttttagtagagaggaggtttcaccgtgttggccaggatggtctcaatctcttgaccttgtgatctgcctgcctcggcctcccaaagtactgggattataggcatgagccaccatgcccggcctttgctcttaactactgatgttgtcttcctgatcttttctacaagaagcttttaaactttttggactttaacctacaataagaaatccattttacatgttcacatgtatctataacaacatttatatttctaaaacaaacttttcatgaaacaagatatacctacatatgtcaggcactctgatattttctattctagtccaccttttcaatttcattctatttatgggaaatatatgttggttgggagtcactgagttaatttaatgacccactaataggctgtgagtggcattggaaaaatacctgcttgtaagatatgcgaacacacgtttcaaggttgtttgtgcatgtggaaatattttggggtgctatctgttttaccatcagtttgtacaaggacactaagacagtgtagcctgctgacttgagaatgttctgtaaggactggaaacactagaatcttgaagaaacgcctggctagaggtgagggtaagctgttaattacactgattacagtttgtgcctctcagactgagaactcttttcttcttgctgggggcattgctatctctaggatgtttgccctgaagtcctgatagtctctttggggttttaataaatggctgaaaaaattgttgtggggtttcaacaggcgttcataggcacccttgcttggcaatataacatggcttttgatgtttgggtgtgggaagggatctttgaagtgctgagagggactcagtctttttccaaaatctctgcttgtgtctgtccagcctctggctccactgcttggctgagatcctggcccatagtagaatctgtgtagaggaaacgagagctcactatttgtgaggcagcctgttccactattggactgctttaaatgtagtgatcagtgattatgctataatccaatcatgtattaattgggcaccaactatgcactaggcatggtatcaagtaccaggagtacaaaaataagtaaaccttgatttctgctatcaattactctcttctcctacttctgtactactgcttttctattgtgagtttgtttagttcattaattggtttattcattcattcaacaatcatatactgattagctactctgaccaggtccagtactaactctaaagaagttatgcccatcccatcttcaccccaagccttctccttttgagactcctcatccagtttctttagttcttcatatatcactgtttttcagatctctggctatccttgccattgacctcagaaatcctgtatttgaccttaaccttcttatacccagtccatacccaaagtgatggaaatggaatagatttctttttaaagttttaaacgaatattttgactgaaaaattttggcagtcttgtatgcaaatgacactgcagagcattgttttctcccccccacgtaggagattttattcaactaaggcacaggcatattaaaagactttcagtacaaggaaaaggggtagtttgttccctccaaatttgactacagctcgaaattgtctttattaatgcaaagttcttttgtcaccttgactttgggacactgttaccaaacctcgtgggaaatatcaagttccagaagattgaatacatgcaggaaacaaatgttttttgggccctagagtgaacatttggtccatatgaaaatgaccaggaagacaattaggtgaaggttttttaatgatttgtgctacgtcagtctcttcccataagacatattcaaagttttaacttttccttaagaggcttccatggggagcaagcatttgataattcatcctttaagaaaaacaccaccgtacactgcttgaagagttcctcttctattacttaaaacgtttttattgtgcaacatttaaggcatacaaaaacatataaagaataccatgatgaaaatctatgactgtattaccaagcttaagaaataaaacagttgagtgatctctc

SEQ ID NO: 31785 - DNA, 2617 bp, Homo Sapiens
tcttccgggcgccgcagcttcctgccaagcaccgcgcagccgcctccgccgcaggatcccccggtgcaggcctccgtgctggtgcggatcctggagctcagccgcgcgcgccctgcccgatcctgtgccgacccaccgcactatgcgcgccgtgccgctgcccgccccgctcctgccgctgctgctgctcgcgctcctggccgctcccaccgcccgcgccagcagagccgagtccgtctccgcgccgcggcccgaacccgagcgcgagtcgcggccaccgcccggcccggggcccgggaacaccacccggtttgggtctggggcggcgggcggcagcggcagctccaacagcagcggcgacgccttggtgacccgcatttccatcctcctccgcgacctacccaccctcaaggcagccgtgatcgtggcgttcgcctttaccaccctcctcatcgcctgcctgctgctgcgcgtcttcaggtcgggaaagaggttaaagaagacacgcaagtatgatatcatcaccactccagcagagcgagtggaaatggcgccactaaatgaagaggatgatgaagatgaggactccacagtattcgacatcaaatacaggtaaaacctgtttcccagcctggtggcatcctgtggaaagttggtcagctgcaacctggggtgtgaaggactggacctggaagccctcttgcgtcggaggtgttgaaaccaaaacgaacgttatgtataaaaccccagctccatcgtgcgtgtcaggcatctgctcagactgtcactggcaagctcgtttccacgtcaccacaatggagttgcttctgccaccctttgggcatccctttaaagtgccccctacttctactccccatgtaagaggctttgtgccttgctaaggagcaaagggtagaaacatgttgattttaaagaagtttttttaagacaattgttgacaatagtaaaagagatcaggaggatcaagaatctaaaacaagcctgaaggatgtccaactgtgtatttagaatttccgacattcttctctactggatctacacattggaccccatctgatcctttgctgcttttttggcttggtcaggtcctggcctcattttggcgttacctgtgtcagagttcaaggtggatgtgcttagagctggtcagccccttccagacctggacacgtctgtggctccttttctttcttcctttttttttttaaaaaaaaaaaaggttcagcagaaatcagcgtggctagttcacaaagaatttccagtatcagggaaaaactgtgcgtgtgtgtgtgtgtgtgtgtgcacgtgtgtgcgtgtgcacgtgtgtgatacctataaaacagtttctccttctctgaagggaaaggaaagtgctaggcagcctgtgattagcaacattctttgtgcttttttgttgttcctctgctctgtcacagttctacgttgtttgccttagaaatgtaatttttaaaaaccattttaaaaatgaacggtgatttggctggctggaaaaaatcacactgtcaggggactatatttgaagtcagtctagacggggctggactaggaacccacctggacccaggagaccccacaggacccaggaggtccctgccggaaggcagaggttcaggtgagagtggctcacctctgagctggtgaagtgaggacttgcctgtgacatgacccagggatctgctgctggcttctggagacagggccttgggctgacttctcaggttgattgaggcctcctgactagcggtgttcccaggctagaggtgattggctgcaacaaagatgcttctattagtctattagcagtgccttcgggaccctgggattttgctctctctagaaaggtgttttttatttttttattttttatctcccccttttttcctggctttgctccagggtttgtgtatttgcctgtttattgtcctgctctttttttttttggatgaaaactccagcctttcctgactcacctccatcttcggttcttcagttttctgagaagagttgggatatgtgggaaggggcatgggagctcggcagcctccgcctgccaggaaggcagtttcgcctctgcaggaaagagcagagcccgtgggaagccctgggtgagggtggcgcagccggcccagcacgcatggtattgccagccacggggggcctgcgtgtagtctctgctccctgcatttcaccttctttgttgactttccttccctgttttcccccatctgtttgccagaggggtgggactggcaacagaacagccgtggctgctttatctctcctctccacggtgtactcaggcctgagtggtgactcacgggagcctggccacctcgcagctgttcgccccctcaacctttgaactggaactgctggctcacacagggttttcgacaactgcagctgaatctcatggaaaagctggattcctctgccttacgcagaaacacccgggctccatctgccaggtgcttgccactggtcctggcagaaatggcggctgctgaaagtgaccttccaaatccttggtggcacttcagcgccacaggctctccaataaaaaccctttacacac

SEQ ID NO: 31786 - DNA, 2198 bp, Homo Sapiens
atttacattcaaatcagccttttataattacattttaaattataataaaatgatggtgccggcgctccagttttccgtgtcttttaactgtaagagaagctgccgtgaattgaatgggggctacccatcacccagagtccccgctgcccaccgtgtgggttctggcctgcccgggcacacgtgtcctgagcatggcagctacatgggtgttacctgtggggacctccccgcactgccaggagaagggcctgacggggattctggccccacacagtgcgatggttgcccagcctcaccgcctgcagctccatctgagaagggcctgatacgggctggggtccaggcccactgccctcatgtcctgagccccacggtggcctgcaggcctggtttggaggccattatctcctcggcggccagccgggcacagcagtggccacttctggtcgaggcagttctgtgggtgaggggcgagcatcgcctcctgcaaccgtaacccaggccctgcctcccctgccatgcccctgtgggtcccgtcgttgccatctcgtcctcagtggcttcccgatgttgcctgctggcagggcaggccccgtgccatggagcatgagggacccttcccctcccagggccaggcttttggcagccaggccaagccgctgctggaatggaattcccggcgttcctggtggggcgcatggcatcggaatcctacctgctttgtctctggcatcagctggtgagccagtcacgtggccgtgtgcgtgagaccagagcccaggactgagggctcctcccgggcgcttcctcctcgctcactcacccccaccccctttttttggctttcagcaggactggctctgagcaggcgtaaaacagtgttaaaactgaatccgggcagcagggagctcctgtccacggcggcaggctctcacagtccaccgggctctcgcggtccacccagaccaccctttacctcgagtccttatgcacagaaaggccctgatatgtcccatacactcaggagttaggcccagagctgggcagtggtcactccacgccattccctctggtgtagagctggccctgcctgcccccagacggccgtggggtgggtggcaccgcttcctggggaaccccttcccacacttctggccttgtttctcacccacacaaggacaccccagtggtcactgctgcagctcgcggtcacatagagggtgagaggggagagctggacaaacaggtgacccagcagacccagcctgatgcccgcaggagagagcaacggggtctgatattttgtctccaaatgaaagagccacagtgaaaccccaggcctgccaaccccagttgtagggccagagaacagggatgtttccctgaggcggtggcaaggtttggtttggtgaaaacgaaggatatgtgagggtctgagaggggagggtgactggcctagactccacccctggcgccctgtccaccgtggctggctggccactctcggacccctcggcgtcaagcgctgactgggtgcctgcctggggcttggggctctgtacgtgttaattctgccactccagcagccctgagtgggaggagccattatcccccttctttctgtagatggggaaactgaggcaggcttgcccatggtgaagtggccagtcggacacagggccagattgaaacctgcagcctgggctcccggctacaacagcgccagcctccacaggcattagaaggggactcactgcgagggccccagccagggcagctttcagggtggggtctctggcctcaccctggggaaacagccggggcgctggctgcctcctgctgagcctggcgtgggaacaatgtggcctctatccctggagcgagccaggccgcctggacgcccagcccttcagagcagcccggccaggcaggcgcccacagcatggcgcccgggccgcgctgtccgtccacggggtgcgggcgccttggccaggcccaggcaagccgctccccgtgtcctccctggctggccactgagtggccagacgccggcttcctcctccctctcccgcccggccagcctcctccttttttggtggtgggtttgggggcccagcccacccgccactgccacgtctgccatcctcccgcacccacgagcatctttcaaaaattcccggtgggcggggctgagctgc

SEQ ID NO: 31787 - DNA, 7333 bp, Homo Sapiens
cccagccccatttaacttcgcggcggcggcggcgactgcggcgccgcgggctggaggccggcgtcggggaaggtcctggtgccggattccgcacgaggtgttgacgggcggcttctgccaacttctccccagcgcgcgccgagcccgcgcggccccggggctgcacgtcccagatacttctgcggcgcaaggctacaactgagacccggaggagactagaccccatggcttcctggacgagcccctggtgggtgctgatagggatggtcttcatgcactctcccctcccgcagaccacagctgagaaatctcctggagcctatttccttcccgagtttgcactttctcctcagggaagttttctggaagacacaacaggggagcagttcctcacttatcgctatgatgaccagacctcaagaaacactcgttcagatgaagacaaagatggcaactgggatgcttggggcgactggagtgactgctcccggacctgtgggggaggagcatcatattctctgcggagatgtttgactggaaggaattgtgaagggcagaacattcggtacaagacatgcagcaatcatgactgccctccagatgcagaagatttcagagcccagcagtgctcagcctacaatgatgtccagtatcaggggcattactatgaatggcttccacgatataatgatcctgctgccccgtgtgcactcaagtgtcatgcacaaggacaaaacttggtggtggagctggcacctaaggtactggatggaactcgttgcaacacggactccttggacatgtgtatcagtggcatctgtcaggcagtgggctgcgatcggcaactgggaagcaatgccaaggaggacaactgtggagtctgtgccggcgatggctccacctgcaggcttgtacggggacaatcaaagtcacacgtttctcctgaaaaaagagaagaaaatgtaattgctgttcctttgggaagtcgaagtgtgagaattacagtgaaaggacctgtccacctctttattgaatcaaaaacacttcaaggaagcaaaggagaacacagctttaacagccccggcgtctttgtcgtagaaaacacaacagtggaatttcagaggggctccgagaggcaaacttttaagattccaggacctctgatggctgatttcatcttcaagaccaggtacactgcagccaaagacagcgtggttcagttcttcttttaccagcccatcagtcatcagtggagacaaactgacttctttccctgcactgtgacgtgtggaggaggttatcagctcaattctgctgaatgtgtggatatccgcttgaagagggtagttcctgaccattattgtcactactaccctgaaaatgtaaaaccaaaaccaaaactgaaggaatgcagcatggatccctgcccatcaagtgatggatttaaagagataatgccctatgaccacttccaacctcttcctcgctgggaacataatccttggactgcatgttccgtgtcctgtggaggagggattcagagacggagctttgtgtgtgtagaggaatccatgcatggagagatattgcaggtggaagaatggaagtgcatgtacgcacccaaacccaaggttatgcaaacttgtaatctgtttgattgccccaagtggattgccatggagtggtctcagtgcacagtgacttgtggccgagggttacggtaccgggttgttctgtgtattaaccaccgcggagagcatgttgggggctgcaatccacaactgaagttacacatcaaagaagaatgtgtcattcccatcccgtgttataaaccaaaagaaaaaagtccagtggaagcaaaattgccttggctgaaacaagcacaagaactagaagagaccagaatagcaacagaagaaccaacgttcattccagaaccctggtcagcctgcagtaccacgtgtgggccgggtgtgcaggtccgcgaggtgaagtgccgtgtgctcctcacattcacgcagactgagactgagctgcccgaggaagagtgtgaaggccccaagctgcccaccgaacggccctgcctcctggaagcatgtgatgagagcccggcctcccgagagctagacatccctctccctgaggacagtgagacgacttacgactgggagtacgctgggttcaccccttgcacagcaacatgcttgggaggccatcaagaagccatagcagtgtgcttacatatccagacccagcagacagtcaatgacagcttgtgtgatatggtccaccgtcctccagccatgagccaggcctgtaacacagagccctgtccccccaggtggcatgtgggctcttgggggccctgctcagctacctgtggagttggaattcagacccgagatgtgtactgcctgcacccaggggagacccctgcccctcctgaggagtgccgagatgaaaagccccatgctttacaagcatgcaatcagtttgactgccctcctggctggcacattgaagaatggcagcagtgttccaggacttgtggcgggggaactcagaacagaagagtcacctgtcggcagctgctaacggatggcagctttttgaatctctcagatgaattgtgccaaggacccaaggcatcgtctcacaagtcctgtgccaggacagactgtcctccacatttagctgtgggagactggtcgaagtgttctgtcagttgtggtgttggaatccagagaagaaagcaggtgtgtcaaaggctggcagccaaaggtcggcgcatccccctcagtgagatgatgtgcagggatctaccagggctccctcttgtaagatcttgccagatgcctgagtgcagtaaaatcaaatcagagatgaagacaaaacttggtgagcagggtccgcagatcctcagtgtccagagagtctacattcagacaagggaagagaagcgtattaacctgaccattggtagcagagcctatttgctgcccaacacatccgtgattattaagtgccccgtgcgacgattccagaaatctctgatccagtgggagaaggatggccgttgcctgcagaactccaaacggcttggcatcaccaagtcaggctcactaaaaatccacggtcttgctgcccccgacatcggcgtgtaccggtgcattgcaggctctgcacaggaaacagttgtgctcaagctcattggtactgacaaccggctcatcgcacgcccagccctcagggagcctatgagggaatatcctgggatggaccacagcgaagccaatagtttgggagtcacatggcacaaaatgaggcaaatgtggaataacaaaaatgacctttatctggatgatgaccacattagtaaccagcctttcttgagagctctgttaggccactgcagcaattctgcaggaagcaccaactcctgggagttgaagaataagcagtttgaagcagcagttaaacaaggagcatatagcatggatacagcccagtttgatgagctgataagaaacatgagtcagctcatggaaaccggagaggtcagcgatgatcttgcgtcccagctgatatatcagctggtggccgaattagccaaggcacagccaacacacatgcagtggcggggcatccaggaagagacacctcctgctgctcagctcagaggggaaacagggagtgtgtcccaaagctcgcatgcaaaaaactcaggcaagctgacattcaagccgaaaggacctgttctcatgaggcaaagccaacctccctcaatttcatttaataaaacaataaattccaggattggaaatacagtatacattacaaaaaggacagaggtcatcaatatactgtgtgaccttattacccccagtgaggccacatatacatggaccaaggatggaaccttgttacagccctcagtaaaaataattttggatggaactgggaagatacagatacagaatcctacaaggaaagaacaaggcatatatgaatgttctgtagctaatcatcttggttcagatgtggaaagttcttctgtgctgtatgcagaggcacctgtcatcttgtctgttgaaagaaatatcaccaaaccagagcacaaccatctgtctgttgtggttggaggcatcgtggaggcagcccttggagcaaacgtgacaatccgatgtcctgtaaaaggtgtccctcagcctaatataacttggttgaagagaggaggatctctgagtggcaatgtttccttgcttttcaatggatccctgttgttgcagaatgtttcccttgaaaatgaaggaacctacgtctgcatagccaccaatgctcttggaaaggcagtggcaacatctgtactccacttgctggaacgaagatggccagagagtagaatcgtatttctgcaaggacataaaaagtacattctccaggcaaccaacactagaaccaacagcaatgacccaacaggagaacccccgcctcaagagcctttttgggagcctggtaactggtcacattgttctgccacctgtggtcatttgggagcccgcattcagagaccccagtgtgtgatggccaatgggcaggaagtgagtgaggccctgtgtgatcacctccagaagccactggctgggtttgagccctgtaacatccgggactgcccagcgaggtggttcacaagtgtgtggtcacagtgctctgtgtcttgcggtgaaggataccacagtcggcaggtgacgtgcaagcggacaaaagccaatggaactgtgcaggtggtgtctccaagagcatgtgcccctaaagaccggcctctgggaagaaaaccatgttttggtcatccatgtgttcagtgggaaccagggaaccggtgtcctggacgttgcatgggccgtgctgtgaggatgcagcagcgtcacacagcttgtcaacacaacagctctgactccaactgtgatgacagaaagagacccaccttaagaaggaactgcacatcaggggcctgtgatgtgtgttggcacacaggcccttggaagccctgtacagcagcctgtggcaggggtttccagtctcggaaagtcgactgtatccacacaaggagttgcaaacctgtggccaagagacactgtgtacagaaaaagaaaccaatttcctggcggcactgtcttgggccctcctgtgatagagactgcacagacacaactcactactgtatgtttgtaaaacatcttaatttgtgttctctagaccgctacaaacaaaggtgctgccagtcatgtcaagagggataaacctttggaggggtcatgatgctgctgtgaagataaaagtagaatataaaagctcttttccccatgtcgctgattcaaaaacatgtatttcttaaaagactagattctatggatcaaacagaggttgatgcaaaaacaccactgttaaggtgtaaagtgaaattttccaatggtagttttatattccaattttttaaaatgatgtattcaaggatgaacaaaatactatagcatgcatgccactgcacttgggacctcatcatgtcagttgaatcgagaaatcaccaagattatgagtgcatcctcacgtgctgcctctttcctgtgatatgtagactagcacagagtggtacatcctaaaaacttgggaaacacagcaacccatgacttcctcttctctcaagttgcaggttttcaacagttttataaggtatttgcattttagaagctctggccagtagttgttaagatgttggcattaatggcattttcatagatccttggtttagtctgtgaaaaagaaaccatctctctggataggctgtcacactgactgacctaagggttcatggaagcatggcatcttgtccttgcttttagaacacccatggaagaaaacacagagtagatattgctgtcatttatacaactacagaaatttatctatgacctaatgaggcatctcggaagtcaaagaagagggaaagttaaccttttctactgatttcgtagtatattcagagctttcttttaagagctgtgaatgaaactttttctaagcactattctattgcacacaaacagaaaaccaaagccttattagacctaatttatgcataaagtagtattcctgagaactttattttggaaaatttataagaaagtaatccaaataagaaacacgatagttgaaaataatttttatagtaaataattgttttgggctgatttttcagtaaatccaaagtgacttaggttagaagttacactaaggaccaggggttggaatcagaatttagtttaagatttgaggaaaagggtaagggttagtttcagttttaggattagagctagaattgggttaggtgagaaagaaagttaaggttaaggctagagttgtctttaagggttagggttaggaccaggttaggtcagggttggattgggtttagattggggccagtgctggtgttagtgatagtgtcaggatggaggttaggtttggagtaagcgttgttgctgaagtgagttcaggctagcattaaattgtaagttctgaagctgatttggttatggggtctttcccctgtatactaccagttgtgtctttagatggcacacaagtccaaataagtggtcatacttctttattcagggtctcagctgcctgtacacctgctgcctacatcttcttggcaacaaagttacctgccacaggctctgctgagcctagttcctggtcagtaataactgaacagtgcattttggctttggatgtgtctgtggacaagcttgctgagtttctctaccatattctgagcacacggtctcttttgttctaatttcagcttcactgacactgggttgagcactactgtatgtggagggtttggtgattgggaatggatgggggacagtgaggaggacacaccagcccattagttgttaatcatcaatcacatctgattgttgaaggttattaaattaaaagaaagatcatttgtaacatactctttgtatatatttattatatgaaaggtgcaatattttattttgtacagtatgtaataaagacatgggacatatatttttcttattaacaaaatttcatattaaattgcttcactttgtatttaaagttaaaagttactatttttcatttgctattgtactttcattgttgtcattcaattgacattcctgtgtactgtattttactactgtttttataacatgagagttaatgtttctgtttcatgatccttatgtaattcagaaataaatttactttgattattcagtggcatccttat

SEQ ID NO: 31788 - DNA, 2946 bp, Homo Sapiens
gctttataaaggggagtttccctgcacaagctctctctcttgtctgccgccatgtgagacatgcctttcaccttccgccatgatcatgaggcttccccagccacatggaactaatgccagcagttactctgcagagatgacggagcccaagtcggtgtgtgtctcggtggatgaggtggtgtccagcaacatggaggccactgagacggacctgctgaatggacatctgaaaaaagtagataataacctcacggaagcccagcgcttctcctccttgcctcggagggcagctgtgaacattgaattcagggacctttcctattcggttcctgaaggaccctggtggaggaagaaaggatacaagaccctcctgaaaggaatttccgggaagttcaatagtggtgagttggtggccattatgggtccttccggggccgggaagtccacgctgatgaacatcctggctggatacagggagacgggcatgaagggggccgtcctcatcaacggcctgccccgggacctgcgctgcttccggaaggtgtcctgctacatcatgcaggatgacatgctgctgccgcatctcactgtgcaggaggccatgatggtgtcggcacatctgaagcttcaggagaaggatgaaggcagaagggaaatggtcaaggagatactgacagcgctgggcttgctgtcttgcgccaacacgcggaccgggagcctgtcaggtggtcagcgcaagcgcctggccatcgcgctggagctggtgaacaaccctccagtcatgttcttcgatgagcccaccagcggcctggacagcgcctcctgcttccaggtggtctcgctgatgaaagggctcgctcaagggggtcgctccatcatttgcaccatccaccagcccagcgccaaactcttcgagctgttcgaccagctttacgtcctgagtcaaggacaatgtgtgtaccggggaaaagtctgcaatcttgtgccatatttgagggatttgggtctgaactgcccaacctaccacaacccagcagattttgtcatggaggttgcatccggcgagtacggtgatcagaacagtcggctggtgagagcggttcgggagggcatgtgtgactcagaccacaagagagacctcgggggtgatgccgaggtgaacccttttctttggcaccggccctctgaagaggactcctcgtccatggaaggctgccacagcttctctgccagctgcctcacgcagttctgcatcctcttcaagaggaccttcctcagcatcatgagggactcggtcctgacacacctgcgcatcacctcgcacattgggatcggcctcctcattggcctgctgtacttggggatcgggaacgaagccaagaaggtcttgagcaactccggcttcctcttcttctccatgctgttcctcatgttcgcggccctcatgcctactgttctgacatttcccctggagatgggagtctttcttcgggaacacctgaactactggtacagcctgaaggcctactacctggccaagaccatggcagacgtgccctttcagatcatgttcccagtggcctactgcagcatcgtgtactggatgacgtcgcagccgtccgacgccgtgcgctttgtgctgtttgccgcgctgggcaccatgacctccctggtggcacagtccctgggcctgctgatcggagccgcctccacgtccctgcaggtggccactttcgtgggcccagtgacagccatcccggtgctcctgttctcggggttcttcgtcagcttcgacaccatccccacgtacctacagtggatgtcctacatctcctatgtcaggtatgggttcgaaggggtcatcctctccatctatggcttagaccgggaagatctgcactgtgacatcgacgagacgtgccacttccagaagtcggaggccatcctgcgggagctggacgtggaaaatgccaagctgtacctggacttcatcgtactcgggattttcttcatctccctccgcctcattgcctattttgtcctcaggtacaaaatccgggcagagaggtaaaacacctgaatgccaggaaacaggaagattagacactgtggccgagggcacgtctagaatcgaggaggcaagcctgtgcccgaccgacgacacagagactcttctgatccaacccctagaaccgcgttgggtttgtgggtgtctcgtgctcagccactctgcccagctgggttggatcttctctccattcccctttctagctttaactaggaagatgtaggcagattggtggtttttttttttttaacatacagaattttaaataccacaactggggcagaatttaaagctgcaacacagctggtgatgagaggcttcctcagtccagtcgctccttagcaccaggcaccgtgggtcctggatggggaactgcaagcagcctctcagctgatggctgcacagtcagatgtctggtggcagagagtccgagcatggagcgattccattttatgactgttgtttttcacattttcatctttctaaggtgtgtctcttttccaatgagaagtcatttttgcaagccaaaagtcgatcaatcgcattcattttaagaaattatacctttttagtacttgctgaagaatgattcagggtaaatcacatactttgtttagagaggcgaggggtttaaccgagtcacccagctggtctcatacatagacagcacttgtgaaggattgaatgcaggttccaggtggagggaagacgtggacaccatctccactgagccatgcagacatttttaaaagctatacaaaaaattgtgagaagacattggccaactctttcaaagtctttctttttccacgtgcttcttattttaagcgaaatatattgtttgtttcttcctaaaaaaaaaaaaaaaaaaaaaaaaa

SEQ ID NO: 31789 - DNA, 3498 bp, Homo Sapiens
ttctttccaagggtctctgggtgaggcccgtgaccttcccaagcctctccctgtcttgtgaaacctgggcgtgatatacctcccttttagggctgctgcgatcatttaggcagattaaacctcataagtggtttcccatacaagaaagatgctagcagtgcaacagacagaacacttacctgcctgccctcccgccaggaggtggtcttccaacttttgcccggagtctacagagggtgggccctctctgctggggctccgggacatggtcaggagaggttggtctgtctgtaccgccattctcttggccagactgtggtgtctggtccctactcacaccttcctgtcagagtatccagaggccgcagagtatccacaccctggctgggtgtactggctacagatggctgtggctccaggtcacctgcgtgcctgggtgatgagaaataatgtcacaacaaatatcccatctgcattctctgggacactgacccatgaagagaaagcagttctcacagtttttacaggcacagccacagccgtgcatgtacaggtggcagctttagcttctgctaaactggagagctcagtgtttgtgacagactgcgtgtcctgcaaaatcgaaaatgtctgtgattcagctcttcagggaaaaagggtgccgatgtctggcctacagggctcaagcattgtcatcatgcccccatccaaccgtccactcgccagtgcggcatcctgcacgtggtcagtccaagtccagggagggccccatcacctgggggtggtcgctatcagtggcaaagtcttgtcagcagctcatggggcaggaagggcctatggttgggggtttcctggcgatcccatggaggaaggatacaagaccctcctgaaaggaatttccgggaagttcaatagtggtgagttggtggccattatgggtccttccggggccgggaagtccacgctgatgaacatcctggctggatacagggagacgggcatgaagggggccgtcctcatcaacggcctgccccgggacctgcgctgcttccggaaggtgtcctgctacatcatgcaggatgacatgctgctgccgcatctcactgtgcaggaggccatgatggtgtcggcacatctgaagcttcaggagaaggatgaaggcagaagggaaatggtcaaggagatactgacagcgctgggcttgctgtcttgcgccaacacgcggaccgggagcctgtcaggtggtcagcgcaagcgcctggccatcgcgctggagctggtgaacaaccctccagtcatgttcttcgatgagcccaccagcggcctggacagcgcctcctgcttccaggtggtctcgctgatgaaagggctcgctcaagggggtcgctccatcatttgcaccatccaccagcccagcgccaaactcttcgagctgttcgaccagctttacgtcctgagtcaaggacaatgtgtgtaccggggaaaagtctgcaatcttgtgccatatttgagggatttgggtctgaactgcccaacctaccacaacccagcagattttgtcatggaggttgcatccggcgagtacggtgatcagaacagtcggctggtgagagcggttcgggagggcatgtgtgactcagaccacaagagagacctcgggggtgatgccgaggtgaacccttttctttggcaccggccctctgaagaggtaaagcagacaaaacgattaaaggggttgagaaaggactcctcgtccatggaaggctgccacagcttctctgccagctgcctcacgcagttctgcatcctcttcaagaggaccttcctcagcatcatgagggactcggtcctgacacacctgcgcatcacctcgcacattgggatcggcctcctcattggcctgctgtacttggggatcgggaacgaagccaagaaggtcttgagcaactccggcttcctcttcttctccatgctgttcctcatgttcgcggccctcatgcctactgttctgacatttcccctggagatgggagtctttcttcgggaacacctgaactactggtacagcctgaaggcctactacctggccaagaccatggcagacgtgccctttcagatcatgttcccagtggcctactgcagcatcgtgtactggatgacgtcgcagccgtccgacgccgtgcgctttgtgctgtttgccgcgctgggcaccatgacctccctggtggcacagtccctgggcctgctgatcggagccgcctccacgtccctgcaggtggccactttcgtgggcccagtgacagccatcccggtgctcctgttctcggggttcttcgtcagcttcgacaccatccccacgtacctacagtggatgtcctacatctcctatgtcaggtatgggttcgaaggggtcatcctctccatctatggcttagaccgggaagatctgcactgtgacatcgacgagacgtgccacttccagaagtcggaggccatcctgcgggagctggacgtggaaaatgccaagctgtacctggacttcatcgtactcgggattttcttcatctccctccgcctcattgcctattttgtcctcaggtacaaaatccgggcagagaggtaaaacacctgaatgccaggaaacaggaagattagacactgtggccgagggcacgtctagaatcgaggaggcaagcctgtgcccgaccgacgacacagagactcttctgatccaacccctagaaccgcgttgggtttgtgggtgtctcgtgctcagccactctgcccagctgggttggatcttctctccattcccctttctagctttaactaggaagatgtaggcagattggtggtttttttttttttaacatacagaattttaaataccacaactggggcagaatttaaagctgcaacacagctggtgatgagaggcttcctcagtccagtcgctccttagcaccaggcaccgtgggtcctggatggggaactgcaagcagcctctcagctgatggctgcacagtcagatgtctggtggcagagagtccgagcatggagcgattccattttatgactgttgtttttcacattttcatctttctaaggtgtgtctcttttccaatgagaagtcatttttgcaagccaaaagtcgatcaatcgcattcattttaagaaattatacctttttagtacttgctgaagaatgattcagggtaaatcacatactttgtttagagaggcgaggggtttaaccgagtcacccagctggtctcatacatagacagcacttgtgaaggattgaatgcaggttccaggtggagggaagacgtggacaccatctccactgagccatgcagacatttttaaaagctatacaaaaaattgtgagaagacattggccaactctttcaaagtctttctttttccacgtgcttcttattttaagcgaaatatattgtttgtttcttcctaaaaaaaaaaaaaaaaaaaaaaaaa

SEQ ID NO: 31790 - DNA, 2919 bp, Homo Sapiens
caccgttagggcagcctggcgcgcggcgcccgccaggcgcccagtcctctgccatcgcccacgcctccctggtgccagggaacaggtatcagcgcgcctccccagcggctgggagagacgctgaatgaagaagagggaaggacggttagtcagtcttatagctggatcagctaccaagagaagttgtaaaccaagaagagaaaagcatttcaatttgggacatttatttgcacctggaaatggggaatgggctgtcagaccagacttctatcctgtccaacctgccttcatttcagtctttccacattgttattctgggtttggactgtgctggaaagacaactgtcttatacaggctgcagttcaatgaatttgtaaataccgtacctaccaaaggatttaacactgagaaaattaaggtaaccttgggaaattctaaaacagtcacttttcacttctgggatgtaggtggtcaggagaaattaaggccactgtggaagtcatataccagatgcacagatggcattgtatttgttgtggactctgttgatgtcgaaaggatggaagaagccaaaactgaacttcacaaaataactaggatatcagaaaatcagggagtccctgtacttatagttgctaacaaacaagatttgaggaactcattgtcactttcagaaattgagaaattgttagcaatgggtgaactgagctcatcaactccttggcatttgcagcctacctgtgcaatcataggagatggcctaaaggaaggacttgagaaactacatgatatgatcattaaaagaagaaaaatgttgcggcaacagaaaaagaaaagatgaatatcaatacctattatatctgtgtggagtaggttttctctggtctgattttgacaaatagaagagtgtctacagcgtggtttgcctgtctgccctcctggatgctattaaagctttgttttgttgaacaatcagatgcccaactctgttgccttgtggaagatgagtaaatgcagtgcttcttaaagtggtctcttctccctaccccacaaatcttttggtactaccatttggggaagccaagcaaggatagtaaattgaccagaacacagttgtgggaatttggtctgaagttagtgaaataaaactttaaagagtgtctgcctagtgttttgtgcttacatctttcggggggaagcctttgcaagaaaattgcatacaaggctttgtaacgatcaagtgctaatcgatggaaatgttaaggtagattaacatatatgcagttatattgatcacattggtccaaccagtccttttttgaagtaagggacaaggagtaagtattttcttttttaagtttctgccaaatgatttttgacgctttctggaatcaagtaatttaatagtatagcttaattctagacaatgtttaagttggtctacctttattaaaaataagatatttggggtatattcaagtgcatggattagttttcctgacaaagcatgttttggtgtgtagtcttactttttagaaatagctatgcatcgttctacacaggtttaaaacaacttttttggggatttagggctattataggaatagtttgttgtcagaagcactttcacttgaagaacctaaaatgattgactcattcatagtaaatatgggcatgtaaactaataaatatgcactggatacatatatggatttatgaagaaggcgatttagtcaagaggatgtaattaaaatatgtggtctctaaaatattccagttacaagatatttgttttattaatatttgctggctaaaaacaaatgtggtttttatatatttttgtagtgtgttgagaagagcaaaagctttataaatatacctgatgcgctgtagaatgaaaatgtaaaagataacctgtatgtgttccgagctttaattttttgtttacaaattgaacagtgttacatgggctgtccagtcctgattatagagaggaagaaatggtaacagtatggcagataagaattacaattatagaaaatgaggggaaaataacaaacctgttttatgaaaattcactggtgctgtttacattggaataaaaagctctataaggaggaaaggcctttatctaattcttatctacagacacttacttccagtgaccatattttactaaatcagcttattttttatgtctaaagcaacagctgttctgaaaaatcaccaaaagaaatgcactttgctagcaggatttgttttggctttgggttttgtttttttgttttttttttttttcagtggcataacagtttttggaaccttgattcttgtgtcacacaaaatgaatgaagtagcttgatgtggagccttcatatgttaaatattcctgcactagtgatggtcacttagaatgtttatagaaatgtggataataactaccaataaactacttgaggcactaggagaacagtatttgactttgaattttaatgtatttccacttttgctgaagcttttaatcagatgtgtaaaaacaattgaccagctaggctatttagtcccatagtagttcagatctgcttagatgtgacaggcattgaaggctgtttttttttttttctcccttcactgatactgaaatcatggtatctgctgcaaacatgagtagatccatgatggattaataaagcttgctgaaaaaaaaaatctgtgtatcagttagatttaccagtttgcctgtactttctgtctacctactatgtaaaatagtgctgtttttaagtatttcaaaagcttgtgtgttgaccctttgtagcctaagtacgtaaacaaattaatgttatctaagtttttcatatttcatggacaacaaaagagaaaatggtatgaacactgtacaaactttgatttataaa

SEQ ID NO: 31791 - DNA, 8164 bp, Homo Sapiens
agaaccgcctgatcccgaactccctgtgcagagaccagactcgcccgaatatggggagaaaaacgagccgcgtgcagcaggggccgcctcggtcccctgcctgctccgcccacggcgagcgttcctggggcctcgagtttccccccttccgctggctgctcggaatcgcgggacggacccacctggccgccctgcctcccttccagtgggtcctggccttcgagatcttcatccccctggtgctgttctttatcctgctggggctgcgacagaagaagcccaccatctccgtgaaggaagtctccttctacacagcggcgcccctgacgtctgccggcatcctgcctgtcatgcaatcgctgtgcccggacggccagcgagacgagttcggcttcctgcagtacgccaactccacggtcacgcagctgcttgagcgcctggaccgcgtggtggaggaaggcaacctgtttgacccagcgcggcccagcctgggctcagagctcgaggccctacgccagcatctggaggccctcagtgcgggcccgggcacctcggggagccacctggacagatccacagtgtcttccttctctctggactcggtggccagaaacccgcaggagctctggcgtttcctgacgcaaaacttgtcgctgcccaatagcacggcccaagcactcttggccgcccgtgtggacccgcccgaggtctaccacctgctctttggtccctcatctgccctggattcacagtctggcctccacaagggtcaggagccctggagccgcctagggggcaatcccctgttccggatggaggagctgctgctggctcctgccctcctggagcagctcacctgcacgccgggctcgggggagctgggccggatcctcactgtgcctgagagtcagaagggagccctgcagggctaccgggatgctgtctgcagtgggcaggctgctgcgcgtgccaggcgcttctctgggctgtctgctgagctccggaaccagctggacgtggccaaggtctcccagcagctgggcctggatgcccccaacggctcggactcctcgccacaggcgccacccccacggaggctgcaggcgcttctgggggacctgctggatgcccagaaggttctgcaggatgtggatgtcctgtcggccctggccctgctactgccccagggtgcctgcactggccggacccccggacccccagccagtggtgcgggtggggcggccaatggcactggggcaggggcagtcatgggccccaacgccaccgctgaggagggcgcaccctctgctgcagcactggccaccccggacacgctgcagggccagtgctcagccttcgtacagctctgggccggcctgcagcccatcttgtgtggcaacaaccgcaccattgaacccgaggcgctgcggcggggcaacatgagctccctgggcttcacgagcaaggagcagcggaacctgggcctcctcgtgcacctcatgaccagcaaccccaaaatcctgtacgcgcctgcgggctctgaggtcgaccgcgtcatcctcaaggccaacgagacttttgcttttgtgggcaacgtgactcactatgcccaggtctggctcaacatctcggcggagatccgcagcttcctggagcagggcaggctgcagcaacacctgcgctggctgcagcagtatgtagcagagctgcggctgcaccccgaggcactgaacctgtcactggatgagctgccgccggccctgagacaggacaacttctcgctgcccagtggcatggccctcctgcagcagctggataccattgacaacgcggcctgcggctggatccagttcatgtccaaggtgagcgtggacatcttcaagggcttccccgacgaggagagcattgtcaactacaccctcaaccaggcctaccaggacaacgtcactgtttttgccagtgtgatcttccagacccggaaggacggctcgctcccgcctcacgtgcactacaagatccgccagaactccagcttcaccgagaaaaccaacgagatccgccgcgcctactggcggcctgggcccaatactggcggccgcttctacttcctctacggcttcgtctggatccaggacatgatggagcgcgccatcatcgacacttttgtggggcacgacgtggtggagccaggcagctacgtgcagatgttcccctacccctgctacacacgcgatgacttcctgtttgtcattgagcacatgatgccgctgtgcatggtgatctcctgggtctactccgtggccatgaccatccagcacatcgtggcggagaaggagcaccggctcaaggaggtgatgaagaccatgggcctgaacaacgcggtgcactgggtggcctggttcatcaccggctttgtgcagctgtccatctccgtgacagcactcaccgccatcctgaagtacggccaggtgcttatgcacagccacgtggtcatcatctggctcttcctggcagtctacgcggtggccaccatcatgttctgcttcctggtgtctgtgctgtactccaaggccaagctggcctcggcctgcggtggcatcatctacttcctgagctacgtgccctacatgtacgtggcgatccgagaggaggtggcgcatgataagatcacggccttcgagaagtgcatcgcgtccctcatgtccacgacggcctttggtctgggctctaagtacttcgcgctgtatgaggtggccggcgtgggcatccagtggcacaccttcagccagtccccggtggagggggacgacttcaacttgctcctggctgtcaccatgctgatggtggacgccgtggtctatggcatcctcacgtggtacattgaggctgtgcacccaggcatgtacgggctgccccggccctggtacttcccactgcagaagtcctactggctgggcagtgggcggacagaagcctgggagtggagctggccgtgggcacgcaccccccgcctcagtgtcatggaggaggaccaggcctgtgccatggagagccggcgctttgaggagacccgtggcatggaggaggagcccacccacctgcctctggttgtctgcgtggacaaactcaccaaggtctacaaggacgacaagaagctggccctgaacaagctgagcctgaacctctacgagaaccaggtggtctccttcttgggccacaacggggcgggcaagaccaccaccatgtccatcctgaccggcctgttccctccaacgtcgggttccgccaccatctacgggcacgacatccgcacggagatggatgagatccgcaagaacctgggcatgtgcccgcagcacaatgtgctctttgaccggctcacggtggaggaacacctctggttctactcacggctcaagagcatggctcaggaggagatccgcagagagatggacaagatgatcgaggacctggagctctccaacaaacggcactcactggtgcagacattgtcgggtggcatgaagcgcaagctgtccgtggccatcgccttcgtgggcggctctcgcgccatcatcctggacgagcccacggcgggcgtggacccctacgcgcgccgcgccatctgggacctcatcctgaagtacaagccaggccgcaccatccttctgtccacccaccacatggatgaggctgacctgcttggggaccgcattgccatcatctcccatgggaagctcaagtgctgcggctccccgctcttcctcaagggcacctatggcgacgggtaccgcctcacgctggtcaagcggcccgccgagccggggggcccccaagagccagggctggcatccagccccccaggtcgggccccgctgagcagctgctccgagctccaggtgtcccagttcatccgcaagcatgtggcctcctgcctgctggtctcagacacaagcacggagctctcctacatcctgcccagcgaggccgccaagaagggggctttcgagcgcctcttccagcacctggagcgcagcctggatgcactgcacctcagcagcttcgggctgatggacacgaccctggaggaagtgttcctcaaggtgtcggaggaggatcagtcgctggagaacagtgaggccgatgtgaaggagtccaggaaggatgtgctccctggggcggagggcccggcgtctggggagggtcacgctggcaatctggcccggtgctcggagctgacccagtcgcaggcatcgctgcagtcggcgtcatctgtgggctctgcccgtggcgacgagggagctggctacaccgacgtctatggcgactaccgccccctctttgataacccacaggacccagacaatgtcagcctgcaagaggtggaggcagaggccctgtcgagggtcggccagggcagccgcaagctggacggcgggtggctgaaggtgcgccagttccacgggctgctggtcaaacgcttccactgcgcccgccgcaactccaaggcactcttctcccagatcttgctgccagccttcttcgtctgcgtggccatgaccgtggccctgtccgtcccggagattggtgatctgcccccgctggtcctgtcaccttcccagtaccacaactacacccagccccgtggcaatttcatcccctacgccaacgaggagcgccgcgagtaccggctgcggctatcgcccgacgccagcccccagcagctcgtgagcacgttccggctgccgtcgggggtgggtgccacctgcgtgctcaagtctcccgccaacggctcgctggggcccacgttgaacctgagcagcggggagtcgcgcctgctggcggctcggttcttcgacagcatgtgtctggagtccttcacacaggggctgccactgtccaatttcgtgccacccccaccctcgcccgccccatctgactcgccagcgtccccggatgaggacctgcaggcctggaacgtctccctgccgcccaccgctgggccagaaatgtggacgtcggcaccctccctgccgcgcctggtacgggagcccgtccgctgcacctgctctgcgcagggcaccggcttctcctgccccagcagtgtgggcgggcacccgccccagatgcgggtggtcacaggcgacatcctgaccgacatcaccggccacaatgtctctgagtacctgctcttcacctccgaccgcttccgactgcaccggtatggggccatcacctttggaaacgtcctgaagtccatcccagcctcatttggcaccagggccccacccatggtgcggaagatcgcggtgcgcagggctgcccaggttttctacaacaacaagggctatcacagcatgcccacctacctcaacagcctcaacaacgccatcctgcgtgccaacctgcccaagagcaagggcaacccggcggcttacggcatcaccgtcaccaaccaccccatgaataagaccagcgccagcctctccctggattacctgctgcagggcacggatgtcgtcatcgccatcttcatcatcgtggccatgtccttcgtgccggccagcttcgttgtcttcctcgtggccgagaagtccaccaaggccaagcacctgcagtttgtcagcggctgcaaccccatcatctactggctggcgaactacgtgtgggacatgctcaactacctggtccccgctacctgctgtgtcatcatcctgtttgtgttcgacctgccggcctacacgtcgcccaccaacttccctgccgtcctctccctcttcctgctctatgggtggtccatcacgcccatcatgtacccggcctccttctggttcgaggtccccagctccgcctacgtgttcctcattgtcatcaatctcttcatcggcatcaccgccaccgtggccaccttcctgctacagctcttcgagcacgacaaggacctgaaggttgtcaacagttacctgaaaagctgcttcctcattttccccaactacaacctgggccacgggctcatggagatggcctacaacgagtacatcaacgagtactacgccaagattggccagtttgacaagatgaagtccccgttcgagtgggacattgtcacccgcggactggtggccatggcggttgagggcgtcgtgggcttcctcctgaccatcatgtgccagtacaacttcctgcggcggccacagcgcatgcctgtgtctaccaagcctgtggaggatgatgtggacgtggccagtgagcggcagcgagtgctccggggagacgccgacaatgacatggtcaagattgagaacctgaccaaggtctacaagtcccggaagattggccgtatcctggccgttgaccgcctgtgcctgggtgtgcgtcctggcgagtgcttcgggctcctgggcgtcaacggtgcgggcaagaccagcaccttcaagatgctgaccggcgacgagagcacgacggggggcgaggccttcgtcaatggacacagcgtgctgaaggagctgctccaggtgcagcagagcctcggctactgcccgcagtgtgacgcgctgttcgacgagctcacggcccgggagcacctgcagctgtacacgcggctgcgtgggatctcctggaaggacgaggcccgggtggtgaagtgggctctggagaagctggagctgaccaagtacgcagacaagccggctggcacctacagcggcggcaacaagcggaagctctccacggccatcgccctcattgggtacccagccttcatcttcctggacgagcccaccacaggcatggaccccaaggcccggcgcttcctctggaacctcatccttgacctcatcaagacagggcgttcagtggtgctgacatcacacagcatggaggagtgcgaggcgctgtgcacgcggctggccatcatggtgaacggtcgcctgcggtgcctgggcagcatccagcacctgaagaaccggtttggagatggctacatgatcacggtgcggaccaagagcagccagagtgtgaaggacgtggtgcggttcttcaaccgcaacttcccggaagccatgctcaaggagcggcaccacacaaaggtgcagtaccagctcaagtcggagcacatctcgctggcccaggtgttcagcaagatggagcaggtgtctggcgtgctgggcatcgaggactactcggtcagccagaccacactggacaatgtgttcgtgaactttgccaagaagcagagtgacaacctggagcagcaggagacggagccgccatccgcactgcagtcccctctcggctgcttgctcagcctgctccggccccggtctgcccccacggagctccgggcacttgtggcagacgagcccgaggacctggacacggaggacgagggcctcatcagcttcgaggaggagcgggcccagctgtccttcaacacggacacgctctgctgaccacccagagctgggccagggaggacacgctccactgaccacccagagctgggccagggactcaacaatggggacagaagtcccccagtgcctgccagggcctggagtggaggttcaggaccaaggggcttctggtcctccagcccctgtactcggccatgccctgcggtcactgcggttgccgcccctaattgtgccaaaggctgacccggcccgggctgcgtacacccttgccctgctttgccttaaagcctcggggtctgcccggcccctcgcccctgcctggcactgctcaccgcccaaggcgacgccggctggaccaggcactgctggcctttctcctgcccggcctcggaaccagcttttctctcttacgatgaaggctgatgccgagagcgggctgtgggcggagctgggtcagtcccgtatttattttgctttgagaagaggctcctctggccctgctctcctgcagggaggtggctgtcccgcgggaagccatcagcttgggccagctggcaggtggcaggaatggagaagctgaccctgctggccaggcaaggggccagaccccccccaacccccagctgccatcgctctcccacccagcttggccccctgcccgcccacctccctgggagccgggcctgtacatagcgcacagatgtttgttttaaataaataaacaaaatgtcaaaaaaaaaaaaaaaaaa

SEQ ID NO: 31792 - DNA, 3408 bp, Homo Sapiens
acatctcccggcaggctgcggaagggggtcgagtagaaggaccgccgctccggcctcccgcgacttctcgaaggtgggcaggtcccaccttgtggaggatggaggtgaccggggacgccggggtaccagaatctggcgagatccggactctaaagccgtgtctgctgcgccgcaactacagccgcgaacagcacggcgtggccgcctcctgcctcgaagacctgaggagcaaggcctgtgacattctggccattgataagtccctgacaccagtcaccctggtcctggcagaggatggcaccatagtggatgatgacgattactttctgtgtctaccttccaatactaagtttgtggcattggctagtaatgagaaatgggcatacaacaattcagatggaggtacagcttggatttcccaagagtcctttgatgtagatgaaacagacagcggggcagggttgaagtggaagaatgtggccaggcagctgaaagaagatctgtccagcatcatcctcctatcagaggaggacctccagatgcttgttgacgctccctgctcagacctggctcaggaactacgtcagagttgtgccaccgtccagcggctgcagcacacactccaacaggtgcttgaccaaagagaggaagtgcgtcagtccaagcagctcctgcagctgtacctccaggctttggagaaagagggcagcctcttgtcaaagcaggaagagtccaaagctgcctttggtgaggaggtggatgcagtagacacgggtatcagcagagagacctcctcggacgttgcgctggcgagccacatccttactgcactgagggagaagcaggctccagagctgagcttatctagtcaggatttggaggtgggcggaaaccagggtcactgagctacagaggaggacatgccctgggatgtagtagtatcatgcagaggtgtgtgggcccttttgttcacctctgcagactgtgaatcctagctgccagtttgcctattatatgccaaggcatttgcaaaaatctcattaatctaaatcaaaatagctttaaagaaaaatgcatacacttcctcagatcatcaaacagactctggtccaaggttggtaatgaaatgactgttcctgacagggaggaatagcagggcccaatcttctgagatggcttctgggtctttccatggtcagagaagatctatagtccgtcctgaggtctgtcaatgtcacaggaaaaggcaaacttgaggggatcgtcgcctgctggctaagaccagggagctaaaaacttgaggaagggaacctgcctgggtgggtgctacttctgattcattgtccttgtccctgtcataagtacctccctattgtagatagaagggaaggaaactgttgacttgagcttggctaaatttcctgaaggtggaggaccttagagttgctccaagtaaactttccaaggacttcttcctgttggtgttgtaagaaaaggcccatgcttgtccgggcacagtggcttacgcctgttaatgccagtactttgggaggccgaggcaggtggatcacctgaggtcaggagttcgagaccagcctgaccaacatggcgaaaccccatctctactaaaaatacaaaaattagcctggcatggtggtgggaggctgaagcaagagaatcacttgaacccaggaggtggaggttgcgtgagctaagatcgcgccactgcactccagcctgggcgacaagagtgaaactccgtcttaaaaaagcccatggcaggctgggcgcggtggctcacgcctgtaatcccagcactttgggaggccaaggtgggcggatcacaaggtcaggagatcgagaccatcctggcgaacacggtgaaaccccgtctctactaaaaaaaatacaaaaaaattagccaggcgtggtcgtgggcacctgtagtcccagctactcagggggctgaggcaggagaatggcgtgaatccgggaggcggagcttgcagggagccgagatagtgtcactgcactccagcctgggtgacagagcgagactccgtctcaaaaaacaaaaagcccgtggcaattaatggtaaaggaaacccggcatttcagtgtaaagaggtaacataaacggatactgcctcattgcactccccaaaagagagtcaggagagcagcaggagaggcgcacagaaggcccagttctcaggggtttttattcttgctgcagttggttaccaaggaagaccccaaagcactggctgttgccttgaactgggacataaagaagacggagactgttcaggaggcctgtgagcgggagctcgccctgcgcctgcagcagacgcagagcttgcattctctccggagcatctcagcaagcaaggcctcaccacctggtgacctgcagaatcctaagcgagccagacaggatcccacatagcagcagcgggaagtgtgccaaggaagctctgtggcgttgtgttattggtagacaccctcagcctcatcatttgactacctatgtactactctaccccctgccttagagcaccttccagagaagctattccaggtctcaacatacgccgttccaccaattttttttttagccccaccagcttcaggacttctgccaattttgaatgatatagctgcaccaacaatatcccgcctcctctaattacatatgatgttctctgttcaaaagtaattggcagtgattggccaggcgcagtggctcacgcctgtaatcccagcactgggaggccgaggggggcggatcgtgaagtcaggagatcgagaccatcctggctaacatggtgaaaccctgtctctactaaaaatacaaaaaaaattagccagccatggtggcgggcgcctgtaatcccagctacttgggaggctgaggcaggagaatggcatgaacctgggaggcagagcttgcagtgagctgagattgcgccactgcactccagcctgggcaacagagcgagactccgtctcaaaaaaaaaaaaaaaaaaagtaattggcagtgactatgggcgcactgcctaacatttagccctgccccatatggaacatgttaaaaaaaaaaaaagccaggccgagcgtgttggctcacgcttgtaatcccagcactttgggaggccgaggcgggtggatcacgaggtcaggagatcgagaccatcctggctaacacagtgaaacgtgtttttactaaaagtacaaaaaactagctgggcgtggtggcaggagcctgtagtcccagctactcgggaggctgaggcaggagaattgcttgaaccggggaggcagaagttgcagtgagccgagattatgccactgtactccagcctgggtgacagagtgacactctgtctcaaaaaaaaaaaaaaaaa

SEQ ID NO: 31793 - DNA, 9615 bp, Homo Sapiens
gcggccgccccgcccccgctcccgccgccgcccgccagtcagtcagtcagtcagtcagtcagtcagtcagtcagtcactgagcgcgcggcgcgggagctgctggcagtcgctgcgtctctggcgagggagcgccgcgcctggggaggaggcggaggcagcggctggaggagcgcgagcggcggtttccttgcccggggccgcgggaaggccgaccgactgccgcgatggagcagctatcagatgaagaaattgatcatggtgctgaagaagacagtgacaaggaagatcaggacctggacaaaatgtttggagcctggcttggagaactagacaaactcactcagagtttggattctgacaagcccatggaaccagtaaaaagatctcctcttcgccaggaaacaaacatggccaacttttcttaccgcttctccatatacaacttgaatgaagctctgaatcagggagagactgtggatctggatgccttgatggctgatctttgctctatagagcaggagctcagcagcattggttcaggaaacagtaagcgtcaaatcacagaaacgaaagctactcagaaattgcctgttagccgacatacattgaaacatggcaccttgaaaggattatcttcttcatctaataggatagctaaaccttcccatgccagctactccttggacgacgtcactgcacagttagaacaggcctctttgagtatggatgaggctgctcagcaatctgtactagaagatactaaacccttagtaactaatcagcacagaagaaccgcgtcagcaggcacagtgagtgatgctgaagtacactctattagtaattcctcccattccagcatcacttccgcagcctccagcatggactctttggatattgataaagtaacacgccctcaagagctggatttgacacatcaagggcagccaattactgaggaagaacaggcagcaaaattgaaagctgagaagatcagagttgccctagagaaaattaaagaggcacaagtgaaaaagctggtgatcagagtccacatgtctgatgacagttctaaaacaatgatggtggatgagaggcagacagtaagacaagtactggataacctgatggacaaatcccactgcggttatagtttagactggtcactggtagaaaccgtttctgaattacaaatggagagaatctttgaagaccatgaaaacttggttgaaaatcttcttaattggacaagagatagccaaaacaagcttatatttatggagcgtatagaaaaatatgcacttttcaaaaacccacagaattatcttttggggaaaaaagaaacagctgagatggcagatagaaacaaagaagtcctcttggaggaatgtttttgtggaagttctgtaactgtaccagaaattgaaggagtcctttggttgaaggatgatggcaagaagtcctggaaaaagcgttattttctcttgcgagcatctggtatctactatgttcccaaaggaaaagcaaaggtctctcgggatctggtgtgctttctccagctggatcatgtcaacgtttattatggccaggactatcggaacaaatacaaagcacctacagactattgtctggtgctgaagcatccacaaatccagaagaaatctcaatatatcaaatacctttgttgtgatgatgtgaggacactgcatcagtgggtcaatgggatccgcattgcaaagtatgggaagcagctctatatgaactaccaagaagccttgaagaggacagagtcagcctatgattggacttccttatccagctccagcattaaatcgggatccagttcttccagcatcccagagtctcagtcaaaccactccaatcagtctgatagcggagtttctgacacccagccagcaggacacgtccgttcccagagcattgtgagctccgtattctctgaagcctggaaacgaggcactcagttggaagagtccagcaaggccagaatggagtctatgaatcggccctacacttcacttgtgccccctttatccccgcaacctaagatagtcaccccctacactgcttcacagccttcaccacctctacctcctccgccacccccacctcctcctccaccaccccctccaccaccccctcctcccccactccccagccagtctgcaccttctgcaggctcagcagccccaatgttcgtcaagtacagcacaataacacggctacagaatgcgtctcagcattcaggggccctgtttaagccgccaacacccccagtgatgcagtcacagtcagtgaagcctcagatcctggtaccccccaatggagttgttccaccaccccctccccctcctccacccccaaccccaggctctgccatggcccagctaaagcctgcaccgtgtgccccatcccttccacagttcagtgccccgcctcctccactgaagatccatcaagttcagcatattactcaggtggctcccccaacaccccccccacctcctcctatccctgcacccctccctccccaagctcccccaaaaccccttgtgaccatccccgcaccaaccagcaccaagactgtggcacctgttgtgactcaagctgcaccacccacacctactcctccagtgcccccagcaaaaaagcagccagctttccctgcttcttacattccaccctctccccctacccctcctgttccagtacccccgccaacattacccaagcaacagagcttctgtgcaaaaccccctccctctccactgtcaccggtgccctcggtcgtgaagcagatagccagccagtttccaccccctccaactccccctgccatggaatctcagcccttaaagcctgtcccagcaaatgtagctccacagtcccctcctgcagtaaaagcaaagcccaagtggcagcccagctccatcccagtcccttctccggacttccctcctccccctcctgaaagcagcctggtgtttcctcctccacccccatcacctgtcccagccccaccaccgccacctccacccacagcttctcctacccctgacaaaagtggatctccaggcaaaaagaccagtaagacgtccagccctgggggaaagaaaccacccccaaccccacagcgcaactccagcattaaatccagcagtggtgcagagcaccccgagcccaagagaccctcggtggacagtctagtcagcaagtttacaccgccagcagaatcagggtctcccagcaaggagaccctaccacctcctgcagcaccccccaagcctggaaaactcaatctttctggagtcaaccttcctggagttctccaacaagggtgtgtgtcagcaaaagcccctgttctgagtgggcgtggaaaggactccgtggtggaatttccttctcctccatccgattctgattttccaccccctccacctgaaacagagcttcctctgccccccattgagattccagcagttttctcgggaaacacctctccaaaagtggcagtcgttaatcctcaaccacaacaatggtctaaaatgtcagtgaagaaggcccctccacccacacgacccaaacggaatgatagcacccgcctcactcaagctgagatttctgagcagccaacaatggccacagttgtgccacaagtgcccacctctcccaaatccagccttagtgtccagcctggattcctggctgacctcaacaggacactgcaacgaaagtccatcactcggcacggctcactctcctcccgcatgtccagagcagaaccaacagccaccatggatgatatggcattgcctccaccaccccctgaactgctgtctgatcaacagaaggctggttacggaggcagtcatatatcaggctatgcaacgttgcggagaggaccccctcctgctccccccaaaagagaccagaacaccaagctctccagagactggtagccaccataggactttattttcatgatatctgtaatcactgctacaatcagctcacctgatcatctgtgaattcaggtgttcagagcctcctggtatgatgttattcaggtagtgtccagctatatgtgtatgtgtgtgtgtacacgtgcatgtacacacagctgtacagtgtgtgtatatatgtatacatatatgtatgtgtatgtgtatatagagagagagctgagagttattctatttattccttttctctcctaatctgaaaatgggtgttctgtattttgggtggaagaggcatagaaggggatgtgtgttgtctcttaagatttctatatcatgtggattggaccaaaaacttctaatcacttatttagaaggtatttataagtgtctgtccatgtgtagcctattcgtgcatgttgtgtattatataactaaggaatagatgtagaatgtgctatttctggttgagaaaaatcaccagaatgtttggtgtatctataaggcttttgtgtttgtttttccccagttggctgaagttagaattgcttgactgacacttcattgctatacatgaaggggcactttaaatcaggaaaatctctcagcttcatagaacgggtaactagtgcaggatggggaaatgttcacagacatcatctgtatgtggttgtgcatagaaagtaaatacatggcgtaattaactcagctgttctagctgcagtactgctgcagtgatccacccacatttaggatgtgctgacagataagctctttgcctacaatacatggataattagtgctataattctggatagttcctttttagtactgttttatgaagctttatcaacttggcttcatgatcctcactttgattgattttaagaggatggataacacagttatctctgtaatgttctgtcccagtatgtctttgggtcaccagttaccttcttaaaatatgtgctttaggtaggtgttattacatatctgtagacaattggtatatgaaatatacacatcctgtgccccaatatggtgcattatgaaaaacaaaatcattttctaaaatgcattttttgagcattgctctatagaagggaagggtgatgagagaacagaactggcccctgtacaggtgtcattaatctggttgtatatgggttataatatgtaatacaaaaagctcattaagtatgggactacatggagagggaagacagtttcatttatagctactggggctaccaggacccttgctgactgcagcctggttgtgattagttcaggttactaggtgttctgatggagtgggacagtccaagtccagtaactgacattacgttttatgcgtgtgcagtttggtataacgtggagtcagtgctctaacgacacactatacttctatatgcttttttctgtgaattttccttggtacatgagagaaataagtactctcatcaacttatgataaattggactattaggaataaaacaatctcagagcagctcctaaacaagagaataaaaatgggccatcccagcacttataaggggagcacatcttgtaatgaaagtctgtgcctattgttaatgattaccaatgcaaactgcagaaatcagttgacattgtcccacaaggaaaaagtgatgccagtaaagtgggggaagagatggtaaataattctagaatgagcaaaagtgcttaattagtacagtatactcaaggtcttgcataacccacactccacgaaaaccgcatcgtaaacagagagtgaacagcacctctccattgctacatctccagaatattgttcggttatgttcatgtggttatggagcaataagaatatataccattaatttttaggtctttcaaattgttcaccaagttttgtgtttgatatttatgaagtgatctttaacacatctgcattgttaatttaagcatgcacagaaatttgggtaatgtttgagtagattgccaagcgctactgtgattcatgaatgaatttctcatagtcttctgcctgcagttttatagtttgaggggcacccatatttgtgggttagagttagtaagaatatgaatccagttatcaaagtattcatccctgaggttttgagttttattgtggtggtgattttctcatgagaaggtagacaacacttcagtttttcttgagggggaaaaaatgtacccgctaaccttttttcacccatgatttgagccctaaaacaacagcctttatgttttcagtgcaggatttcttggaatttcttgcttgtatcaatcctgatgatagccatcctgaacagatgcttctggtctgttttcctggaatagcagacatccttttgaacactaatgatgccaggaagagagtaaggctagaggaggagactcattttaaccccagtccagtggcttgtccgacaacaggccatttccctttacattcctccacagacagaaatggctattaaaaatgttttaacctcatgtatgaactgaatttaaaaaaccactaaagtgatactttatacttctgttttactccctagtgggttttctttaatttggatttttgttgggatgtagcttttcctagactgtatttctgtagctctttttctctggtgtattcatggaaagcatctactgccgcacgacactagtactgtgccttctttcactgccctctgctctgcagctctcacccagcttggctgcttcaagtctgtgcagttgacttggctgtactgaaaagtgaacagcatggattaactcatcctgctgctgagggcagtgcaaacaggtgcttattagaggtagtgacttgcttaattagtgacactcctaatttctactatggataatttcaaagtagaatcactctatgcttagagttttggcaccaatgctgtagggcagcagaatctattctcagtaaaataacttatggtttattagatattctgtattggattttaccagcttgacttttactgctcagatgctttctttcccccccttagacgctgtaattctcttgggaagagtaactattcttaaggtttttacagatacccaccttagttgtaaattggatagtttatatttctgggactttttaaatgaaaatgtggaatgttaagttacaaaagacttttcatcagaaaatttcaaacaaagtaaacatggcgttttatagtcctctaaaatctaggtgctcccacccaccaaaggcatatcctgcaaagggctgtgaactatcttggtgaactgtcttgggtcccctttccatgtatgttttcttgtcactgaaaacaaacaacgctgagtttatcaagaaaatttaaattgggggatcataataattccaaccaagtgacaactctgacatcaaggttattaggagctgtacatccaattcaagttttatttgctgctattctgggagaataaacttgtatatggagaataaactaataaacttgtatcgaggaaatccataaagttataaattagcctgaaaaatatttcaggtaatggtgtggattggcctgctttgactctcagccaccaacagaaatctttgtcacctttgttcctcagctaaaagtaattttgttataaacacaaagtgactttaaacaggtaaaaaacccattcctatttttgtacattaccaaaagtttttcatatacctacagagctaactaattacaactgatttaatccactcaagtttagaccagttaaacccataggatcctgtatggttatcaatgtgatgccttgcttttcataaaataggtataattgggtcatacacttgacgagagggtgactgtttctaggggaagaaaaccctttagattgcaggtaactttcacttttttttttttaatatacactttacatttgtataaattatgcagggtactcctaaccctgtagaaatgtatgacctctcacaaagttgagatttgatccaaagagaaatgcaagtataaaagaattagatacttattatcttttaaggtttttttttttttttggtagagatgggggtctcactgtgttgcccaggctggtctcaaactcctggccacaagtgatcttcctgcctcagcctcccaaaatgctgagattacaggcatgagccactgtacccagcctttccttataaaattcaaagagaaaatttctacacctttatccctcaaataaaacaagtgctcagttcttaccgtgcccttgcaaggtctatatgtaaaagaaatctgaaatttagctgtagaataaaacttgataaataaaaagaaaaaacatacatttctccagttggtttgctctttgcttgttgaagtaataaaccgttttaaagagaaaatacttgctgtaaacccccagtgccttcaactcttttggcagaatatttttaaagaaatccagcaagcaaactttgaggtgctaatgaaagtaaaggaaggtggtatttctagttttggcagaaatgaaaagtgtctcacaagagacatcactacccacgtggggtctggctgctttctaccaaagacatttagagaagtgaattgagtcagggtgatggtgaacactacatattttatagatggttaagttgagaattaattatgtttatcatggatggctactaataccaagctcatgattgttgcagcctcaacgtcttaggcagtaaaacttgtctgcagcactaaagggggagaaacccttatattttgcaaactgtccattcgttaaatttattgtaacctaataccaaaaactgccgtttttcatattatttccccacctcctacttttttttttttttttgctacttgtaaaataaccccttctagaaaataagcattaactggaatgtttcaaacaattttgcttcattttactatcagccactagtgaactcttacagagatgtacatttaagataaaattagcttgtgctaagtgttttaaaaacattgtttactgttaaaggggaattgcacattatatttaactgggattgctccctccctcagttctttaaaaaacaagagtcaaggctcacaccaacttgtaggctgtgggagctttgccataggtagatacaatgtagaagtatacttttttaaagcatgaagaagacaaggaacttcattataatgtaccaggtagaggacattattattcaaaggattatgcacagctcagtgaagatgaagttacaatttttctcgcagctttgttgctattattttcttctgcataaatgtatgctcatttcattatgtgccttgctccctgattgtgcaaagctatatatatatatatatatatatagatagatagatagatatatgagagagatatattcagtactactgaggatgtttttctgaggatgtttttgttctgctggattaagttattttccaagttactcttgccagttatgtcagtaaactattgtaatggcttagcacactagtcgtacagtcagtgtaaatgtttttcatttacatgttttcattatatcagcttatcaaatccttaataaaaaaaattcatagatttcatttaaaaaaaaaaaaaaaaaa

SEQ ID NO: 31794 - DNA, 2682 bp, Homo Sapiens
cgctcgccctggggccgctcagggagccgggacgcgctgcctgggctccgcgcagccgatgacattctgagttcttcctctccataccgggctccacgtctcctgtcttctttacctgatccacaggacccctcaactttcctgtaagggaggctctattaccccgtttttcagagacgagaggtagggctcagagaggtttagttactttccaagatcacacagccagtcagggcagagccgggacacaaccctgtgtctctggcggtggctctatggactcggcccctctgttccccaggccccacctcttccagaacctcctgctcttcctgtgggccctgctgaactgtggtttgggggtcagtgctcagggtccgggcgagtggaccccgtgggtgtcctggacccgctgctccagctcctgcgggcgtggcgtctccgtgcgcagccggcgctgcctccggcttcctggggaagaaccgtgctggggagactcccatgagtaccgcctctgccagttgccagactgccccccaggggctgtgcccttccgagacctacagtgtgccctgtacaatggccgccctgtcctgggcacccagaagacctaccagtgggtgcccttccatggggcgcccaaccagtgcgacctcaactgcctggctgaggggcacgccttctaccacagcttcggccgcgtcctggacggcaccgcctgcagcccgggtgcccagggggtctgcgtggctggccgctgccttagcgccggctgtgatgggttgttgggctcgggtgccctcgaggaccgctgtggccgctgcggaggcgccgacgactcgtgccttttcgtgcagcgcgtgtttcgtgacgccggtgccttcgctgggtactggaacgtgaccctgatccccgagggcgccagacacatccgcgtggaacacaggagccgcaaccacctggcactgatggggggcgatgggcgctacgtgcttaatgggcactgggtggtcagcccaccagggacctacgaggcggccggcacgcatgtggtctacacccgagacacagggccccaggagacattgcaagcagccgggcccacctcccatgacctgctcctacaggtcctcctgcaggagcccaaccctggcatcgagtttgagttctggctccctcgggagcgctacagccccttccaggctcgtgtgcaggccctgggctggcccctgaggcagcctcagccccggggggtggagcctcagccccccgcagcccctgctgtcacccctgcacagaccccaacgctggccccagacccctgcccaccctgccctgacacccgcggccgcgcccaccgactactccactattgcggcagtgactttgtgttccaggcccgagtgctgggccaccaccaccaggcccaggagacccgctatgaggtgcgcatccagctcgtctacaagaaccgctcgccactgcgggcacgcgagtacgtgtgggcgccaggccactgcccctgcccgatgctggcaccccaccgggactacctgatggctgtccagcgtcttgtcagccccgacggcacacaggaccagctgctgctgccccacgccggctacgcccggccctggagccctgcggaggacagccgcatacgcctgactgcccggcgctgtcctggctgagcccctgcaggagccccggccacacacagcaagaaagatacatctgaccagcctcaacgtcaacgtatttcccctctcaccctggcttccaggcagctctgaaatacgtcccacctgtgcagctatgtgactccctcccacacacgcttaagacacctctgcatgcagtcaaagccactgtcacaagccggcaggcactggtgaggaggcactaaggagactctgacttttatttcgcctctctccttggctgccaggaagctcatagctatttatactcagaaagtttaacgctgctttctttctctttgcgcgcgtcacacttgcttggagacactgtcatgaacgagcatgacaccctgctgccctgggtacccagaagatcatctgtttacttcccagacactgtgctgtctctgctctctgctactcacacacaccctcatgtgtgaagggcagagacactgtcacaaacaggcatgccccttagaagacatgcctaaccaggcactgtaacgtaccaacgtaccaatttccccttttcccctggctaccaggaaactcggagacaatcttttcagcctcagcatttctggctggatttccacccatcaacacgtgcttgctcctcctttttttttttttctgaggtagacccttgctctgtcacctaggctgaagtgcggtggtgcaatcatggctcactgcagcctcaaattcctgggctcaagcgatcctcccacctcagcctccacagcagctggaactccaggtgtgaatcaccatgcccggctaacttttaaattttttgtagagatggggtcttgctacgttgcccacactgctctccaactactggcctcaaacgatcctcctgcctcggcctcccaaagcactggaatttcaggcatgcactatcgtactggctgttcaccccccttttattcctctttaatttttacaagcactttttaaaaaaaaattttacttt

SEQ ID NO: 31795 - DNA, 1272 bp, Homo Sapiens
ccaaagaaagcaaggggaccaaggccgggactgctggggtgaaggtccgggaggctgagtaaggggacggaagggcacaggccatggaaaggaatgacatcatcaacttcaaggctttggagaaagagctgcaggctgcactcactgctgatgagaagtacaaacgggagaatgctgccaagttacgggcagtggaacagagggtggcttcctatgaggagttcaggggtattgtccttgcatcacatctgaagccactggagcggaaggataagatgggaggaaagagaactgtgccctggaactgtcacactattcagggaaggaccttccaggatgtggccactgaaatctccccggagaaagcccccctccagcccgagacgtctgctgacttctatcgtgattggcgacgacacttgccaagtgggccagagcgctaccaggctctactgcagcttgggggtccaaggctcggctgcctcttccagacagatgtgggatttggacttcttggggagctgctggtggcactggctgatcacgtggggccggctgaccgggcagcggtgctggggatcctatgcagcctggcgagcactgggcgcttcaccctgaacctaagcctgctgagccgggcagagagagagagctgcaagggcttgtttcagaagctgcaagccatgggcaaccccagatccgtgaaggaggggctcagctgggaggagcagggtctggaggagcagtctggtgggctccaggaggaggagaggctcctgcaggagctgctggagctgtaccaggttgactgatgcagcaagctaccctcagaggtcccagtggtcactggaggcagttttttggttgttgtcttgggggttctgcaggaccataataagaaacccacacctggttcccttctcaacttggaattttcagagcaaaaacaggaatcaagtcttccccacttctccagtccctcagtgtctcgctgttttgaactgtgtgtatccatggacagtcaagagctcaggaagttgagagcggttttgtttcccacccttagagtctgccaagcctctagcccactggccttgagagatgagtgtgtgcccaaccaaatgctggctataccagttacagcctccactcataaaagggaaaaagcaaaatctttatggtaaacaaacactgatctccacagctcttaacaagaatgtttatagccccaaaccaatgaatggacatgtaatcaaaaaaaaaaaaaaaaaa

SEQ ID NO: 31796 - DNA, 2488 bp, Homo Sapiens
gttccgtccggacggcgtttccacggacgcccaggagacagccggttgctgagccgggagcgctgactggcccggctgggcagggatgaaattgattctgcagtaaagatgttggtgtcattaaaaatgagctacaaagctgccgcgggggaggattacaaggctgactgtcctccagggaacccagcacctaccagtaatcatggcccagatgccacagaagctgaagaggattttgtggacccatggacagtacagacaagcagtgcaaaaggcatagactacgataagctcattgttcggtttggaagtagtaaaattgacaaagagctaataaaccgaatagagagagccaccggccaaagaccacaccacttcctgcgcagaggcatcttcttctcacacagagatatgaatcaggttcttgatgcctatgaaaataagaagccattttatctgtacacgggccggggcccctcttctgaagcaatgcatgtaggtcacctcattccatttattttcacaaagtggctccaggatgtatttaacgtgcccttggtcatccagatgacggatgacgagaagtatctgtggaaggacctgaccctggaccaggcctatagctatgctgtggagaatgccaaggacatcatcgcctgtggctttgacatcaacaagactttcatattctctgacctggactacatggggatgagctcaggtttctacaaaaatgtggtgaagattcaaaagcatgttaccttcaaccaagtgaaaggcattttcggcttcactgacagcgactgcattgggaagatcagttttcctgccatccaggctgctccctccttcagcaactcattcccacagatcttccgagacaggacggatatccagtgccttatcccatgtgccattgaccaggatccttactttagaatgacaagggacgtcgcccccaggatcggctatcctaaaccagccctgctgcactccaccttcttcccagccctgcagggcgcccagaccaaaatgagtgccagcgaccccaactcctccatcttcctcaccgacacggccaagcagatcaaaaccaaggtcaataagcatgcgttttctggagggagagacaccatcgaggagcacaggcagtttgggggcaactgtgatgtggacgtgtctttcatgtacctgaccttcttcctcgaggacgacgacaagctcgagcagatcaggaaggattacaccagcggagccatgctcaccggtgagctcaagaaggcactcatagaggttctgcagcccttgatcgcagagcaccaggcccggcgcaaggaggtcacggatgagatagtgaaagagttcatgactccccggaagctgtccttcgactttcagtagcactcgttttacatatgcttataaaagaagtgatgtatcagtaatgtatcaataatcccagcccagtcaaagcaccgccacctgtaggcttctgtctcatggtaattactgggcctggcctctgtaagcctgtgtatgttatcaatactgtttcttcctgtgagttccattatttctatctcttatgggcaaagcattgtgggtaattggtgctggctaacattgcatggtcggatagagaagtccagctgtgagtctctccccaaagcagccccacagtggagcctttggctggaagtccatgggccaccctgttcttgtccatggaggactccgagggttccaagtatactcttaagacccactctgtttaaaaatatatattctatgtatgcgtatatggaattgaaatgtcattattgtaacctagaaagtgctttgaaatattgatgtggggaggtttattgagcacaagatgtatttcagcccatgccccctcccaaaaagaaattgataagtaaaagcttcgttatacatttgactaagaaatcacccagctttaaagctgcttttaacaatgaagattgaacagagttcagcaattttgattaaattaagacttgggggtgaaactttccagtttactgaactccagaccatgcatgtagtccactccagaaatcatgctcgcttcccttggcacaccagtgttctcctgccaaatgaccctagaccctctgtcctgcagagtcagggtggcttttcccctgactgtgtccgatgccaaggagtcctggcctccgcagatgcttcattttgacccttggctgcagtggaagtcagcacagagcagtgccctggctgtgtccctggacgggtggacttagctagggagaaagtcgaggcagcagccctcgaggccctcacagatgtctaggcaggcctcatttcatcacgcagcatgtgcaggcctggaagagcaaagccaaatctcagggaagtccttggttgatgtatctgggtctcctctggagcactctgccctcctgtcacccagtagagtaaataaacttccttggctcctgct

SEQ ID NO: 31797 - DNA, 2944 bp, Homo Sapiens
cctccaggtccttcccctaaaacttggcactgccgatactcccagcccgttccttcccaagtcaggaacttgcaggggaccccttggcaattctttttctctcaagagcagacagccttcagtcccagccgctgccagggctggtgtgtctgacccagctgtggtttttccaggcctgaaggccccggagtgcaccagcggcatgtacaaagagaccgtctactccgccttcaatctgctcatgcattacccacccccctcgggagcagggcagcacccccagccgcagcccccgctgcacaaggccaatcagcccccccacggtgtcccccaactctctctctacgaacatttcaacagcccacatcccacccctgcacctgcggacatcagccagaagcaagttcacaggcctctgcagacccctgacctctctggcttctactccctgacctcaggcagcatggggcagctcccccacactgtgagctggttcacccacccatccttgatgctaggttctggtgtacctggtcacccagcagccatcccccacccggccattgtgcccccctcagggaagcaggagctgcagcccttcgaccgcaacctgaagacacaagcagagtccaaggcagagaaggaggccaagaagccaaccatcaagaagcccctcaatgccttcatgctgtacatgaaggagatgagagccaaggtcattgcagagtgcacacttaaggagagcgctgccatcaaccagatcctgggccgcaggtggcacgcgctgtcgcgagaagagcaggccaagtactatgagctggcccgcaaggagaggcagctgcacatgcagctatacccaggctggtcagcgcgggacaactacgggaagaagaagaggcggtcgagggaaaagcaccaagaatccaccacaggaggaaaaagaaatgcattcggtacttacccggagaaggccgctgccccagccccgttccttccgatgacagtgctctaggctgccccgggtccccagctccccaggactcaccctcataccatctgctgccccgcttccccacagaactgcttactagccctgcggagccggcacctacatccccaggtctctccactgctctcagcctcccaaccccagggcccccacaggccccccgcagcaccctgcagagcacacaggtacagcaacaggaatctcagagacaggtggcctagcaggcacaggacacctggccgcctccaggagcctaccccctgaaagtgacagagacccagatctcatggaaactggccaggggtcctgttaacgtcatctcagggtccagaccctgaagatttcagaggctgcaggacttctgcctgaacctggggtcatcgattcaaactgctccaagtggtgggaatcagatctgtcttgatgtgtcatctaattaagggaatcccttgtacctatggctgcctgcatctattctttgtaccatctgtcttgccagccagaagcctctgcctccctagcttttctgctataggtcagagatgggctgaactgagcctagctaccttctctacccatctcccccatcccccactgccacaccctccccattcagacacttcatggaccaagaatgagctggtttgtcaaacaacatgtgagcatggtcacaagcacaaagctcaagatgacagctcttctaaggaaatggagaagctctgtttataaaaacaaaaacaaaaccagctgctactcataagttggaccagaggaagccccttactatgatctcaggagcttgcaagaagcaggaaggggaatggaataggttaagtttaggcctatcaacctaagcaacagaaataatctgacactaccttatcaggcaaattggggaggggagggtgtatctagctctagttcaaattatttggaagtgttccctgagaaacccaccagcctaagaagctctggccccaggcttgtcactagcagctgcagtcaacagttcaaagaagtcatggcccaaatccagtgtgcacccctccccattcacagagcctttttcacaattccatttccagttcatctatggcagtccagccagctcctgggcagcttgagagggcaaacccaaaacctcatgacagccagagcctgtctttcagcattcagtccgcctggccggctccagtttccccatggggctgcgggacagaggaccattacaactagatcaaggagcccagaaaacctccagtagtggacaacaggttttcaccatagcctacgttaacccatttttgagccaagcttcaaccctcagccttgaaaaacaagtctttaatttaatttttgttttttgcctaaatccaaagaaaaagggctgccgggccaggcgcggtggctcacgcctgtaatcccagcactttggcaggccgaggcaggtggatcacctgacgtcagtagtttgagaccagcctggccaacatggtgaaaccctgtatctactaaaaatacaaaaattagccggacgtggtggtgcgcgcatgtaatcccagctactcgggaggctgaggcggaagaatcacttgaacccgggaggcggaggttccagtgagccgagatggcgctattgcactccagtctgggtaacagggagactgcatctcaaaaaaaaaaaaaaaaaaaaaaaagggctgtccatgtattcacacacccctcaaaaaaagcctttagttcctactttagccactggtttctcagaatccaaagatcacatattctagtgtaacactgcaagaagtcttgagaaaaagattattgtagtgttcaaaatatttttgtattgttaatgcatcatcatagaaaaacttttaaacatgagaataaagatactttttactgggtttgtttttcaaagcctgaaaaaaa

SEQ ID NO: 31798 - DNA, 2349 bp, Homo Sapiens
tgaggatcagagggtggaaaataaaagctgtggtccccaggagtcctgaacatctggggacagcgggaaaacatgagtgactccaaggaaccaagggtgcagcagctgggcctcctggaagaagatccaacaaccagtggcatcagactttttccaagagactttcaattccagcagatacatggccacaagagctctacagggtgtcttggccatggcgccctggtgctgcaactcctctccttcatgctcttggctggggtcctggtggccatccttgtccaagtgtccaaggtccccagctccctaagtcaggaacaatccgagcaagacgcaatctaccagaacctgacccagcttaaagctgcagtgggtgagctctcagagaaatccaagctgcaggagatctaccaggagctgacccagctgaaggctgcagtgggtgagttgccagagaaatccaagctgcaggagatctaccaggagctgacccggctgaaggctgcagtgggtgagttgccagagaaatccaagctgcaggagatctaccaggagctgacccggctgaaggctgcagtgggtgagttgccagagaaatccaagctgcaggagatctaccaggagctgacccggctgaaggctgcagtgggtgagttgccagagaaatccaagctgcaggagatctaccaggagctgacggagctgaaggctgcagtgggtgagttgccagagaaatccaagctgcaggagatctaccaggagctgacccagctgaaggctgcagtgggtgagttgccagaccagtccaagcagcagcaaatctatcaagaactgaccgatttgaagactgcatttggtgagttcctgcacatcaagggtccttgggcctgagatggtctctgtgtgatgtgactttacttgagttaccaaccctgcctgagcctcagtttcctcccctgtgaaatgagaacacggggtaactgcgatcattgcacttggtgttcacagtgggccaggcacacagtagacactcagttcaaccaatccgctgccttctgttctgagctctaaagctgctaattctcccagtctggaagagatggagccaggactcctgggttctcctggggatcagggagagtcttgggaagtagggagaggaatggtctctccccattccaagcggtccacccaacatggacagtcaaggaagggccctgattttcaagggcttgaaggctgggcagatatgggaatatggacaacctaatctgagcccagccctgaccagcctcccccaacagaacgcctgtgccgccactgtcccaaggactggacattcttccaaggaaactgttacttcatgtctaactcccagcggaactggcacgactccgtcaccgcctgccaggaagtgagggcccagctcgtcgtaatcaaaactgctgaggagcagaacttcctacagctgcagacttccaggagtaaccgcttctcctggatgggactttcagacctaaatcaggaaggcacgtggcaatgggtggacggctcacctctgtcacccagcttccagcggtactggaacagtggagaacccaacaatagcgggaatgaagactgtgcggaatttagtggcagtggctggaacgacaatcgatgtgacgttgacaattactggatctgcaaaaagcccgcagcctgcttcagagacgaatagttgtttccctgctagcctcagcctccattgtggtatagcagaacttcacccacttgtaagccagcgcttcttctctccatccttggaccttcacaaatgccctgagacggttctctgttcgatttttcatcccctatgaacctgggtcttattctgtccttctgatgcctccaagtttccctggtgtagagcttgtgttcttggcccatccttggagctttataagtgacctgagtgggatgcatttagggggcgggcttggtatgttgtatgaatccactctctgttccttttggagattagactatttggattcatgtgtagctgccctgtcccctggggctttatctcatccatgcaaactaccatctgctcaacttccagctacaccccgtgcacccttttgactggggacttgctggttgaaggagctcatcttgcaggctggaagcaccagggaattaattcccccagtcaaccaatggcatccagagagggcatggaggctccatacaacctcttccacccccacatctttctttgtcctatacatgtcttccatttggctgtttctgagttgtagcctttataataaagtggtaaatgttgtaactgcaaaaaaaaaaaaa

SEQ ID NO: 31799 - DNA, 19271 bp, Homo Sapiens
ccttcagttcttaaagcgctgcaattcgctgctgcagccatatttcttactctctcggggctggaagcttcctgactgaagatctctctgcacttggggttctttctagaacattttctagtcccccaacaccctttatggcgtatttctttaaaaaaatcacctaaattccataaaatatttttttaaattctatactttctcctagtgtcttcttgacacgtcctccatatttttttaaagaaagtatttggaatattttgaggcaatttttaatatttaaggaatttttctttggaatcatttttggttgacatctctgttttttgtggatcagttttttactcttccactctcttttctatattttgcccatcggggctgcggatacctggttttattattttttctttgcccaacggggccgtggatacctgccttttaattcttttttattcgcccatcggggccgcggatacctgctttttatttttttttccttagcccatcggggtatcggatacctgctgattcccttcccctctgaacccccaacactctggcccatcggggtgacggatatctgctttttaaaaattttctttttttggcccatcggggcttcggatacctgctttttttttttttatttttccttgcccatcggggcctcggatacctgctttaatttttgtttttctggcccatcggggccgcggatacctgctttgatttttttttttcatcgcccatcggtgctttttatggatgaaaaaatgttggttttgtgggttgttgcactctctggaatatctacacttttttttgctgctgatcatttggtggtgtgtgagtgtacctaccgctttggcagagaatgactctgcagttaagctaagggcgtgttcagattgtggaggaaaagtggccgccattttagacttgccgcataactcggcttagggctagtcgtttgtgctaagttaaactagggaggcaagatggatgatagcaggtcaggcagaggaagtcatgtgcattgcatgagctaaacctatctgaatgaattgatttggggcttgttaggagctttgcgtgattgttgtatcgggaggcagtaagaatcatcttttatcagtacaagggactagttaaaaatggaaggttaggaaagactaaggtgcagggcttaaaatggcgattttgacattgcggcattgctcagcatggcgggctgtgctttgttaggttgtccaaaatggcggatccagttctgtcgcagtgttcaagtggcgggaaggccacatcatgatgggcgaggctttgttaagtggttagcatggtggtggacatgtgcggtcacacaggaaaagatggcggctgaaggtcttgccgcagtgtaaaacatggcgggcctctttgtctttgctgtgtgcttttcgtgttgggttttgccgcagggacaatatggcaggcgttgtcatatgtatatcatggcttttgtcacgtggacatcatggcgggcttgccgcattgttaaagatggcgggttttgccgcctagtgccacgcagagcgggagaaaaggtgggatggacagtgctggattgctgcataacccaaccaattagaaatgggggtggaattgatcacagccaattagagcagaagatggaattagactgatgacacactgtccagctactcagcgaagacctgggtgaattagcatggcacttcgcagctgtctttagccagtcaggagaaagaagtggaggggccacgtgtatgtctcccagtgggcggtacaccaggtgttttcaaggtcttttcaaggacatttagcctttccacctctgtcccctcttatttgtcccctcctgtccagtgctgcctcttgcagtgctggatatctggctgtgtggtctgaacctccctccattcctctgtattggtgcctcacctaaggctaagtatacctccccccccaccccccaacccccccaactccccacccccaccccccaccccccacctccccacccccctacccccctacccccctacccccctctggtctgccctgcactgcactgttgccatgggcagtgctccaggcctgcttggtgtggacatggtggtgagccgtggcaaggaccagaatggatcacagatgatcgttggccaacaggtggcagaagaggaattcctgccttcctcaagaggaacacctaccccttggctaatgctggggtcggattttgatttatatttatcttttggatgtcagtcatacagtctgattttgtggtttgctagtgtttgaatttaagtcttaagtgactattatagaaatgtattaagaggctttatttgtagaattcactttaattacatttaatgagtttttgttttgagttccttaaaattccttaaagtttttagcttctcattacaaattccttaacctttttttggcagtagatagtcaaagtcaaatcatttctaatgttttaaaaatgtgctggtcattttctttgaaattgacttaactattttcctttgaagagtctgtagcacagaaacagtaaaaaatttaacttcatgacctaatgtaaaaaagagtgtttgaaggtttacacaggtccaggccttgctttgttcccatccttgatgctgcactaattgactaatcacctacttatcagacaggaaacttgaattgctgtggtctggtgtcctctattcagacttattatattggagtatttcaatttttcgttgtatcctgcctgcctagcatccagttcctccccagccctgctcccagcaaacccctagtctagccccagccctactcccaccccgccccagccctgccccagccccagtcccctaaccccccagccctagccccagtcccagtcctagttcctcagtcccgcccagcttctctcgaaagtcactctaattttcattgattcagtgctcaaaataagttgtccattgcttatcctattatactgggatattccgtttacccttggcattgctgatcttcagtactgactccttgaccattttcagttaatgcatacaatcccatttgtctgtgatctcaggacaaagaatttccttactcggtacgttgaagttagggaatgtcaattgagagctttctatcagagcattattgcccacaatttgagttacttatcattttctcgatcccctgcccttaaaggagaaaccatttctctgtcattgcttctgtagtcacagtcccaattttgagtagtgatcttttcttgtgtactgtgttggccacctaaaactctttgcattgagtaaaattctaattgccaataatcctacccattggattagacagcactctgaaccccatttgcattcagcagggggtcgcagacaacccgtcttttgttggacagttaaaatgctcagtcccaattgtcatagctttgcctattaaacaaaggcaccctactgcgctttttgctgtgcttctggagaatcctgctgttcttggacaattaaagaacaaagtagtaattgctaattgtctcacccattaatcatgaagactaccagtcgcccttgcatttgccttgaggcagcgctgactacctgagatttaagagtttcttaaattattgagtaaaatcccaattatccatagttctgttagttacactatggcctttgcaaacatctttgcataacagcagtgggactgactcattcttagagccccttcccttggaatattaatggatacaatagtaattattcatggttctgcgtaacagagaagacccacttatgtgtatgcctttatcattgctcctagatagtgtgaactacctaccaccttgcattaatatgtaaaacactaattgcccatagtcccactcattagtctaggatgtcctctttgccattgctgctgagttctgactacccaagtttccttctcttaaacagttgatatgcataattgcatatattcatggttctgtgcaataaaaatggattctcaccccatcccaccttctgtgggatgttgctaacgagtgcagattattcaataacagctcttgaacagttaatttgcacagttgcaattgtccagagtcctgtccattagaaagggactctgtatcctatttgcacgctacaatgtgggctgatcacccaaggactcttcttgtgcattgatgttcataattgtatttgtccacgatcttgtgcactaacccttccactccctttgtattccagcaggggacccttactactcaagacctctgtactaggacagtttatgtgcacaatcctaattgattagaactgagtcttttatatcaaggtccctgcatcatctttgctttacatcaagagggtgctggttacctaatgcccctcctccagaaattattgatgtgcaaaatgcaatttccctatctgctgttagtctggggtctcatcccctcatattccttttgtcttacagcagggggtacttgggactgttaatgcgcataattgcaattatggtcttttccattaaattaagatcccaactgctcacaccctcttagcattacagtagagggtgctaatcacaaggacatttcttttgtactgttaatgtgctacttgcatttgtccctcttcctgtgcactaaagaccccactcacttccctagtgttcagcagtggatgacctctagtcaagacctttgcactaggatagttaatgtgaaccatggcaactgatcacaacaatgtctttcagatcagatccattttatcctccttgttttacagcaagggatattaattacctatgttacctttccctgggactatgaatgtgcaaaattccaatgttcatggtctctccctttaaacctatattctaccccttttacattatagaaagggatgctggaaacccagagtccttctcttgggactcttaatgtgtatttctaattatccatgactcttaatgtgcatattttcaattgcctaattgatttcaattgtctaagacatttcaaatgtctaattgattagaactgagtcttttatatcaagctaatatctagcttttatatcaagctaatatcttgacttctcagcatcatagaagggggtactgatttcctaaagtctttcttgaatttctattatgcaaaattgccctgaggccgggtgtggtggctcacacctgtaatcccagcactttgggaggctgaggtgggaagatcccttactgccaggagtttgagaccagcctggccaacattaaaaaaaaaaaaaagtaagacaattgccctggaatcccatccccctcacacctccttggcaaagcagcaggagtgctaactagctagtgcttcttctcttatactgcttaaatgcgcataattagcagtagttgatgtgcccctatgttagagtagaatcccgcttccttgctccatttgcattactgcaggagcttctaactagcctgaattcactctcttggactgttaatgtgcatacttatatttgctgctgtacttttttaccatgtaaggaccccacccactgtatttacatcccagctggaagtacctactacttaagacccttagactagtaaagttagcgtgcataatcttaggtgttatatacacattttcagttgcatacagttgtgccttttatcaggactcctgtacttatcaaagcagagagtgctaatcaatattaagcccttctcttcgaactgtagatggcatgtaattgcagttgtcaatggtccttcaattagacttgggtttctgacctatcacaccctctttgctttattgcatggggtactattcacttaaggcccctttctcaaactgttaatgtgcctaatgacaattacatcagtatccttccttttgaaggacagcatggttggtgacacctaaggccccatttcttggcctcccaatatgtgtgattgtatttgtcgaggttgctatgcactagagaaggaaagtgctcccctcatccccacttttcccttccagcaggaagtgcccaccccataagacccttttatttggagagtctaggtgcacaattgtaagtgaccacaagcatgcatcttggacatttatgtgcgtaatcgcacactgctcattccatgtgaataaggtcctactctccgaccccttttgcaatacagaagggttgctgataacgcagtccccttttcttggcatgttgtgtgtgattataatcgtctgggatcctatgcactagaaaaggagggtcctctccacatacctcagtctcacctttcccttccagcagggagtgcccactccataagactctcacatttggacagtcaaggtgcgtaattgttaagtgaacacaaccatgcaccttagacatggatttgcataactacacacagctcaacctatctgaataaaatcctactctcagaccccttttgcagtacagcaggggtgctgatcaccaaggccctttttcctggcctggtatgcgtgtgattatgtttgtcccggttcctgtgtattagacatggaagcctcccctgccacactccacccccaatcttcctttcccttccggcagggagtgccctctccataagacgcttacgtttggacaatcaaggtgcacagttgtaagtgaccacaggcatacaccttggacattaatgtgcataaccactttgcccattccatctgaataaggtcctactctcagaccccttttgcagtacagcaggggtgctgatcaccaaggccccttttcttggcctgttatgtgcgtgattatatttgtctgggttcctgtgtattagacaaggaagccttccccccgcccccacccccactcccagtcttcctttcccttccagcagggagtgccccctccataagatcattacatttggacaatcaaggtgcacaattataagtgaccacagccatgcaccttggacattattggacattaatgtgcgtaactgcacatggcccatcccatctgaataaggtcctactctcagatgccctttgcagtacagcaggggtactgaatcaccaaggccctttttcttggcctgttatgtgtgtgattatatttatcccagtttctgtgtaatagacatgaaagcctcccctgccacaccccacctccaatcttcctttcccttccaccagggagtgtccactccatatacccttacatttggacaatcaaggtgcacaattgtaagtgagcataggcactcaccttggacatgaatgtgcataactgcacatggcccatcccatctgaataaggtcctactctcagaccctttttgcagtacagcaggggtgctgatcaccaaggccccttttcctggcctgttatgtgtgtgattatatttgttccagttcctgtgtaatagacatggaagcctcccctgccacactccacccccaatcttcctttcccttctggcaggaagtacccgctccataagacccttacatttggacagtcaaggtgcacaattgtatgtgaccacaaccatgcaccttggacataaatgtgtgtaactgcacatggcccatcccatctgaataaggtcctactctcagaccccttttgcagtacagtaggtgtgctgataaccaaggcccctcttcctggcctgttaacgtatgtgattatatttgtctgggttccagtgtataagacatggaagcctcccctgccccaccccaccctcaatcttcctttcccttctggcagggagtgccagctccataagaaccttacatttggacagtcaaggtgcacaattctaagtgaccgcagccatgcaccttggtcaataatgtgtgtaactgcacacggcctatctcatctgaataaggccttactctcagaccccttttgcagtacagcaggggtgctgataaccaaggcccattttcctggcctgttatgtgtgtgattatatttgtccaggtttctgtgtactagacaaggaagcctcctctgccccatcccatctacgcataatctttcttttcctcccagcagggagtgctcactccataagacccttacatttggacaatcaaggtgcacaattgtaagtgaccacaaccatgcatcttggaaatttatgtgcataactgcacatggcttatcctatttgaataaagtcctactctcagaccccctttgcagtatagctggggtgctgatcactgaggcctctttgcttggcttgtctatattcttgtgtactagataagggcaccttctcatggactccctttgcttttcaacaaggagtacccactactttttaagattcttatatttgtccaaagtacatggttttaattgaccacaacaatgtcccttggacattaatgtatgtaatcaccacatggttcatcctaattaaacaaagttctaccttctcaccctccatttgcagtataccagggttgctgaccccctaagtccccttttcttggcttgttgacatgcataattgcatttatgttggttcttgtgccctagacaaggatgccccacctcttttcaatagtgggtgcccactccttatgatctttacatttgaacagttaatgtgaataattgcagttgtccacaaccctatcacttctaggaccattatacctcttttgcattactgtggggtatactgtttccctccaaggccccttctggtggactatcaacatataattgaaattttcttttgtctttgtcagtagattaaggtcataccccatcacctttcctttgtagtacaacagggtgtcctgatcaaccaaagtcctgttgttttggactgttaatatgtgcaattacatttgctcctgatctgtgcactagataaggatcctacctactttcttagtgtttttagcaggtagtgcccactactcaagactgtcacttggaatgttcatgtgcacaaactcaattctctaagcatgttcctgtaccacctttgctttagagcagggggatgatattcactaagtgccccttcttttggacttaatatgcattaatgcaattgtccacctcttcttttagactaagagttgatctccacatattccccttgcatcaggggcatgttaattatgaatgaacccttttcttttaatattaatgtcataattgtatttgtggacctgtgtaggagaaaaagaccctatgttcctcccattaccctttggattgctgctgagaagtgttaactactcataatctcagctcttggacaattaatagcattaataacaattatcaagggcactgatcattagataagactcctgcttcctcgttgcttacatcgggggtactgacccactaaggccccttgtactgttaatgtgaatatttgcaattatatatgtctccttctggtagagtgggatattatgccctagtatcccctttgcattactgcaggggctgctgactactcaaaacttctcctgggactgttaataggcacaatggcagttatcaatggttttctccctccctgaccttgttaagcaagcgccccaccccacccttagtttcccatggcataataaagtataagcattggagtattccatgcacttgtctatcaaacagtggtccatactcccaacccttttgcattgcgccagtgtgtaaaatcacaggtagccatggtgtcatgctttatatacgaagtcttccctctctctgccccttgtgtgcccttggcccctttttacagactattgctcacaatctcaggtgtccatatttgcagctattaggtaagattgtgctgtctccctcttcccttccctctgccctgccccttttgcctctttgctgggtaatgttgaccagacaaggccctttctcttggacttaaacaattctcagttgcactttccttggtcccacccattatacatgaacccctctacttcctttcgcattgcttctgagtatgctgactacccaaagccccttctgtgttattaataaacacagtactgattgtcccatttttcagcccatcagtccaagatctccctaccactttggtgtgttggtgcagtgttgactatgaaaagcaggcctgaactaggtggataagccttcactcattttctttcatttattaatgatcctagtttcaattattgtcagattctggggacaagaaccattcttgcccacctgtgttactgctttactgtgcaaaatactgaaggcaagtcagacccagggagctggattgccatcctttattttgtgtttccagtgtacactataaaattgtctccccaggaaggaaggttggcactttctctgcattcttctttccagagcagattgcctggttaagaatctcttgttgtcccctttgtatattgttattgtaaagtgccaaatgccaggatacagccagaaaaattgcttattattattaaaaaaatttttttaagaaagacatctggattgtagggtggactcgataacctggtcattatttttttgaagccaaaatatccatttatactatgtacctggtgaccagtgtctctcattttaactgagggtggtgggtctgtggatagaacactgactcttgctattttaatatcaaagatattctagagtggaactcttaagaccagtatctttgtgtgggctttaccagcattcacttttagaaaaactacctaaattttataatcctttaatttcttcatctggagcacctgcccctacttatttcaagaagattgcagtaaaacgattaaatgagggaacatatgcagaggtgcttttaaaaagcatatgccaccttttttattaattattatataaaatgaagcatttaattatagtaataatttgaagtagtttgaagtaccacactgaggtgaggacttaaaaatgataagacgagttccctattttataagaaaaataagccaaaattaaatattcttttggatataaatttcaacagtgagatagctgcctagtggaaatgaataatatcccagccactagtgtacagggtgttttgtggcacaggattatgtaatatggaactgctcaagcaaataactagtcatcacaacagcagttctttgtaataactgaaaaagaatattgtttctcggagaaggatgtcaaaagatcggcccagctcagggagcagtttgccctactagctcctcggacagctgtaaagaagagtctctggctctttagaatactgatcccattgaagataccacgctgcatgtgtccttagtagtcatgtctccttaggctcctcttggacattctgagcatgtgagacctgaggactgcaaacagctataagaggctccaaattaatcatatctttccctttgagaatctggccaagctccagctaatctacttggatgggttgccagctatctggagaaaaagatcttcctcagaagaataggcttgttgttttacagtgttagtgatccattccctttgacgatccctaggtggagatggggcatgaggatcctccaggggaaaagctcactaccactgggcaacaaccctaggtcaggaggttctgtcaagatactttcctggtcccagataggaagataaagtctcaaaaacaaccaccacacgtcaagctcttcattgttcctatctgccaaatcattatacttcctacaagcagtgcagagagctgagtcttcagcaggtccaagaaatttgaacacactgaaggaagtcagccttcccacctgaagatcaacatgcctggcactctagcacttgaggatagctgaatgaatgtgtatttctttgtctctttctttcttgtctttgctctttgttctctatctaaagtgtgtcttacccatttccatgtttctcttgctaatttctttcgtgtgtgcctttgcctcattttctctttttgttcacaagagtggtctgtgtcttgtcttagacatatctctcatttttcattttgttgctatttctctttgctctcctagatgtggctcttctttcacgctttatttcatgtctcctttttgggtcacatgctgtgtgctttttgtccttttcttgttctgtctacctctcctttctctgcctacctctcttttctctttgtgaactgtgattatttgttaccccttccccttctcgttcgttttaaatttcaccttttttctgagtctggcctcctttctgctgtttctactttttatctcacatttctcatttctgcatttcctttctgcctctcttgggctattctctctctcctcccctgcgtgcctcagcatctcttgctgtttgtgattttctatttcagtattaatctctgttggcttgtatttgttctctgcttcttccctttctactcacctttgagtatttcagcctcttcatgaatctatctccctctctttgatttcatgtaatctctccttaaatatttctttgcatatgtgggcaagtgtacgtgtgtgtgtgtcatgtgtggcagaggggcttcctaacccctgcctgataggtgcagaacgtcggctatcagagcaagcattgtggagcggttccttatgccaggctgccatgtgagatgatccaagaccaaaacaaggccctagactgcagtaaaacccagaactcaagtagggcagaaggtggaaggctcatatggatagaaggcccaaagtataagacagatggtttgagacttgagacccgaggactaagatggaaagcccatgttccaagatagatagaagcctcaggcctgaaaccaacaaaagcctcaagagccaagaaaacagagggtggcctgaattggaccgaaggcctgagttggatggaagtctcaaggcttgagttagaagtcttaagacctgggacaggacacatggaaggcctaagaactgagacttgtgacacaaggccaacgacctaagattagcccagggttgtagctggaagacctacaacccaaggatggaaggcccctgtcacaaagcctacctagatggatagaggacccaagcgaaaaaggtatctcaagactaacggccggaatctggaggcccatgacccagaacccaggaaggatagaagcttgaagacctggggaaatcccaagatgagaaccctaaaccctacctcttttctattgtttacacttcttactcttagatatttccagttctcctgtttatctttaagcctgattcttttgagatgtactttttgatgttgccggttacctttagattgacagtattatgcctgggccagtcttgagccagctttaaatcacagcttttacctatttgttaggctatagtgttttgtaaacttctgtttctattcacatcttctccacttgagagagacaccaaaatccagtcagtatctaatctggcttttgttaacttccctcaggagcagacattcatataggtgatactgtatttcagtcctttcttttgaccccagaagccctagactgagaagataaaatggtcaggttgttggggaaaaaaaagtgccaggctctctagagaaaaatgtgaagagatgctccaggccaatgagaagaattagacaagaaatacacagatgtgccagacttctgagaagcacctgccagcaacagcttccttctttgagcttaggtgagcaggattctggggtttgggatttctagtgatggttatggaaagggtgactgtgcctgggacaaagcgaggtcccaaggggacagcctgaactccctgctcatagtagtggccaaataatttggtggactgtgccaacgctactcctgggtttaatacccatctctaggcttaaagatgagagaacctgggactgttgagcatgtttaatactttccttgatttttttcttcctgtttatgtgggaagttgatttaaatgactgataatgtgtatgaaagcactgtaaaacataagagaaaaaccaattagtgtattggcaatcatgcagttaacatttgaaagtgcagtgtaaattgtgaagcattatgtaaatcaggggtccacagtttttctgtaaggggtcaaatcataaatactttagactgtgggccatatggtttctgttacatatttgttttttaaacaacgtttttataaggtcaaaatcattcttagtttttgagccaattggatttggcctgctgttcatagcttaccaccccctgatgtattatttgttattcagagaaaatttctgaatactactagtttccttttctgtgcctgtccctgtgctaggcactaaaaatgcaatgattattgatatctaggtgacctgaaaaaaaatagtgaatgtgctttgtaaactgtaaagcacttgtattctactgtgataagcgttgtggatacaaagaaaggagcaagcataaaaaagtgctctttcaaaaggatatagtactatgcagacacaaggaattgtttgataaatgaataaattatatgtatatttgaggccaatttgtgtttgctgctctggtaattttgagtaaaaatgcagtattccaggtatcagaaacgaaaacacatggaaactgcttttaaactttaaaatatactgaaaacataagggactaagcttgttgtggtcacctataatgtgccagataccatgctgggtgctagagctaccaaagggggaaaagtattctcatagaacaaaaaatttcagaaaggtgcatattaaagtgctttgtaaactaaagcatgatacaaatgtcaatgggctacatatttatgaatgaatgaatggatgaatgaatattaagtgcctcttacataccagctattttgggtactgtaaaatacaagattaattctcctatgtaataagaggaaagtttatcctctatactattcagatgtaaggaatgatatattgcttaattttaaacaatcaagactttactggtgaggttaagttaaattattactgatacatttttccaggtaaccaggaaagagctagtatgaggaaatgaagtaatagatgtgagatccagaccgaaagtcacttaattcagcttgcgaatgtgctttctaaattataaagcacttgtaaatgaaaaatttgatgctttctgtatgaataaaactttctgtaagctaggtattgtctctacaaaattctcattgtatagttaaaccacagtgagaagggttctataagtagttatacaaaccaagggtttaaatacctgttaaatagatcaattttgattgcctactatgtgaactcactgttaaaggcactgaaaatttatcatatttcatttagccacagccaaaaataaggcaatacctatgttagcattttgtgaactctaaggcaccatataaatgtaactgttgattttctcacttggtgctgggtactaggtttataaaattgtatgatagttattatattgtgcaaataaagtaggaaaatttgaataacaatgattatcttttgaatacgcatacgcaagggattggttgtctgaagaatgccactatagtagttatctattgtgtgccaatctcattgctaggcattggggatgcaaagataaaccatctttattgtgtcttgggtagcagaagaaaatatgtgtaaaatcaatttataatttgtaaactgccacccatatataagctatatctgctgaatgatcattgattactcttatccttagagataacaactgggggcacaaacatttattatcattattgaacctacaacagagatctatgtgtagatttacaaagcctacagttctatacagataggaatgaactattggcttactgaatggtgattactttctgtggggctcggaactacatgccctaggatataaaaatgatgttatcattatagagtgctcacagaaggaaatgaagtaatataggtgtgagatccagaccaaaagtcatttaacaagtttattcagtgatgaaaacatgggacaaatggactaatataaggcagtgtactaagctgagtagagagataaagtcctgtccagaagatacatgcttcctggcctgattgaggagatggaaaatttttgcaaaaaacaaggtgttgtggtcttccatccagtttcttaagtgctgatgataaaagtgaattagacccaccttgacctggcctacagaagtaaaggagtaaaaataaatgcctcaggcgtgctttttgattcatttgataaacaaagcatcttttatgtggaatataccattctgggtcctgaggataagagagatgagggcattagatcactgacagctgaagatagaagaacatctttggtttgattgtttaaataatatttcaatgcctattctctgcaaggtactatgtttcgtaaattaaataggtctggcccagaagacccactcaattgcctttgagattaaaaaaaaaaaaaaaaagaaagaaaaatgcaagtttctttcaaaataaagagacatttttcctagtttcaggaatcccccaaatcacttcctcattggcttagtttaaagccaggagactgataaaagggctcagggtttgttctttaattcattaactaaacattctgcttttattacagttaaatggttcaagatgtaacaactagttttaaaggtatttgctcattggtctggcttagagacaggaagacatatgagcaataaaaaaaagattcttttgcatttaccaatttagtaaaaatttattaaaactgaataaagtgctgttcttaagtgcttgaaagacgtaaaccaaagtgcactttatctcatttatcttatggtggaaacacaggaacaaattctctaagagactgtgtttctttagttgagaagaaacttcattgagtagctgtgatatgttcgatactaaggaaaaactaaacagatcacctttgacatgcgttgtagagtgggaataagagagggctttttattttttcgttcatacgagtattgatgaagatgatactaaatgctaaatgaaatatatctgctccaaaaggcatttattctgacttggagatgcaacaaaaacacaaaaatggaatgaagtgatactcttcatcaaacagaagtgactgttatctcaaccattttgttaaatcctaaacagaaaacaaaaaaaatcatgacgaaaagacacttgcttattaattggcttggaaagtagaatataggagaaaggttactgtttattttttttcatgtattcattcattctacaaatatattcgggtgccaataggtacttggtataaggtttttggccccagagacatgggaaaaaaatgcatgccttcccagagaatgcctaatactttccttttggcttgttttcttgttaggggcatggcttagtccctaaataacattgtgtggtttaattcctactccgtatctcttctaccactctggccactacgataagcaggtagctgggttttgtagtgagcttgctccttaagttacaggaactctccttataatagacacttcattttcctagtccatccctcatgaaaaatgactgaccactgctgggcagcaggagggatgatgaccaactaattcccaaaccccagtctcattggtaccagccttggggaaccacctacacttgagccacaattggttttgaagtgcatttacaaggtttgtctattttcagttctttactttttacatgctgacacatacatacactgcctaaatagatctctttcagaaacaatcctcagataacgcatagcaaaatggagatggagacatgatttctcatgcaacagcttctctaattataccttagaaatgttctcctttttatcatcaaatctgctcaagaagggctttttatagtagaataatatcagtggatgaaaacagcttaacattttaccatgcttaagttttaagaataaaataaaaattggaaataattggccaaaattgaaaggaaaaatttttttaaaatttctctaaatgtaggcctggctgggctttgaccttttccgtttttaaatcactcacagagggtgggacaggaggaagagtgaaggaaaaggtcaaacctgttttaagggcaacctgcctttgttctgaattggtcttaagaacattaccagctccaggtttaaattgttcagtttcatgcagttccaatagctgatcattgttgagatgaggacaaaatcctttgtcctcactagtttgctttacatttttgaaaagtattatttttgtccaagtgcttatcaactaaaccttgtgttaggtaagaatggaatttattaagtgaatcagtgtgacccttcttgtcataagattatcttaaagctgaagccaaaatatgcttcaaaagaagaggactttattgttcattgtagttcatacattcaaagcatctgaactgtagtttctatagcaagccaattacatccataagtggagaaggaaatagataaatgtcaaagtatgattggtggagggagcaaggttgaagataatctggggttgaaattttctagttttcattctgtacatttttagttagacatcagatttgaaatattaatgtttacctttcaatgtgtggtatcagctggactcagtaacacccctttcttcagctggggatggggaatggattattggaaaatggaaagaagaaagtaactaaaagccttcctttcacagtttctggcatcactaccactactgattaaacaagaataagagaacattttatcatcatctgctttattcacataaatgaagttgtgatgaataaatctgcttttatgcagacacaaggaattaagtggcttcgtcattgtccttctacctcaaagataatttattccaaaagctaagataaatggaagactcttgaacttgtgaactgatgtgaaatgcagaatctcttttgagtctttgctgtttggaagattgaaaaatattgttcagcatgggtgaccaccagaaagtaatcttaagccatctagatgtcacaattgaaacaaactggggagttggttgctattgtaaaataaaatatactgttttg

SEQ ID NO: 31800 - DNA, 2572 bp, Homo Sapiens
aattttcagctgttctttgctcaataataacttttttatcaccaagatatctctctaagtttttgacatattcctcatttgttttgataaaagttttcttattttcttagaaaaataagttactaaaagtcatatatcattgtatatcttcaaaatattgcttaaaactaggacttgtatttaaatgttttttcttcttaaagacaatttgcaggtgccctcaggaaccctgaagctgggctgagccatgatgctgctgccagaacccctgcagagggcctggtttcaggagactcagagtcctctgtgaaaaagcccttggagagcgccccagcagggctgcacttggctcctgtgaggaaggggctcaggggtctgggcccctccgcctgggccgggctgggagccaggcgggcggctgggctgcagcaatggaccgtgagctggcccagcccgcgtccgtgctgagcctgcctgtcgtctgtggccatgcccatcatgggctcctcggtgtacatcacggtggagctggccattgctgtgctggccatcctgggcaatgtgctggtgtgctgggccgtgtggctcaacagcaacctgcagaacgtcaccaactactttgtggtgtcactggcggcggccgacatcgcagtgggtgtgctcgccatcccctttgccatcaccatcagcaccgggttctgcgctgcctgccacggctgcctcttcattgcctgcttcgtcctggtcctcacgcagagctccatcttcagtctcctggccatcgccattgaccgctacattgccatccgcatcccgctccggtacaatggcttggtgaccggcacgagggctaagggcatcattgccatctgctgggtgctgtcgtttgccatcggcctgactcccatgctaggttggaacaactgcggtcagccaaaggagggcaagaaccactcccagggctgcggggagggccaagtggcctgtctctttgaggatgtggtccccatgaactacatggtgtacttcaacttctttgcctgtgtgctggtgcccctgctgctcatgctgggtgtctatttgcggatcttcctggcggcgcgacgacagctgaagcagatggagagccagcctctgccgggggagcgggcacggtccacactgcagaaggaggtccatgctgccaagtcactggccatcattgtggggctctttgccctctgctggctgcccctacacatcatcaactgcttcactttcttctgccccgactgcagccacgcccctctctggctcatgtacctggccatcgtcctctcccacaccaattcggttgtgaatcccttcatctacgcctaccgtatccgcgagttccgccagaccttccgcaagatcattcgcagccacgtcctgaggcagcaagaacctttcaaggcagctggcaccagtgcccgggtcttggcagctcatggcagtgacggagagcaggtcagcctccgtctcaacggccacccgccaggagtgtgggccaacggcagtgctccccaccctgagcggaggcccaatggctacgccctggggctggtgagtggagggagtgcccaagagtcccaggggaacacgggcctcccagacgtggagctccttagccatgagctcaagagagtgtgcccagagccccctggcctagatgaccccctggcccaggatggagcaggagtgtcctgatgattcatggagtttgccccttcctaagggaaggagatctttatctttctggttggcttgaccagtcacgttgggagaagagagagagtgccaggagaccctgagggcagccggttcctactttggactgagagaagggagccccaggctggagcagcatgaggcccagcaagaagggcttgggttctgaggaagcagatgtttcatgctgtgaggccttgcaccaggtgggggccacagcaccagcagcatctttgctgggcagggcccagccctccactgcagaagcatctggaagcaccaccttgtctccacagagcagcttgggcacagcagactggcctggccctgagactggggagtggctccaacagcctcctgccacccacacaccactctccctagactctcctagggttcaggagctgctgggcccagaggtgacatttgactttttttccaggaaaaatgtaagtgtgaggaaaccctttttattttattacctttcactctctggctgctgggtctgccgtcggtcctgctgctaacctggcaccagagcctctgcccggggagcctcaggcagtcctctcctgctgtcacagctgccatccacttctcagtcccagggccatctcttggagtgacaaagctgggatcaaggacagggagttgtaacagagcagtgccagagcatgggcccaggtcccaggggagaggttggggctggcaggccactggcatgtgctgagtagcgcagagctacccagtgagaggccttgtctaactgcctttccttctaaagggaatgtttttttctgagataaaataaaaacgagccaca

SEQ ID NO: 31801 - DNA, 2309 bp, Homo Sapiens
  misc_feature (2255)..(2256): n is a, c, g, or t
tttgtcttcaagagtttttcgagaccagggaagaaggaaggaaatgcccagtttgatcgtgggagtggtaaaatgataaagtagatctgggtggggtttgtagcaccagagcataatggagaaacaccttggttttgtaatcaagactggatctaccagtgacttgctgaataacttcggtgattcctttctcttcttgggtctcactgtatttcaaaacatgaagaatttcattgtaatgttacctaataagtgagccagcacttctactctgtgagaaagtaggaaaactcttgggacaatcagagatgatgtgatgtaatgtccattagttcttcctgtgaataatcctgagggaaagcccccaggtccctcccagaatggggtggatatttcccaatacagctaaggaattatcccttgtaaataccacagacccgccctggagccaggccaagctggactgcataaagattggtatggccttagctcttagccaaacaccttcctgacaccatgagggccagcagcttcttgatcgtggtggtgttcctcatcgctgggacgctggttctagaggcagctgtcacgggaggtgagtgaacaggtgacctgctgggctgggttggactaaggggagaccctctggacaccctgggccaggacagggagcactactgaagcagtaggcagcactggagcccagatttcagctttctgttctttgccatcatattcagaaaaaataggactttggctggtggactccacgtgctttccacctcagtgactgagatatcaggactgtttgtggaagtaatgttggtatgtggccttggcctcagatgtcaatacctgtgcagaatgtgcaataaaataatgaactccaggattttaaaccttgggtgtggacacagtccccgtttctctgccccataaaagcactggagtaatcagtactctaaaaggaggttaagaaacaacaagccttcaggaatcatgttgtttgaggacccccattttataaggagggaaccaaaaatgtagaaatgagtgagcaattgccaaggtaattcccagagccaggatggggctcaagtctcctagtatgtggctcagggttctttcctactccaatgcacttcctaacaaatgacaatgtgtcctcttcactgctgggtgtcaccccagtctgaccactgctcctgagagacttggagtggaggaagggggaagaaacaaatactcaagggaactctggtcctgtagaccaccccaaaaaaggaagagccttccaagagtgtagctcccagaggtgtaccttccctactcaggccatggtttgaggatgctgcagtaagcagtggatggacccagacccagaggaaagacatggcagctgaagcagaggcttactgggtataaatgtgggctcgtttcttcttttaacagttcctgttaaaggtcaagacactgtcaaaggccgtgttccattcaatggacaagatcccgttaaaggacaagtttcagttaaaggtcaagataaagtcaaagcgcaagagccagtcaaaggtccagtctccactaagcctggctcctgccccattatcttgatccggtgcgccatgttgaatccccctaaccgctgcttgaaagatactgactgcccaggaatcaagaagtgctgtgaaggctcttgcgggatggcctgtttcgttccccagtgaggtgagcactagctggagaacgaggagacccctgaagacacaaaagaaggctgagcggtggggaagcatcccaggttggtgggagggaggttgtgggaggtgacagaaagactgggagactgaggggtctgagaggctataaccagagtgcctagaaggatgatctgtcttcctcactgcctctgagtgctttgatgtgctgactctcacctctgatactcttctcttccacagagggagccggtccttgctgcacctgtgccgtccccagagctacaggccccatctggtcctaagtccctgctgcccttccccttcccacactgtccattcttcctcccattcaggatgcccacggctggagctgcctctctcatccactttccaataaagacttccttctgctccacttgtttctggttcctatgacttctgggctcctggatgctttggggaaatggatgtagaattgggacttcttctctccagtgaagaggggaaacggtcccatggtgaaagagagcaggnnggaggaaacaaggaggcacatgctagggcttcatattacaatccaataatcag

SEQ ID NO: 31802 - DNA, 3068 bp, Homo Sapiens
aacggtatcgataagcttgatatcgaattccgcacccccggctcggggctgtgagcggctcggggccgggggtgggcggcggtgcggcgggcggccgacgctcctcttcggcggcggcggcggcggcggcccatgcgtggggcggcgcggctggggcggccgggccggagttgcctcccggggcccgcgctgagggccgccgccgcgcccgccctgctgcttgctcgttgcgctgttgccgctgctgccggcctgcgtgccgccgcccgtccgcggcccccggagctgcagtcggcttccgcggggcccagcgtgagtctctacctgagcgaggacgaggtgcgccggctgatcggtcttgatgcagaactttattatgtgagaaatgaccttattagtcactacgctctatcctttaatctgttagtacccagtgagacaaatttcctgcacttcacctggcatgcgaagtccaaggttgaatataagctgggattccaagtggacaatgttttggcaatggatatgccccaggtcaacatttctgttcagggggaagttccacgcactttatcagtgtttcgggtagagctttcctgtactggcaaagtagattctgaagttatgatactaatgcagctcaacttgacagtaaattcttcaaaaaattttaccgtcttaaattttaaacgaaggaaaatgtgctacaaaaaacttgaagaagtaaaaacttcagccttggacaaaaacactagcagaactatttatgatcctgtacatgcagctccaaccacttctacgcgtgtgttttatattagtgtaggggtttgttgtgcagtaatatttctcgtagcaataatattagctgttttgcaccttcataatatgaaaaggattgaactggatgacagcattagtgccagcagtagttcccaagggctgtctcagccatccacccagacgactcagtatctgagagcagacacgcccaacaatgcaactcctatcaccagttatcctaccttgcggatagagaagaacgacttgagaagtgtcactcttttggaggccaaaggcaaggtgaaggatatagcaatatccagagagaggataactctaaaagatgtactccaagaaggtacttttgggcgtattttccatgggattttaatagatgaaaaagatccaaataaagaaaaacaagcatttgtcaaaacagttaaagatcaagcttctgaaattcaggtgacaatgatgctcactgaaagttgtaagctgcgaggtcttcatcacagaaatcttcttcctattactcatgtgtgtatagaagaaggagaaaagcccatggtgatattgccttacatgaattgggggaatcttaaattgtttttacgacagtgcaagttagtagaggccaataatccacaggcaatttctcagcaagacctggtacacatggctattcagattgcctgtggaatgagctacctggccagaagggaagtcatccacaaagacctggctgccaggaactgtgtcattgatgacacacttcaagttaagatcacagacaatgccctctccagagacttgttccccatggactatcactgtctgggggacaatgaaaacaggccagttcgttggatggctcttgaaagtctggttaataacgagttctctagcgctagtgatgtgtgggcctttggagtgaacagcttgtgggaactcatgactctgggccagactccctacacgttggacattgaccccttcgagatggcggcatacctgaaagatggttaccgaatagcccagccaatcacctgtcctgatgaattatttgctgtgatggcctgttgctgggccttagatccagaggagaggcccaggtttcagcagctggtacagtgcctaacagagtttcatgcagccctgggggcctacgtctgactcctctccaatcccacaccatcaggaagaaggtgcctgtcggggctcacttgaagcctgtcagggatgctttgtatatctaacacaacgccaacagaagcacatttgtcttccagaacaccgtgccttagaaatgctttagaatctgaactttttaagacagacttaataatgtggcatattttctagatatcacttttattaggttgaactgaaagggtttttgtaaattttttggccaaaattttttaaaacatacttactttggactaggggtacattcttacaaaataaataaacagtttttaaaattgtttagacacagatatttggaattagctatcttagggccaactgctttttatttttttacttcatcaaggtgatgtaagtgactttgtttagacacagatatttggaattagcctatcttagtgccaactgctttttatttttttccttcatcaaggtgatgtaagtgactcacctttaaagtttttttagtgttattttttatcactactctgggaaatggtttgtcttcaagatgcaatacttttcttagataaggaaaaacagcataaaaagatacctggtctgccttgtacaagaaaaccgaatattagaggaagaaaatttaaagaaaagctagagaaaaaaaaaattttttaaaaaatacttattagaagcaaactgcccttgcatggaaaactgtttatttttttcagtgaaaaaggaattctgctttcgtgtttttgggaaagcaggaactgagttcattacatctttaatttggcagaaattagcctttctgtgaaccagatgtggtttggggcagatctgtagtaaacaatggtgattttatttatttttactctctggaaaaggagataatacaattccagaaagtgaactcatatttctaaggtaagatcccttttatgcacctagaatatgctatgcacagagcgggtgcttgagttgttgtcgttttttgtttgttttttaaatgtaaactggtaaattttgtgcttatcttcaaggctggcttaagtataaaattgttttttaaacacttgaaaaattaaaggatttgttttatattaaaaaaaaaa

SEQ ID NO: 31803 - DNA, 2202 bp, Homo Sapiens
gcccacacaccccactccagctccggagcacccgtgctgggctgcatggggactggccggaggggcagggccaggggagcgggtaggcagagcttcgggaggagatgaggtgaaagtaattgacgctgcccagcccggcagtgggagaggcaggggatgcgtcagtgtcgcgctggagctggcagaggtgatgagcggcggagacacgcggggctgcgatcgctcgccccaggatggccgcggctcatggacctgtggccccctcttccccagaacagaatggtgctgtgcccagcgaggccaccaagagggaccagaacctcaaacggggcaactggggcaaccagatcgagtttgtactgacgagcgtgggctatgccgtgggcctgggcaatgtctggcgcttcccatacctctgctatcgcaacgggggaggcgccttcatgttcccctacttcatcatgctcatcttctgcgggatccccctcttcttcatggagctctccttcggccagtttgcaagccaggggtgcctgggggtctggaggatcagccccatgttcaaaggagtgggctatggtatgatggtggtgtccacctacatcggcatctactacaatgtggtcatctgcatcgccttctactacttcttctcgtccatgacgcacgtgctgccctgggcctactgcaataacccctggaacacgcatgactgcgccggtgtactggacgcctccaacctcaccaatggctctcggccagccgccttgcccagcaacctctcccacctgctcaaccacagcctccagaggaccagccccagcgaggagtactggaggctgtacgtgctgaagctgtcagatgacattgggaactttggggaggtgcggctgcccctccttggctgcctcggtgtctcctggttggtcgtcttcctctgcctcatccgaggggtcaagtcttcagggaaagtggtgtacttcacggccacgttcccctacgtggtgctgaccattctgtttgtccgcggagtgaccctggagggagcctttgacggcatcatgtactacctaaccccgcagtgggacaagatcctggaggccaaggtgtggggtgatgctgcctcccagatcttctactcactggcgtgcgcgtggggaggcctcatcaccatggcttcctacaacaagttccacaataactgttaccgggacagtgtcatcatcagcatcaccaactgtgccaccagcgtctatgctggcttcgtcatcttctccatcctcggcttcatggccaatcacctgggcgtggatgtgtcccgtgtggcagaccacggccctggcctggccttcgtggcttaccccgaggccctcacactacttcccatctccccgctgtggtctctgctcttcttcttcatgcttatcctgctggggctgggcactcagttctgcctcctggagacgctggtcacagccattgtggatgaggtggggaatgagtggatcctgcagaaaaagacctatgtgaccttgggcgtggctgtggctggcttcctgctgggcatccccctcaccagccaggcaggcatctattggctgctgctgatggacaactatgcggccagcttctccttggtggtcatctcctgcatcatgtgtgtggccatcatgtacatctacgggcaccggaactacttccaggacatccagatgatgctgggattcccaccacccctcttctttcagatctgctggcgcttcgtctctcccgccatcatcttctttattctagttttcactgtgatccagtaccagccgatcacctacaaccactaccagtacccaggctgggccgtggccattggcttcctcatggctctgtcctccgtcctctgcatccccctctacgccatgttccggctctgccgcacagacggggacaccctcctccagcgtttgaaaaatgccacaaagccaagcagagactggggccctgccctcctggagcaccggacagggcgctacgcccccaccatagccccctctcctgaggacggcttcgaggtccagtcactgcacccggacaaggcgcagatccccattgtgggcagtaatggctccagccgcctccaggactcccggatatagcacagctgccaggggagtgccaccccacccgtgctccacgagagactgtgag

SEQ ID NO: 31804 - DNA, 1718 bp, Homo Sapiens
atggggcttggggctgggcggccagacgctaactcggatgctcccaggctacgccttggccatgacccgtgcggccgcgcgcccccgccttcaccttcggcgcgcgcttccccacgcagcagacgacgtgcggccccgggccaggccacctggtgcccgctcgcatgaccgtgcgcggcaccgacggcgcccccgcctactccatctacggccgcccacgccgctcagcgcccttcctcactccgggacctggtcaggacccccgggcccctggccaccccaacgccgaactgcgtccagggaggcccacctgggaacccccgacctgaaccccgagtccccctcggataccctaacacgatattcggtacccccatatccggatctcaaatcccaaaccccgaacccacggggctttgataaatcgtggctcagactccccactagtcccaggaccccatctcgggtacccaccaggctcccacgcagttctagccccccacacccttgatccgccccgcaggcaggtacttcccggagcgagcggggaacgcgacgtaccccagtgcgcctcggcacaccattgctccccgaaactggggtgtccaggcggaacagcagagcccaggtcccgcggcctatacggtgccctcgctcttgggtccgcgcgtcatcggcaaagtctccgccccaacttgctccatctacggccgcagagcggctggcagtttcttcgaggacctcagcaaggtcgtgagtccaggggtctacaagtcccgggccccccagttcacgattctggcgcggacttcgctcccccaagacaacactcggaagccagggcccgcggcctacaacgtggatcagcaccggaagccccgcggctggagtttcgggatccggcactcggactacctggccccgctggtgaccgacgcggacaactgacccgccaggcgggagcggccccacacgtgtttgcttaaagtctgcgagtccgcatcgtgtccgcctctctctctctctctctgcgcgtcctggcgcaaggcctggggtggagccacggctggggccgtgtcccaactccgaacccagcggggcggggcccgagcgtcgggcgaggccgggaccccagcgctgcgccgcgtccgaacgtcgagaccccaccgagggcgggagggggactctcgggagccacagacgcccgagacccacgccgggcgggaccggccagggatcacccccgccgacggccccgggccccgacggcccggaagttccgcgtgtccgggggcaccgggggattggccggggcgcggcgtgcaaggcttcccgggggcggcgactgccgagctccgccctccaggcggccccacccgcctgccgtcctggggcgccgccgccccgccgccggcagtggaccgctgtgcgcgaaccctgaaccctacggtcccgacccgcgggcgaggccgggtacctgggctgggatccggagcaagcgggcgagggcagcgccctaagcaggtacgggcggggctcaagtcgcgaggcggggaagcgggaggcagacacggacgagggcgacacagacacgggaccgaggggcggacaccggagagacacgggaaaggggtcgggacaggagcacgtggctcagacaccgacgccgggaggccgcagaccccggacgtgtcaggcatccccgcaggcccggagcg

SEQ ID NO: 31805 - DNA, 5190 bp, Homo Sapiens
  misc_feature (3979)..(3979): n is a, c, g, or t
  misc_feature (3994)..(3995): n is a, c, g, or t
  misc_feature (4022)..(4022): n is a, c, g, or t
  misc_feature (4430)..(4431): n is a, c, g, or t
  misc_feature (4434)..(4436): n is a, c, g, or t
  misc_feature (4452)..(4452): n is a, c, g, or t
  misc_feature (4710)..(4710): n is a, c, g, or t
  misc_feature (4713)..(4713): n is a, c, g, or t
  misc_feature (4720)..(4720): n is a, c, g, or t
  misc_feature (4723)..(4723): n is a, c, g, or t
  misc_feature (4730)..(4730): n is a, c, g, or t
  misc_feature (5170)..(5171): n is a, c, g, or t
gcctgtcctactgccgccggcgccgcggccgtcatggggttcctgaaactgattgagattgagaactttaagtcgtacaagggtcgacagattatcggaccatttcagaggttcaccgccatcattggacccaatggctctggtaagtcaaatctcatggatgccatcagctttgtgctaggtgaaaaaaccagcaacctgcgggtaaagaccctgcgggacctgatccatggagctcctgtgggcaagccagctgccaaccgggcctttgtcagcatggtctactctgaggagggtgctgaggaccgtacctttgcccgtgtcattgtaggaggttcttctgagtacaagatcaacaacaaagtggtccaactacatgagtacagtgaggaattagagaagttgggcattctcatcaaagctcgtaacttcctcgttttccagggtgctgtggaatctattgccatgaagaaccccaaagagaggacagctctatttgaagagattagtcgttctggggacgtggcgcaggagtatgacaagcgaaagaaggaaatggtgaaggctgaagaggacacacagtttaattaccatcgcaagaaaaatattgcggctgaacgcaaggaagcaaagcaggagaaagaagaggctgaccggtaccagcgcctgaaggatgaggtagtacgggctcaggtacagctgcagctctttaagctttaccataatgaagtggaaattgagaagctcaacaaggaactggcctcaaagaacaaggagatcgagaaggacaagaagcgtatggacaaggtggaggatgaactgaaggagaagaagaaggagctgggcaaaatgatgcgggagcagcagcagattgagaaggagatcaaggagaaggactcagaattgaaccagaagcggcctcagtacatcaaagccaaggagaacacctcccacaaaatcaagaagctggaagcagccaagaagtctctgcagaatgctcagaagcactacaagaagcgtaaaggtgacatggatgagctggagaaggagatgctgtcagtggagaaggctcggcaggagtttgaagaacggatggaagaagagagtcagagtcagggcagagatttgacgttggaggagaatcaggtgaagaaataccaccggttgaaagaagaagccagcaagagagcagctaccctggcccaggagctggagaaattcaatcgagaccagaaagctgaccaggaccgtctggatctggaagaacggaagaaagtagagacagaggccaagatcaagcaaaagctgcgggaaattgaagagaatcagaagcggattgagaaactggaggaatacatcaccactagcaagcagtccctagaagagcagaagaagctagagggggagctgacagaggaggtggagatggccaagcggcgtattgatgaaatcaataaggagctgaaccaggtgatggagcagctaggggatgcccgcatcgaccgccaggagagcagccgccagcagcgaaaggcagagataatggaaagcatcaagcgcctttaccctggctctgtgtacggccgcctcattgacctatgccagcccacacaaaagaagtatcagattgctgtaaccaaggttttgggcaagaacatggatgccattattgtggactcggagaagacaggccgggactgtattcagtatatcaaggagcagcgtggggagcctgagaccttcttgcctcttgactacctggaggtgaagcctacagatgagaaactccgggagctgaagggggccaagctagtgattgatgtgattcgctatgagccacctcatatcaaaaaggccctgcagtatgcttgtggcaatgcccttgtctgtgacaacgtggaagatgcccgccgcattgcctttggaggccaccagcgccacaagacagtggcactggatggaaccctattccagaagtcaggagtgatctctggtggggccagtgacctgaaggccaaggcacggcgctgggatgagaaagcagtagacaagttgaaagagaagaaggagcgcttgacagaggagctgaaagagcagatgaaggcaaaacggaaagaggcagagctgcgtcaggtgcagtctcaggcccatggactgcagatgcggctcaagtactcccagagtgacctagaacagaccaagacacgacatctagccctgaatctgcaggaaaaatccaagctggagagtgagctagccaactttgggcctcgcattaatgatatcaagaggatcattcagagccgagagagggaaatgaaagacttgaaggagaagatgaaccaggtagaggatgaggtgtttgaagagttttgtcgggagattggtgtgcgcaacatccgggagtttgaggaagaaaaggtgaaacggcagaatgaaatcgccaagaagcgtttggagtttgagaatcagaagactcgcttgggcattcagttggattttgaaaagaaccaactgaaggaggaccaagataaagtacacatgtgggagcagacagtgaaaaaagatgaaaatgagatagaaaagctcaaaaaggaggaacaaagacacatgaagatcatagatgagaccatggctcagctacaagacctgaagaatcagcatctggccaagaagtcggaagtgaatgacaagaatcatgagatggaggagattcgtaagaaactcgggggcgccaacaaggaaatgacccatttacagaaggaggtgacagccattgagaccaagcttgaacagaagcgcagtgaccgtcacaacttgctacaggcctgtaagatgcaggacattaagttgccactgtcaaaaggcaccatggatgatattagtcaggaagagggtagctcccagggggaggactcagtgagtggttcacagagaatttccagtatctatgcacgagaggccctcattgagattgactacggtgatctgtgtgaggatctgaaggatgcccaggctgaggaagagatcaagcaagagatgaacacactgcagcagaagctgaatgagcagcagagtgtgcttcagcgtattgccgcccccaacatgaaggccatggaaaagctggaaagtgtccgagacaagttccaggagacctcagatgagtttgaagcagcccgaaagcgagcaaagaaggccaagcaggcattcgaacagatcaagaaggagcgctttgaccgcttcaatgcttgttttgaatctgtggctaccaacattgatgagatctataaggccctgtcccgcaatagcagtgcccaggcattcctgggccctgagaaccctgaagagccctacttggatggcatcaactacaactgtgtggctcctgggaaacgcttccggcctatggacaacttgtcaggcggggagaagacagtggcagctctggccctgctctttgccatccacagctacaagccagcccccttcttcgtcctggatgagattgatgctgccttggataacaccaacattggcaaggtggcaaattacatcaaggagcagtcgacttgcaacttccaggccatcgtcatctctctcaaggaggagttctacaccaaggccgagagcctcattggagtctatcctgagcaaggggactgtgtgatcagcaaagtcctgaccttcgacctcaccaagtacccagatgccaaccccaaccccaatgagcagtagcagtatttttgccctcccgccctgtctggatccctaagctgtccctctcccaatctctggatatttgactcccaaccttccccctacctcctggccctttttggtgtagtcatgggatttaggcactgctaatcaagcatgaagaggaacagaggtgatgttaggtctggagcaaaaattcctgaacgacagggagtattctggcctctgaaaggaggtgctgagctgaacagggccatctgtncatcacacacacccnnttctccctcatcacccataatcgtggnccccttggctcttgcccactgtgtgtgtgggtatgtatgtgtgtatgtatgtatccgcatgtgtgcatgtgagtatgtttgcaaaataataaaggatattggagacctgttttagaaggagcctaggctgaatttgattccaagagagcttaggatgacagcacccctgagctgggcaaaggtactcaggacctcataggagtcttaggcagttacctgaaactgccttcattcactcatttgtgtattcattcatttatgtattcatcagacacataccgaacaccctctatttgtcaggctctgtgcttggaatacagagttgaatcagacatgatctctaccctcctagtaaggagatacagtgggttcatgaatgactatagttagctgaatgtcatatgtacnnttnnngaatttgagaagtggntgatcccctctaggcttcctggaggtcacatttaagctagaccttgacaaattggtaggatttggtcaggcactaggagtggagcatgagctctggggacagacagttatgggttctggtcccactttttatcacttactagttgtttgaccttgggcaagtcatttgaccttctgtgcctcagtttcctcatctgtaaaatggggctaacaatattacctacctcataggatttaatgatgtcaagctcctcactgnagnccttatnccnttcgtgnagcccactaggtgccgacccctcagaatataatcctcatgcctgacccctgagagcttctgatcccagctattaggacagaagaagcctccaaatctggaaggtgctgaatgccctgctgactgggaaagtttcagggcactgatggggtctacctggtaagcggagggcctgaggaaacctgtagcttcaatcatgtctggtaaccgggtgcctgagccccaatctgggttgtgaggaaataggggagaggtatcctgggccacatcccagcctaacacctgtgaggttcattttaggaactaacctcattagctataaggatcatgcagaggcagcaaagccgggtgcgatgagctcagcctttactcattcacatacaccatcacactttaattccaatctgtatattgctttttaaaagttaagtccattctaatnncccaaatatgcatgaattc

SEQ ID NO: 31806 - DNA, 2192 bp, Homo Sapiens
ctaagtcagaatcccgcccaggcgaacgatacggcagcggcccggagcctcggttggcctcggatagccggtcccccgcctgtccccgccggcggccgccccccccctccacgcgccccgccgcgggagggcgcgtgccccgccgcgccgggaccggggtccggtgcggagtgcccttcgtcctgggaaacggggcgcggccggaaaggcggccgccctcgcccgtcacgcacgcaccgttcgtggggaacctggcgctaaaccattcgtagacgacctgcttctgggtcggggtttcgtacgtagcagagcagctccctcgctgcgatctattgaaggacagaggagtttgagatgaaggaggacgagccgtggtacgaccaccaggacctccagcaagatcttcaacttgctgctgagcttgggaagacattactggatcggaacacagagttggaggactctgttcagcagatgtatacaaccaatcaggagcagttacaggaaattgagtatctgacgaagcaagtggaacttctacggcagatgaacgaacaacatgcaaaggtttatgaacaattagacgtcacagcaagggaactggaagaaacaaatcaaaagctagttgctgacagcaaggcctcacagcaaaagattctgagcctgactgaaacgattgaatgcctgcaaaccaacattgatcacctccagagccaagtggaggagctgaagtcatctggccaagggagaaggagcccgggaaagtgtgaccaggagaaaccggcacccagctttgcatgtctgaaggagctgtatgacctccgccaacacttcgtgtatgatcatgtgttcgctgagaagatcacttccttgcaaggtcagccaagccctgatgaagaggaaaatgagcacttgaaaaaaacagtgacaatgttgcaggcccagctgagcctggagcggcagaagcgggtgactatggaggaggaatatgggctcgtgttaaaggagaacagtgaactggagcagcagctgggggccacaggtgcctaccgagcacgggcgctggaactagaggccgaggtcgcagagatgcgacagatgttgcagtcagagcatccatttgtgaatggagttgagaagctggtgccagactctctgtatgttcctttcaaagagcccagccagagcctgctggaagagatgttcctgactgtgccggaatcacatagaaagcctctcaagcgcagcagcagtgagacgatcctcagcagcttggcagggagtgacatcgtgaagggccacgaggagacctgcatcaggagggccaaggctgtgaaacagaggggcatctcccttctgcacgaagtggacacgcagtacagcgccctgaaggtgaagtatgaagagttgctgaagaagtgccaagaggaacaggactccctgtcacacaaggctgtgcagacctccagggctgcagccaaggacctgactggagtgaacgcccagtctgagcctgttgccagcggctgggaactggcctctgtcaacccagagcccgtgagttcccctacaacacctccagaatacaaagcgttgtttaaggagatctttagttgcatcaagaaaactaagcaggaaatagatgaacagagaacaaaataccgatcactctcctctcattcttaattgaacctctagctctactactaatttgcctattgcctatcgcctctctctcccattcagacaagtgtttgtagactctgaagcctaatgttactcatgacgtttgcctcattgctttgcttatttagcaaatgcatacaacgaggaaaggaggtggctagtggtatcagttctctgatccacttccatttaagctccccaggaaatcccatgacaaactggcctctggctggcgcgctgttagacttcagttcctgaaaaggaccagtggagggaagagctatacttctggagaagtaggcctggagttactacagtatgggggaaaagggtcgagttagaacaaagctaaggcaattcctattgcttccttgcgcaacttctcaaaacgatgaaagtcagaaggctgtcaaactcaaatatctttgcaaacactgtttgaatactgtgaattcattacgaagaatgttcgagagaaagcaggggtctaatccaaaaaaaaaaaa

SEQ ID NO: 31807 - DNA, 3183 bp, Homo Sapiens
cctccaggccccgccgcgcgtcccgggggccggccccgcgagcgcaggagtaaacaccgccggagtcttggagccgctgcagaagggaataaagagagatgcagggatttgtgaggttacggcgccccagctgcaagatgcactagccggctgaacccgggatcggctgacttgttggaaccggagtgctctgcacggagagtggtggatgagttgaagttgccttcccggggctcattttccacgctgccgagaggaatccgagaggcaaggcaatcacttcgtcttgccattgattgggtatcgggagctttttttttctcccctctctctttcttttcctccgtcttgttgcatgcaagaaaattacagtccgctgctcgcccgccctgggtgcgagatattcagccccgctctctcccgtgcattgtgcaacccaaagatgaaagaccgaaggggagaaagttaaagaaatcgcccacatgcgctggatcagtccacggcttggggaaaggcatccagagaaggtgggagcggagagtttgaagtctttacaggcgggaagatggcggactggagctgaaagtgttgattgggaaacttgggtgattcttgtgtttatttacaatcctcttgacccaggcaggacacatgcaggccaaaaaacgctatttcatcctgctctcagctggctcttgtctcgcccttttgttttatttcggaggcttgcagtttagggcatcgaggagccacagccggagagaagaacacagcggtaggaatggcttgcaccaccccagtccggatcatttctggccccgcttcccggagcctctgcgccccttcgttccttgggatcaattggaaaacgaggattccagcgtgcacatttccccccggcagaagcgagatgccaactccagcatctacaaaggcaagaagtgccgcatggagtcctgcttcgatttcaccctttgcaagaaaaacggcttcaaagtctacgtatacccacagcaaaaaggggagaaaatcgccgaaagttaccaaaacattctagcggccatcgagggctccaggttctacacctcggaccccagccaggcgtgcctctttgtcctgagtctggatactttagacagagaccagttgtcacctcagtatgtgcacaatttgagatccaaagtgcagagtctccacttgtggaacaatggtaggaatcatttaatttttaatttatattccggcacttggcctgactacaccgaggacgtggggtttgacatcggccaggcgatgctggccaaagccagcatcagtactgaaaacttccgacccaactttgatgtttctattcccctcttttctaaggatcatcccaggacaggaggggagagggggtttttgaagttcaacaccatccctcctctcaggaagtacatgctggtattcaaggggaagaggtacctgacagggataggatcagacaccaggaatgccttatatcacgtccataacggggaggacgttgtgctcctcaccacctgcaagcatggcaaagactggcaaaagcacaaggattctcgctgtgacagagacaacaccgagtatgagaagtatgattatcgggaaatgctgcacaatgccactttctgtctggttcctcgtggtcgcaggcttgggtccttcagattcctggaggctttgcaggctgcctgcgtccctgtgatgctcagcaatggatgggagttgccattctctgaagtgattaattggaaccaagctgccgtcataggcgatgagagattgttattacagattccttctacaatcaggtctattcatcaggataaaatcctagcacttagacagcagacacaattcttgtgggaggcttatttttcttcagttgagaagattgtattaactacactagagattattcaggacagaatattcaagcacatatcacgtaacagtttaatatggaacaaacatcctggaggattgttcgtactaccacagtattcatcttatctgggagattttccttactactatgctaatttaggtttaaagcccccctccaaattcactgcagtcatccatgcggtgacccccctggtctctcagtcccagccagtgttgaagcttctcgtggctgcagccaagtcccagtactgtgcccagatcatagttctatggaattgtgacaagcccctaccagccaaacaccgctggcctgccactgctgtgcctgtcgtcgtcattgaaggagagagcaaggttatgagcagccgttttctgccctacgacaacatcatcacagacgccgtgctcagccttgacgaggacacggtgctttcaacaacagaggtggatttcgccttcacagtgtggcagagcttccctgagaggattgtggggtaccccgcgcgcagccacttctgggataactctaaggagcggtggggatacacatcaaagtggacgaacgactactccatggtgttgacaggagctgctatttaccacaaatattatcactacctatactcccattacctgccagccagcctgaagaacatggtggaccaattggccaattgtgaggacattctcatgaacttcctggtgtctgctgtgacaaaattgcctccaatcaaagtgacccagaagaagcagtataaggagacaatgatgggacagacttctcgggcttcccgttgggctgaccctgaccactttgcccagcgacagagctgcatgaatacgtttgccagctggtttggctacatgccgctgatccactctcagatgaggctcgaccccgtcctctttaaagaccaggtctctattttgaggaagaaataccgagacattgagcgactttgaggaatccggctgagtgggggaggggaagcaagaagggatgggggtcaagctgctctctcttcccagtgcagatccactcatcagcagagccagattgtgccaactatccaaaaacttagatgagcagaatgacaaaaaaaaaaaaggccaatgagaactcaactcctggctcctgggactgcaccagactgctccaaactcacctcactggcttctgtgtcccaagactaggttggtacagtttaattatggaacattaaataattatttttgaaaaaaaaaaaaaaaaaa

SEQ ID NO: 31808 - DNA, 2362 bp, Homo Sapiens
caggcgtgacgccagttctaaatcttgaaacaaaacaaaacttcaaagtacaccaaaatagaacctccttaaagcataaatctcacggagggtctcgccgccagtggaaggagccaccgcccccgcccgaccatggccgaggagctggtcttagagaggtgtgatctggagctggagaccaatggccgagaccaccacacggccgacctgtgccgggagaagctggtggtgcgacggggccagcccttctggctgaccctgcactttgagggccgcaactacgaggccagtgtagacagtctcaccttcagtgtcgtgaccggcccagcccctagccaggaggccgggaccaaggcccgttttccactaagagatgctgtggaggagggtgactggacagccaccgtggtggaccagcaagactgcaccctctcgctgcagctcaccaccccggccaacgcccccatcggcctgtatcgcctcagcctggaggcctccactggctaccagggatccagctttgtgctgggccacttcattttgctcttcaacgcctggtgcccagcggatgctgtgtacctggactcggaagaggagcggcaggagtatgtcctcacccagcagggctttatctaccagggctcggccaagttcatcaagaacataccttggaattttgggcagtttgaagatgggatcctagacatctgcctgatccttctagatgtcaaccccaagttcctgaagaacgccggccgtgactgctcccgccgcagcagccccgtctacgtgggccgggtggtgagtggcatggtcaactgcaacgatgaccagggtgtgctgctgggacgctgggacaacaactacggggacggcgtcagccccatgtcctggatcggcagcgtggacatcctgcggcgctggaagaaccacggctgccagcgcgtcaagtatggccagtgctgggtcttcgccgccgtggcctgcacaggtgagctgcacgctgggatgtgggtcatgagccctgggagggggcacgaagagcactggagtaggaatcaggacatccctgccctggtcctgccccctgccaccaacactctcaatgcgctatgtggcctagagcctgtgaccaccctctccggtcctttatccaatagccatccctccagtggttgttaggatcaagggctatcattggagagactgcatgggctcagggctgagaacttgggcactggagcccacgttctcaaaaactcaggatttttaacttgagttaaaaaccccctccctcccaccacttgctctgtgaccttgagcaaatgacttctttctgaacctcagtttcctcgtctggaaaatggggacaacatcaagaccttcctcctagagtgggtgtgacatgaagctactcagcacagaacctagcccagtgtcactctcggcaaatattagccagtaataactggatcctaacagtaatatcagtgtcaagaaagaaagcatgttctaaaatgtagagggggaatatcgagcaatttaaaaccaaaaaagtaaaataaatctaaaacaaaaatcttcaaaatttaaggccagaaaatgtcgatgattgttgccaggctgatgatggtgcttatgagaatgggttagcatcacatgctggctaagaacgtagactcaagacatgaggattgcttgaggccgggagtttgagaccagcctgggcaatatagtgagaccttgtctctacaaaaaaataaaataaaataaaaattagcaggcatggttgtgtgtctggagtcttggctactcagaaggctgaggcaggaagatcgcttgacccctggaggttggctgcaatgagctatgattgcaccattgcactccagcctgggcaacggagcaagatcctctctcaaaaaaaaaaaaaaaaaaaaaaaaaaaaagagagagagcacaaattctgaagtcaaggcctgggttcaaatcctagctctgcttcttaccagctgtgtgtccttaggtaaatcacttaactcctctgaaccacagttccattgtatgtaaaatgggcacaacggtagtacctttatactgggatggttgtgaggattaaatgagttaatatgtgtgaggtagctgagcgtggtggtggtgcacctgtagtcttagctgtttgggaggctgaggcagggggatcacttgagcccaggaggtcgaggctgcggtgagtcatgattgcaccactgtactccagcctgggtgacagagcgagacctcatctctaaataaataaatgaatgtgggaagtgcttaaaatgattttgggtgcataatagaaaatacttatgtgatgata

SEQ ID NO: 31809 - DNA, 7017 bp, Homo Sapiens
cctcgctccctctccggtaatgagggggctgagctgtccctccgaggagggggcctggtgtggataaaagagacgaaaaagccgggggaggtttccaaaaataaaaccgtccgggtccccttcagacggctgcaggcacagggaggaggcgcgaaggtgcagcagccgtgcgagcccagctggagtaggagcgcggactcgaggctcggggcgcgcagccctcgttccgccgagagccgggcccccagtcggccgcttcagggccccctagactcagagaagctggccgccgggcggggccgggagaacagcccgcgggcgtccagcgtgccgaccacaaagctcttcgcggtgcccgcgcgcaccactctccagccgccccgcgccatgaggccgcggaccaaagcccgcagcccggggcgcgccctgcggaacccctggagaggcttcctgccgctcaccctggctctcttcgtgggcgcgggtcatgcccaaagggaccccgtagggagatacgagccggctggtggagacgcgaatcgactgcggcgccctgggggcagctacccggcagcggctgcagccaaggtgtacagtctgttccgggagcaggacgcgcctgtcgcgggcttgcagcccgtggagcgggcccagccgggctgggggagccccaggaggcccaccgaggcggaggccaggaggccgtcccgcgcgcagcagtcgcggcgtgtccagccacctgcgcagacccggagaagcactcccctgggccagcagcaaccagcaccccggacccgggccgcgccggctctcccacgcctggggaccccacagcggtctggggctgcgcccccaaccccgccgcgagggcggctcacggggaggaacgtctgcgggggacagtgctgcccaggatggacaacagcaaacagcaccaaccactgtatcaaacccgtttgcgagccgccgtgccagaaccggggctcctgcagccgcccgcagctctgtgtctgccgctctggtttccgtggagcccgctgcgaggaggtcattcccgatgaggaatttgacccccagaactccaggctggcacctcgacgctgggccgagcgttcacccaacctgcgcaggagcagtgcggctggagagggcaccttggccagagcacagccgccagcaccacagtcgccgcccgcaccacagtcgccaccagctgggaccctgagtggcctcagccagacccacccttcccagcagcacgtggggttgtcccgcactgtccgacttcacccgactgccacggccagtagccagctctcttccaacgccctgcccccgggaccaggccttgagcagagagatggcacccaacaggcggtacctctggagcacccctcatccccctgggggctgaacctcacggagaaaatcaagaagatcaagatcgtcttcactcccaccatctgcaagcagacctgtgcccgtggacactgtgccaacagctgtgagaggggcgacaccaccaccctgtacagccagggcggccatgggcacgatcccaagtctggcttccgcatctatttctgccagatcccctgcctgaacggaggccgctgcatcggcagggacgaatgctggtgccccgccaactccaccgggaagttctgccacctgcctatcccgcagccggacagggagcctccagggagggggtcccgccccagggccttgctggaagccccactgaagcagtccactttcacactgccgctctccaaccagctggcctccgtgaacccctccctggtgaaggtgcacattcaccacccacccgaggcctcagtgcagatccaccaggtggcccaggtgcggggcggggtggaggaggccctagtggagaacagcgtggagaccagacccccgccctggctgcctgccagccctggccacagcctctgggacagcaacaacatccctgctcggtctggagagccccctcggccactgcccccagcagcacccaggcctcgaggactgctgggccggtgttacctgaacactgtgaacggacagtgtgccaaccctctgctggagctgactacccaggaggactgctgtggcagtgtgggagccttctggggggtgactttgtgtgccccatgcccacccagaccagcctccccggtgattgagaatggccagctggagtgtcctcaggggtacaagagactgaacctcactcactgccaagatatcaacgagtgcttgaccctgggcctgtgcaaggacgcggagtgtgtgaataccaggggcagctacctgtgcacatgcagacctggcctcatgctggatccatcgcggagccgctgtgtgtcggacaaggcaatctccatgctgcagggactgtgctaccggtcgctggggcccggcacctgcaccctgcctttggcccagcggatcaccaagcagatatgctgctgcagccgcgtgggcaaagcatggggcagcgagtgtgagaaatgccctctgcctggcacagaggccttcagagagatctgccctgccggccacggctacacctacgcgagctccgacatccgcctgtccatgaggaaagccgaggaggaggaactggcaaggcccccaagggagcaagggcagaggagcagcggggcactgcccgggccagcagagaggcagcccctccgggtcgtcacggacacctggcttgaggccgggaccatccctgacaagggtgactctcaggctggccaggtcacgaccagtgtcactcatgcacctgcctgggtcacagggaatgccacaaccccaccaatgcctgaacaggggattgcagagatacaggaagaacaagtgaccccctccaccgatgtgctggtgaccctgagcaccccaggcattgacagatgcgctgctggagccaccaacgtctgtggccctggaacctgcgtgaacctccccgatggatacagatgtgtctgcagccctggctaccagctgcaccccagccaggcctactgcacagatgacaacgagtgtctgagggacccctgcaagggaaaagggcgctgcatcaaccgcgtggggtcctactcctgcttctgctaccctggctacactctggccacctcaggggcgacacaggagtgtcaagatatcaatgagtgtgagcagccaggggtgtgcagcggggggcagtgcaccaacaccgagggctcgtaccactgcgagtgtgatcagggctacatcatggtcaggaaaggacactgccaagatatcaacgaatgccgtcaccccggtacctgccctgatgggagatgcgtcaattcccctggctcctacacttgtctggcctgtgaggagggctaccggggccagagtgggagctgtgtagatgtgaatgagtgtctgactcccggggtctgtgcccatggaaagtgcaccaacctagaaggctccttcagatgctcttgtgagcagggctatgaggtcacctcagatgagaagggctgccaagatgtggatgagtgtgccagccgggcctcatgccccacaggcctctgcctcaacacggagggctccttcgcctgctctgcctgtgagaacgggtactgggtgaatgaagacggcactgcctgtgaagacctagatgagtgtgccttcccgggagtctgcccctccggagtctgcaccaacacggctggctccttctcctgcaaggactgcgatgggggctaccggcccagccccctgggtgactcctgtgaagatgtggatgaatgtgaagacccccagagcagctgcctgggaggcgagtgcaagaacactgtgggctcctaccagtgcctctgtccccagggcttccagctggccaatggcaccgtgtgtgaggatgtgaatgagtgcatgggggaggagcactgcgcaccccacggcgagtgcctcaacagccacgggtctttcttctgtctgtgcgcgcctggcttcgtcagcgcagaggggggcaccagctgccaggatgtggacgagtgtgccaccacagacccgtgtgtgggagggcactgtgtcaacaccgagggctccttcaactgtctatgtgagactggcttccagccctccccagagagtggagagtgtgtggatattgacgagtgtgaggactatggagacccggtgtgtggcacctggaagtgtgaaaacagccctggctcctaccgctgtgttctgggctgccagcctggcttccacatggccccgaacggagactgcattgacatagacgagtgcgccaacgacaccatgtgtggcagccacggcttctgtgacaacactgatggctccttccgctgcctctgtgaccagggcttcgagatctctccctcaggctgggactgtgtggatgtgaacgagtgtgagcttatgctggcggtatgtggggccgcgctctgtgagaacgtggagggctccttcctgtgcctctgtgccagtgacctggaggagtacgatgcccaggaggggcactgccgcccacggggggctggaggtcagagtatgtctgaggccccaacgggggaccatgccccggcccccacccgcatggactgctactccgggcagaagggccatgcgccctgctccagtgtcctgggccggaacaccacacaggctgaatgctgctgcacccagggcgctagctggggagatgcctgtgacctctgcccgtctgaggactcagctgaattcagcgagatctgccctagtggaaaaggctacattcctgtggaaggagcctggacgtttggacagaccatgtacacagatgcggatgagtgtgtgatattcgggcctggtctctgcccgaacggccggtgcctcaacaccgtgcctggttatgtctgcctgtgcaatcccggcttccactacgatgcttcccacaagaagtgtgaggatcacgatgagtgccaggacctggcctgtgagaatggcgagtgcgtcaacacggagggctccttccactgcttctgcagccccccgctcaccctggacctcagccagcagcgctgcatgaacagcaccagcagcacggaggacctccctgaccacgacatccacatggacatctgctggaaaaaagtcaccaatgatgtgtgcagcgaacccctgcgtgggcaccgcaccacctacacggaatgctgctgccaggacggcgaggcctggagccagcagtgtgctctgtgtcccccgaggagctctgaggtctatgctcagctgtgcaacgtggctcgcattgaggcagagcgggaggccggggtccacttccggccaggctatgagtatggccccgggcccgatgacctgcactacagcatctatggcccagatggggcccccttctacaactacctgggccccgaggacaccgtccctgagcctgccttccccaacacagccggtcactcagcggaccgcacacccatccttgagtctcctttgcagccctcagaactccagccccactacgtggccagccatccagagcccccagccggcttcgaagggcttcaggcggaggagtgcggcatcctgaacggctgtgagaatggccgctgtgtgcgcgtgcgggagggctacacctgtgactgttttgagggcttccagctggatgcggcccacatggcctgcgtagatgtgaatgagtgtgatgacttgaacgggcctgctgtgctctgtgtccatggttactgcgagaacacagagggctcctaccgctgccactgctccccgggatatgtggctgaggcagggcccccccactgcactgccaaggagtagcagtcaggggtcagtgtggcaactacctggaaatggcctccagtcacaggcaggggccttgaggatgatttcctagctgggaagacaccgtgacatcaggccagaggtttccaatcagccttgcctgctttcatctctcccagcttagcctctggctgtaagcttcggtcattgcctccatgcccttgcttggctcaagcaccaccaatcgctttaatgcttcagccaccgcatgaggccctgtccaccacctttcctggccttgctatgggatgcttaccaaaggatggccctcatccaccctcccaagctgtgcgagcatgcaaggccccatggcctcacactgcagacacccctttccagccacaatccaccatcatcctgacgatcccacaactgggacagaggctacatctgccctagggaggtccttcagaatctgtggagcaagaaaggatttggggaagcttggggactgactccagagccccctcctaagaaccatcaccaccactcagccaatctgttctgggccctgattttgccacacctccatcctgtagcccattctctgaccccaaggagtggcagaagatcccttcactcagagaagcaaggctgatattagcttgttgaatgtaagagacacaaatgaagaagaacaaagagcctgagaaagcagcaagaggacatgatgaaaaatacgtggagttgatgagaaaggggagccaaggctttatacgtctaaagaaaatattcagtagctgaatccgcccagtgatagcctgtgggcaccagcagcaagggctgccatgggatacagcacccatctacaaagacctctattacataaacactgcttcttacaggaaacaaacctcttctgggatctccttttgtgaaaaccagtttgatgtgctaaaagtaaaaagtctattttccagtgtggtcttgttcagaagcagccagatttccaatgttgtttttcccctccactcagaaacccctgccctttcccttcagaaaacgatggcaggcattcctctgagtttacaagcagagactcactccaacccaaactagctgggagttcagaaccatggtggaataaagaaatgtgcatctggtccaaaaaaaaaaaaaaaaaaaaaaaaaaaaaaaaaa

SEQ ID NO: 31810 - DNA, 8833 bp, Homo Sapiens; identical to SEQ ID NO: 29245

SEQ ID NO: 31811 - DNA, 5265 bp, Homo Sapiens
ctcgcccctccgcgctcgcaacttcggcctcccccggctcccgcccgccctccctcctttgttgcgcgatgagggtcgggtttcggatctgaccgagccgccgccgcgggatggagccgctcagccaccggggcctgccgcgcctgtcctggatcgacaccctctacagcaacttcagctacgggacggacgagtacgacggagaggggaatgaggagcagaaggggcccccggagggctcagagaccatgccgtacatcgatgagtcgcccaccatgtccccgcagctcagcgcccgcagccagggccggggggatggcgtctccccgactccacctgagggactggctcctggggtggaagcagggaaaggcctggagatgaggaagctggttctctcggggttcttggccagcgaagagatctacattaaccagctggaagccctgttgctgcccatgaaacccctgaaggccaccgccaccacctcccagcccgtgctcaccatccagcagatcgagaccatcttctacaagatccaggacatctatgagatccacaaggagttctatgacaacctgtgccccaaggtgcaacagtgggacagccaggtcaccatgggccacctcttccagaagctggccagccagctcggtgtgtacaaagcgtttgtcgataactataaagtcgctctggagacagctgagaagtgcagccagtccaacaaccagttccagaagatctcagaggaactcaaagtgaaaggtcccaaggactccaaggacagccacacgtctgtcaccatggaagctctgctctacaagcccattgaccgggtcactcggagcaccctagtcctacacgacctgctgaagcacacacctgtggaccaccccgactacccgctgctgcaggatgccctccgcatctcccagaacttcctgtccagcatcaacgaggacatcgacccccgccggactgcagtgacaacgcccaagggggagacgcgacagctggtgaaggacggcttcctggtggaagtgtcagagagctcccggaagctgcggcacgtcttcctctttacagatgtcctactgtgtgccaagctgaagaagacctctgcagggaagcaccagcagtatgactgtaagtggtacatccccctggccgacctggtgtttccatcccccgaggaatctgaggccagcccccaggtgcaccccttcccagaccatgagctggaggacatgaagatgaagatctctgccctcaagagtgaaatccagaaggagaaagccaacaaaggccagagccgtgccatcgagcgcctgaagaagaagatgtttgagaatgagttcctgctgctgctcaactcccccacaatcccgttcaggatccacaatcggaatggaaagagttacctgttcctactgtcctcggactacgagaggtcagagtggagagaagcaattcagaaactacagaagaaggatctccaggcctttgtcctgagctcagtggagctccaggtgctcacaggatcctgtttcaagcttaggactgtacacaacattcctgtcaccagcaataaagacgacgatgagtctccaggactctatggcttccttcatgtcatcgtccactctgccaagggatttaagcaatcagccaacctgtactgtaccctggaggtggattccttcggctattttgtcagcaaagccaaaaccagggtgttccgggacacagcggagcccaagtgggatgaggagtttgagatcgagctggagggctcccagtccctgaggatcctgtgctatgagaagtgctatgacaagaccaaggtcaacaaggacaacaatgagatcgtggacaagatcatgggcaaaggacagatccagctggacccacaaaccgtggagaccaagaactggcacacggacgtgattgagatgaacgggatcaaagtggaattttccatgaaattcaccagccgagatatgagcctgaagaggaccccgtccaaaaagcagaccggcgtcttcggtgtgaagatcagcgtggtgacgaagcgggagcgctccaaggtgccctacatcgtccggcagtgtgtggaggaggtggagaagaggggtatcgaggaggttggcatctacaggatatcgggcgtggccacggacatccaggcgctcaaggccgtcttcgatgccaataacaaggacatcctgctgatgctgagtgacatggacatcaacgccatcgccgggacgctcaagctgtacttccgggaactgcccgagccgctcctcacggaccgactctacccagccttcatggagggcatcgccctgtcagaccctgctgccaaggaaaactgcatgatgcacctgctccgctccctgcccgaccccaacctcatcaccttcctcttcctgctggaacacttgaaaagggttgccgagaaggagcccatcaacaaaatgtcacttcacaacctggctaccgtgtttggacccacgttactgagaccctcagaagtggagagcaaagcacacctcacctcggctgcggacatctggtcccatgacgtcatggcgcaggtccaggtcctcctctactacctgcagcacccccccatttccttcgcagaactcaagcggaacacactgtacttctccaccgacgtgtagcccgaggcagggtggctgcgggcgggtggtggaaccagcccctccagcctggggtccaactcagacttgaaagactgcaatagaaaactcccaaacccagcactccagactcgagggaagccagcttccaagaactggaatgcgtacgtcttttgtgccaccttgtacaaagccggctgcccagccccagcctcaccaccgcatcccacctcctgccctccatacctctagttgtgtctgatgctccgtgctgttcgggaattgttttatgtacacttgtcaggcagaaaaggtagtgaccggcccggcgtgggcacacagacagcccgctttgttctttcatttcctccagcactttctttccgcctgagtccagcccaaggccttttattttgcgctgtgtaactgctgccagcttctctcttggccctgctcccagatggcggtctcctggcagcctcccctcagtcttcctccacccgcctcttccttcccagcctgcctgcatgcatgtgcacccttggtcttcgctccatcgccttgaaagctctgaagaggccctgggttgtcgcggcagcagtggtctgtttgatgctgccgtttgccgctgccggcccctcctcagactccgcctttgggagcacacctgctttgccttgctgcctgtgcaaatgttggacaagcagacacactcacactcgtccccagcttagcacagagctggagcgcccatttctggaattttccgtttgggaatctccacttctggggtttacctgttcggcctcctgcctatcagtgaggcatctctgactgttccttctactgcttttcagttcccttccctgctgttctatttcctttgagtgtaaagactcacaggtgacctgctatcgagatagccagagggtcaggagagaatgggggaggaggcggtcaggctgctgaggaaacaccacaggctgaacgggggaggaatgcacatgccacgctgggtgtcccgggtcgcggggaggcagctcagctcttaggagcaagttgtgggggcttttcaagaggggccaggcttcctggagggtgactgatgtggccgaagcaggtgtccaggcaggtaggctgcagccaggagctccctggcaccgcaggacctcgtggtactcttgccttagattttacacacactccacagccaagcactgccacggtcctccaggacctgggaagcaaaggcacaggcccacggtggccagccattgtggtgccgccccagcttctggatacagccttttgggtaaacactgggaactccagaagttgtggggagagtggggaatcagacagccgcctctaggggctgggttctgctggggcctccttgttggtgctgtaggcacccgccaggagcagggacccgacttgcagacgcattgcccggtactaggaaggagtgaggtgtgttcccaccgtacacttcccacacgagctgcggctgccagcctcgggccatcagcctaggagagcagatgcagctccaggggctcgacttatagccagttacagctccccggctcttctgtgtggcagagcgtcgtttccgggccctcagggctggggagctcagttcccattgcttgtgctcagggctgagtcttaaagaagggtttgccggccctaacgctgcagccgtgctgagaggccctttttgagcctgtttactcctgtggccttgggcagaacagtaaatactctgtgcacggaggaaagacatgcccaagaggaaggaagtactgaccatcggctgcctgtgagcagcttagcaaggagcccttgctccctgggaaaggcggtgaacttgagtctaaagatgcagtgcctggcccttcctaaggtccctgcctggcatccgagtgtcggtgtgtggcacagaaggctcctgcttgcttccaaagtgatggacaggaaggggcagagtgagtcacggcccagactgcgaccttcacgtctcagcctcagggagccccacagccccaagctcgctgaggcaacgtgagaacaggctatgggaaggctgcaaaggctgagaaatgcaaaggctcatatttataaatcccacccccagagtggggagggtcaggtgccagacctggactaaactgcaccaaggaaacacccagcagggtctcctgtgagccggggaccatgcagcccgaaacctccagtcactgcgcccggcaggagtcaggagccagggactgtgcagcctggaacctccagtcactgtgccagcagggtggctgtgcccagcaggagtcaggctaagaaacgccaggtctgcctgttcttgctgggcaatggctgatggctgccagtttctgctgatacacaggtaggatgggacccttcatgaatatctgactttaataagttggtaaggatatatttttttgtctatgttctgtttcaacttatgtagattattataaattgatgtaaaccacgtgagaggaaaatgttaataaaaaatgcaaagccccatcatttgcacaaaactcaaaaaaaaaaaaaaaaaaaaaaa

SEQ ID NO: 31812 - DNA, 1677 bp, Homo Sapiens
gcctcgatttaaagagacagaagctgtcggggtcctggaagacggtccccaataccctccccccaagtccttgggaccacttgggtccccagagctggggagatggtttgtggcggctttgcctgctccaagaatgcgctttgcgctctcaacgtggtctacatgctggtgagcttgttgctcattggagtggctgcttggggcaagggcctgggtctggtgtccagcatccacatcatcggcggagtcattgctgtgggagtcttccttctccttattgcagtggctggactggtgggtgctgtcaaccaccaccaagtcctgctgttcttttacatgatcatccttggtttggtcttcatcttccaatttgtaatctcttgctcatgtctggctattaaccgaagcaaacagacagatgtcatcaatgcttcttggtgggtcatgagcaacaagactcgggatgaactggaaagaagttttgattgttgtggcttattcaacctcacaaccctgtatcaacaagattatgatttctgcactgcaatctgcaagagccagagccccacatgccagatgtgtggagaaaagtttcttaagcattcagacgaagccctgaaaatcctagggggtgttggactcttctttagctttacagagatccttggtgtttggctagcaatgagatttcggaatcagaaggatcctagagccaaccccagtgcctttctatgagactttggatccttctgacttttcttctgctctctctaagctttctcttcctcccttagggaatatctagggtctgtaaccgttttggtttgagaaaaaggaaaggccccttgtcacatcctctaaaattgatggaatagcaagactttatgccttgacatattttagtgggagccagactataaggaataaaaggaaaaactttcttcctctctctccaagaggatatgggaagcttctgtgagtgcataggatgggggctggagtcattcttagctgtttcccttcctctgtccatatactggatcacctcaacataccctggtgtggctctaagggtaaatcagggatagggccaaggagaaaacaaccaagaactctttcctgtaataagcaggatccagtttgagaaagtttagcgaatataaaagtaaaagccatttaaaaatctatattctttttttttttttgacacagagtcttgctctgttgcccaggctggagtgcaatggcatgatctcggctcaccgcaacctctgcctcccgggttcaagcgatcctcctgcctcagtctcccaagtagctgggattacaggtgtgcaccaccacgcctgactaattttgtatttttagtagagacagggtttcaccatgttagtcaggctggtctcgaactcctgacctcaggtgatccacccgcgttggcctcccaacgtgctgggattataggcgtgagccaccacgccccgcctaaaatccatattcaaagaagcaatttcagttcctttctaagctttgtcagtcaaggggctccactgacttcctaggccctgtaatttaaccagtctttaaggttttgcaggaaagtcccttcttccaagtggtttttccaaatcgcacaatggcaaagccaaacagaggaagaaacattaaaaaaaaaaa

SEQ ID NO: 31813 - DNA, 1000 bp, Homo Sapiens
gacccttaagcttcacacacaaaaaattggtctttgttcattctcagatgacaggatgtcccaagagtaacaaaagatgggagccaatcctctcatagctgtttcttcaatcatcccatcaacagctcttcatttcttgaactaccttccttttccaaagaggtaatgctgagatcagtcagaaaggctttctgagaaaactggcttggatttctgggtctgttccagtcgattcaagatgaactggcttgtatcaatgaagcgctcaacgcagttcacaaaacaggcctcagcccgactgtccaactttggcccaggcttgtccatgcacttctcccaacaaagttcagtcatctggtgcaccagctgctggaagcgctgcttttgagtctctacctcgatgaaatgctgcaactgtgggtccactgcacccaaacccgccgcggaggaagaggaggaggaatccatcccagggcgaccaagcttgcagagacgaactccgcaccgaccttcacgtgtctccgcgacggaaccggaaccacagctagctgcctctgggaccgcccccgtgagtgcactgcgtcggcgcgaggcaggcgtccaactccaccccgccgcctcccacaccttggcgccggtgcttcgttcccggagtcggcgggttccactccccggaccccgcaatcccgtaaccccgcaaccctgccgttgcgcccagccttgcgccttgagatcgcagggcttacagcccagagccgaggtgccgttgagatgttactccaaaaagaaaagaaaggagaaaaggaagttacttcagaccacgtgatccattccgtgctggccccacagctccgcccctgtccacttccaaattagcccgcgttttctgagctaccagagttgtgcactgggtcagttagttgactgggtcgattagttggctatcctgggcccctggctttcgttttttgatggagttttcctctcccgacgtagggaa

SEQ ID NO: 31814 - DNA, 1649 bp, Homo Sapiens
gccacttcttctgggcccacgaggcagctgtcccatgctctgctgagcacggtggtgccatgcctctgcaactcctcctgttgctgatcctactgggccctggcaacagcttgcagctgtgggacacctgggcagatgaagccgagaaagccttgggtcccctgcttgcccgggaccggagacaggccaccgaatatgagtacctagattatgatttcctgccagaaacggagcctccagaaatgctgaggaacagcactgacaccactcctctgactgggcctggaacccctgagtctaccactgtggagcctgctgcaaggcgttctactggcctggatgcaggaggggcagtcacagagctgaccacggagctggccaacatggggaacctgtccacggattcagcagctatggagatacagaccactcaaccagcagccacggaggcacagaccactccactggcagccacagaggcacagacaactcgactgacggccacggaggcacagaccactccactggcagccacagaggcacagaccactccaccagcagccacggaagcacagaccactcaacccacaggcctggaggcacagaccactgcaccagcagccatggaggcacagaccactgcaccagcagccatggaagcacagaccactccaccagcagccatggaggcacagaccactcaaaccacagccatggaggcacagaccactgcaccagaagccacggaggcacagaccactcaacccacagccacggaggcacagaccactccactggcagccatggaggccctgtccacagaacccagtgccacagaggccctgtccatggaacctactaccaaaagaggtctgttcatacccttttctgtgtcctctgttactcacaagggcattcccatggcagccagcaatttgtccgtcaactacccagtgggggccccagaccacatctctgtgaagcagtgcctgctggccatcctaatcttggcgctggtggccactatcttcttcgtgtgcactgtggtgctggcggtccgcctctcccgcaagggccacatgtaccccgtgcgtaattactcccccaccgagatggtctgcatctcatccctgttgcctgatgggggtgaggggccctctgccacagccaatgggggcctgtccaaggccaagagcccgggcctgacgccagagcccagggaggaccgtgagggggatgacctcaccctgcacagcttcctcccttagctcactctgccatctgttttggcaagaccccacctccacgggctctcctgggccacccctgagtgcccagaccccaatccacagctctgggcttcctcggagacccctggggatggggatcttcagggaaggaactctggccacccaaacaggacaagagcagcctggggccaagcagacgggcaagtggagccacctctttcctccctccgcggatgaagcccagccacatttcagccgaggtccaaggcaggaggccatttacttgagacagattctctcctttttcctgtcccccatcttctctgggtccctctaacatctcccatggctctccccgcttctcctggtcactggagtctcctccccatgtacccaagg

SEQ ID NO: 31815 - DNA, 4839 bp, Homo Sapiens; identical to SEQ ID NO: 29669

SEQ ID NO: 31816 - DNA, 5706 bp, Homo Sapiens
ggaattccattttccctcccttttctccaagcaaattttgtccacagtcaacgacgggagtccttcctgtatcgatccgacagcgattatgacctctctccaaagtctatgtcccggaactcctccattgccagtgatatacacggagatgacttgattgtgactccatttgctcaggtcttggccagtctgcgaactgtacgaaacaactttgctgcattaactaatttgcaagatcgagcacctagcaaaagatcacccatgtgcaaccaaccatccatcaacaaagccaccataacagaggaggcctaccagaaactggccagcgagaccctggaggagctggactggtgtctggaccagctagagaccctacagaccaggcactccgtcagtgagatggcctccaacaagtttaaaaggatgcttaatcgggagctcacccatctctctgaaatgagtcggtctggaaatcaagtgtcagagtttatatcaaacacattcttagataagcaacatgaagtggaaattccttctccaactcagaaggaaaaggagaaaaagaaaagaccaatgtctcagatcagtggagtcaagaaattgatgcacagctctagtctgactaattcaagtatcccaaggtttggagttaaaactgaacaagaagatgtccttgccaaggaactagaagatgtgaacaaatggggtcttcatgttttcagaatagcagagttgtctggtaaccggcccttgactgttatcatgcacaccatttttcaggaacgggatttattaaaaacatttaaaattccagtagatactttaattacatatcttatgactctcgaagaccattaccatgctgatgtggcctatcacaacaatatccatgctgcagatgttgtccagtctactcatgtgctattatctacacctgctttggaggctgtgtttacagatttggagattcttgcagcaatttttgccagtgcaatacatgatgtagatcatcctggtgtgtccaatcaatttctgatcaatacaaactctgaacttgccttgatgtacaatgattcctcagtcttagagaaccatcatttggctgtgggctttaaattgcttcaggaagaaaactgtgacattttccagaatttgaccaaaaaacaaagacaatctttaaggaaaatggtcattgacatcgtacttgcaacagatatgtcaaaacacatgaatctactggctgatttgaagactatggttgaaactaagaaagtgacaagctctggagttcttcttcttgataattattccgataggattcaggttcttcagaatatggtgcactgtgcagatctgagcaacccaacaaagcctctccagctgtaccgccagtggacggaccggataatggaggagttcttcccccaaggagaccgagagagggaacgtggcatggagataagccccatgtgtgacaagcacaatgcttccgtggaaaaatcacaggtgggcttcatagactatattgttcatcccctctgggagacatgggcagacctcgtccaccctgacgcccaggatattttggacactttggaggacaatcgtgaatggtaccagagcacaatccctcagagcccctctcctgcacctgatgacccagaggagggccggcagggtcaaactgagaaattccagtttgaactaactttagaggaagatggtgagtcagacacggaaaaggacagtggcagtcaagtggaagaagacactagctgcagtgactccaagactctttgtactcaagactcagagtctactgaaattccccttgatgaacaggttgaagaggaggcagtaggggaagaagaggaaagccagcctgaagcctgtgtcatagatgatcgttctcctgacacgtaacagtgcaaaaactttcatgccttttttttttttaagtagaaaaattgtttccaaagtgcatgtcacatgccacaaccacggtcacacctcactgtcatctgccaggacgtttgttgaacaaaactgaccttgactactcagtccagcgctcaggaatatcgtaaccagttttttcacctccatgtcatccgagcaaggtggacatcttcacgaacagcgtttttaacaaaatttcagcttggtagagctgacaaagcagataaaatctactccaaattattttcaagagagtgtgactcatcaggcagcccaaaagtttattggacttggggtttctattcctttttatttgtttgcaatattttcagaagaaaggcattgcacagagtgaacttaatggacgaagcaacaaatatgtcaagaacaggacatagcacgaatctgttaccagtaggaggaggatgagccacagaaattgcataattttctaatttcaagtcttcctgatacatgactgaatagtgtggttcagtgagctgcactgacctctacattttgtatgatatgtaaaacagattttttgtagagcttacttttattattaaatgtattgaggtattatatttaaaaaaaactatgttcagaacttcatctgccactggttatttttttctaaggagtaacttgcaagttttcagtacaaatctgtgctacactggataaaaatctaatttatgaattttacttgcaccttatagttcatagcaattaactgatttgtagtgattcattgtttgttttatataccaatgacttccatattttaaaagagaaaaacaactttatgttgcaggaaaccctttttgtaagtctttattattcactttgcattttgtttcactctttccagataagcagagttgctcttcaccagtgtttttcttcatgtgcaaagtgactatttgttctataatacttttatgtgtgttatatcaaatgtgtcttaagcttcatgcaaactcagtcatcagttcgtgttgtctgaagcaagtgggaaatatataaatacccagtagctaaaatggtcagtcttttttagatgttttcctacttagtatctcctaataacgttttgctgtgtcactagatgttcatttcacaagtgcatgtctttctaataatccacacatttcatgctctaataatccacacatttcatgctcatttttattgtttttacagccagttatagcaagaaaaaggtttttccccttgtgctgctttataatttagcgtgtgtctgaaccttatccatgtttgctagatgaggtcttgtcaaatatatcactaccattgtcaccggtgaaaagaaacaggtagttaagttagggttaacattcatttcaaccacgaggttgtatatcatgactagcttttactcttggtttacagagaaaagttaaacaaccaactaggcagtttttaagaatattaacaatatattaacaaacaccaatacaactaatcctatttggttttaatgatttcaccatgggattaagaactatatcaggaacatccctgagaaacggctttaagtgtagcaactactcttccttaatggacagccacataacgtgtaggaagtcctttatcacttatcctcgatccataagcatatcttgcagaggggaactacttctttaaacacatggagggaaagaagatgatgccactggcaccagagggttagtactgtgatgcatcctaaaatatttattatattggtaaaaattctggttaaataaaaaattagagatcactcttggctgatttcagcaccaggaactgtattacagttttagagattaattcctagtgtttacctgattatagcagttggcatcatggggcatttaattctgactttatccccacgtcagccttaataaagtcttctttaccttctctatgaagactttaaagcccaaataatcatttttcacattgatattcaagaattgagatagatagaagccaaagtgggtatctgacaagtggaaaatcaaacgtttaagaagaattacaactctgaaaagcatttatatgtggaacttctcaaggagcctcctggggactggaaagtaagtcatcagccaggcaaatgactcatgctgaagagagtccccatttcagtcccctgagatctagctgatgcttagatcctttgaaataaaaattatgtctttataactctgatcttttacataaagcagaagaggaatcaactagttaattgcaaggtttctactctgtttcctctgtaaagatcagatggtaatctttcaaataagaaaaaaataaagacgtatgtttgaccaagtagtttcacaagaatatttgggaacttgtttcttttaattttatttgtccctgagtgaagtctagaaagaaaggtaaagagtctagagtttattcctctttccaaaacattctcattcctctcctccctacacttagtatttcccccacagagtgcctagaatcttaataatgaataaaataaaaagcagcaatatgtcattaacaaatccagacctgaaagggtaaagggtttataactgcactaataaagagaggctctttttttttcttccagtttgttggtttttaatggtaccgtgttgtaaagatacccactaatggacaatcaaattgcagaaaaggctcaatatccaagagacagggactaatgcactgtacaatctgcttatccttgcccttctctcttgccaaagtgtgcttcagaaatatatactgctttaaaaaagaataaaagaatatccttttacaagtggctttacatttcctaaaatgccataagaaaatgcaatatctgggtactgtatggggaaaaaaatgtccaagtttgtgtaaaaccagtgcatttcagcttgcaagttactgaacacaataatgctgttttaattttgttttatatcagttaaaattcacaataatgtagatagaacaaattacagacaaggaaagaaaaaacttgaatgaaatggattttacagaaagctttatgataatttttgaatgcattatttattttttgtgccatgcattttttttctcaccaaatgaccttacctgtaatacagtcttgtttgtctgtttacaaccatgtatttattgcaatgtacatactgtaatgttaattgtaaattatctgttcttattaaaacatcatcccatgatggggtggtgttgatatatttggaaactcttggtgagagaatgaatggtgtgtatacatactctgtacatttttcttttctcctgtaatatagtcttgtcaccttagagcttgtttatggaagattcaagaaaactataaaatacttaaagatatataaatttaaaaaaacatagctgcaggtctttggtcccagggctgtgccttaactttaaccaatattttcttctgttttgctgcatttgaaaggtaacagtggagctagggctgggcattttacatccaggcttttaattgattagaattctgccaataggtggattttacaaaaccacagacaacctctgaaagattctgagacccttttgagacagaagctcttaagtacttcttgccagggagcagcactgcatgtgtgatggttgtttgccatctgttgatcaggaactacttcagctacttgcatttgattatttcctttttttttttttttaactcggaaacacaactgggggaattcc

SEQ ID NO: 31817 - DNA, 2449 bp, Homo Sapiens
agctgcccgcgtcgcgtgtgtacccccgcgcactgaaggaggtccaccagccctcaccagcccccgcggaccgtgcaatggcccagcgtaagaatgccaagagcagcggcaacagcagcagcagcggctccggcagcggtagcacgagtgcgggcagcagcagccccggggcccggagagagacaaagcatggaggacacaagaatgggaggaaaggcggactctcaggaacttcattcttcacgtggtttatggtgattgcattgctgggcgtctggacatctgtagctgtcgtttggtttgatcttgttgactatgaggaagttctaggaaaactaggaatctatgatgctgatggtgatggagattttgatgtggatgatgccaaagttttattaggacttaaagagagatctacttcagagccagcagtcccgccagaagaggctgagccacacactgagcccgaggagcaggttcctgtggaggcagaaccccagaatatcgaagatgaagcaaaagaacaaattcagtcccttctccatgaaatggtacacgcagaacatgttgagggagaagacttgcaacaagaagatggacccacaggagaaccacaacaagaggatgatgagtttcttatggcgactgatgtagatgatagatttgagaccctggaacctgaagtatctcatgaagaaaccgagcatagttaccacgtggaagagacagtttcacaagactgtaatcaggatatggaagagatgatgtctgagcaggaaaatccagattccagtgaaccagtagtagaagatgaaagattgcaccatgatacagatgatgtaacataccaagtctatgaggaacaagcagtatatgaacctctagaaaatgaagggatagaaatcacagaagtaactgctccccctgaggataatcctgtagaagattcacaggtaattgtagaagaagtaagcatttttcctgtggaagaacagcaggaagtaccaccagaaacaaatagaaaaacagatgatccagaacaaaaagcaaaagttaagaaaaagaagcctaaacttttaaataaatttgataagactattaaagctgaacttgatgctgcagaaaaactccgtaaaaggggaaaaattgaggaagcagtgaatgcatttaaagaactagtacgcaaataccctcagagtccacgagcaagatatgggaaggcgcagtgtgaggatgatttggctgagaagaggagaagtaatgaggtgctacgtggagccatcgagacctaccaagaggtggccagcctacctgatgtccctgcagacctgctgaagctgagtttgaagcgtcgctcagacaggcaacaatttctaggtcatatgagaggttccctgcttaccctgcagagattagttcaactatttcccaatgatacttccttaaaaaatgaccttggcgtgggatacctcttgataggagataatgacaatgcaaagaaagtttatgaagaggtgctgagtgtgacacctaatgatggctttgctaaagtccattatggcttcatcctgaaggcacagaacaaaattgctgagagcatcccatatttaaaggaaggaatagaatccggagatcctggcactgatgatgggagattttatttccacctgggggatgccatgcagagggttgggaacaaagaggcatataagtggtatgagcttgggcacaagagaggacactttgcatctgtctggcaacgctcactcatcaatgtgaatggactgaaagcacagccttgtggcccaaaagaaacgggctacacacagttagtaaagtctttagaaagaaactggaagttaatccgagatgaaggccttgcagtgatggataaagccaaaggtctcttcctgcctgaggatgaaaacctgagggaaaaaggggactggagccagttcacgctgtggcagcaaggaagaagaaatgaaaatgcctgcaaaggagctcctaaaacctgtaccttactagaaaagttccccgagacaacaggatgcagaagaggacagatcaaatattccatcatgcaccccgggactcacgtgtggccgcacacagggcccacaaactgcaggctccgaatgcacctgggcttggtgattcccaaggaaggctgcaagattcgatgtgccaacgagaccaagacctgggaggaaggcaaggtgctcatctttgatgactcctttgagcacgaggtatggcaggatgcctcatctttccggctgatattcatcgtggatgtgtggcatccggaactgacaccacagcagagacgcagccttccagcaatttagcatgaattcatgcaagcttgggaaactctggagagaggctgcctttctggttccatctccttgggtgtgaggatagaatttcgaacaccaagagtcaa

SEQ ID NO: 31818 - DNA, 5102 bp, Homo Sapiens
gcttctgcgactccagttgtgagagccgcaagggcatgggaattgacgccactcaccgacccccagtctcaatctcaacgctgtgaggaaacctcgactttgccaggtccccaagggcagcggggctcggcgagcgaggcacccttctccgtccccatcccaatccaagcgctcctggcactgacgacgccaagagactcgagtgggagttaaagcttccagtgagggcagcaggtgtccaggccgggcctgcgggttcctgttgacgtcttgccctaggcaaaggtcccagttccttctcggagccggctgtcccgcgccactggaaaccgcacctccccgcagcatgggcaccagcctcagcccgaacgacccttggccgctaaacccgctgtccatccagcagaccacgctcctgctactcctgtcggtgctggccactgtgcatgtgggccagcggctgctgaggcaacggaggcggcagctccggtccgcgcccccgggcccgtttgcgtggccactgatcggaaacgcggcggcggtgggccaggcggctcacctctcgttcgctcgcctggcgcggcgctacggcgacgttttccagatccgcctgggcagctgccccatagtggtgctgaatggcgagcgcgccatccaccaggccctggtgcagcagggctcggccttcgccgaccggccggccttcgcctccttccgtgtggtgtccggcggccgcagcatggctttcggccactactcggagcactggaaggtgcagcggcgcgcagcccacagcatgatgcgcaacttcttcacgcgccagccgcgcagccgccaagtcctcgagggccacgtgctgagcgaggcgcgcgagctggtggcgctgctggtgcgcggcagcgcggacggcgccttcctcgacccgaggccgctgaccgtcgtggccgtggccaacgtcatgagtgccgtgtgtttcggctgccgctacagccacgacgaccccgagttccgtgagctgctcagccacaacgaagagttcgggcgcacggtgggcgcgggcagcctggtggacgtgatgccctggctgcagtacttccccaacccggtgcgcaccgttttccgcgaattcgagcagctcaaccgcaacttcagcaacttcatcctggacaagttcttgaggcactgcgaaagccttcggcccggggccgccccccgcgacatgatggacgcctttatcctctctgcggaaaagaaggcggccggggactcgcacggtggtggcgcgcggctggatttggagaacgtaccggccactatcactgacatcttcggcgccagccaggacaccctgtccaccgcgctgcagtggctgctcctcctcttcaccaggtatcctgatgtgcagactcgagtgcaggcagaattggatcaggtcgtggggagggaccgtctgccttgtatgggtgaccagcccaacctgccctatgtcctggccttcctttatgaagccatgcgcttctccagctttgtgcctgtcactattcctcatgccaccactgccaacacctctgtcttgggctaccacattcccaaggacactgtggtttttgtcaaccagtggtctgtgaatcatgacccagtgaagtggcctaacccggagaactttgatccagctcgattcttggacaaggatggcctcatcaacaaggacctgaccagcagagtgatgattttttcagtgggcaaaaggcggtgcattggcgaagaactttctaagatgcagctttttctcttcatctccatcctggctcaccagtgcgatttcagggccaacccaaatgagcctgcgaaaatgaatttcagttatggtctaaccattaaacccaagtcatttaaagtcaatgtcactctcagagagtccatggagctccttgatagtgctgtccaaaatttacaagccaaggaaacttgccaataagaagcaagaggcaagctgaaattttagaaatattcacatcttcggagatgaggagtaaaattcagtttttttccagttcctcttttgtgctgcttctcaattagcgtttaaggtgagcataaatcaactgtccatcaggtgaggtgtgctccatacccagcggttcttcatgagtagtgggctatgcaggagcttctgggagatttttttgagtcaaagacttaaagggcccaatgaattattatatacatactgcatcttggttatttctgaaggtagcattctttggagttaaaatgcacatatagacacatacacccaaacacttacaccaaactactgaatgaagaagtattttggtaaccaggccatttttggtgggaatccaagattggtctcccatatgcagaaatagacaaaaagtatattaaacaaagtttcagagtatattgttgaagagacagagacaagtaatttcagtgtaaagtgtgtgattgaaggtgataagggaaaagataaagaccagaaattcccttttcaccttttcaggaaaataacttagactctagtatttatgggtggatttatccttttgccttctggtatacttccttacttttaaggataaatcataaagtcagttgctcaaaaagaaatcaatagttgaattagtgagtatagtggggttccatgagttatcatgaattttaaagtatgcattattaaattgtaaaactccaaggtgatgttgtacctcttttgcttgccaaagtacagaatttgaattatcagcaaagaaaaaaaaaaaagccagccaagctttaaattatgtgaccataatgtactgatttcagtaagtctcataggttaaaaaaaaaagtcaccaaatagtgtgaaatatattacttaactgtccgtaagcagtatattagtattatcttgttcaggaaaaggttgaataatatatgccttgtgtaatattgaaaattgaaaagtacaactaacgcaaccaagtgtgctaaaaatgagcttgattaaatcaaccacctatttttgacatggaaatgaagcagggtttcttttcttcactcaaattttggcgaatctcaaaattagatcctaagatgtgttcttatttttataacatctttattgaaattctatttataatacagaatcttgttttgaaaataacctaattaatatattaaaattccaaattcatggcatgcttaaattttaactaaattttaaagccattctgattattgagttccagttgaagttagtggaaatctgaacattctcctgtggaaggcagagaaatctaagctgtgtctgcccaatgaataatggaaaatgccatgaattacctggatgttctttttacgaggtgacaagagttggggacagaactcccattacaactgaccaagtttctcttctagatgattttttgaaagttaacattaatgcctgctttttggaaagtcagaatcagaagatagtcttggaagctgtttggaaaagacagtggagatgaggtcagttgtgttttttaagatggcaattactttggtagctgggaaagcataaagctcaaatgaaatgtatgcattcacatttagaaaagtgaattgaagtttcaagttttaaagttcattgcaattaaacttccaaagaaagttctacagtgtcctaagtgctaagtgcttattacattttattaagctttttggaatctttgtaccaaaattttaaaaaagggagtttttgatagttgtgtgtatgtgtgtgtggggtggggggatggtaagagaaaagagagaaacactgaaaagaaggaaagatggttaaacattttcccactcattctgaattaattaatttggagcacaaaattcaaagcatggacatttagaagaaagatgtttggcgtagcagagttaaatctcaaataggctattaaaaaagtctacaacatagcagatctgttttgtggtttggaatattaaaaaacttcatgtaattttattttaaaatttcatagctgtacttcttgaatataaaaaatcatgccagtatttttaaaggcattagagtcaactacacaaagcaggcttgcccagtacatttaaattttttggcacttgccattccaaaatattatgccccaccaaggctgagacagtgaatttgggctgctgtagcctatttttttagattgagaaatgtgtagctgcaaaaataatcatgaaccaatctggatgcctcattatgtcaaccaggtccagatgtgctataatctgtttttacgtatgtaggcccagtcgtcatcagatgcttgcggcaaaagaaagctgtgtttatatggaagaaagtaaggtgcttggagtttacctggcttatttaatatgcttataacctagttaaagaaaggaaaagaaaacaaaaaacgaatgaaaataactgaatttggaggctggagtaatcagattactgctttaatcagaaaccctcattgtgtttctaccggagagagaatgtatttgctgacaaccattaaagtcagaagttttactccaggttattgcaataaagtataatgtttattaaatgcttcatttgtatgtcaaagctttgactctataagcaaattgcttttttccaaaacaaaaagatgtctcaggtttgttttgtgaattttctaaaagctttcatgtcccagaacttagcctttacctgtgaagtgttactacagccttaatattttcctagtagatctatattagatcaaatagttgcatagcagtatatgttaatttgtgtgtttttagctgtgacacaactgtgtgattaaaaggtatactttagtagacatttataactcaaggataccttcttatttaatcttttcttatttttgtactttatcatgaatgcttttagtgtgtgcataatagctacagtgcatagttgtagacaaagtacattctggggaaacaacatttatatgtagcctttactgtttgatataccaaattaaaaaaaaattgtatctcattacttatactgggacaccattaccaaaataataaaaatcactttcataatcttgaaaaaa

SEQ ID NO: 31819 - DNA, 1738 bp, Homo Sapiens
gccaggagggcgcctctgggaagaagaccacgggggaagcaaagtttcagggcagctgaggagccttcgccgcagcccttccgagcccaatcatcccccaggctatggagggcggactctaagatgaatcccgacctggacaccggccacaacacatcagcacctgcccactggggagagttgaaaaatgccaacttcactggccccaaccagacctcgagcaactccacactgccccagctggacatcaccagggccatctctgtgggcctggtgctgggcgccttcatcctctttgccatcgtgggcaacatcctagtcatcttgtctgtggcctgcaaccggcacctgcggacgcccaccaactacttcattgtcaacctggccatggccgacctgctgttgagcttcaccgtcctgcccttctcagcggccctagaggtgctcggctactgggtgctggggcggatcttctgtgacatctgggcagccgtggatgtcctgtgctgcacagcgtccattctgagcctgtgcgccatctccatcgatcgctacatcggggtgcgctactctctgcagtatcccacgctggtcacccggaggaaggccatcttggcgctgctcagtgtctgggtcttgtccaccgtcatctccatcgggcctctccttgggtggaaggagccggcacccaacgatgacaaggagtgcggggtcaccgaagaacccttctatgccctcttctcctctctgggctccttctacatccctctggcggtcattctagtcatgtactgccgtgtctatatagtggccaagagaaccaccaagaacctagaggcaggagtcatgaaggagatgtccaactccaaggagctgaccctgaggatccattccaagaactttcacgaggacacccttagcagtaccaaggccaagggccacaaccccaggagttccatagctgtcaaactttttaagttctccagggaaaagaaagcagctaagacgttgggcattgtggtcggtatgttcatcttgtgctggctacccttcttcatcgctctaccgcttggctccttgttctccaccctgaagccccccgacgccgtgttcaaggtggtgttctggctgggctacttcaacagctgcctcaaccccatcatctacccatgctccagcaaggagttcaagcgcgctttcgtgcgcatcctcgggtgccagtgccgcggccgcggccgccgccgacgccgccgccgccgtcgcctgggcggctgcgcctacacctaccggccgtggacgcgcggcggctcgctggagcgctcgcagtcgcgcaaggactcgctggacgacagcggcagctgcctgagcggcagccagcggaccctgccctcggcctcgccgagcccgggctacctgggccgcggcgcgccaccgccagtcgagctgtgcgccttccccgagtggaaggcgcccggcgccctcctgagcctgcccgcgcctgagccccccggccgccgcggccgccacgactcgggcccgctcttcaccttcaagctcctgaccgagcccgagagccccgggaccgacggcggcgccagcaacggaggctgcgaggccgcggccgacgtggccaacgggcagccgggcttcaaaagcaacatgcccctggcgcccgggcagttttagggcccccgtgcgcagctttctttccctggggaggaaaacatcgtggggggga

SEQ ID NO: 31820 - DNA, 2566 bp, Homo Sapiens
ggcacgagttgtgctcctcgcttgcctgttccttttccacgcattttccaggataactgtgactccaggcccgcaatggatgccctgcaactagcaaattcggcttttgccgttgatctgttcaaacaactatgtgaaaaggagccactgggcaatgtcctcttctctccaatctgtctctccacctctctgtcacttgctcaagtgggtgctaaaggtgacactgcaaatgaaattggacaggttcttcattttgaaaatgtcaaagatataccctttggatttcaaacagtaacatcggatgtaaacaaacttagttccttttactcactgaaactaatcaagcggctctacgtagacaaatctctgaatctttctacagagttcatcagctctacgaagagaccctatgcaaaggaattggaaactgttgacttcaaagataaattggaagaaacgaaaggtcagatcaacaactcaattaaggatctcacagatggccactttgagaacattttagctgacaacagtgtgaacgaccagaccaaaatccttgtggttaatgctgcctactttgttggcaagtggatgaagaaatttcctgaatcagaaacaaaagaatgtcctttcagactcaacaagacagacaccaaaccagtgcagatgatgaacatggaggccacgttctgtatgggaaacattgacagtatcaattgtaagatcatagagcttccttttcaaaataagcatctcagcatgttcatcctactacccaaggatgtggaggatgagtccacaggcttggagaagattgaaaaacaactcaactcagagtcactgtcacagtggactaatcccagcaccatggccaatgccaaggtcaaactctccattccaaaatttaaggtggaaaagatgattgatcccaaggcttgtctggaaaatctagggctgaaacatatcttcagtgaagacacatctgatttctctggaatgtcagagaccaagggagtggccctatcaaatgttatccacaaagtgtgcttagaaataactgaagatggtggggattccatagaggtgccaggagcacggatcctgcagcacaaggatgaattgaatgctgaccatccctttatttacatcatcaggcacaacaaaactcgaaacatcattttctttggcaaattctgttctccttaagtggcatagcccatgttaagtcctccctgacttttctgtggatgccgatttctgtaaactctgcatccagagattcattttctagatacaataaattgctaatgttgctggatcaggaagccgccagtacttgtcatatgtagccttcacacagatagacctttttttttttccaattctatcttttgtttccttttttcccataagacaatgacatacgcttttaatgaaaaggaatcacgttagaggaaaaatatttattcattatttgtcaaattgtccggggtagttggcagaaatacagtcttccacaaagaaaattcctataaggaagatttggaagctcttcttcccagcactatgctttccttctttgggatagagaatgttccagacattctcgcttccctgaaagactgaagaaagtgtagtgcatgggacccacgaaactgccctggctccagtgaaacttgggcacatgctcaggctactataggtccagaagtccttatgttaagccctggcaggcaggtgtttattaaaattctgaattttggggattttcaaaagataatattttacatacactgtatgttatagaacttcatggatcagatctggggcagcaacctataaatcaacaccttaatatgctgcaacaaaatgtagaatattcagacaaaatggatacataaagactaagtagcccataaggggtcaaaatttgctgccaaatgcgtatgccaccaacttacaaaaacacttcgttcgcagagcttttcagattgtggaatgttggataaggaattatagacctctagtagctgaaatgcaagaccccaagaggaagttcagatcttaatataaattcactttcatttttgatagctgtcccatctggtcatgtggttggcactagactggtggcaggggcttctagctgactcgcacagggattctcacaatagccgatatcagaatttgtgttgaaggaacttgtctcttcatctaatatgatagcgggaaaaggagaggaaactactgcctttagaaaatataagtaaagtgattaaagtgctcacgttaccttgacacatagtttttcagtctatgggtttagttactttagatggcaagcatgtaacttatattaatagtaatttgtaaagttgggtggataagctatccctgttgccggttcatggattacttctctataaaaaatatatatttaccaaaaaattttgtgacattccttctcccatctcttccttgacatgcattgtaaataggttcttcttgttctgagattcaatattgaatttctcctatgctattgacaataaaatattattgaactacc

SEQ ID NO: 31821 - DNA, 2325 bp, Homo Sapiens
gcggcagcggctcttatagtgcaaccatggcagactattcaacagtgcctcccccctcttctggctcagctggtggcggtggtggcggcggtggtggtggaggagttaacgacgctttcaaagatgcactgcagagagcccggcagattgcagcaaaaattggaggtgatgcagggacatcactgaattcaaatgactatggttatgggggacaaaaaagacctttagaagatggagatcaaccagatgctaagaaagttgctcctcaaaatgactcttttggaacacagttaccaccgatgcatcagcagcaaagcagatctgtaatgacagaagaatacaaagttccagatggaatggttggattcataattggcagaggaggtgaacagatctcacgcatacaacaggaatctggatgcaaaatacagatagctcctgacagtggtggccttccagaaaggtcctgtatgttaactggaacacctgaatctgtccagtcagcaaaacggttactggaccagattgttgaaaaaggaagaccagctcctggcttccatcatggcgatggaccgggaaatgcagttcaagaaatcatgattccagctagcaaggcaggattagtcattggaaaagggggagaaactattaaacagcttcaggaacgggctggagttaaaatggttatgattcaagacgggccgcagaacactggtgctgacaaacctcttaggattacaggagacccatataaagttcaacaagccaaggaaatggtgttagagttaattcgtgatcaaggcggtttcagagaagttcggaatgagtatgggtcaagaataggaggaaatgaagggatagatgtccccattccaagatttgctgttggcattgtaataggaagaaatggagagatgatcaaaaaaatacaaaatgatgctggtgttcgcattcagtttaagccagatgatgggacaacacccgaaaggatagcacaaataacaggacctccagaccgatgtcaacatgctgcagaaattattacagaccttcttcgaagtgttcaggctggtaatcctggtggacctggacctggtggtcgaggaagaggtagaggtcaaggcaactggaacatgggaccacctggtggactacaggaatttaattttattgtgccaactgggaaaactggattaataataggaaaaggaggtgaaaccataaaaagcataagccagcagtctggtgcaagaatagaacttcagagaaatcctccaccaaatgcagatcctaatatgaagttatttacaattcgtggcactccacaacagatagactatgctcggcaactcatagaagaaaagattggtggcccagtaaatcctttagggccacctgtaccccatgggccccatggtgtcccaggcccccatggacctcctgggcctccagggcctggaactccaatgggaccatacaaccctgcaccttataatcctggaccaccaggcccggctcctcatggtcctccagccccatatgctccccagggatggggaaatgcatatccacactggcagcagcaggctcctcctgatccagctaaggcaggaacggatccaaattcagcagcttgggctgcttattacgctcactattatcaacagcaagcacagccaccaccagcagcccctgcaggtgcaccaactacaactcaaactaatggacaaggagatcagcagaatccagccccagctggacaggttgattataccaaggcttgggaagagtactacaagaaaatgggtcaggcagttcctgctccgactggggctcctccaggtggtcagccagattatagtgcagcctgggctgagtattatagacaacaagcagcctattatgcccagacaagtccccagggaatgccacagcatcctccagcacctcagggccaataataagaagtggacaatacagtatttgcttcattgtgtgggggaaaaaaacctttgttaaatatatggatgcagacgacttgatgaagatcttaattttgtttttggtttaaaatagtgtttccttttttttttttttttttttgaaaatgtacaaaatatctatcactactgataggaggttaatatttctgtgtagaaatgaaaattggtttgtttttagtatttagtgtagatgtacacattccagcaaatgtatttgcaattatgtggttgatgctttgtgatataaatgtactttttcaatgtatactttcactttccaaatgcctgttttgtgctttacaataaatgatatgaaacctca

SEQ ID NO: 31822 - DNA, 1673 bp, Homo Sapiens
attcccccgcaggccgggcatgggtgggggcgccgggccgtcacgatgagcgccctgggcagcccggtccgggcctacgactttctgctcaagttcctgctggtgggcgacagcgacgtgggcaagggcgagatcctggcgagcctgcaggatggcgcggccgagtccccgtacggccacccggcgggcatcgactacaagacgaccaccatcctgctggacgggcggcgggtgaagctgcagctctgggatacttcaggccagggaagattttgtaccatattccgctcctactcccggggcgcacagggtgtgatcctggtctatgacattgcgaaccgctggtcttttgacggcattgatcgatggattaaggagatcgatgagcatgcccccggagtccccaagatcctggtggggaaccgcctgcacctggcgttcaagcggcaggtgcccacggagcaggcccaggcctacgccgagcgcctgggcgtgaccttctttgaggtcagccctctgtgcaatttcaacatcacagagtcgttcacggagctggccaggatcgtgctgctgcggcatgggatggaccggctctggcggccgagcaaggtgctgagcttgcaagacctctgctgccgggcggtcgtgtcctgcacgccggtgcacctggtggacaagctcccgctccccattgccttaagaagccacctcaagtccttctcgatggccaacggcctgaatgccaggatgatgcacggcggttcctactccctcaccaccagctccacccacaaaaggagcagcctccgcaaagtgaagctcgtccgccccccccagagcccccccaaaaactgcaccagaaacagctgcaaaatttcttaaggaaggcactgaaagaaacacggcggaatctctccaggagaagctcggcgttacccccggcagctggtggatgcatctcagatcccggttcctctcggcgaatgctgcttgcgaatgtgtgcgacgccttccgtgtgatggaaacacactaccccgtcggacttcgaatttctacgtggatgtgcatgaagctcttgttttcgatgtgtgtttgtaaagggaaaattagtactctgctcgactcttggtaacatgaaattctgaatgttactttatcatgattgcactgcaacttttttccttaaaataactgcttttgtaagaacggtgatattggagtgattagtataaattcaatggaatttgagaagcaatggcagcgggataatttagagtcactgatattacgagaggggtctttttgtaaacctccttttcaatgtcaaagcaccaatttataaaacgctgcagatgtagaggttatgtgcaactgatctgtccagtttgtgtatgaaatggatttgataaagtttttgctagttatttactacattttgggattaataagtgatttatatgcatatttttctgtaaatctacagttttttgtacaagatattctacaagttatgaagctaagggaagaaaatgccaaagatacctctagttatgttgaacacagccagcacagtttcgacaggtcaaggaagagctgtttcagtaaagaatgaagtgaaaacacttatttaggaaaatgtttctcaacaataaaatgtatagttgtttctctc

SEQ ID NO: 31823 - DNA, 4179 bp, Homo Sapiens
ccggacctgccagtgtctcttaggagtgaggtacctggagttcggggaccccaacctgtgacaatgacagcagacaaattggttttctttgtgaatggcagaaaggtggtggagaaaaatgcagatccagagacaacccttttggcctacctgagaagaaagttggggctgagtggaaccaagctcggctgtggagaagggggctgcggggcttgcacagtgatgctctccaagtatgatcgtctgcagaacaagatcgtccacttttctgccaatgcctgcctggcccccatctgctccttgcatcatgttgctgtgacaactgtggaaggaataggaagcaccaagacgaggctgcatcctgtgcaggagagaattgccaaaagccacggctcccagtgcgggttctgcacccctggcatcgtcatgagtatgtacacactgctccggaatcagcccgagcccaccatggaggagattgagaatgccttccaaggaaatctgtgccgctgcacaggctacagacccatcctccagggcttccggacctttgccagggatggtggatgctgtggaagagatgggaataatccaaattgctgcatgaaccagaagaaagaccactcagtcagcctctcgccatctttattcaaaccagaggagttcacgcccctggatccaacgcaggaacccatttttcccccagagttgctgaggctgaaagacactcctcggaagcagctgcgatttgaaggggagcgtgtgacgtggatacaggcctcaaccctcaaggagctgctggacctcaaggctcagcaccctgacgccaagctggtcgaggggaacacggagattggcattgagatgaagttcaagaatatgctgtttcctatgattgtttgcccagcctggatccctgagctgaattcggtagaacatggacccgacggtatctcctttggagctgcttgccccctgagcattgtggaaaaaaccctggtggatgctgttgctaagcttcctgcccaaaagacagaggtgttcagaggggtcctggagcacgtgcgctggtttgctgggaagcaagtcaagtctgtggcgtccgttggagggaacatcatcactgccagccccatctccgacctcaaccccgtgttcatggccagtggggccaagctgacacttgtgtccagaggcaccaggagaactgtccagatggaccacaccttcttccctggctacagaaagaccctgctgagcccggaggagatactgctctccatagagatcccctacagcagggagggggagtatttctcagcattcaagcaggcctcccggagagaagatgacattgccaaggtaaccagtggcatgagagttttattcaagccaggaaccacagaggtacaggagctggccctttgctatggtggaatggccaacagaaccatctcagccctcaagaccactcagaggcagctttccaagctctggaaggaggagctgctgcaggacgtgtgtgcaggactggcagaggagctgcagctgcctcccgatgcccctggtggcatggtggacttccggtgcaccctcaccctcagcttgttgttgaagttctacctgacagtccttcagaagctgggccaagagaacctggaagacaagtgtggtaaactggaccccactttcgccagtgcaactttactgtttcagaaagaccccccagccgatgtccagctcttccaagaggtgcccaagggtcagtctgaggaggacatggtgggccggcccctgccccacctggcagcggacatgcaggcctctggtgaggccgtgtactgtgacgacattcctcgctacgagaatgagctgtctctccggctggtcaccagcacccgggcccacgccaagatcaagtccatagatacatcagaagctaagaaggttccagggtttgtttgtttcatttccgctgatgatgttcctgggagtaacataactggaatttgtaatgatgagacagtctttgcgaaggataaggttacttgtgttgggcatatcattggtgctgtggttgctgacaccccggaacacacacagagagctgcccaaggggtgaaaatcacctatgaagaactaccagccattatcacaattgaggatgctataaagaacaactccttttatggacctgagctgaagatcgagaaaggggacctaaagaaggggttttccgaagcagataatgttgtgtcaggggagatatacatcggtggccaagagcacttctacctggagactcactgcaccattgctgttccaaaaggcgaggcaggggagatggagctctttgtgtctacacagaacaccatgaagacccagagctttgttgcaaaaatgttgggggttccagcaaaccggattgtggttcgagtgaagagaatgggaggaggctttggaggcaaggagacccggagcactgtggtgtccacggcagtggccctggctgcatataagaccggccgccctgtgcgatgcatgctggaccgtgatgaggacatgctgataactggtggcagacatcccttcctggccagatacaaggttggcttcatgaagactgggacagttgtggctcttgaggtggaccacttcagcaatgtggggaacacccaggatctctctcagagtattatggaacgagctttattccacatggacaactgctataaaatccccaacatccggggcactgggcggctgtgcaaaaccaaccttccctccaacacggccttccggggctttggggggccccaggggatgctcattgccgagtgctggatgagtgaagttgcagtgacctgtgggatgcctgcagaggaggtgcggagaaaaaacctgtacaaagaaggggacctgacacacttcaaccagaagcttgagggtttcaccttgcccagatgctgggaagaatgcctagcaagctctcagtatcatgctcggaagagtgaggttgacaagttcaacaaggagaattgttggaaaaagagaggattgtgcataattcccaccaagtttggaataagcttcacagttccttttctgaatcaggcaggagccctacttcatgtgtacacagatggctctgtgctgctgacccacggggggactgagatgggccaaggccttcataccaaaatggtccaggtggccagtagagctctgaaaatccccacctctaagatttatatcagcgagacaagcactaacactgtgcccaacacctctcccacggctgcctctgtcagcgctgacctcaatggacaggccgtctatgcggcttgtcagaccatcttgaaaaggctggaaccctacaagaagaagaatcccagtggctcctgggaagactgggtcacagctgcctacatggacacagtgagcttgtctgccactgggttttatagaacacccaatctgggctacagctttgagactaactcagggaaccccttccactacttcagctatggggtggcttgctctgaagtagaaatcgactgcctaacaggagatcataagaacctccgcacagatattgtcatggatgttggctccagtctaaaccctgccattgatattggacaggtggaaggggcatttgtccagggccttggcctcttcaccctagaggagctacactattcccccgaggggagcctgcacacccgtggccctagcacctacaagatcccggcatttggcagcatccccattgagttcagggtgtccctgctccgcgactgccccaacaagaaggccatctatgcatcgaaggctgttggagagccgcccctcttcctggctgcttctatcttctttgccatcaaagatgccatccgtgcagctcgagctcagcacacaggtaataacgtgaaggaactcttccgcctagacagccctgccaccccggagaagatccgcaatgcctgcgtggacaagttcaccaccctgtgtgtcactggtgtcccagaaaactgcaaaccctggtctgtgagggtctaaagagagagtcctcagcagagtcttcttgtgctgcctttgggcttccatggagcaggaggaacataccacagaacatggatctattaaagtcacagaatgacagacctgtgattt

SEQ ID NO: 31824 - DNA, 3828 bp, Homo Sapiens
  misc_feature (2448)..(2448): n is a, c, g, or t
  misc_feature (2454)..(2456): n is a, c, g, or t
  misc_feature (3490)..(3490): n is a, c, g, or t
  misc_feature (3610)..(3610): n is a, c, g, or t
ctcttagcgctcaggtcttttccttccgccgacccgaagtcatcgctgggagtactggttgccctttcctcagtccttcagtgaatctacagagcctatttcctcaggagcctcagcctggtccttacttcagtgataaaaggaggaaaggctggctacagcaaacatcattcaagatgtccagcaaagggagcagcacagatggcagaacagacttagctaatggaagcctgtctagcagtccagaggagatgtctggagctgaagaggggagggagacatcctcaggcattgaagtggaggcctcagacctgagtttgagcttgactggggatgatggtggccccaaccgcaccagcacagaaagtcgaggcacagacacagagagctcaggtgaagataaggactctgacagcatggaggacactggtcattactccattaatgatgaaaatcgagtccatgaccgctcagaggaagaggaagaggaggaagaagaggaggaagaagagcagcctcggggcgcgtgtacagcgcaagcggctaaccgtgaccaggactcatcagatgatgagcgggccctagaggactgggtgtcctcagaaacatcagctctaccccgacctcgctggcaagccctccctgcccttcgggagcgggagctgggttcaagtgcccgctttgtctatgaggcctgtggggcaagagtctttgtgcacggtttccgcctgcagcatgggcttgagggccatactggttgtgtcaataccctgcactttaaccagcgcggcacctggctggccagtggcagcgatgacctgaaggtggtggtgtgggattgggtacggcggcagccagtactggactttgagagtggccacaaaagtaatgtgttccaggccaagtttcttcctaacagtggtgattctactctggccatgtgtgcccgtgacgggcaggttcgagtagcagaactgtctgccacacagtgttgcaagaatacaaaacgtgtggcccagcacaagggagcgtcccacaagttggcactggaaccagactctccctgtacgttcttatctgcaggtgaagatgcagttgttttcaccattgacctgagacaagaccgcccagcgtcgaaactggtggtgacaaaagagaaagagaagaaagtggggctgtatacgatctatgtgaatcctgccaatacccaccagtttgcagtgggtggacgagatcagtttgtaaggatttatgaccagaggaaaattgatgagaatgagaacaatggagtactcaagaagttctgtcctcatcacctggtgaacagtgagtccaaagcaaacatcacctgtcttgtgtacagccacgacggcacagagctcctggccagttacaatgatgaagacatttacctcttcaactcctctcacagtgatggggcccagtatgttaagagatacaagggccacagaaataatgccacagtaaaaggcgtcaatttctatggccccaagagtgagtttgtggtgagcggtagtgactgtgggcacatcttcctctgggagaaatcatcctgccagattattcagttcatggagggggacaagggaggcgtggtaaactgtcttgagccccaccctcacctgcctgtgctggcaaccagtggcctagaccatgatgtgaagatctgggcacccacagctgaagcttccactgagctgacagggttaaaagatgtgattaagaagaacaagcgggagcgggatgaagatagcttgcaccaaactgacctgtttgatagtcacatgctgtggttccttatgcatcacctgagacagagacgccatcaccggcgctggcgagaacctggggttggggccacagacgcggactctgatgagtctcccagctcctcagacacatcggacgaggaggagggccctgaccgggtgcagtgcatgccatcttgaggcctcatacctaggtggggcaggctggggctgccaacctgatcctgcctgggcaaccctttcctgtcccaggccctacattcagcagaaacgcactttggactttttgctttagataaaagaaagacatcccaggagaaggacaaaccagaggagtgaaccaacaaagagtacctaggaatgggagttgagcctggaatgggctccatggagaggtgcataggactcggcagaaatggcctctccccaaagcctctttttgagaggagagggaagcctatttgttaactggtttgggatagggaatggggtttctttttctttaatctcccttgtttcttgggctgggggaggggtggggggaacaactggctattcagtaccaaggggccagagtggagggtaggagtgccactctctctttggtttaggtttttgaccttttcttcctttgttttttaaaagtttatgacagttnctcccnnnaccccacaaccccatcccagaatcctattttcctgggaagtccttaaagcccctaaccatcccacactcttcactttcctttccaccttattcattctctgtacttaccacagtattttgcacttgattacatatccttcatctcttctcttcatcccatcaccccctaaataggtcaggtgagggaggctgggaagaggtgggaggaggggagaagtgaaggaagataggaaggatattacctcttctgttatttttttaagaaacattgtttggtggcagcaatctccctgtccctatcactgttagaggcctaattttatatctataaatatattaaaaagcaagtcaaacttggatgtatcaaggtaaaattattgtcaaagtttaaatacctatatattctctgaatgcaataaagggacttaagagtgaacaagagtaatggtgtggaagtgacacctggggtcagtttacctctgtgtatggtcactagagattgggacttaccctttaggttttaggaggcttgagaatggaaggatcctcatttctgcccttcctggttccctgctttggtgtaggggttgggaaaaacaggaaattcctctcagctctgcctcagatctcctacctctccttaagtcttgtagggggttccaaggatggctcttctaaccagaggctggcctgtctttaaaacttaactactttagggtggtgccaccactgcagactattgtggtactttgtgacagaagacatgtacacacacaccacacacatacatacacactctctcactctgtctctcttacctttagctgcttgatcattaagccatccaacttcatgccagttcccttctttatagaagagtgaagggaaagacttcctgggtttgacttaaaccttgtccaccttcttgatattttaggattgaggaataaagtcattaatctaaggaactgattacagtggctggagcttgggcacttgtcttatcactggtcactgagtctgaaagtcccagntgaattcttgcccttaagtgcttttgctgctatttttttgcccccagttccacaagatccaaccaagaattctgtatcctggcaacagtcagattcttctaaatcagccagcaagagggnaaagagtgagagatggtattcccagatcattcttcctcctgcccctttcccagcagctctagaccagatgttggctgctgtacttactccctgaggtagggaatgtgtggtgatcgagtggtctgtgttcctattgctggtggggtgatagggtgggctaaaaaccatgcactctggaatttgttgtattttctcccagtaaagcttttcttctcccg

SEQ ID NO: 31825 - DNA, 2906 bp, Homo Sapiens
gctccggcccgccccgctgcccggcccgcgcgccgggccatggagctgcgggatgtgtcgctgcaggacccgcgggaccgcttcgagctgctgcagcgcgtgggggccgggacctatggcgacgtctacaaggcccgcgacacggtcacgtccgaactggccgccgtgaagatagtcaagctagacccaggggacgacatcagctccctccagcaggaaatcaccatcctgcgtgagtgccgccaccccaatgtggtggcctacattggcagctacctcaggaatgaccgcttgtggatctgcatggagttctgcggagggggctccctgcaggagatttaccatgccactgggcccctggaggagcggcagattgcctacgtctgccgagagcgactgaaggggctccaccacctgcattctcaggggaagatccacagagacatcaagggagccaaccttctcctcactctccagggagatgtcaaactggctgactttggggtgtcaggcgagctgacagcgtctgtggccaagaggaggtctttcattgggactccctactggatggctcccgaggtggctgctgtggagcgcaaaggtggctacaatgagctatgtgacgtctgggccctgggcatcactgccattgagctgggcgagctgcagccccctctgttccacctgcaccccatgagggccctgatgctcatgtcgaagagcagcttccagccgcccaaactgagagataagactcgctggacccagaatttccaccactttctcaaactggccctgaccaagaatcctaagaagaggccgacagcagagaagctcctgcagcacccgttcacgactcagcagctccctcgggccctcctcacacagctgctggacaaagccagtgaccctcatctggggaccccctcccctgaggactgtgagctggagacctatgacatgtttccagacaccattcactcccgggggcagcacggcccagccgagaggaccccctcggagatccagtttcaccaggtgaaatttggcgccccacgcaggaaggaaactgacccactgaatgagccgtgggaggaagagtggacactactgggaaaggaagagttgagtgggagcctgctgcagtcggtccaggaggccctggaggaaaggagtctgactattcggtcagcctcagaattccaggagctggactccccagacgataccatgggaaccatcaagcgggccccgttcctagggccactccccactgaccctccagcagaggagcctctgtccagtcccccaggaaccctgcccccacctccttcaggccccaacagctccccactgctgcccacggcctgggccaccatgaagcagcgggaggatcctgagaggtcatcctgccacgggctccccccaactcccaaggtgcatatgggcgcctgcttctccaaggtcttcaatggctgccccctgcggatccacgctgctgtcacctggattcaccctgttactcgggaccagttcctggtggtaggggccgaggaaggcatctacacactcaacctgcatgaactgcatgaggatacgctggagaagctgatttcacatcgctgctcctggctctactgcgtgaacaacgtgctgctgtcactctcagggaaatccacgcacatctgggcccatgacctcccaggcctgtttgagcagcggaggctacagcaacaggttcccctctccatccccaccaaccgcctcacccagcgcatcatccccaggcgctttgctctgtccaccaagattcctgacaccaaaggctgcttgcagtgtcgtgtggtgcggaacccctacacgggtgccaccttcctgctggccgccctgcccaccagcctgctcctgctgcagtggtatgagccgctgcagaagtttctgctgctgaagaacttctccagccctctgcccagcccagctgggatgctggagccgctggtgctggatgggaaggagctgccgcaggtgtgtgttggggccgaggggcctgaggggcccggctgccgcgtcctgttccatgtcctgcccctggaggctggcctgacgcccgacatcctcatcccacctgaggggatcccaggctcggcccagcaggtgatccaggtggacagggacacaatcctagtcagctttgaacgctgtgtgaggattgtcaacatgcagggcgagcccacggccacactggcacctgagctgacctttgatttccccatcgagactgtggtgtgcctgcaggacagtgtgctggccttctggagccatgggatgcaaggccgaagcctggataccaatgaggtgacccaggagatcacagatgaaacaaggatcttccgagtgcttggggcccacagagacatcatcctggagagcattcccactgacaacccagaggcgcacagcaacctctacatcctcacgggccaccagagcacctactaagagcagcgggcctgtccaggctccccgccccaccccacgccttagctgcaggcccttttgggcaaaggggcccatcctagaccagaggagcccaggccctggccctgctggggctgaaggtcagaagtaatcctgagaaatgtttcaggcctggggagggaggggagcccccgacgcctctgcaataactggaccagggggagctgctgtcactcccccatccccgaggcagcccagtccctagtgcccaaggcagggaccctgggcctgggccatccattccattttgttccacatttcctttctactctttctgccaagagcctgcccctgcatttgtcctgggaaacacggtatttaagagagaactatattggtattaaagctggtttgttttaaaaaaaaaa

SEQ ID NO: 31826 - DNA, 2397 bp, Homo Sapiens
cccccgagccgcgccgagtctgccgccgccgcagcgcctccgctccgccaactccgccggcttaaattggactcctagatccgcgagggcgcggcgcagccgagcagcggctctttcagcattggcaaccccaggggccaatatttcccacttagccacagctccagcatcctctctgtgggctgttcaccaactgtacaaccaccatttcactgtggacattactccctcttacagatatgggagacatgggagatccaccaaaaaaaaaacgtctgatttccctatgtgttggttgcggcaatcagattcacgatcagtatattctgagggtttctccggatttggaatggcatgcggcatgtttgaaatgtgcggagtgtaatcagtatttggacgagagctgtacatgctttgttagggatgggaaaacctactgtaaaagagattatatcaggttgtacgggatcaaatgcgccaagtgcagcatcggcttcagcaagaacgacttcgtgatgcgtgcccgctccaaggtgtatcacatcgagtgtttccgctgtgtggcctgcagccgccagctcatccctggggacgaatttgcgcttcgggaggacggtctcttctgccgagcagaccacgatgtggtggagagggccagtctaggcgctggcgacccgctcagtcccctgcatccagcgcggccactgcaaatggcagcggagcccatctccgccaggcagccagccctgcggccccacgtccacaagcagccggagaagaccacccgcgtgcggactgtgctgaacgagaagcagctgcacaccttgcggacctgctacgccgcaaacccgcggccagatgcgctcatgaaggagcaactggtagagatgacgggcctcagtccccgtgtgatccgggtctggtttcaaaacaagcggtgcaaggacaagaagcgaagcatcatgatgaagcaactccagcagcagcagcccaatgacaaaactaatatccaggggatgacaggaactcccatggtggctgccagtccagagagacacgacggtggcttacaggctaacccagtggaagtacaaagttaccagccaccttggaaagtactgagcgacttcgccttgcagagtgacatagatcagcctgcttttcagcaactggtcaatttttcagaaggaggaccgggctctaattccactggcagtgaagtagcatcaatgtcctctcaacttccagatacacctaacagcatggtagccagtcctattgaggcatgaggaacattcattctgtattttttttccctgttggagaaagtgggaaattataatgtcgaactctgaaacaaaagtatttaacgacccagtcaatgaaaactgaatcaagaaatgaatgctccatgaaatgcacgaagtctgttttaatgacaaggtgatatggtagcaacactgtgaagacaatcatgggattttactagaattaaacaacaaacaaaacgcaaaacccagtatatgctattcaatgatcttagaagtactgaaaaaaaaagacgtttttaaaacgtagaggatttatattcaaggatctcaaagaaagcattttcatttcactgcacatctagagaaaaacaaaaatagaaaattttctagtccatcctaatctgaatggtgctgtttctatattggtcattgccttgccaaacaggagctccagcaaaagcgcaggaagagagactggcctccttggctgaaagagtcctttcaggaaggtggagctgcattggtttgatatgtttaaagttgactttaacaaggggttaattgaaatcctgggtctcttggcctgtcctgtagctggtttattttttactttgccccctccccactttttttgagatccatcctttatcaagaagtctgaagcgactataaaggtttttgaattcagatttaaaaaccaacttataaagcattgcaacaaggttacctctattttgccacaagcgtctcgggattgtgtttgacttgtgtctgtccaagaacttttcccccaaagatgtgtatagttattggttaaaatgactgttttctctctctatggaaataaaaaggaaaaaaaaaaggaaactttttttgtttgctcttgcattgcaaaaattataaagtaatttattatttattgtcggaagacttgccacttttcatgtcatttgacattttttgtttgctgaagtgaaaaaaaaagataaaggttgtacggtggtctttgaattatatgtctaattctatgtgttttgtctttttcttaaatattatgtgaaatcaaagcgccatatgtagaattatatcttcaggactatttcactaataaacatttggcatagat

SEQ ID NO: 31827 - DNA, 84539 bp, Homo Sapiens
gatccgccctcctcagcctcccaaagtgctgagattacaagtcaccacgcctggcttccgtatttaagtattaggtggtgactccatacaaaatatttaacagcttgctggttaacatttaaatctttgttgctaagaccttttctatgtttgacagttattccaaacacgttccatataggaatagtttgccaaatagaagaacacgggatattcttctcccatggctgatgtgttgtgattctaggtgcatatttctgtttccaagaacacggacctgttctcaagttcaaacactgcatcaagagactgtgccccatgtcttttcacttttttccctctctctttctctccccttcccctccttgatttaatttcttcagcaggtcagaattgatacagcttccagaagaaatagtagaagtaggcaaaagattagtttttaattcttgttctgtcaaatactttttgattgaaattgtttttattacaaaggtagcatttgctttttgaaaaacaaaataagaaaaatctttttaatcacttcactattaagtttgttgaatattccctcataactttttctcctggctttttgagtatttgagacatttctttccacattgcagttttgaaacattctaccccacactcatacatgaaagtgaaggctctgcttctcagagtacagtttaatttactttgtggacatcattaacaaaaggcagagaaagacattggaccatactaattgtgggacttagaaaagctatattagtgatggttattaagtatcgcttgcagtggagtctgtaacatattcctatgaagttaatctaactactgagatagtgggagtgcagaggaggcatgctgtgagatggagtggtattttccagcatggcttttctgtttcttgaaaaccctacagcactttgccatggtttctcatctggatgaaataaagcacctgtaccttagtatgtcctgccatgcctttgtatggcatacttggctttgttctccaggcctcttcccacagtaacaacggattctttaggaattggaagggggggccgggcatggtgactcacgcctgtaatcctgggactttgggaggctgaggcgggtggatcacgaggtcaggagtttgagaccaacctggccaatatggtgaaaccctgtctctactaaaaatacaaaaaagaattagctgggtgtggtggggcatgcctgtagtcccagctactcgggaggctgaggcagaagaattgcttgaacccaggaggcggaggttgcagtgagctaagatcgtgccactgcactccagcctgggtggcagagactccgtctcaaaaaaaaaaaaaaaaaagaattggaagggaatggaggaagcaaggtggttaaacaaaaatcatctttacacacaccacccactctatgatgtatatgagttcagaagagcactttgctttatccttaatagaaatatctgtaaagccaggggagtcataaagctgtaggctaagtaaggtgccatgagaaaaggaggcttcacttacgccagtatttggagcagcgtttggcctcttggaggtgtttgcacccatcggagatgctccatagtgagatttaggataagtgcaaggtgagctttgcttttgtaaaatgcatgaagtgtgaccacgaaagggccatgggaaagaattattgatgggttacaggtgcatcgtttcaggcagattgacactaggaaagagcaaagagcaggtagaggtttgacagtttactcctttaaagtaatccatgtccaataacccatggaaagtcttcatgtacttctaaggggtagacataccctagtctaggtgctaatctaggttctatcatgtgttagctgtgaccctgggcaaataactttatcctatggcctcaatttcatcttgcaaaaaaatacggattagataatggcacttccttaaaaggtttgatgggatttcaatggaatattgcatagaaagtgcttgaggcattgtaagtacacagtaagtgaagtgttgaccattattaatatcatgatgataaagtgtgtaacttattttataagtaccatataattgaaatttgccaatagtaactcctcggagacttccagggaactctgtcaatcaaaaaaagctttgtgtaataatggacgctaccttgacagagtgtgttagtcaagagaggatacttatttataaattttgggatatttatacttttttttttttctttagagatggagtcttgctctgtcgccaaggctagagtgcagtggcgcaatctcggctcactgcaacctctgcctccccagttcaagtgattctcctgcctcagccttccaagtagctaggactacaggcacctgtcaccaggcctggctaatttttgtattttttaggagagacggggtttcaccatcttggtcaggctggtctcgaactcctgacctcgtgatccacacgcctcagccttccaaagtgctgggattacagacgtgagccaccgcacccaactataaaatgtatttttatagatacttattgaattttaggatgtgggctgggtgattattttttaaagtacttttaaaaaaattaaggtattatttacatataatatccacccatttttaagtatacattttggtgaattactgtgtgtcaatcatgtaacctcaaacacagccaagattataaaacagttctctacgctgctttggtgatggatacaccaaaatctcagaaaccaccactacagaacttattcatgtaaccaaacaccatgtgttccccaaaaacctattgaaaaaaaaaaagaacccaaaaccaaaaaacagttctctcaacattaaaagttttcctgtgcctttttccagtggattccttccctcagcctctggccccagacaaacacttatccactttctgtgtctgtagttttgtcttttcaagaaattcctatgaatggaaccatataaaagttatataaaaatcatagacttttgtatttgatttcttttactcttagcatcatttttttgagatttactcctgttgtatgtatttacatttcctctttttcttggtgagtaatattgcattatatgaatatctcacaatttatccattttactagtggataacattagattgcttccaacttgaggctattatagtacagctgctatgaacatttgtgtattcaccattgtgtgagcatatgattttccctaccttcttttctatttcactttcttttcctttttctttccttttttttttttcttttttttgagacagtctctctgtgtcgcccaggctggagtgcagaggcacgatctcggctcactgcaacctctgcctgctgggttcaagcaattctcagcgtcagcctcccaagtagctgggattacaggggcccgccaccacacccagctaatttttgtatttttagtagagacggggtttcaccctgttgaccaggctggtcttgaatgcctggcctcagtgacccacctacctcagcctcccaaagtgctgggattataggcctgagccacagtgcccggccctttttcctttctttttttgagataggatcttgctcaatcatgcaggctggagtgcagtggcacacttggctcactgcaacctccacctcctgggttcaagcgagtctcctgcctcagcctcccgagcagctgggactacaggtgcgtgccaccacgcccagttaatttctgtgtttttagtagagacggggtttcaccatgttggccaggatggtctcgatctcttgacctcgtgatctgcctgcttcagcctcccaaagtgctgggatgacaggcgtgagccaccaagcccagctgacaatggattttctttgttttctccttcatctgaagatgtcttccctttgccttcatttttaaaggatattttctctgggtatagaattataatccgagagtatagaggttgacaagttttttggtattggttttagttttgggttgtgtctttttgttgttggcttttgttttgtttttgccccttatagatgtttcactgtcttttggctcatgtgttccgatgagaagtcagcccttcattgggtccttgttctcatctgtttaatacctgttcccatacctgccctttctctctcactgcttttaagatttgctctttatctttggttttggagtatttgactatgaagtgcaagctgctttgtttcttcttggtgtacattcagcatcttgcatcttcaagtatctgcgtatcattaagtttgggcagtttttggctcttgtttcttctaaattttttctaccccattctccctgtccctctccttttggtattgtagttacccactggaacacgtgacattatgtagcaagtctctgagtctgttcatttttttccttcagtcttttttttttttttttgaaatggtctctctctgttgcccaggctggatggtacagcggtgtgatcacgactcactgcaactttggcctcctgggtttaagccatcctcctgcctcagcctctttgagtagctgggaccacaggcacgtgccaccacgcctggctaattttttgatttttactagaaacagagtcttgccatgttgcccaggctggtcttgaactcctgggctcaagcaatccacctgccctggtctcccaaaatgctaggattacaggtgtcagccactatgccagccttttcaattttttatctctcttcttcatcttggttaatttctactcatcttttttgaaatgcacatactgtccttttctttgtccattcagctgagtatatccagtgaattttttatttcaaaaagttaatttttttcagttctagaattgccatttaattattttttgttgttcctatttcccccattgagatttcctacttcttagctgagattttcattcattggaaacatgccttatactgcttcattgagatgattataatagctgcttaaaatctttgtctattccagcattttgttgatctgcaggttagactggcagttgaactaatttgtcccactgtcttgcttctttgtatggtgggtagttctggattgtttactggactgtatgaatgtcaaattctggatattctggattctgttacttttctctaatacttgtttggttttatcaggtggttttcttggctgggtttgaacacaaatgtgtttctctctgagatctttagtctgtagctgagctgctttgtgtctgtcccatgcatgagtggctcaagggtcagtcagggatgtgattgtacggggattggagatcttcccctgcctttttcccttctaggattacttcagtctatttatttatttgtttatttatttagagacagaagtcttcctctgtcacccaggctggagtgcaatggcgcgatctcagctcactgcaacccctacctcccgggttcaagcgattctcctgcctcagcctcctgagtagctgggattacaggcccgcaccaccacgcccggctaatttttgtattcttagtagagaaggggttttgccatgttggccaggctggtcacgaactcgtgaactcatgctctacccgcctcagcctccccaagtgctgggattacaagcgagagccactgcgcccagccggctctctttgttattcatagtttcctggcttctcttttctgagccacccagccaaaaatgctttgactttttctatgcatgtttctgtcatgtctgtgcatgacataaatcataatatcctaagacacaaaattgttaaaggcaataatttggaaacatacaacaataaataaaatggttatagagatgtaactttaaaaagttgaacattttgttaaaacgattcctgaatatgctggaaaattcagatagttaacaaaatattttgaggataaaaaggaaaggaatctgttatctggaggtagaataacttggccattttacagaaaggaaacaaattctgatttcactttttgtatatcatccatttgacaattttcaataaaaggtttattgaaaacggaatacataaggctggtgtttggacctttttcctaattagaaattgtccatgtctccaaagattattaactcagtttattatcagctaaagagatcttaaagttgactaaacacctggaaattaaaacttaggccaacacatcaaagtctttatgacttgaagtgttttaagaattaatgaggcaaagcacacacctgtggtcccagctacccaggagactgaggcaggagaactgtttgagcccaggagtttgaagctgcagtgagctatgatcatgccactgttcttcagcccaagagactgagtgagacctcttaagaaaaaaaaaaaaatgaccggacacagttgctcacgcctgtaatctcagcactttgggaggctgaggcgggtggatcacgagatcaggagatcgagacaatcctggctaacacggtgaaaccctgtctctactaaaaaaatacaaaaaaattagcagggcgtggtggtgggcgcctgtagtaccagctacctgggagcctgaggcagaaaaacggcgtgaacccaggaggcggatctcggcagtgagctcacaccagtggctcacacttgtaatcccagcactttgggaggccgaggtgggcagatcacctgaggtcaggagttcgagacaagcctgaccaacatggagaaaccccgtctctactaaaaatacaaaattagtgggcgtgtggcgcatgcctgtaatcccagctacttaggaggctgaggcaggagaatcgcttgaacccgggaggtggaggttgcagtgagccaggatcgcgccattgcactccagcctgggcaacaagagccaaactccgtctcgaaaagaaaaaattcatgagactaaatcattttaaaaagatgtcttttattacaatttctttcaattaaacagttttatatttttgaaattttaaacaatttgtgcaaacgagatcctactggacctataaaactaatgtagttaatttagaaggtttaaatcacgagaagttaagcccaaatcttgggttgatttaattgttgtgttaacattgtttttatatcataataaaatcagaaggatgcatagacttgtttttaagctaatattaacttctatttctagcccaaagagtcatctatcaaaagccagctcatattaagtagggggaccaagagggaggtctctcagttaaacaaagttattgacttgtctttagacaggcaagacagagtatctcctcataaggttttcttttaacctttttgttctgaagttaatatgtcttttaagtgaataatcttgtttataacaacattttcttttctgttttgtttgtttgtttgtttgagacagagtctcgcactgtcacccaggctggagtgcagtggcacagtcttggctcactgcaacctctgcctcctgggttcaagtgattctcctgcctcagcctcccgagtagctgggactacaggcacatgccaccactcccatctaatttgttttgtgtttttagtagagacggggtttcacaatattggtcaggctggtctcgaactcctgacctcgtgattcacccacctcggcctcccaaagtgctgggataacaggcatgagccactgcacccagctataacaacattttcaaagtggcacattttaatatgaataaaccttctacaatcacaggcctagaaagtttttctttttcttacggaatttcttgactgtttacttgtactagatatttcttcggtatattcataatgacagaacaattgtttatgattgattgatctccaaagtttcccaagaaaagagaaaaagtaggaggggaaggaagaaagaagtgagcagaagttggcttcagagagataggaagggccagttcccttctctgtttaaggaggggagaagacttagatgcagggaaactcattttgacatgccaactcaaaccacagaagccagagtcagttcagctggtttcagtagtaactcaggaccttgacaattctgttaagccatgtcctttaaaagccagctcttattaagtagggggatgaagggggaagcccttcagttaaacaaagttactgacctgtcttttagacaggcaggacagaggatctcctcatgaggtttttttaacctttttgttctgaagttaatgtgtgttttaaatgaataatcttatttataacaacattttcagcgtggcaactgcagtttcagaatggtggaattataccagtcagagagagatgcaaatgatttaaaataggaagaaagcaggtgtctggcccagaggaccagattaagaagaccccatgagagttacaatagttagtgaaaatggtgcttctgcaaacctcatgtctacagaagctggtcaaagaccagatgccaccaggtagaatcccagcaaactcttcaatggtagatatctgtcaccatccttaggaggtaggtctgtggaagctcactataataccatttgcttaacagatatacaaacatggatcagatataatttcaacccacaaggagctcacagtctggctcttcttttgaggcaaaaagactaaagctgttgcctttatggtaagataaatctgccttggagtcaatccaaggtgatttaattactgtaggtagttgtaccaataaggcttgtatcccagagaactccatattgcatttaagcttgttagtaagccaggccagctctatttcctgtgaggactttaaaaaaaattgcattcacacatttaaaaattagcataagcagggtgcagtgatgcacgcctgtagtcccagctacttggtaggcagaggtgggaggatcacttgagccccagaagttcaagaccagcctggacaacaaagtgaagtgaagactgtctcaaaaaaattaattatgacataaaatgttatatgtcttaatttacacaaatataagtatatacttttaaatcccattcttacacacaaaagctagcatactgtgtaaagtattctggacctacacacctttatttttttaacataacaatatgtcttggatacattttcctatttgtctatagaaagtttcatcattattttaaaaaatttgtttttggctgggcacagtggctcatgcctgtaattccagcactttgggaggccgcggcaggcgaatcaggaggtcaggagtccgagactagcctggccaacatggtgaaaccccatctctactaaaaatacaaaaacttagctgggcgtagtggcgggcgcctgtaatcccagctacccgagaggctgaggcaggagaatcgcttgaacccgggaggcagaggttgcagtgagccgagatcctgccacagcactccagctggggcgacagagtgagactccatcttaaaaaaaaaagtttgcttttatatttcatacctgcatggtattctattgtgtgagtaggccatcatccagtggtcttcaaactttcctgtgtactccgtaacagaatttgttgttttgacatgcagtctcactctgttgaccaggctagagtgcagtgccacaatctcagctcactgcagcctccacctcctgggttcaagagattctcatgcctcagcctcttgagtagctggcgcatgccaccatgcttgactaatttttgtatttttagtagagacgggatttcaccgtgttggccaggctggtcttgaactcctgacttcaagtgatctgcccgccgtggcctcccaaagtgctgggattacaggcttaagctaccacgcctggtcttctaatagaatttttaaaaactgtatttacccccttgcacatttaaattgacatctaagatttttattataagtttaaatagttgtaaaggatgtattttccattatattttatacattccttaattttatatatatatatatatatatatagttttttttttttttttttttgagatggagtctcactctgtcacccaggctggagtgcaatggtgcgatctcggctcaccgcagtcactgcctctagggttcaagagattctcctgcctcagcctcccgagtagctgggatcacaggcacccgccaccatgcccggctaatttttgtatttttagttgagatggggtttcaccatgttggtcaggctggtctcgaactcctgacctcaggtgatcccccccacctcagcttttcaaagtgttgggattacaggcgtgagccactgtgcctgccctcccttaattataatttaaaaaatttttgcagatgtagatttatataaattggcaagccagttctctttatcaaattaactgatcaaaaaaaaaaaaacagattaactggtcaaacatagatttactttctgtcagtaaaattttgacttcatttttttaaatcaaataagcatgttaacccggtattgctgtgacaacctttatcctaatttcttttcttcttcttcttcttcttcttcttcttcttcttcttttttttttttgaaatggagtcgtgctctgtcacccaggctggagtgcagtggcacaatctcggctcactgcaacctccacctcccaggttcaagcaattcttctgcctcagcctcccgagtaactgggactacaggcatgcaccaccacgcctggctaatttttgtatttttagtagagatggggtttcaccgtgttggccaggctggtctcgaactcctgacctcaggtgattcgcccaccttggcctcccaaagtgctgggattacaggcatgagccatcgcacccagcttttttatcccaatttcaagatgggtgggcaggtaggtaggtaggcaggtgggtagatagatagggccttcagacttgcctcgcattcatcttttacataaaataagacagtttcaccttgaacacttctgtggtgagactgtttagtcttgtagctctaaactccagccatactctgatgactcccacatttataaatcccagatttgtatactcaactacttatctaacaggtcaaaactgaactcttaaaattcttacatttgtgtccacacatgattggctaagctaatggggctcagatttaccctgtcacctgaaacaactgtaaaactggagaaaatatgtcaaactctgaagttattaggtctaaggtgattaagaacagcgaatcctgagacctgagaaatagagccctatgattgctctgatttaatgctcggagaaagtttccagaccgcggtgcggggagaaggaacatcagcaggccccagcagtctctcctcattgaagaggtaaaatgaaaatccagggcagctggggcagctagagttcacaggcagagaaacaaagaggcaagagatgcacagagaagagaacactggcctgcagatgcccagggagcccactcgagtattcggttgagtactgatcagtgcacccatgtgaggaaaccccttagttcagggaaggagccactcaaaaggattagagagaaccatttacggagttcacacagggccagaaatagttcctgttcccagtagcagagtagaacatttcatgattcaggggtattgattggagtactaagaagagttgtattagtgaaggttcttgagagagagagagagagagagagagagagagagagtgtgtgtgtgtgtgtgtgtgtgtgcacgtgtgaagaaatttattgtaaggaattgccacgtgattatggaggctgataagtcccaaaaatctgcagggcgagtcagcaagatggagacttaggagagccaatgatgtggctatagtccaaaggctgacaggctcaagacccaggcagagccaatgtttcagttcaagtccaaaggcaggaaaaaagttgatgtcccagttcgaaggcagttaggctggaagaattctcttttactcaggaaagggtcagattttttgttcaattcaggcctttaacagattgaatggggctcacccacattagggaggccaagctgctttacgcattttgccagactaacgtttgaccaaagatctgagcacgtatggcccagtcaagttgacacataatgttaatcatcacaaaagtcttgcctcaatagttgggaaaaattaatcctagaataaatgctattctggtcttgcttagcaaaggttaagagcaagaccaaaaagatcaaaccttttccaaacaaaagctgaagaatatttttagggatacaaaaccatctaggaccgagtgtggtaaaatgcacaatgtttaccagccattccagaattactaggtatgagcagaagtagtaacatacaaccaataactgaccagaaatgagacagattatataagtagtacattacagacattagtcattataattgtattccatgtgttcagtaagctaaagaaaagatttaatatgttaagtaaagacatgaaagatgatggctgggcatggtgcctcacgcctgtaatgccagcactttgggaggccaaggtaggtggatcacctgaggtcaggagttcaagaccagcctagccaacatggtgaaaccccacctctactaaaaatacaaaaattagctgggtgtggtagcgtgcacctataatcccaactatacgggaggctgaggcaggagaatcacttgaacctgggaggcagaggttgcagtaagccaagatcgtaccactgcactccaacctgggcgagagagcaagattccgtctccacaaaaaagaaagatacagagatgaaaaatacactgaagactgtcagaataaacattgcacaagtaaagatttgtgattttgaagacttaaccatagaaactatccaaaatgaagcagaaaaaaaaaagaaaccctgaaaaaaatacatgaacacaacatcagtaaagtgagggacaacatcaggtagccaaatgtgtgtggaattggagtccctgaaggaagggagggtatgagggaccaaaaaatatatatagagagagaaaaaaaaatggctgaaaaatttccaagtgtaatgaaagcagtaaacacacagatccaagaatttcaaggaactccaagcacaggaaacatgaagaaaaactatatactaaggcacatcttaagcaaattgcttaaaaccatggtttaaaatggccaaagaaaaagatacattatatacttaagatcagggtgacaccagatttctcattggaaacaatgtaagccaggttaacagtggaacaatacatttaaagcaaagaaagaaaacagttgtctacctagaattcttttctcagtgaaaatacctttcaaaaatgaaggcaaaataaggtctctttcagactttaaaaaaaaaaaggaagaatttattaccagtagatatgcagtacaagaaatatcaaaggatgtaattaaagcagaaagagaatgataactggtagaaaactggagccaccaggagtcccaggctgcagtgagctatgatcgcaccactgcattccagcctgggtgacagagtgagaccctctgtctaaataaacaaacaaataaaagaaaactggagctataaaaataaatgaagacaatgcaaagggtaactaagtggataaatacataagatattttttctttttgtttcagtctcattaaaagatatgtcttagaggtaattacacattgtagcatttgtaacttacatagaagtaaagtttatgacaatagcagcacaaagactgggagtgggagaacaaatatactcttgtaagctttttacactacatgtgaagttgtataatgtcaattgaaggtagactgtgataagttaaagatgcatatgataaaatctatagtagcagagttatagctaatgagccaacaacaataaaaagttgggatataatcccaacactttgggaggccgaggtgggtggatcatgaggtcaggagttcgagaccagcctgaccaacagggtgaaactttgtctctactaaaaatacaaaaattagccgggcatggtggtggcacctgcccgtaatctcagctactcgggaggctgaggcaggagaatcacttgaacccaggaggcagaggttgcagtgagcggagatagtgctactgcactgtagtctgagcgacagagtgagactccgtctcaaaaaaaaaaaaaaaaaaaaaaaaaagttgggataaatatctttaaataatccaaaagatggcagaaaaaaaaactaaacaggaaaagcaaacagagcagatgggacaaatatgaaacaaagagcaagatggtaggttaaaattcatatcaataattaattcaccattaagggccaggcagagtggctcatgcctgtaatcccagcattttgggaggtggattaggaggatcacttgaagccaggagtttgagaccagctttggaagccaagtgagactccatctctacaaaaaaaaaaaaaaaaaaaaaaattagccaggtgtggtggtgtagttccactcaggaggctacggtgggaggatcacttgagcccaggagtttgaggctacagtgagctctgatcacaccactgcactcctccagcctgggtgacagcgagattccatcttaaaaaaaaaaaatcctcattaaaagcagacattgtgagattggataaaaaagcaagacctatttatatttatatgctgtctacagttatcccactttgaatataaaaatacaaatacgttaaaagcaaaagagtggaaaaagatgttaatatgttaacattaatgaaaagaaaaccttagtggcatattaaacaaactatattttaaaatgaatgtcaccaaggataaaggagaattatttcataataataaagagatacattcatcaagacataattctaaatgtttatgcatgtattaacagagattcaaaatacaaacttttcaaggagaaataaatctgtaattatagttgaaggtttaacaactctctcacaaaaactgatagaacaagtagacaaaaatcagtgaggatatagaagatttggacaatataatcaactgacttgacttaattgatgttcagtagaacattcgacccctaaacagcagaatacacgttcttttcaagtgcatatggaactgtttccaagacaaatcattttctgggccattttaaaagcctcagtagacccggcggggtggctcacgcctgtaatcccagcactttgggaggccaaggcgggcggatcacctgaggtcaggagttcgagacaagcctggccaacgtggtgaaaccccgtctctacgaaaaataccaaaaattagctgtgtgtagtggtggatacctgtaatcccagctactcaggaggctgaggcaggagaatcacttgaacccgggaggcagaggttgcagtgagccgagattgcactactgcactccagctgggcaacagtgagactccgtctcgaaaaaaacaaacaaacaaaagcctcagtgaatgtaagctgattcaatttgtagaaagtatgatctctggccaggtgcggtggctcacgcctgtaatcccagcactttgggaggctgaggcgggcggatcacgaggtcaggagatcaagaccatcctggctaacatggtgaaaccccttctctactaaaaatacaaaaaatcagctgggcatggtggcgctcacctgtagtctcagctactcaggaggctgaggcaggagaatcacttgaacccgggaggatgaggttgcagtgagccgagatggtgtcactgcactccagcctggctgagagagcgagactccatctccaaaaaaaaaaaaaaaaaaaaaaaagaaagtatgatctctggccacaaggaattaaatgaggaattaataacagaaaggtatctggaagatctttcaaatatttggaaaataacataattttaagtaaatcatgggtcaaagaaaatcaacagcgaagtaagtaagtatctggaactgaatgaaggtgaaagtgccacataaaatttgtgtgatggagctaaagggaaatttatatagtgcagatggtccctgacttatgacgtctcaacttacatttttcaattttatgatgggtttttcaggatgtaacccaattttaagttgagcatctgtatcagaaaagaacaaaggtcccaaatcaatgaccttggggtcccacttttagaaattagaaaaaatgaagactagtgaaaccccaattaagcagaagaaaaagccagtgtggccaggcagggaggcccatgcctgtaatcccagcactttgggaggctgaggcgggcagatcacaaggtcaggagattgagatcatcccggccaacatggtgaaaccccgtctctactaaccatacaaaaattagctgggcgtggtggcgcttgcctgtgtaatcccagctactcaggaggctgaggcaggagaatcgctttaaccagggagtcggaggttgcagtgaaccgagatcgcgccattgcactccaccctagcgacagaacgagactccgtctcaaaaaaaaaagaaagaaagaaagaaaaagaaaaggccagtctggaaatcaatgaaacagaaaaccagtacagaaatcatgaaaccaaaagctagttatttgagagagcaatgaaactcataaacctctacccagactgatcaggggaaaaaagggaagacaataactgtaatatcagcagtgaaagagatgacatcacacagattctaaagatattgaaagtgtaataactgaatattgatcagcaatctagaagaaacagattccttgaatgacacaaactaccaaagttcactcaagaagtaaccatctgccgggcgcagtggcttacgcctgtaatcccagcactttggtaggccgaggtgggcggatcacgaggtcaggagaccgagaccatccttgctaacacggtgaaaccccgtctccactaaaaatacaaaaaattctccgggcgtggtggcgggcgcctgtagtcccagctactcaggaggctgaggcaggagaatggcttgaacctgggaggcggagcttgcagtgagccgagattgcaccactgcactccagcctgggtgacagagccagactctgtctcaaaaaaataaaataaaataaaaataaagtttagtaaaataaaaaaaatcagtaaaatacaaataaaatttagtaaaaataaagctgattctaaaatgcatgtgcaacagaggatctagagtagccaaaataagctcctctgtctgacttaaagtcttaattaaaataatcagacaggccgggcatggtggctcacgcctgtaatcccagcactttgggaggctgaggcaggtggatcacctgaggtcaggagttacaaaccagcctggccaacatggtgaaaccccatctctactaaaagtacaaaaattagtcaggcgtgatagcacacgcctgtaatcccagctactcaggaggctgaggcaggagaatcgcttgaacccgggaggcggaggttgcagtgagctgagatcatgccaccgcactccagcctgggcgacagagtgagactctcaaaataatgaaataaaaataaaaaactgaacttcatatcttgtccccagatctgatatagtcacttcttcctttgttcagttaaacccagcttcatgtttctgcttgcccagggccaataactttgggatcttccttgactcttctttttctgtcaaaccccgtaccagtctttcaggtaaccgtaacttcagagtctatccaggtcacctctgcttgtccaagcccctgtcatctctcacttggatgatttcattagcctcttggccaggatccctgcttctgctggtatttccttagtttcttctccctacagcagccagagctaatcattttaaatgtcatatttctgtctcgcctcagctgcaaaccttccagtaccttcccagctccttctaaataaacaccagaggccgggtgcagtggcttatgcctgtaatcccagcactttgggaggccaaggtgggcagatcacctgaggtcaggagttcgagaccagcctggccaacatggtgaaaccccctccctactaaaaatacaaaaattagctgggcgtgatggcgcctgtaatcccagctacttgggaggctgaggcaagagaatcgcctgaacccaggaggtggaggttgcagtgagccaagactgcgccactgcactccagcctgggcaacaagagtgagactctgtctcaaaaaatataaataaataaacaaacaagcaccagagccctggcagtcacctgtgaggcttcaccccgtctccccacccactataacctctgacttacctccttttacactccttcttgctgactctgttccttccacattggcctctttgctcttgcttgaatgatccccagtcatcctccctgcccagggcctttgcacttgctgttctctgccaggaaggtgcttcctccgtagttcactcttcacctcctttgggtctttgctcagttgtcatcttcagtgatggctcttctgatcaccttatttaatttttattttttaattaaaaattttttttgtggagatgtcttgctatgttgcccaggcttatctcaaactcctggactcaaacgatcctcctgcctcagcttcccaaagtgctgggattacaggtgtgagctaccacacccggccccgatcaccttatttaaaattgcagctcccagcccccaaccccagcatacccattcctcttttttttttttgagacagaatcttgctctgtctcaaattccctccagccatgagccctgaaatgaaacaagttatctatttccaaaacacaacagtggggcaggcataggatagacattcccattccaaaagggagcaataggcaagaagaaaggggtagctggtcccaagtaagtccaaaacctgagacagagtcttgctctatcgcccaggctggactgcagagtggtgcgatctcagctcactacaacctccgcctcccgggttcaagcgattctcctgcctcagcctcccaagtagctgggattagaggcatgcaccaccacacctggctaatttttgtagttttagtagaggcagggattcaccatcttggccaggctggtctcaaactcctgaacctcaggtgattccccccgccttggcctcccaaagtgctgggattacaggcgtgagccaccgcctggtctccctcattccttttgttatcagtcatccctcccagccctggcaactgctgctcactttcctgaccttagaattttgcttattacagaatgtcatataagtagaattataaagtatctaagcttttaagtcctaatgcatttaagatctgtaaaaagtaaagtagaggttcctcttcaaagactttcctccccatctaattaggaataaatagtaacttctcttagaagaaaaatttattcaaagacctgtgctaacattcttaaatatctgctagccataataaagaaatcaatgtactttatattcttagctctcacaatttagcctaaatatttgccctggcatgcttatactggtccaagcaagcattaggtcatggcctgttcctcttccttatttgaaggtgtttttacctttctcagcactccacaagttacttcctccttcctttgttctcctctgcctttgcctcttttaaaaagttctaagttcctagccaatcaggacaaatacagaatgtgaggtcctgttccagccaatggaaactggacacagcagtagggtggacgcgtcaggttgtaaatgaccctgtctcctttgttcagtgtactctcatggcaaaactgctggtgagtgtaccctttctgcagaaagtaaaaaatggccttgctgaggaaattaaatttatgttcaagtgctttttcttcagggcaccagggaacaagcatttctaacagatccatatgtgtcgctgcatgtaatcagtggttcattcctttctattgctgagtagtgttccattgtatggatgtacccgtgtattgatccatccatccactgaaggatatttgagttgtttccagtttttttgtgattatgaataaagccactgtaagcattcacatagaggctttggtgtggacataagttttcatttctcttcggtaaataattaggagtagaattgctaggtcgtaggataagtatatgcttaacttaggagaccctgccacagtattttacaaagtaagggtgctattttgcattactaccagcagttcacaccatatgtattcacaccagttgctccatttggtcttcgttctgtgacttgtctctattctcttaacagtatctttagaacagcagaagtttttgattttgatgaaattcagtttatcgggccaggctgggtggcttatgcctataatcccagcactttgagagaccgaggagggtggatcacttgaggccaggagattgagaccagcttggccaacatggcgaaaccctgtctctactaaaaatataaaaattagccatacatcgtggcgcatgcctgtagttccagctactcaggagtctgaggcaggagaatcacttgaaccctggaggaagaggttgcagtgagctgagatcatactgctgcactccagcctgggcaacagagcaaaactccatttcaaaaaaaaataaaataaaatttcagtttatcagtgatttctcttaagtttcatgcattgggtattgtagctaagaaatcttcacctaactcaagtttacaaagattcttctgttttttttctagaagatttataagttttaatttaacttttaggcttataattcatttcacattaaatggtgtatgtggtgccaggtattgctcgagagtcatcatcttgcataggggtttcggatgttctagcaccatttgttcaacagatagcctcttttcattaaattgccctttcacctttgtggaagatcaattcagcatgcatgtatgggtcacttgtatgtttttaattgatttctaaattctgaaaggaaaatgataaaaaggaagattctttcactatatctgcatttccaatttctcccccaagaacgctttcctaacacctgcaggcagaactaaccactctgggcccctgtagctgttgtgcgtatgtttattattgagtttttctggcctttgcagttctttcagtgtctgattctccctctctctcagcttctttctcaagactgtgcatccttggaggtcagaaattgtctcatcctgccgggcgcgatggctcatgcctctaatcccagcactttgggaggccgaggcggttagatcacaaggtcaggagttcgagaccagcctggccaacatagtgaaaccctgtctctattaaaaatacaaaaattagctgagcgtggtggcacatgcctgtagtcccagctactcgggaggctgaggcaggagaatcgcttgaacccaggaggcggggaggttgtagtgagctgagattgtgccactgcactccagcctgggcaacagagcgagactccatctcaaaaataaataaataaataaaagacaaaataaattttctcatccttttttgtcatcttcatcacagctggctctctaatgttcgttgaatgaaagggccattcccaaatctctgataagtcaagcatttttaggagagctaaaccagccaaatgagaccaggaagtgaagaaaaatacctttttttttttttttttttttttggagacggagcctcactttgtcacccaggccggagtgcagtggcacgatctgagctcactgcaacctccgcctcccaggttcaagcaattctattgcctcagcctccccagtagctgggactacgggcacacaccaccatgcccggctactttttttttgtatttttagtagagatggagtttcaccgtgctggccaggctggtgtcaaactcctgacctcgtgatccgcccgcctcagccttccaaagtgctgggattacacgcgtgagccaccgcgcccagctgaaaaatacctactttttttttttttttacagcaggaggtgtttctgcttctactttgctgtgacttctgtttctccaggcattcctggtatggacatttataccaggtgttttggtcattggtgggctctcagcttcagaggacacttggcttctctataccctatctttggtgacttctgcttgttggacttcagtcactgcagttcacaagtttcacactcatgaaatatttattgttaattaattccaatatttaattgattgcttctctttctcagcactttggaaacatgtttactacctagacattttcctacagtagatttttaattcttaacattttgatcttaagcaatttaccatgatacttggtttccatgagagatttaacagttggaactgtactgcccataagatgcaggtggggtcatggtatgtagttgggaactctacaaatggcagcccttcatgcctttgcaaaggctgcaggttggaaagctgccattacttgtgagggcgtccaaatgcttcctgtgaatggaagatgtgtttctgtgcctcactgtcttcactgtgctggattgctggctttctcagatgtctttatttgagtcaacctgtattccatctccccactcccacccagtcttgatcatctcatttgtgtgtatacaaccttcccctcacacacacctctttgcagagtttcgttgcactgggcgttgggaggagaggcgtcagagttgggtggaatcatttcaggctgactgtccagacatagctctcattagaagcatcagtaaataagctgaaaaccaacaacacgtacagcacagtctttctgtgtttgcagcttggaactgagcagccctcactgggtgcatttctaatcctttgtctcatcatttatatgacatccacttagaaaaaggtgttaaaatcatataacatattgctttttccccttttttattagcagttttactgaggtgtaatttatatgccataaaatttaccatttgaatgttcaattcaatgatttctactaaatttatagagtgtgcaccataaccacaatccagttttattttttatttttttttcgagacagagtctcactctgtcactcaagctggagtgcagtggtgcaatctcggctcactgcagcctccacctcccgggttcaagcgattctcctgcctcagcctcccgagtatctgggactacaggcacgtgccaccatgcccagctaagttttttgtattcttagtagagatagggtttcaccatgttagccaggatggtctcgatctcctgacctcatgatccgccagcctcagcctcccaaagtgctgggattacaggcgtgagccaccgcacctggccccacaatccagttttagaacatttccagcatccccaaaagatcccttttgtccctttgcagcagtcctacccccacttccagccccaggcgaccattcatttgctttttctatagatttgtcttttccgtacgtttcatgtaaatgaagttttatacaatatatgaccttttgtgactgttttttttcccagcatgtttttgaggtttatctgtattatagcacgtctcagtactttgttccctttttatcactgagtattattccattgtacggacatacatttttctctattcactagttggtgaacatttggattgtttccagttttggtcatcattaacaatgctactatatatatccatgtataagtctttgtgtggatatacattttcatttctctagggtagatttctagaagtaaaattgctgagtctttttttttttttttgagatggagttttgctcttgttgcctgggctggagtgcaatggcataatcttggctcactgcaacttccgcctccctggttcaagtgattctcctgcctcagcctcccgggtagctgggattacaggcatgtgctaccacacctggctattattattattattattttttttttttttgagacagagtctcgctctgtcacccaggctggagtgcagtgcgcgatctcagctcactgcaagctctgcctcccgggttcatgccattctcccgcctcagcctcccaagtactgggactacaggcacccgccaccacccccggctaattttttgtatttttagtagagacgaggtttcactgtgttagccgggatgctctcactctcctgacctcgtgatctgcctgcctcggcctcccaaagtgctggcattacaggcgtgagccaccatgcctggcaaattttgtatttttagtagagacgaggtttcaccatgttgatcaggctggtctcaaactcctgacctcaggtgatccacccaccttggcctcccaaagtgttgggattacaggcgtgagccaccacgaccggtcaaattgctgtcttatagtaagtttatgtttaactttttaagaaactgccaaactatttcctaaagtgactgtaccatttacattcccaccagcaatgtgtgagtgttccagtttttccatgtccttgccaatagttggttttgtctgcctacctatccccgcccctgcttttttttttttttttttttttttaagagacagggtcttgctgtgttgttcaggctggcctcaaactcctgggctcaagtgctcctccctagtagctgggactataggcacacaccagtgtaccaggggttgtctgtcttttgattatagctattggaatgggtgtgaagcagcatctcgtgattttagtttccatttcttgaatgactaatgatactgaacatctttttatgtgcttattagccatttgtatttcatctttggtgacctgtcaattcaaatcttttgcctatttttttttattaagtttgtgcactgtcttattatcgagtggtaagagttctctgtattgtgggtacaagttcttttttttttcgagatggagtctcgctctgtcacccagggtggagtacagtggcacgatctcagctcactacaacctctgcctcctgggttcaagcgattcttctgcctcagcatcccaagtagctgggactacaggcttgcaccaccacacccagctaatttttgaatttttagtagagacgggatttcaccatcttggccagacgggtctcaaactactgacctcgtgatcctcccacctcggcctcccaaagtgctgggattacaggtgtgagccaccgtgcccggccttccaagttctttatcaggtatatgatagcacatgtagctttttatcttccttacaccagtgcaagtttatagaaaggaaaagggatagttaatagtaatcataataatgtttaatatttgaatgttttttaggagctggacactgggctgcatgtttcacggggatgatttgggtcactcttcaattttctaaaggttacaggactgtttcaaacacctctccttctattaacagttttcaatggagaaagaaaacaaaagattgatttggggaattcttaggttaatgcgagttagaactgaccttttaacattattaccataaggactaaatggctgttacagacccaaaataggagcaattcaaacaagcgagatgcttctctctgtaacaggctgacagtcgcggtcctggaggggcacgatggctcctcagggtcagacacctcctgtcccttactctgtaaggcacagcttctacctcaggatccaaaatgcccacgccagctgccatggcccctcacaggcagtggacaccagaaagaggagagggagtgcgtgcctgttgctttgaagaacctgacccagaagtcttacacagcacttttgcccacataccatcacttagtcatgtggtagtgcctggccacaagagagactgggaaatggagtctttattctggggtgatgtgtcccatctgcaactgaggggttaaggcctaaaacttagggattgaaggcaggagaaaaaacagatgtcgagagccagtgttgggattgcagggtcctgtgtgggattcctgttcattttcatcaaagaaagtctagttgatatgcaattgttggcctaagtgttattgaggagttaattttactgttgaattacaccagaacatttgtcatgtgaaataactataaatacgactgattattgcctagtgtattacagttctctccagagacacaggaaacaatagggtctgtctatcggaatagatatcctaaaagtgtatcttttgaagagattgattataaggtattggctcatgagatgatggagcttaagaagtcccacagtctgctctctgccagatggagacccaggaaagctgctggtgtagtttgaaggcctgagagctgagggccagtgatgtggattccagtctgaaggtctgagaacccagagggctgagggcaggagaagatccatgtcccagctcaagcaggcagagggagggtaaatccaaccttcctttttctgtttttttgttctaatcaggccctcaacggactggaggatgcccagccaaagtggggagggccatctgcttaggcagttcaccaattcaaatgctagtctcttctagaaacaccctcacagacacacctggaaataatgtttaagatctgggcatcctgggggtctagtcaagctgacacatacatttaaccaccacacttagggaatatgaaaataacttagacattaaatttgattttggtgttgctgtaaagaatacagatcttaggcaccagctcgtaggaggggtggtaaacaaggaggacagcttttaccaggttgcctttggaagcaaaactctgctttgctgttttgttttcaagcggctgcatggccactgagcgagccctttcctgccatcaccacagtgccacttagtgaacagtttctccaaggttaactgtagctgctcttgttcagttaatatgtagttctggattaatatgccacatctgtcactttaaggaagaaaaagagcagttccgtttagagatcccattgctcctctaaggacagcagtcatttctaacaagcagagggaagaaatcttctggttccatttgtcctttgtgtgtgttgaaaaccttgacaacaaaacaaattggtactgaatggtttgaagaaataaacattaactcccctttagtatttcatttctagggtttccagccttggtaacaattaccaagaactttgctgtcatggggtacagctctaggctgctgacaggatcttcatactggaggagactatacttttatagccaattccaactgccccagagataacttggataaacactggctcctccactacctcctaatccctgctgggttttacactgtggggaggtttagacaacttgttttctttcccttttagcccttctctctacactcccctccagctgccttcttcccccacccccaaatgtaacgtgatctcctaggcctgctctgctgcttttgcagattcttttagtcttagagaaagagaggaaaacattaaccattggtttaccaattcaaagttaacaacattttaaacaaaaggagcttgtcaataaccagggcttgggcttttcttttatcagttcctcctacttggctgagtttacctcatcataaatcttatcacacagataataatttgacagctttagggtttttgcagcattgctattttctattgcaacaaagctgtaacattgctatttttgatgtatttgttttatagatatcttaatcttcaatattcagattaaaaacaaacaagacttagtgatttaaaattatttggtaaaaaggtaaagggacagagacatctcatgaaaacatggcaaaatctctttaagtttaattcaagcacttagagtttaataagaatatcccaaaccatttttgcttaataatatttctgtttataattaaaccttaaggtacagtgttgtaactggatttaagaatttagagttttgttgtttcttcgccatcagcgaaattaagatttaaaacctatagtttgcaacaaattttagtttttcagcctagtgtcctaaaacttgtctgtcatgggtacctagtaggtgtcatgtcacaggaaagggatctaacaagggagtttgaagataggggttttccttgctctgccactaacttgctatgtgacctagggcaagttatataacctatctgtgtcacagttgtctgaaatgcaatatggggaaaataaattcttaaaatgacaataaaaagatttctttttttttttgagacagagtcggcgcaatttcggctcactgcaacctccacctcctgggttcaggcgattctcctgtctgagcctcctgagtagctgggattacaggcacacaccaccacgcccagcaaatttttgtgtattttgtagagatggggtttcgccatgttggccaggctggtctcaaactcttgagctcaaacgatctacctgccttggcctcccaaagtgctgggattacaggcatgagccaccacgcctggccaaaatatatatatacatattttaagtgaagatgtgtaaggactaaaggagcccaaaggagacagtaggggataagaaaggcaaagagagtggtaatagatttagcagaatcaaggatgccaaaacctcttctgagagagaccttgattaagagtgagctggtttgcctgtaagaatctgcggaaaggtcagaaattagagacattagtaccacagaaagcaggggatgaggcctgaagctgaaatcaaggggatcaattgagagcctataaaaggagggtttagattcttcaaacccctcccaaccccacagagtcagatgaccacctctcctaaccacctacaggagaccagaggcattatattgagaaatgcccggccgggcgcggtggctcacgcctgtaatcccagcactttgggaggccgaggcgggcggatcacaaggtcaggagatcgagaccatcctggctaatgtggtgaaacaccatctctactaaaaatacaaaaaattagccgggcgtggtggcgggcgcctgtagtcccagctactcaggaggctgaggcaggagaatggcgtgaaccctgaaggcggagcttgcagtgagccgagatggcgccactgcactccagcctgggcaacagagcaagactccgcctcagaaaaaaaaaagaaaagaaatgccccgtagaggctctgcactcagaagcctgacccccagcatgggtccgggtaggccattggccgaaaatagtggagtgggcaaagagcagattttttaaaagtctgcatactgaatagtaagattcccagccctcttctaatacctgctagccaggggcctaataaggaagagattgaaatattcttttctagggggaaaaagttgaatgaccctagagaaaagccctacagataccaacatttagggattctcttgaaaaagcgagtttaccatctcctttcactgaagcttaccagtggctgtgccccttccacgcatacaaaactaacagtcatcttttagttgctcattcatagagagtgagtggcctgccaaatctctctaggcattagaggaaggtctctaacctgatattaatagataaagggtaaaacaaatagcagaaaacaggaacttggtggaaataaagacaatgcagtcaacagaggaagagtttaaaagaactattcagcttgggcaccatgactcacgcctgtaatcccaacactttgggaggctgaggtggacagttcacctgcggtcaggagtttgagaccagcttggccaacatagtgaaaccccatctccactaaaaatacaaaaattaactgaacatggtggcaggcacctgtaatcccagctattgggaggctgaggcaggagaattgcttgaacctgggaggcatagcttgcagtgagccaagattgcaccactgcattccagcctgggtgacagagtgagactctgtctcaaaaataataaataaataaataaataaataaataaataaataaagctatgcatttcccacaaatactgcttaaaaaaaaaaagaactattctttgctatccttggagagagagattgcaaatgtcagaaaacaggatgcttttaaaaacaataacaatcagaataagaataaaaatgaattatttttcttttatttatttatttatttatttttgatacatggtctctgtcacccaggctggagtgcagtggcaagatcacagctcactgcagccccaacctgcctcagccccccaagcaactgggactacaggcacgcaccaccacacctggctaatttttaaattttttgtagagagatggggtctcactatgttgcccaggctggtcttgaactcctgggctcaagtgatcctcctgcctcagcctcccaaagggctgggattatgggcatgagccaccacaacccagcaagaatgaattgtttaatattaaaaacattatagcccaaatttaaaatccaacagaagatgtggaaaattgtctcagaatgtattgggttggtacaaaagtaattggggcttttgccattttaatgacaaaaacgttgattacttttacaccaacctaatagaacataaagacaaagacatggactgttgagagaacaataagagagaacaggtaagaaaattagaaactctcgggaggctgagacaggataatcgcttgaacccaggaggcagaagttgtagtgagccgagactgtgccattgcactcctgcctgggcaagcaacaagagtgaaactgcgtctcaaaaaaaaagaaaagaaaattagaaactcaatcccagggctttaatatcctttttgtaggaattccagaaagaaaacaaaaaaataatgataataacgaagaaacaaatggaggagaagttaggagacgttaaatgtaaggaaaaatttcagagtttagtgaagtgagtattttccaaaacagaattatataaatctctggatttatgagtgcccagaataatatatgaaaggccatatcattgtgaaagttcagaacaccaagaatattagaagatcctaaaagtttccaaagagaaaaaaagcaagtcattttaaggggtcaggaaccagaatgggattgcatctctaaacaatacttactggaaactagatagtagcagataaataaatgccttcaaagttcatttgggaaaattattttcaacctagaattctatacccagacaaactgtcaagatagaagaaaggtatttttttagacatgcaccctccctccccacctctgtgaagctactggatgatgaattccagcaaaatgaagaagtcagtcaataagtagaactgagcccgggcacggtggctcacacctgtaatcgcagcactttgggaggccgaggcgggcagatcacgaggtcaggagattgagaccatcctggtgtaacacagtgaaaccccgtctctactaaaaatacaaaaaaattagcagggcgtggtggcgggcccctgtagtccgagctactcgggaggctgaggcaggagaatggcgtggtgaacccgggaggcggagcttgcagtgggcggagatcgcgccactgcactcccgcctgggtgacagagcgagactacgtctcaaaaaaaaaaaaaaaaaaaagtacaactgagaatatttgaaatgttttagtgattggaaaaaatatcactagatgtttgacagatctttgaagtatttgagggaaaatggtgataggtatatagaagactaaatgaaaacaaggcaatatctctaggataaacaaagatgtataataaaggaaacattcatagtatattattggctaagcagtgaagaatatttatatcatcctaataatgtaaacactaactattgatttatcccccaaattgtgattttattgttttggggggttatggatggtgatagtataatactgctgtcataagttaatagataatggataaatctaatgaattcagaaagagcaagatgatgttactagctaaaaatctgaaggaggctgtctctgcggaaacatacaggggaaagggattgctgttttttattaccagatttttacaagactatttttagccttttttacaagacttttagtactgcttgagttttaaccatgttatgtatattactttgattaaaaagaaaaattaatttaaaaaaatgagcatactaataccattaattttctccttctagagaaaaatgtttaacagttaggtttagacttgttaattataaaaatatagtagtcttactgtaatgagattttctagaaagcggatttactctaaggcagttcagatttggtccccagctgagaattatagcctggaaataccaacagaaaaatcagtgtcatttgaaggacagtcatctgtgcagcctgtgcatgaaatcatgggtctgaattaggcccccattcaagatgcgggggtgtggggtttgtgttttgctgaagctgtggttgcaaatctttgctttaggatgaaaggtggggctctctgttacatttgaaccttagttgctactcctacctcacagctagtgtttctttctcttcataaaataaattgatttcctggtcccttggaaaacctccagactgctttctggaatcattttcatatagcatgtttgttaatttgagctcttgactgagtcccagtgagatgtaggcaggaacacagacctgatacagaaatagtcctcttttggaaataacaatagctactgtttatcgagcaccttctgtgctttgggcactctccctacatgattcctaatcttcataataaccctgtgagataactactcttatgactacctcccatttttcagatgagaaaattgaggctctgagaggtgaagtcgttgcccatggccccccagtgagtggcagatctgagactcagcgctagcctttgtgacacataactcgtgaccagcaggtagtgctacccgattgaaaaaatgtgagacttaaagggatgcatgtgtccctatacagtggcaaaaactggtatgacagaaatgatgttttaagctatgttatcctttagttggacatacactggacccacagagctagagtacctggcaggctcttgctggacaatgtttgctgaatcagagaaagtgggctttgttggcatttgcatgtgaaatactgtgcacatacctcaagatctttgctgttccccccctaaagctactagctatgctggaaacagtgaaggggtcagccagacctggggtcaccttgtcctggggtcccaagccaggcctcctgtcaggttcatctgtctctgttccacctgcactcacacccagtcttgctgctgagagatggagcatccacatcctgaatcctgcctccttcccttgacacacttctatggtgggtgcctgcccaactttttcttaataggactaaattccaaattaaaaaaaaaattcagtctctctcctctaatcatccaagaagagtcctcttttggtaacttgttctagaactatgcctatcttaaattcagaaattgctttcaaatgaattaaattttagaaatatccattcctgttcgtcctattcccagtgaaaataagcaactcttccctcttccaaaacagtggatttcttttctttttttctttttttgaaatgtagtcttgctctgctgcccaggctggagtgcagtggtgcaatcttggcacactgcaacctccacctcccaggttcaagcgattctcctgcctcagcctctcgagtagctgggattacaggtgtgtaccaccatgcctggctaatttttgtatttttagtagagacaggatttccccatgttggccaggctggtctttaactcctgacctcaggtgatcgcccaccttagcctcccaaagtgctgggattacaggcgtgagctactgtgtctggcccccaaacagtggatttccatcttacatatgcatacagatcatctgggagcttcagatccagcccattgcacatattctgattctagactagaaaccaagactccgcattttaagcaagccccacattattcaaaatagattgtccatggattatgcttttagaaacattgttcagatcccatgctttaatgttggggagtttatcctttccttctaaatattttttttttttttgagatggagtctcgctctgttgcccaggctggagtgtggtggtgcgatcactgctcactgcatcctccacctcccaggttcaagcaattctctgcctcagcctcccgagtagctgggattacagatgcccgctaccacgcccagctaatttttttgtacttttagtagagatggggtttcaccatctcaaaaaaaaaaaaaaaatcttaaatagctctagttccctgaattattttctcctaagacatgttttcccaacagttaatgttacttatttcatcttctgatcttactcatattatccacctttcacttaaattggaaattttctgccattttacaaagttcaagactttcctaccttcctacctcctggctgtgtgaacttggacagaatacttccccctctcccttcagtcagttttcttacttgtgaaatggaattaaactatacaaaatcattaggttactgtgaggcttaagagtgcctggcacatattacatgcacattaaaaatgtatttcttcccaaactaatgcaacatagcaaacaagttagttcacagtctttaatttctttccttttccctttctttttagctaatagcttttgggtcttaggctgattagaaggaatccttcttggggtgttcttctggtaagaagattgaagctctcctttatttgcttgtaacagaatgctcttcgtatctttcaaaagcgtcaaaagctggatatggaaagtataggccaggtttgatacagaagtgtagtttggcagttttttcagtatccattgccactaattcagtattttgttagatctgttgatgtacggttttataactaaaattaaaaagatttgggtacagtttataagcattattcattttaagaggatttaagaggataagaccattttagactcgagcagaatattagtaataataattagcttaaaaaaataaacatataccaatataaagaacagcacaaggcaagcaaatatctgggcctatattaacagacggtattcaaggatatggctagaatttccaaaatgcctaataatgtgtaattcttggcattaagccgccaatttgaatatggccctttaatatgaaatgctatataatgacagactttattatagtctgatccaaggcccctgaactttccaaaagggcaacaaaacagacagatactgtattttttcactagttggtactggtggcacccttttgagtgttatttttggcattacgtgtagaggttgacagattcaagacaacactaaacatgttagcagtcaccacacgcaggctgtccagcagaatgacagcgcctcccagatcctagaaagcatccagagtcactgcacccatcccctgggggccctgtagtcctgcatctccagatgatgggagctgcaaacttccctgatggtgccctcttggatgctcatgaggcctgatctggtaccacgactctagcagtaggtccattcaatggcagtaaaaatacatgttgtatgttgatcagaatttggcaggacacatgtggaaagttaatgacatcctggccgagaacccctgtgatatacactggttacatcctgtccaactggagtttttatgtgctgtttttggcagagccaagtgaagatcttgttacttagccattcctgaggtactgaagatacccgggtttttgtcattacaggataggctagaaagtagccagggtctcataaccaaggctttctctgaaacatataatgacaatgctagttatttgaccaaagatatccaatgctttaatccacttggaatttattcttgatgtgaagggtcagcatcatccactggtcgggagcctgatccttggagccaggcagacctgggttgagtccatctccgcctgtttccagctgtgggcaaggtgtctgacttctctgagcatctgtggggtttgtttgtttttaaacctgaagaattgggataatctgtttcctcacagaatcattacgcagatgcaatacagttaatgaaggtaacatggcacataggaagagcacaatacacgtcagctcttactcttcatggctagaagatgtggactaaacttccccctttacagttttgtgattaacaccatttatgaaagaaataaatgaaataaattccttttcctgtcatgaggggaacttacctgattttattgaattatttggtgccattgagttccttattgtttccctctgacctagatttctgggtgtgcgccagtaacacgactgtgattgttgctgctttataacattgtctgtggtcagtccaaacaagagtttaaaataattgaatgaaatggattttaaacaatggtccccccaccctcaccccgtggcactcggccaaaggaagaggaaaagttctctgttaaagaaaatgaatcagagaagaggcccagaccgtgcctccgaaaattctcattgtagggactaagtcctctcactctgaactcacacccgtctgttcgcagcctcacctcatatcctggtctggatgtgcggcctcaccggggtgtcgtgcgcacgtgtggttgtcctgtgggtgccagctctgacttcctccccagacacccactgcctcagccttaatcacaggacgcgcgttgagtagaaatgagaccagttagtattggtaactgcagaggaatttgcattttcaccagcgttctcgggtcagagggtttgcctggcaccgcgtactgggaaactcgccaaaagcggtgcaggttggagacgccccaggccgcggtggagttgcgcgcggcttctaaagtggagtggagcaggcctgcaccctccccgccggggctgggacggcgcttccaggcggagaaagacctccgcgggccgcgcgcggccttccccctgcgaggatcgccattggcccgggttggctttggaaagcggcggtggctttgggccgggctcggcctcgggaacgccaggggcccctgggtgcggacgggcgcggccaggagggggttaaggcgcaggcggcggcggggcgggggcgggcctggcgggcgccctctccgggccctttgttaacaggcgcgtcccggccaggcggagacgcggccgcggccatgggcgggcgcgggcgcgcggggcggcggtgagggcggctggcggggccgggggcgccgggggggcgcgcgggccgagccgggcctgagccgggcccgcggaccgagctgggagaggggttccggcccccgacgtgctggcgcgggaaaatgttggagatctgcctgaagctggtgggctgcaaatccaagaaggggctgtcctcgtcctccagctgttatctggaaggtaagcccgggccgcacgggttgggctgagtagccgcgcgccctcccgctgctgctgggcccttcctaggcctcgccgcccgcgcgctcccgcctgcgccctccccgggtcttgtcttttttttctttcttccctcttctcttctcttctcttcagttctcttatattctgtctctctttctttctctctgtgtctgtctcttttctcttctcttgtctctctctttttctctctctctgtctctttctctttctcgcgatggcccctaggcgccgccggcggagcgtggcccccagccccggcaccagccccggtagagccacgccggatggtgacggcggcgtccgggaccccacagtgcgggctcccccgaaaaagtttgagaaagccaactcgccaggccttaacatccctgggatcccacgttgtggaatttccaccgttaattgggactgtgtgttaaaaagatcgacccgtgtttgtgaaaacatgcgatttccattaagcatcatgtacacaaggagcaccactctaccatttatggatacagaatttcaagtgatctttccatctcccccacccccatcttatctacagaccacgaagaggtcttaggaattcgctctcttttcaggggaggggagcccatttaagaaggcgtttccaaggagtcccccagagtactggggtgtcatgttcgtttccttaagtgaagctcagggccaggagggcttcacttttgcgttctttctacctactctccttctctaattacatctgttttattttatttttctttcctgttgtagtctttagttttataaatggaaaaaaagtaaattaagggttatgggtcttcactttcgtagcttctaggtgggtatgaaattgatctgatttgagactggtgctcccagaccattgccttcagcagaaaggctatctgtgcttcagagatggagttgcacttggacttctctgttgttttcaactaagaatataagagtaaaaatgtggccgggcgcggtggctcaagcctgtaatcccaacactttgggaggccgagacgggtggattatttgaggtcaggatttcgagaccagcctggccaacatggtgaaaccctatttctactaaaaatacaaaaaattagccgggcgtggtggtacacgcctgtaatcccagctactcgggaggctgaggcaggagaattgcttgaacccggcagggggaggttgcagtgagccaagatcgcgccactgcactccagcctgggcgacacagcaagactcggtctcaaaaaaaaaaaaaaaaaaaaaagagtagaaagaaatgtgaagctcactttagatcaagtaggatttctgctagaatgccatgtttttctttttaaaaaagcaggagaaataaacaggcctcatttattttctaacctatttttctttccttaacctctgactctaccctgaaggcctgcttggagtcacatatgcagatcgcactagtgatgtgggtgaaacctgtttgcccttcttgccacagtttgtgtacctcactcctcttctgtctctgggattccagggggctgaatggcccagagaaggctcatctaggtggagtgggctcacagagcctagcatttggagggtggagattgtttatttgtccctaaaagttgatgtctgagcattccaaatcatcttcaattaatacatcgcttattttttccaagttgctcaaaattctgagcacattctcatttacatctgtatcgagttagtgttaggcatcatcatctccactttgcagatgggtgcctaaggcggggatgaatggacttttgtaagtgcagagctggagcaaagtttaggtcacagctttgccaagtcattgttttgttttcctgggagtaaaccggagatttagtatggacctggctggtttaattattgttttgggaaaaaaatctaaaactcattccaacatgtcttgaaatgaattataatgttgactctaaagtctcaaaaaaaaaaaaaagttctagtacagcagactgccttgggttaaaccttcttctaggaaggtgtcactctaggaattctttcttactgagttttcttcttttcgttgttatagttaattagagaaagtaaatggaattatcattttgtagttggtagactttaacaagcctcagcgatagtcttttaaagactggaagtgctatttgtcttttgggaaaaatagttcctaacatctggatgagtaatccaggctttccactttcactgacagcctaaatcagtcaatcagtgtcgatcagtcagtcagtgtttattgacgcccactcagggtcccaggcattccctgtcagggagagaattgaatgagatcaagtttttcattgttctatcaaagaagcttccaccataaatgtggtttgatggtgcatgctacctgctactcagcctagctgtcaaagcaacactggtaaacataaagatggctagcaattattaaatgcttactatgtgccaaatactgttttattactctatgtgatctgatatagttatatttcatgatagcactatgattatttccattttatagatgaggaaactgagtcaccaaaaggttaggtaacttgtctagggtcacagagccagtgagtgggggtactggaatttgaactcatgctatctggcttgggagagcccacttttagccactggatgctctactgatgtctcttttggaattcactgtgattttcaaaatggtatctccagaaactcctccaattaatccctgaaatgtaagggtagtctctttttcttttctagaaacctgatcctggcaaaatgattagctttaacagtaggattaattttttttaaatgtatataaaaatacttgtatgtaagaaatcctaaaagggtatttagtgaaaagtaattccctctcctattcattttccccacctagaggcaatcaccctggagttttatgtgtgtccttctagaaatactgtgtgcacatataagcatttattataacatgtgaattttgctctccagctttttgtgaatatgcatgtttatagcagtatctattcaccaggaccgcatttagctttgcaatattcggtctactttgaacactgaattttctgattatttctttcccctggagacgtcaaagaaaacatgaacactagccttttgaattcagggttttcttttcattttattttcatttgttcatgtgtttgtatttacatacattgtgcctgaatattgtacatgtatgtgacagttgtgtactgtagaatcaaaaactaatgtctgtgaactgaactcttcttgaactttttgttgttgttgttattgttgcttttggagatagggtcttgctctgtcacccaggctggactgcagtggcacaatcacagctcactgcagccttgagctcctggtctcaagcaaccctcccacctcagcctcccaagtagctggggctgcaggcatatgctacctgactaattaaaattttttttttttttttgtagagacagggtctcactatttttactagtttgcccgggccaagccagtgttgaactactggcctcaagtgatcctcccaccttggcctccccaaagtgcatccctacaggcatgagccactgcactcagcctgaactttcgaaatttattttaagggcccacttttaaatgcttcttttcagcagctaactttccagcggatgcttcatgtggtgccagccatacagatacgcttttagaacttgagctttggagaagcttatgcttgctttctgctctctcctgaggtcatcagatacttcccttgttcagtaacaaagaaagtgagactctttctgttacctaataaaaggccagtctgtccatttcattttgggtgctattaacattgttgaccatttacaatgtcacaggccctggcactgagcacatcatgtgcagcctcacttaattttcacaccagtgccctgaggtttctagaaaagaggaagggccccagtttaggtggcagtacttttcaatttggaggcaggagatcccagttttcctctgacctctctgagcttccgtgtttttacctctaagacagagagaccaatctctgttcagccaccttagaggattgttttgagggtctataagatgattgagggaaagctctgaaactggtaagagttaaatgtatgtttgtgttatgttgatacgagattcctctgagatgctctttagtccaggcaggtttatggctcacacagcgttcctagggtctcattcttctgcacaggcaggcagctcccgagccagccagtctggacccaaatgccacctgtgctcttggctggtcttgcgcattcaccgaggctcactgtaccttggtgttcccatttctaaaataaggcctgtagtaatccctacctcactgagttgttgagagacttcatgtaaattgtttagcagggagcctggcacagaacaagagcctagcagaaaagtaagctgttgttactttaagcaaatatttagcagcctaaaatggtggctttaccagtttctgtaatggttgaagtgatgacagaattcagccaatcccacccatagtttttcttgctaataaagcagtttgtttctaagtgtgttttgatgcgtataattaatacttcctgtccttgatttttggctgaaaaatgtcttctcttcctcgcaccctctgttattcccgtagtgaatattttcattgtggaagagaaattcccattggctcatggttggcattttatttctcctgtccagagacaatatttccacagcctcaaacgtgaaaactgaaaatctggtgccacttaccaccttgtaaaatcaagtcattgtaattgtgccagtataatcattgatctgaaataaaagcagaaaataaatcaatgggtagctttcttaaatacataagaactaaagatcaaatgggatattggaagactttaacttttcctccataatggtggatcttaattaaacacacagaagaacaatttataaaataaattcataggtttgtttgttcttttttagtgtcaatttttaaaactatctcttttttaattaaaaaaaatagagatgggtctcactatgtcgcccaggctggtctcaaactcctgggctcaagcaatcctcccacctcagcctcccaaagtgctgggattacaggcatgagccactgcacccagcctaaaactgtctcaaaagtagacagcataatgaactcccatgtacttatgatgtggctttaacaattatcagcttatagtcagtcttgttttcttacataataaagttacagtttcaaagccattaggaagaatagcttgctaattataattacttagttttgatagtgtaactttgtcctcagatgggtagaatcgttactctggaacaggggtgtccaatcttggcttccctgggccacattgggagaaaaattgtcttgggccacacgtaaaacatactaacgatagctgatgagctaaaccaacaaaacaaatcccacaaaaatctcatttctttttttttttgagacaagagtctcactctgtcgcccagactggagtgcagttgcacgatctcagctcactgcaagctccgcctcctgggttcacgccattctcctgcctcagcctccctagtagagggtactacaggcgcccgggggtttcaccatgttagccaggatggtctccatctcctgacctcgtgatccgcccacctcggcctcccaaagccctgggattacaggcgtgagccactgcaccgggccaaaaatcttataatgtttttaagaaagtttgcaaatttgttaggccacattcaaagccgtcctgggccatatgcagcccgtgggccatgggttgaacaagcttgctctagaaattggttttcaggccgggcgcggtggctgacgcctgtaatcccagcactttgggaggccgaggcaggtggtcacctgaggtcaggagttcgagaccagcctggccaacatgctgaaaccctgtctctactaaaaatataaaaaattagccaggcgtagtggggagtgcctgtaatcccagcactttgggaggctgaggtgagtagatcacttgagaccaggagttcaagaccagcctggccaacatggcaaaaccccgtctctactgaaaatgaaaaaaaaaaaaaaaaaaaaaacttagccaggcgcagtggctcacatctgtaatcccagctactcaggaggctgaggcaggagaatcacgtgaacctgggagctggaggttgcagtgagcctagatcgcaccactgcacttcagcctgggcgatggagtgagactccaactcaaaaaaaaaaaaaaaaaaatttcaattggcttctattaaagcttttttatgtttgtcattgttttctagtaataacaacaatccacattttttgtgagaaatataccataatatagagaagtataaagaaaatgtaaggccagacacggtggctcacgccgataatcccagcactttgggaggctgaggcaggcttatcacctgaggtcaggagttcgaaaccagcctggccaacatggtgaaaccccatctctactaaaaatacaaaaaaagtagccgagtgtggtggcgggcacctgtaatcccagctactcaggaggctgaggcaggagaattgcttgaacccggaaggtgaaggttgcagtgagcagagatcacgccattgcactccagcctgagtgtcaagaacgagactccgtctcgagaaaaaaaaaaaagaaaagtaaatttaaagcacttaaaatcccaccaccctgagttaactactgttcacagtttggtgaaattcctcctcgtcttctattttttcatagttgggaccatgcctatatactggaatgtaatataaacacttaatatattattgcgagtatattctcaaacttaaatattttttccaaaaatattttgagtggcttttaaaatatatcctattttatgcatgcagcataaactaacttatcctgtgttgatagatattttgtacttgcccttttctgtgctgttgtttaaaattagtgtatagaaataattgtgttgatcacttaggataaattcctagaggtaaatcagatattaaattctttatagacttctggttcatattccagttgccctcaatttatacacctactactagcattgtatgagagtgcccgtttctctgaaatcttacccacactggctgtcagcgtcaaaaagatgtatctgcagatttggcaaggaatttgcatttcagtgattattatcaagcgttcacacactttccatgtttaatggtaattttttttgtttttttttgagacgatgtctcactctgttgcccaggcagagtgcagtgccgcgaccttggctcactgcaacctctgcctcccaggttcaggtgattctcctgcctcaactccttagcagcttggattacaggcatgcgccaccatgcccggctaatttgtgtatttttagtagagacggggtttcaccatattggccaggttagtctcaaactcctgacctcaagtgattgcccgccttggcctcccgaagtggtgggattacaggtgtgagccaccgcacctggcctttaatgataatgtaaattttttgtgaattgtttattcgtggctttgccccattttttccatagtggagggatttttctttttcttgttggtatgtaaagtccttgtgtgtcaagaatgctctgcctcacagtttttctaatataatgacagtggaagctcgtaactggcttccacttgactgacttgctaaattgaccggcactcttcacttccttataaaacatgcctccatagtccctgtgccccatggcacatgggatggggtagccacactaccactgtctgctgctgcatatgttcctgtccacaagagccagtcatgtttgtttccaagcctggttctttcagatatagctgttgttgtaattacttggttgatatgaaaccaatgaaatgcaagtgtgaaaagagaattgtttctaggaaaattaagatgaatgctttagaaagactcagtaaaggaagataaatttaacaaattactacagaattaggtgtaagacaacagtaaatgattggaatgaattacagaaatctagaaagctttgacagtgggaatgcgtagtgaatggctctaagttctccctccatctgtaggaaattgaagctggaagtgagatgatatattcattatagggaggacttacagaagaaaacatcaagctctaatcacatgtccacatttcgttttgtttacttattttttgaaatggagtctcactctgttgcccaggctggagtgcagtggcatgatctcagcttactacaacctctgcctcctgtgttcaagcgattctcgtgcctcagcatcctgagtagttggggctacaggtgtgcaccaccacgcccaactaatttttatatttttagtagagacggggtttcgctatgttggccagcatggtcttaaactcctgacctcaggtgatctgcctgcctcggcctcccaaagtgctgggataacaggcatgagccaccgcacccagccccacatacctacatttcaaaggacagtctttggccctacagtcaagactaccaaaccaatgtacactaaatgggggtggggatcacgttgttgttttttgtttgtttttgtttgtttgtttgtttgtttgtttttttgagagagtctcgctctgtcacccaggctggagtatagtggcgtgatctcggctccctgcaagctccgcctcccgggttcacgccattctcctgcctcagcctcccgagtagctgggactacaggtgcccgccaccacgcccagctaatttttttgtatttttagtagagacggggcttcaccgtgttagtcaggatggtctcgatctcctgacctcggggatcacatattttaataaaattgataatccctaatagtgatggcgctaggtgtacttttagagccaatgtaaatagtcgagaaagggggccaaacatatgactaagcttcttctacactctaggagatgtcagtattgcaagatcctgttccttgaaattatctttgccccccgccattcagaaaaattaccaaatattgtaataatgtaatttaggacttaccctttcagagaaacagttcctgaaggttgacttcagttagtagtacagaagcgagacttgaagctcttcatggtttatgttctgttggtttatcccaaagagatgttttagagcacattcatttctgaaagttctcggtcatgtttccggaagtttgatcaggtgggttctttttctttttttaaaagataattttttttttaaagataattcagaatcagtcccacccctgagatggtattattacccaggaaagaatgcgtgaggatcctctaaatccatagagaaggaaaactaaaacaattttgttaccatttgtttggctcaagcatctggtagatccttcagttcttttcaaattagaattttcctctctttttcttttttttttttttttttgagatggagtcttactccatttcccaggctggagtacagtggcacaatctcggctcactgcagcctcacctcccgggttcaggcaattctccggcctcagtctcctgagtagctgggattacaggtacccgccactaattttcatatttttgcctggctaatttttgtgtttttagtagagatggggttttgccatgttggccaggctggtctcgaactcctgacctcaggtgatctgcccacctcagcctcccaaaatgctgggattacaggggtgagcctccacgccgggcctctctttttaagataataaaaattactaaacatcataatgacatgatttgggattactctttcagagaaacagttcctaaaggtttacttcagttagtgatttttatttttattatttatttattttttgagatggagtctcactctgtctgccaggctagagtgcagagacgagatctcagctcactgcaacctccgcctcccagactcaagcgattctcctacctcagcctcctgagtagctgggactagtagctggaactacaggcgcccgccaccatgcccggctagttttttctattttagtagtgacggggtttcaccgtgttgcccaggttggttttgaactcctgagctcaggctcaggcaatctgcctgcctcagcctcccaatgttctagggttacaggcatgagctactgtgcctggcccagttagtgatttttaaattgtagttccttaaatgagtattttggatttcactccacaatgttcttcaactgtaagatctacttgaggttatttgatttgctggtttgcaagaactcgtctacacgttgtctttatcacaaagaaattctggagcatttgagccctgttcaaaaaaaaaaggcaagaagaaacttcaggaacaaataacctatttgaccctgtaatgaataatattcacacattttctaatttaagagctgttgattgatttccaacttttagaatctgtttcagacaaaacatggaagtttagtaacagttttttctattctgtaataataattgccacaaggttaaaaaaaaaaatttacagaagaacatatttgagggtggtcgtgggggcaagaaagctggaaggacgggtggggtgtgttaatagccttgtcttgtgaagtaagtcctcagagacgctgtcctagttggaagaacaggcagtgaaggtgtgcgtctgttacggagaataggactccagtgatctagctggtacttagagaggtgggggtgatcaccaaaaaaacagctctgcctctgggagcggagaggactgggatagaaagtatttgtctttcattttaagcccttctgtacgatttgacttttcttttttttttttttttttttttttgagatggagtctcactctgtcacccaggctggagtacagtggcacgatcttggctcactgcaacctccgcctcccaggttcaagcaattctcctgcctcagcctcccaagtagctgggactacaggcacctgccaccatgcccggctgatttttgtatttgtagtaaagacaggatttcactgtgttggtcaggttggtcttgaactcctgacctcatgatccacccccggcttttttttttgacacggagtttctcgttacccaggctggagtgcagtggcgcaatctctgctcactgagacctccacctcctgggttcaagcgattctcctgcctcagcctcctgagtagctgggactacaggtgtgcgtcaccatgcccggctaatttttgtatgtctaatggagacagggtttcaccatgttggtcaagttggtctcaaactcctgaactcaggtgatccacccaccttggcctcccaaagtgctgggattacgggcgtgagccaccatgcccggctaaagcaagaaattttcattgcatattttaagcaaaggcaaatgcatatgtggatagactgttttaatttgactaaagtcatattgaatccatgaattttagaagctcaaactattggggaacaataattaccaccttggagtgaaaatacttaatttccacaagatttagtaaaggaagagttttttaaaaaccaccttaatgataatagtatgtacagatgttaagaaatgaaataggaatgtgtaatgttggaaacacaaatatttttgcttctgagaataaaactaattttttctcccaattttctcttcctttttcttttttctgttcccccctttctcttccagaagcccttcagcggccagtagcatctgactttgagcctcagggtctgagtgaagccgctcgttggaactccaaggaaaaccttctcgctggacccagtgaaaatgaccccaaccttttcgttgcactgtatgattttgtggccagtggagataacactctaagcataactaaaggtaaaagggttgtgggcagctagtggtggttgcaggagatagaaatctgggaattgcggtttgacctaccaccctttgctcgttaaaggagcagctttgaaatctggactgcagggatatccaaaacaacaactgcatgtttctaagggagtcgactctccttagaggagttcttgtacaatagccctgggcaaaaacagaacttgccctattttttatactgaaaaggacagctggacaaaatactgaacgcaatttttcccctaagaaaaagcattatttccctaaaatgtcttatattaggaacagagcacttgaataaacataattgatttataaaaactgaggctatacacttacctatctgttcagtacaaacaggaagcttcaaatgtaaacgtgaattctcatacacttataaatgcatatctttatgtggacttgttaaaatgaaattggtatttaggaatttggagatttttagtagttacacaagaatcaatgaaaaagaacgaagctggtttccaaagctgatatgtctgatttggttcctttcttctcaggtgaaaagctccgggtcttaggctataatcacaatggggaatggtgtgaagcccaaaccaaaaatggccaaggctgggtcccaagcaactacatcacgccagtcaacagtctggagaaacactcctggtaccatgggcctgtgtcccgcaatgccgctgagtatctgctgagcagcgggatcaatggcagcttcttggtgcgtgagagtgagagcagtcctggccagaggtccatctcgctgagatacgaagggagggtgtaccattacaggatcaacactgcttctgatggcaaggtaggggacccttggcagggggcgctgatgggcccagggcaggggaaccagaggtcctgctgtcggattgataaattattgcaagaaagctcaaccaagaagatgtttaaagaatctttcaggtgggagtcattccattagccttatgaagaccctttattgaggatccgttctgtgatattacaagttcctgggactggtatgattctcttattgtcttgctagagttttgttgttagcaagttacttaaaataggaggaatatctgttgggttttggacacattttttacaataagattcttcctttaaaaaaaatattttataatgatagaaatcatccccaacgagaaaaattcaaataatagataacctttcttagagcgaaagaccactttactatcccctcccccacagacgcctggcacgtgggcttcttcctgcggatgaacacattcatggagaggtgtgtggacatacgtgcatacacgcatgcagttttcagtgaaaaccgggatcaaacccacagcttaccaaacccaaagtgtggtgttgtaagggaggtggcctatatgattttgtggtcttcatataaataatccttaagagtccataaagagaagggaggagttaacattgactgaggtattgctataatacctgcatctttgcattaaagaaagggaggcataaagagatcttgcccgatgtcaacctagtgagtcactgatggaataggcttggatcccacagtttattctactgcaccaggctgtagttgaggtacagtgttgataggtggtcccgatggtgtatgtttgtttgtttgtttgtttttgagatggagtcttgccctgtcacccaggctggagtacagtggtgcgatcttggctcactgcaacctctgcttcccatgctcaagtgatcctcccaccttagccttccgagtagttgggaccacaggcgcacaccaccatgcccagctgttttttgtttgtttatttgttttgagatggcattttcgctctcattgcccaagctggagtgcaatggtgcgttctcggcttactgcaacctccacctcccgggttcaagcatttctcctgcctcagccttccaggtagctgggattacaggcatgcaccaccacacccagctaattttgtatttttagtagagacagggtttcaccatgttggtcaggctggtctcaaactcctgacctcaggtgatccacctgcctcagcatcccaaagtgctgggattacaggcgtgagccaccacgcctggccgtttttgtatttccagtagagacagggtctcgccatgtcgcccaggctagtctcaaactattgagctcaagcaatctgccctcctcggcctcccaaaatgctgggattacaggcacgagccactgtgcccagcctatattttttaaatagtatgtaatgcatgcatatggttaaaaaaaatcaaaagaacaaaatgaattacagtaaaaagtaatcgtctcctaattcacttttcctgcccagaggcaagcactggtactagttccttctagagttacctggacacagatggatggtatatagatgtttatgtggatgtttatattcaaaaaggcacgcaaatgatacatgcacgcgaatgcatcatgcttctcccgtgtgataatacaccttcgagattgttttatggcaacaggtttagagctgcctcattcttaccagtgactgtgtaccgtggatggactgtcacttatttcagtagtcccctgctggttgacttttaggttgtttccaatctttagttattgtaaataatgctgatatgaggtggctttcaaaccttttcaaaaatctggttctgctgtaagaaaaactcattttacaccaccacccagccctcacaatataacaaaagtttcatgaagtcttacctacccttactgtatgtaacgcactctgatagtttgtatttcattctgttctatttcattttttaaaaattctggttgtaatccactaaatttatttcatagactgactagtggcccatggcctggtttgaaaatgcgttgcacgtgcttctttatgtgggtgtaagtgtgtgcagataagttgccagaactgactgaaggttatgtgcatcaccaggtcaccctctatagaaattgtacaaatttgttctcccacaaacaatccatgaaagggcttgtttccccttaacccacaccaacagtttattattagacatgtaaaaacacctttgtcactctgactggtaaagaatggcatctcattatgttgaatatccatgtggcatattttgggtcatctttatgccatttagtaaattcatctttttcctacatgttagaaatataccaagtgtatatgtgtatctaggcctgttgacctctctgttctcttccattggtctgtctatccgtatgccagtaccaaacttgtaattgctatggcttcataccatgttgtggtatctgataggctagtccccacttacctttttaactttttttttttttggctgtcttcacacattcacttgtaccatatgaacatacatatacttcctttttaatgttcttatttttcttcacatcccaaagtcttctggctgaaatcctattgcccatatctgatgctttccaccactgcagaattctttagtaccaacactgcagtgtgcgtgacggacaaaagagcctgttatccctgtgtgactagacgtgggcctgtcagcttgctttttgggttattgttcttatcccagaggtggagctgcgttcttccattctgagggacgtacttcaggacattgggccctttgaaagagccttcagaccacaagggtacctttctagtgaatcagaacaccagggtgcaccgcccatggggggtgattttctggagcagacagcttgcttcccatgtgtgctatttatccaaggcaagtcatgctgcaccgagatagtcacttgaggtttgcaccgaacaggataatggtttcttttccctagagctgtttaatcagcaaccttggaacagatgcaggcaggcatgatctagtgtgacagctcattagctaggggttgatctaaaatactgttcaaatgggcaaggaaaggcctgcgtatgggatatgtgatttgcagaatttgagattcatccaaagagggagaatctgcctaagatgcctctgtctaaaagctagtatgtgccaggtgggtttgtttcattccaggtagagcacagggagcttatgtgaccaggcagtgtccaccattgggcaacacatcacacttcccttggcgtcttgcctcctccctccccgtctggcacagactctcccatcagccgtttgggcacctggggacttctgagcccacagcgtcatccagcagaccgtctgcggaggttccttcctgtgagggccgcactcgagggggtgtattgggtgggatcgtatcactggaatgagtgaacatcgttagagggagctcccacagctatgcgtgtgaccgtgtggctcgccgctgaaaaatgctgctcacatagcagaacttcgatgcaatcctttttggatttctaaggggaaattttaagaccgataggaggaataggctggggttgaataagtttggttcttatttttaaattagctcatctttagaaaacaactgaatttagaagattcttctgtaaggccccaaaggatttctttctgcctccccgctcttggctcttatttgtgtctctcctcgtgttctgagcttttcagcagcccttgtgggtcatcagccgaggaccatcagctcggggcccagagctggggactgggagttatgagctggactcttgaaggggccaatactaaaccgagccgttgccatttcctaggagccttgacaggctcaaacatctctgggtacccggggatttgactgtcattgttctgatcctttcccaaagttgtaaccctctgttgacatagcggaattgaagattgatttttcttcaccaccttctgcctaaagttcttagttctgaatgtgtccacacctcattgacttctatgagatgcccctgtcacgttcctcgattccttctagtccttaatagagtctttccttttcttgaaagaaatttgcccagttgacatttattttcatcgtctgctgaagtgacagatccaaggccctaagcttcagcagagttgcaggaagggaccatttacacagcctcttagatgtttaaggtttacccgccctgacagtggctcagcaggcgtaggcctcctggtgaaaagccgagcacatggctaacctgctctggtggaggggctttggaccgttcttgtgtactgcgaggcttgccttcctgctggtgtgtgagcagctctcgggggaacttgcttcctggctgagcaacctgtaaacagtatgtctgaggtgggactcccgggcccaaagcagccaaaggttgcacaagtctaagctccgttaggcctgtcagtgtggctgtcaaaagaaacgctgtttcttttctttctttcctttttttttttttttttttttttttttttgagacaggctgtcacccaggctggagtacagtggcacaatctcggctcattgcaacctgcgcctcccgggttcgagcgattctcctgcatcagcctctcaagtagctgagactacaggtgcccaccagcatgcccggctaatttttgtatttttagtagagatggggtttcaccatgttggccaggctggtttcgaacgcctgacctcgtgatctgccctccttggcctcccaaagtgctgggattacaggcgtgagccactgctcctggcaaaatgctgtttctaagcgtttctttgacaagtcccatccttcaggttcatgcatgattagggagaggcagcagccctgactgagcacctgagtgttcatggaaccaggtgcatagcgtaatgacatgccattcatgacactactttcttccctgaacatgccatgaattcctgatgattacacagttccccaacaagtgctgctcaaaacctggaactaatcagaaggaagcaccagccttgactgttagtgggacacggggaagatggctgtgaaccgaatatgcggtgcctttgggggagaatggttttagtatttagtaagtgtcagtatgtaagttttatgttgaaaaatgaactaagtcacaacaaggtctataaatttaattattgaaaaggataaagttgggccattcagtgaaacctcctgtaactgaagtctctaacacagtagccaatgggggaatcaaatgagcccaagaagaaattctgcgtaaactaggacttaggggagcccttagcattccactttggagtgaaggaacccgatccgccagttggggaacgctcctttgaggcccatgtgcttcctgctccgacgggagagagggataatgagacttgctcccaggtgccctgccctggagcccagcaggccacacgggctctttgactctgtactgtgccagtgatttccaagatgggagtggtgctctgattgcaggaatgtcttcttggaatggcttttctcacttctctagagtccttggtagggagcacatcatcagctgagctaacgtgagaacaggggttggagcacttgccaccggcagtgaagtaatcggacagctgacagtcttttccagagggtcggggattgggagctgaccccaggtcccgctccgttttctttgtgtgcagcacttgtgttggtgaccagcagtgaagagagtgcgtggacgtcaccgtgtggttatgaagctaacggcagccctcagcggtgccgacttccgctccccgacacattcctgtgtgcacgttcgtgggtctgagcgtgactcatggtgtgtgtccctagagcagttcactcagaggcttctcttccgtgctctcaagaataaaagcagggccgccacatcctgataagtcttgccattcagcggtcctgtcttgcagagggataagccagtgtccccaggccacagtccttacaccttgagcaagttccccagagtgaagcaatctttctagacaagttttgcgtttctcagaattttattttagtgatattgttaccaaaagattgtaaccccaaaatgtgtgcctttggcttgcctgttttaggaattcacttgtgttatctccccaagcaaaacaaaagaaagagaaaccttcctgttgacgaatcctttttaccttcttgagagttgtcaatgggactaacttgtatatttctttgctaccttcttttaaaaacatttttcttatttactattacagacgtatagtaatggtgcctgacataacccacagccaaaggccttggccttgctgtgtgtatttcaggctttttcttcccttttctttttttttaagtaataagatattacagttatagctgaagcctgatcctgttcccttttctccctctcgtcccaagcatcaccactgtcccaaatctgctccttcttcccacatctttgcagtttgggcaagtcttctgaatgcctagtcatgattttaagtcttctttccaccttcagtgatggttggctaccctgagcaagccagtagattcagttatgtgcctggagtccagatgttttatgtggatttttcatgtggaattgtttttggtaaggaagtattcccttgccacaccaatgaaaagagaagaaaacaggtagctggcacccactgcattgttgctttctgccagcctgctccttctccttcctctccagctctgttgtgtccagatgcaaactctacatgcagggtttgaccctaggtcctcacctgctgtagctctcacacggggaccgaatgctcttgtgtcgtaaatccttccttttgcttcctcgtgttggatgtgtttagtggttttcatcttctggtcactatttcattctaggtttatcccctttaaattataaattaaatgaattcttcgcttttcctaccagcaactacccaccaagttctaccatgtgttaatttaatcaacagttatttattgagtacttattacatgttgatttcctgttctcaacattggaatgaagacagcttagggttctgctttcatgaagcttgcatgctcttaggtggagacagacagtaattaagcagataaacaggaaattatgagctagtagtgggtccattgctgagaagtaagacaggtggtaggatgacccgtgccgtgtgatgactttagattgggtggttggggaagacttcacggaccttaaaactggccttggaacgggaagcgagaactgggcacggaagatgagggagtgggagatttcaggcagagggagcagcagcaggtacagaggccctgaggccttttattgtgtctttttgcttgagcgagtaacttagagcacacgtagagaaagacagcagaagtgatcttctaaacactctgtcctgtgtggagagctccttatgtgagattttgctgtgtagtgaattaaggctcagccaaactggctcacgtgagctctttgagcttgcctgtctctgtgggctgaaggctgttccctgtttccttcagctctacgtctcctccgagagccgcttcaacaccctggccgagttggttcatcatcattcaacggtggccgacgggctcatcaccacgctccattatccagccccaaagcgcaacaagcccactgtctatggtgtgtcccccaactacgacaagtgggagatggaacgcacggacatcaccatgaagcacaagctgggcgggggccagtacggggaggtgtacgagggcgtgtggaagaaatacagcctgacggtggccgtgaagaccttgaaggtaggctgggactgccgggggtgcccagggtacgtggggcaaggcgtctgctggcattaggcgatgcatctgcctggaagtctacctcctgcctgctgtccgagggcttcattggcgccacggaattgacttttccgtcttatatcattcctgtgtctttgtaggagtggaatcattctcatagtccgagtgtgtttccacatatggtgagagctgacaagcatggaggggttttggtgtaaaaagattagtcatttggagaggttttctcattttatggcaaggttcttttaaagccgtggatttccatgctgttcgtgcggcatggagatcacttcctaccgagagttaaggaggaaaaaaagatctctgagttttgaaagaagatttaaccaaaatgcatttgactcttctgtggatttttgttggctgatttggaaggcaggtgccctgggcatccccagtgggttccaattctgcagctgcccagactcctgcaggcagaggtggaagtgtccccgctagaaaggcatccaggaaactcgcttttgaccaactcagatacagtctggtctttcttgttaactgggactttaccctctccactaatgaatagtgtttgtagtttccaggcaggtttttttcttcttttgaagttctttgaaacccttaggacgccaagggaaggaagttttcattttcagccctttgcattcttcaaaatgtgatccaggcttttccctgtggcgagggtgtcccctagtgttgacttacattatttccacttgttttaaatgaactttgattaccttgacctgtgcacagaaatcaagagaggcagcccctttttagagctgttagaaaagaactgaaacatccacctctgggaaaaatagagtttagtttgtgcatgtgtctcagaagtcaggtgcacacattgagactggtgcagccacatgcctgccttttagggactccttgactgacctgatgccttcacccaaaggcatagtgaaatgggaagtatgatttctgactggtatgaagtggctgctttagagaaaagatcacattctttagtcctagaaaccaaaggtggcttcctgatgctcttattcagcacgtgcctgtctttgaggcaggactggcactggggtgggggcatggtttggggttaccttaaggaccctggatatttctcagataggactttttcttttctttttttgagacggagtcttactctgttgcctaggctggagtgcagtggcatgatctcagctcactgcaacctccgcctccccaaattggcgattctccttcctcagcctcacgagtagctgggattacaggcacccgccaccacacccagctaatttttgtatttttagtagagatggggtttcgctgtgttggcctggctggtctcaaactcctgacctcaagtgatctgcctacctcagcctcccagagtgctgggattataggcatgagccaccacacccggccctggactttttcttaattgaataaatatttatcaagttcttcacttctatttgacggttcctgggctcaacactggattagaaaatgaatgggacagagttcttcatctgagacatagggtggtccaggtagtaggaggaagaaggattgcagcgcagcagtcctcgggacaccaccagggggtgaacgaaggagggacgggggagctgtgcaggtgccccagctccttgggttgcacagggttgaagaccagacccaagaaatggggccttgaccagctcagcaaactgagaatggcctagatttcagcacactttcaccaggatttgtcaaatgaaggaagattccaagcgcaaaataccctagatttcaaccagtaaaagcttgtctgaaaacttccaagatcgggttgtacaacttgacatttgaggaaacgctacttcagtagatggtgctgtggcattgttttctgaacaactgaaggaggagactccagagaagggtacctgctggagacctgtgtggtttgtggggtgggtttcttatatcactgaatctaaagtgggtgcctttcagaatgtgctttactaataatgtgttactctgcttttaattatacttctaataattttccccaagagcctaattaacttacgatctcacagttggtaaagaattacaggatgtcattgcgtggatttctgtgggcagtcacccggagtggtatctaattagggaaaaggcagtatgtccctttctggaagtgtgttaactgaaaatacggtactaagcaactgctaaataaattagccctccttcctcctggccgtgcgcagaaacatccctgcagtatgttgcctatttgtcaaataagattagtgtaaatatggggcatttacctttgctatagaagctgaaattgccaggcacggtggcttacgcctgtaatcccagcactttggaaggccaaggctggtggattgcttgagcccaggagttaaagaccagcctgggcaacatggcaaaactctgcctctacaaaaaataccaaaaatcagccaggcgtggtggtgcgtgtgtattcctagctacttgggaggctgacatgggaggattacctgagcccgggaggttgaggctgcagtgagccgtaatcgtgccactgcactcctacctggggagcagagtgagaccctgtctccaaaaaaaaaaaaaaaaaaaaaagctgaaatccttgagtggattctaaatcatggcagtggctaacattcagcttcatcgtgcccttgctgtgtgcctggcagagacctctgtgcttactacatgtcgcatctcattgaatcctcacaaccttaagatccttccaggttgagcatcccggaccctaaaatcccaaatcctaaatgctcccaaatccaaaactttttgagcaccggcatgcagctcagaggaaatgcatactggaacatttcagattttggattttctaatttggagtgctcatctggtaatatagtgtggatattccccaatctgcaaagatctgagctccgaaacacttgtagccccaagcctttcagttaagggacattcaccctgtatcaacattttaatgctgagaaaatggaagagagagaggttaagtgactgacctggcatcacacagccaggagtggcagcatcaggatttgaactggggcactcagctccaaagctcagctcttcttttttaaaattgaacccagattcttatttctcaaataccataaaatatttacataagccacagttatgccttttaaaaaaaaatcaccttttccccccactctcccatttacttcctttgcagtttgtggctacgatctaccttcctcttcaaaacccttgaaaaatccttgcagccttgcccaagcgtccttccctcagccgatttttgggcctcagtttcctcccatccagcctgtttcctatcgctggcttctccaagggcagagccagagtcctcttttgccagcagggggagcaagggcctacttttaaccgcaactccatagtgaacaagtcaagcaaccttgggtcattcatataccttccaggcagaaggaagacagaagagaacaggaaaaaagcaggacactaggctgacccctgcagatgggaagctggaattacagcaaaggctcattgattgggaactgcacccttgaattttgatagtattgggcaggacatagtcttgctatctgtgttaaagggaggacgtgcttaagaaaaccaacagtcaagtacaagaagctctaattttttttgaggtgggggaacggggtctcactgtgttgcccagctggcctcaaactcctggctcaagcagtcctcccacctcagcctcctgagtagcagggatcacaggcttgtgccactgtgcccagctaagaggctgcaattttttaatgaactgtattcagagtttgtacatcagtgtcttttttttctatgaatcagttctctaagtaatagaatttggaaaagaccgctggtgatctagctgtggcatttagattgactcatgagctaactgacaaatttactacttaaacagtggaaaataatgtgcaggatatatttttttgaataggttgtcccaccctcgagttctgtgtctttcctgagtccgcatatgtgaaccttgttttaaccaggtgacagcatcccataggcacggatctctgtcttctgttgtccacatcatgtgtcttggcagttgttccttattgatatacataaggttgtcttgtttttgtatggatatattttaacatgtaccagtgttcagtgggcctttctcttatttccaatattttgctgttctaaacagcagcacagtgattcccctcatttgcatgtatgtgaaactatcctggtgggtccgcttccagaaactactggatcagggaccatgtgcatttatggccttgaccatactgccagagtaccttccaaggagtttgtgtcatcaatttgcactccccagtggtgttgagagagtgcctgtttcctccacccagcacagtgtgtttcggttttatttctcccaggaaatgggtgttagttggggagctccagaaagaagccgagaagaagggcagtcgtacccttggcagttgtacgcagtggctctctggccgcacaaggagggctcggagcctgctgttgccaggttgcacttgctcttgcaagacaggcattccttgcagtgggttctcctctggccagggagatgagttctgggggctcctctacgaggtggtctctcctgggctttcctctcgagcttcaagtcccacctctggagtgtgaatcgccttcctcagtctaactctatccctccagtggtttttttttttttgctttttgtttttgtttttgtttttttgagacagagtctcactctgtcacccaggctggagtacagtggcgtgatctcggctcaccgcaagctccacctcccgggttcaagcaattctcctgcctcagcctcccgagtagctgggactacaggtgcctgcgaccacgccggctaattttttgtatttttagtagagacagggtttcaccatgttagccaggatggtctcgatctcctgacttcatgatctgccctcctcggcctcccaaagtgctgggattacaggcgtgagccaccacacccagcagtctcttcagtgtatttagctgtgttgatcctgattcatctgatgggtgaaggaatattggaaataaggataatccctgtggtgtttcactgtgcctgtaacctctctcacctagcatttggttaaccagaaacagatgtggaaactgatctatctgtagataatggccctgctcagggagggggtccctgctgagagcgagacattgaaagcctgctacacagaaactgctggaaggccaagccatttcttttttctttttctttttttttttttttttttttcagacagagttttgcccagtagttcaggctggagtgcagtggcatgatctcagttcactgcaacggcctcccaggttcaagcaattcttctgcctcagcctcctgagtagctggcattacagactcctgccaccacgcccggctaatttttgcatttttagtagagacacggtttcaccatgtggccaggctggtctcgaactcctggcctcaagttatctgcctgtctcggccccccagagaggccaagccatttttaaaaacagtgttctttttcatgctgtagaatacctgtgcttgggggtgagcaaaaaggaggaaactgattagaaaatacctatgagggccgggtgcagtggttcatgcctgtaatcccagcactctgggaggccgaggagggcagatcacaaggtcaggagatcaagaccatcctggttgacatggtgaaaccccgtctctactaataatacagaaaattagctgggcgtggtggcaggtgcctgtagtcccagctactcgggaggctgaggcaggagaatggtgtgaacctgggaggcggagcttgcagtgagccgagatcgcgccactgcactctagcctgggcgacagagcaagactccgtctcaaaaaaaaaaagaaaatacctgtgagatgttgagtctgggagaatgtatctgtgagaagacaaacaaccctagtattcattaaagaaccagcctttgttttctacaagctatctgttcggtctactcaggaatagagataaactgccttaatagtaataaaagcaagcaccgctgagtgagtgctggcctcatgccaggaactgctcttggcactctgtgcacaagggagatactgacattctttctgttgtgcagatgagaaaacaggctcagagaaggtgagtaacttaccatggtcacacagcagcagagctaggtcagtataatccacaagtcattctcttaaccgctccgccgtaccgcccagaatgttcatctgcatctgggccagcctcgtcagtccgtgcaaagaggccagttgacccatctccctccctaacaagcacagaagagaccaggctgaaaattcatagctttcactcaaagtgtttccttcacctcattcatctgagttagctttattttactatataaagagaattttcttcagcaaaatgataggaatttttttaatgaaagtaaaggaatgtcacagaattgcgtcagggatatttccagtttaacacaactacaaacgtaggctgttttgttgttgttgttttggttttctattttgagatgaagtctcactctgtcgcccaggctgaagtgcagtggtgcgatcttggctcactgcaacctcctgctcccgaattcaagtgattctcctgcctcagcctcctgagtagctggaactacaggcatgcgctaccacgcctggctaatttttgtatttttagtagagatggggtttcaccatgttgaccaggttgttccggaactcaggtgatccaccttggcctcccaaagtgttgggattacaggcatgagccaccacactcggccagctgttgttaatagttaaaattataaattggacaaggtctgattccagcagggggagacaaattcacattgatttttctataagaaaaggaattatttgtactttcctcccttgtgtgtttgtgtgtatgtaagagagacagatgagaagagggctgcctttgagagccatgttccttttgcatgtacatacctctcaagattattacatgggtcttttagaagagggtcagtagctataaaagcaaatgatatttatgaaatgatttcattgtatgtggtttattatgtagtcttcaaaacagaaaaaccccacttgcttcgaaagcttcctttgagagctactttttaaccatattgttgatcaagcaagattcttaaagccccagtcctatacgtgagcagcattgaatccccggatactggcaggcgttcactgtccagcctttgacattagcatgtcaccctggtaaatcagagcactccatgccaaaaaacagcatggtctgctgagcacattaaggagcagagagggctcagaagaattaaacggccaatggggtggtgacagaggtgagctctttccccctcggacagcttggcatggtgactaccaatgaggtttaattgacattaagagcagctcaccatttttaaagagcgataaattgtttccaagtttcagcctcacggagccctgagctaagagataatgggctgacacatagcctcattggtcacgcttcacttgtaaacaggattggccaaagcaagaaggctgtaagtaaaggttggcccgtcctctggaagcctcccccacagcagggtggggaactggggcagccatagcaagcaggaccatcaggacacggtgtctcccaaacgggccggaacatacaaggttctacgtttaatagaaagttgatcaagccttcctctttggggagcctaatttttaagccattcactctctgttcccctgcagtcttttctctccaaactctgttgaaacttggaggcatctcgcttcctcctttggcctttgtagccaggttttcgcagcaaacagaccatatcatttaacacccacctgcttcttgttctgatagtcagttcagtagacagtagcattttttaagtcaaaaagaggcttagtgatgtaggccaaggtcaaggctctgtgtcatggggctctccccagggctcagtgccacggcacttcagacttgaccccagactgaaaagatgagaggacctgtagaagtcacggcctgtctgtcccgggcccatgctcctatctttttctcccccttggcatttagataccatggacttgttaaaatgtgacatgtactgatgatccttatgaatttgttggtaggggagctgctggtgaggattattttagactgtgagtaattgacctgacagacagtgatgactgcttcattaagagcccacgaccacgtgccagaatagttcagcatcctctgttgctactgtactttgagacatcgttcttctttgtgatgcaatacctctttcttgtcatgagggtctcttcccttaaatcaggtacatttcagattcttcaggtgatgttttttaggctgagtgtgttagcaccccttggaaaccaggttccctggggaaagtgtgtcacgtttgtggtgtttgcccgtatagctctcccacacccccacgagctccaagaggtggggaagcacatgtggcctgcctagcaggcaccagaagcaggttgtcggcacatgcaagccagctttgccctgttgcctgggggagaattgaaaagtttggccccaaaggggaaaattctttctgccatcaagttgctggtcagctgtcatggaacctgtctgcagcaatgtggctgtcacaaaacgcagcccaggacgagtatgcgctgaagctccattttgcattaactagtcaagtacttacccactgaaaagcacttcctgaaataatttcaccttcgtttttttccttctgcaggaggacaccatggaggtggaagagttcttgaaagaagctgcagtcatgaaagagatcaaacaccctaacctggtgcagctccttggtgagtaagcccggggctctgaagagagggtctcgcgccgcacccccagggtgacacaggcgctggggaagacgcacgggcggctcactgcacaaaacctcgttggaatatttgtgctctgccgacgttcagccgcgggtaaaatgaggcctgtatgggatgggtgtgtgcgtgtgtgcacatatgcacatgtatgtatgagagggagaatgtgattattttaagtggatacctaaaagcagtcaaatgcaaatctgaaattagtttctgaaacttgggcattttccagagttttctcactgaagtgattctgtaagtagacacataaccatcagacctaaccattcaggggtaaactgacggtggtgaaggtcatttgaggtggggccaggtctgcgtctgaattctgtggcagcctctccctgcgtaaattcaagttcactggcttgagaagaagaaaagagcctggccatgtccctcccacacgagcacagtctcaggatgcaggtgcttgggaccatgttggaagttgggcccaggactgaggagcagagtcagaatccttcagaaggctttttctttagacagttgtttgttcagttgggagcggagccacgtgttgaagtcctcgttgtcttgttggcaggggtctgcacccgggagcccccgttctatatcatcactgagttcatgacctacgggaacctcctggactacctgagggagtgcaaccggcaggaggtgaacgccgtggtgctgctgtacatggccactcagatctcgtcagccatggagtacctggagaagaaaaacttcatccacaggtaggggcctggccaggcagcctgcgccatggagtcacagggcgtggagccgggcagccttttacaaaaagccccagcctaggaggtctcagggcgcagcttctaacctcagtgctggcaacacattggaccttggaacaaaggcaaacactaggctcctggcaaagccagctttgggcatgcatccagggctaaattcagccaggcctagactctggaccagtggagcagctaatccccggagtaaggaatatttcatttttgaaccattttgggctaagtggaatattaaatgaagttcataaaaggcgtccttcctaataatcacagtcccctctgaaagagagtactcattgttcctccggggccagcgcccagcagtaatggcctcttcctgggagccgctggcattgcttttacgcaaactcatgggaacaaccagtacatggcttttgttttttagtgtgtgtgtctttttttcctgctttctctttattatcttttcattctccacttaacttgctgtcctctgattcagggatgtttccacaattgtcagaattgtgtatgtggaggtctaaattaagtgtctttgctgttttaaaccctgaagtgttttgaccttcaaatgtgccacaattatcttggtcttcaaattctttgctggtggaaatggcttcccagcaaagcgacggcctgtgcaggacagagcctgatgggctttgctggcgtcttttatacgagatgttctccacaccaccactgtgacctttcctacccaattagctcaagtatgaaacctctacatgagatttcatagcaaggaataagggtagcatgtgtgaaatgctggcggctccttgtaagacagattttctatgctccatgagagcctgatccagatactcctggctttcaggaaagtgaatcctctgatgctgcaaattgagattgcttgacttctggtttgcctggcacggccgggtccgttccttcttcattcaagcgaacttaaaatgctttatcaaaatcctcttaggcacaactcttctgtatttaatttcactcttgttgctgacgatcaggctatctcacgcagccatcacctcaagctgctgccccctctcattccgctcttcccgtttgccttgtgatttcatggttaatgttcatgaaccaaagattagactcctacctccctgggagaatcaggaagtgagaggaagcagattatacaggagagagttttttaggatacatttgggtacacctcaggaagaaagagggaagtaggaaacacagtttgggtaaagaatgccatgggctttgttttattttgtcccatcaagtctgaataggacaagtggagatgcactctgatagaagtttcttgcaatcaaggactgggctcagtgtttgtctccgtgcctggcatagagtagcaataactgcacttactattctcgacacttcaatcaaagcacttagcatattaattaattacactcacagcaaccctaagaggtaggtgccattattatcgtcttcattttacggatgaggtaactgagtcccagggtaattaacttgctccaggtcatgaggccagggagcccgctcccagcaccagcctctccccatgttgggatctcagggtgtgtttgctgagaggctggcactgtgttaattgccgtgggcattaatacaaacttccagggcattggactcaatctttccattgtcagcattgcacctttgctcagcagtggtggatttgtgaagtggaaggttggccaggagctctcatgggtgaacattttcctttcttagagatcttgctgcccgaaactgcctggtaggggagaaccacttggtgaaggtagctgattttggcctgagcaggttgatgacaggggacacctacacagcccatgctggagccaagttccccatcaaatggactgcacccgagagcctggcctacaacaagttctccatcaagtccgacgtctggggtaagggctgctgctgcactgaagtggtccttcctgactacaggagggtttttttctgcctctttcttgctcttccctttcttttcttcctttctttttgtttttttgagacggagtctcactctgtcacccaggctggagtgcagtggtgcaatcttggctcattgcagcctctccctcccgggttcaagcgattctcctgtctcagcatcttgagtagctgggattataggcacccgccaccacacccagctaatttttggtatttttagtagagatggggtttcaccatgttggccaggctggtctagaactcctgacctcaggtgatctgcctgccttggcctcccaaagtgctgggattacaggtgtgagccactgtgcacagccacccttttttttttttttttaactgtgtatttggcctgaggtccaaatatggtgcacagtgtatctgctgatctgttaagtctcctctataagccccctctccatgtctttatttcccttgctgtttattgaagaaaccatccttagagtttcgtacgttctgggttttgctcattgtctcccatggtgtgatttaatatgttcctctgacttcagtattcctagtaatgggtggctggatctggaacggcctcatcacattcaggtttgactgtttctcttttagtaagagtggatcaggggagatggtgtgcccttccatcagtagatacaaaatgcttcatttatttccttccttcctttcctcccctctccctcccctcctctcttctccttctccttccgacggagtttcgctcttgttgcccaggctggagtgcagtggcacgatcttggctcactgcaacctctgccttctggtttcaagcgattctcctgcctcagcctcctgagtagctgggattataggcgcatgccaccacccccggctaatttttgtatttttagtagagacggggttttaccatgttggccaggatggtctccaactcctgacttcgtgatccacccacctcggcctcccaaagtgctgggattacaggcgtgagccaccacgcctggccccaaaatgcttgatttgctatcgtttttttgtgggggtttttttttgagtaatttttggcagttactgatatacagtgcctagatccaatagtttgctaggtattgccaggtaggaattctctaattctgtcattcctgttaagttactagtggaaacttgtatgaggagaaacagttcctcatctgtgtggttactcagtggtacagttcatgtaggaagagcagggtcaattcttgcttctttgtttttatttaccagtttttaaaataacaaattactttttcttttttttttttggagccagagtcttgctttttctggggtacaaagtacaggctggagttcagtagcatgatctcggctcactgcaacctccgcctaccagattcaagcaattcttctgcctcagcctcccaagtagctgggattacaggtgcctgccaccacgcctggctaaatttttttgtatttttagtaaagatggggtttcaccatgttgcccaggctggccttgaacttctgagctcaggcagtccacctgccttggcctcccaaagtgctgggattacaggcgtgagccaccatgccctgccacaagttggtttcttttttttttttttttttttttttttttgagacagtctcactctgtcgcccaggctggagtgcagtggcgcgatcttgatcttggctcactgcaagctccacctcctgggttcacaccattctcctgcctcagcctcccgagtagctgggactataggcatctaccaccacgcccggctaatttttttgtatttttagtagagacagggtttcaccatgttagccaggatggtctcaatctcctgacctcgtgatccgcccgcctcggcctcccaaagtgctgggattacaggtgtgagccaccgtgcccggcccctaatttttgtatttttagtagagatggggtttcgccatgttggccagggtggtcttgaattcctgacctcaaataatcctcccacttcagcctcccaaagtgctgggattacaggcgtgagccaccgcacccagccttgtcctggtcttctgatgataaagagcctggtaaaatgtcagagcctgggctgctgctggggccatcccttctgaggtctgctgcaaaggtaactgattttaaatgtagtgtagtgaaatgctacacatcttgaacagcctttctctttcggttttctttcagcatttggagtattgctttgggaaattgctacctatggcatgtccccttacccgggaattgacctgtcccaggtgtatgagctgctagagaaggactaccgcatggagcgcccagaaggctgcccagagaaggtctatgaactcatgcgagcatgtaagccttcctcagcctgttctcacgagtatatgtgggcattccaggaaattcaactgtgcaggagtgtgtacacaaagttgaaagtttttccatgagctctctccattccagttcttcagatgcagctaatgtagccatttgatacctattgacctttatttacagataaatagtatgtgcgtgacttgtcttttaaagcaaaaatggtattgatagataccaaacctgggtgtattcctaaatacagattcctgggccctgctttcacagacattctgctatagtagctaagctcatgaggtgattttttttttttttttttttgagacggagtttcgctcttgtcgcccaggctggagtacaatggcgcaatgttggctcacttcaacctccacctccctggttcaagcgattctcctgcctcagcctcccaagtagctgggattacaggcatgcaccaccacgcccggctaattttgtatttttagtagagatggggtttctccatgttagtcaggctggtctccaactcccaacctcaggtgatctgcctgcctcggcctcccaaagtgctgcgattacaggcgtgagccaccacgcccagctgcgaggtgatttttatctggtcgttttatactgattacatatgtgttatctgtactatgcacacacaggatgttttcatatatcttataaggtatttatatggccatttcttacactgttttcccacacatgtctttccacgtccatatattcagatctctccctctccctacctcttatttatgtatagctgcccagtactccatttcactcattcatccggtcctcttttgatgtgcatttggttgttttacacatttgtttggtttttgcccttataaacaaagcagaaacaaatattcatgtacacgaatctctgggcactttggctggtatttctaaaagttgaactgttggttccaagaactgtgtgggttttaaattttgatacattttaccaaactgttaaaaaaggttgtgccattgtatgctccagtcagacgcatatgggagtgactgttcctggtccccagtactaggctttgtcagtctgtttagtcctcatgttagtctcattttcatgagaatttctttacttcagactttgataaccgtgaagaaagaacaagatagaaggtgagctgtttggcttagtaattttctacacctactagagcgggactgggaaaaatatatttgtaaatgcagttcttgctgtcactgtctctctggggttttacaatccatattcctgccagcatctaacgtcttttcaaattcttaatgtctataacaggacatgatgacattcatcgttttgacttgttgcagcaaaagatggttagcaggattggaatgttgctttcattctagacttttccttgagaactgctagccccgtattgctagccagatctcatggatgatctgacttgggtttcatctgtccaggttggcagtggaatccctctgaccggccctcctttgctgaaatccaccaagcctttgaaacaatgttccaggaatccagtatctcagacggtaaagtacccatcccggggtacctgcagtggggtgaaagggcagccatgtgggactgcagcctgggtcattcggttcacttcctggtgaaagttcacagaccagcctgtcctgagaccagaaagctgggcagaggtgtggagtattgtgctttcttgtctgctgcagccctgcagagttctaagaaatgctaagggctgtttctccggtatccacgtgccttttctttagttgtatgcagatgagcactgttaccttacaaagaaagagaaccaccacaccaagccaacaccagtactgatggctgctggatttttgtttctgtccctgtatgattcttagaagtggaaaaggagctggggaaacaaggcgtccgtggggctgtgagtaccttgctgcaggccccagagctgcccaccaagacgaggacctccaggagagctgcagagcacagagacaccactgacgtgcctgagatgcctcactccaagggccagggagagagcggtaagtcccccgcttcccccaaccccactgctcttcccttccctgccagaggctacattcaggccatcataggccaacgggaagctgtgaatggagcccgcacagaagggcagccatggcctttgtcaatggttcagcttcggaaggaggaaggttctcctctccccacctgcctcctatcccctccctctgagagtccccgaggagcataggctccagcagtgagttcagtcctgtaggcagaggtgcttctgaagcccgccaaggagctagcccatctcccacctattacccgcggcatctgtggttgctgtctcagagcagattcaacaatagtaagcaccaggctgcgtgacaagcagctcacggtgaaggcactgatgtgagaagctcgctgcagccaggtggaaccaggacacgcacatggacagaacccgtgtcctggtggtctctgggaagagcatctttctggtgccattgcctaggcgagcaagggagttgggatcagctcaggagggggtctcaagacactagcaaaaataataatggccaacatttatgtagtgtgcctactacaggccaggctctgttctatgttcatggttgacccccagaaccagcagtccaggttctgctgcagaccagctgaacaaaagcattgaggggtgtattagtctgttttcatgctgctaataaaggtatacccaagactgggtaatttataaaggaaagaggtttcaccgactcacagttccacatggctggggaggcctcacaatcatggctgaaggtgaatgaggagcaaggtcacatcttacttggcggcaggcaagagagcttgtgcaggggaagtccgctttataaaaccatcagatctcgtgagacttattcactaccacgagaatgtgggagaaacctccccatgattcattgatctccacctgaccccaccgttgacacgtggggcttattacaattcaaggtgagatttgggtggggactcagccaacccatattggaggtgggggataggccaagcatctgggttcatagaggatcctggggatggcaatggtggactccattctaatggactgcagactgggtacatgtgaagggactggacaaagccctacttcttgaagatttatggtgggatgtttactgacagcagaatctataaacctgagttttctttatcacgtactctcattagtaaaaaaaaaaaaaaaaaacagaacatgcagcccatatatatggtatataaagtacgtatgtccactactgtaggagtagagtgcgtatgttatgtaccaaaacgcacatttaaaaggcttgcatgctaaataagtccaaatttgcaatacttcccgccccgctgggccatctcactcacctacttggaggttatggcgtatagactctccagaatcttccacccttcctcctcttatcggttttcctgatttcaggtggctgagcagtagggaggagaggcctctgggaacgctgtgcttattaagaacccagtgatcagcagtcatgttcatttacgcccgtcagtttcatctgaggggtattttgatagtgatctcttggtgagccgagggtgtcaattaactgctcagtgctgaaactgagtggtgcataattcattgcaatttcactctcctggcctccttccactagattaaagttttgggagggctttggtgttccctgattcagatgtcccgcgtgctgccttgggttctgataaatgcatactggtacctctgttgagttacaggtgccaacagaaaacctcttcttgcaagctgacctctgagggagaattctgttactcactagcaggagcttggcaacaccaaaaagatttccttttttttttgagatggagtctcactctgttgccaggctggagtgcaatggcatgataccagctcactgcaacctccacctcctgggttcaagcgattctcctgcctcatcctcctgagtagctgggactacaggcgtgtgccaccacacccagctaatttttgcattttttagtagagacggggtttcaccatgttggccaggatggtctctatctcttgacctcatgatccgcccacctcagcctcccaaagtgctgggatgacaggcttgagccaccgcgcctggctaccagaaagatttcttatgagctatgattcatatttaaagagtgcccattaaaaaactgttggccgggcgtggtggctcacacctgtaatcccagcactttaggaggccgaggtcagcgaatcacaaggtcaggctcccgtggcacaagctgggggctgcccccaccccatgctccccagaggagcacccaagcgtctgggctcagacaggcctggatctgataaccggctctgatgccaccatccctgaggccaggcaagtcccagccgggctacagcactgttgtgagaatgcagatgaggttgtaaaggtgaagcacgtgtcacgcttctctcaataaagccatcattgctgttaggattgtcattaggaaaggctttgggccgggtgcagtggctcatgcctgtaatcccagcactttgggaggccaaggcgggtggatcacctgaggtcaggagtttgagaccagcctaaccaacatggtgaaaccccgtctctactaaaaatacaaaattagccaggcgtggtagcgggtgcctatagtcctagctacttgggaggctgaggcaagagaaccatttgaacctgggaggcggaggttgcagtgagctgagatcgtgccactgcactccagcgtaggcaacaagcgagactccaactcaaaaaaaaaaaaaaaccacacacacgctttggtctctttccctgaagatgggaacaaaaagctggacggccctggcctcttcatccctgcactggtttacttgaaggcagcagccccccacccacccacatcactctctagtgagtataaaaacgatgacaaggccaagcaaagggtcaaaacctgtggctctcctgccagccagctagccgagaggcctatgaggagctctgggaataaggggctgtgtcccacagtggggaagggacaatgggccattatgcacaggagataagaagggatgacctttgacaatttttttgtttgtttgtttgtttgttttgagatggagtctcactctgtctcctgggctggagtgcagcagtggcactctgcctcccgggttcaagcgattctcctctgtcagcctctagagttgtctggagttgtcagctcttccccttgcgtttcagatcctctggaccatgagcctgccgtgtctccattgctccctcgaaaagagcgaggtcccccggagggcggcctgaatgaagatgagcgccttctccccaaagacaaaaagaccaacttgttcagcgccttgatcaagaagaagaagaagacagccccaacccctcccaaacgcagcagctccttccgggagatggacggccagccggagcgcagaggggccggcgaggaagagggccgagacatcagcaacggggcactggctttcacccccttggacacagctgacccagccaagtccccaaagcccagcaatggggctggggtccccaatggagccctccgggagtccgggggctcaggcttccggtctccccacctgtggaagaagtccagcacgctgaccagcagccgcctagccaccggcgaggaggagggcggtggcagctccagcaagcgcttcctgcgctcttgctccgcctcctgcgttccccatggggccaaggacacggagtggaggtcagtcacgctgcctcgggacttgcagtccacgggaagacagtttgactcgtccacatttggagggcacaaaagtgagaagccggctctgcctcggaagagggcaggggagaacaggtctgaccaggtgacccgaggcacagtaacgcctccccccaggctggtgaaaaagaatgaggaagctgctgatgaggtcttcaaagacatcatggagtccagcccgggctccagcccgcccaacctgactccaaaacccctccggcggcaggtcaccgtggcccctgcctcgggcctcccccacaaggaagaagctggaaagggcagtgccttagggacccctgctgcagctgagccagtgacccccaccagcaaagcaggctcaggtgcaccagggggcaccagcaagggccccgccgaggagtccagagtgaggaggcacaagcactcctctgagtcgccagggagggacaaggggaaattgtccaggctcaaacctgccccgccgcccccaccagcagcctctgcagggaaggctggaggaaagccctcgcagagcccgagccaggaggcggccggggaggcagtcctgggcgcaaagacaaaagccacgagtctggttgatgctgtgaacagtgacgctgccaagcccagccagccgggagagggcctcaaaaagcccgtgctcccggccactccaaagccacagtccgccaagccgtcggggacccccatcagcccagcccccgttccctccacgttgccatcagcatcctcggccctggcaggggaccagccgtcttccaccgccttcatccctctcatatcaacccgagtgtctcttcggaaaacccgccagcctccagagcggatcgccagcggcgccatcaccaagggcgtggtcctggacagcaccgaggcgctgtgcctcgccatctctaggaactccgagcagatggccagccacagcgcagtgctggaggccggcaaaaacctctacacgttctgcgtgagctatgtggattccatccagcaaatgaggaacaagtttgccttccgagaggccatcaacaaactggagaataatctccgggagcttcagatctgcccggcgacagcaggcagtggtccggcggccactcaggacttcagcaagctcctcagttcggtgaaggaaatcagtgacatagtgcagaggtagcagcagtcaggggtcaggtgtcaggcccgtcggagctgcctgcagcacatgcgggctcgcccatacccgtgacagtggctgacaagggactagtgagtcagcaccttggcccaggagctctgcgccaggcagagctgagggccctgtggagtccagctctactacctacgtttgcaccgcctgccctcccgcaccttcctcctccccgctccgtctctgtcctcgaattttatctgtggagttcctgctccgtggactgcagtcggcatgccaggacccgccagccccgctcccacctagtgccccagactgagctctccaggccaggtgggaacggctgatgtggactgtctttttcatttttttctctctggagcccctcctcccccggctgggcctccttcttccacttctccaagaatggaagcctgaactgaggccttgtgtgtcaggccctctgcctgcactccctggccttgcccgtcgtgtgctgaagacatgtttcaagaaccgcatttcgggaagggcatgcacgggcatgcacacggctggtcactctgccctctgctgctgcccggggtggggtgcactcgccatttcctcacgtgcaggacagctcttgatttgggtggaaaacagggtgctaaagccaaccagcctttgggtcctgggcaggtgggagctgaaaaggatcgaggcatggggcatgtcctttccatctgtccacatccccagagcccagctcttgctctcttgtgacgtgcactgtgaatcctggcaagaaagcttgagtctcaagggtggcaggtcactgtcactgccgacatccctcccccagcagaatggaggcaggggacaagggaggcagtggctagtggggtgaacagctggtgccaaatagccccagactgggcccaggcaggtctgcaagggcccagagtgaaccgtcctttcacacatctgggtgccctgaaagcccttcccctcccccactcctctaagacaaagtagattcttacaaggccctttcctttggaacaagacagccttcacttttctgagttcttgaagcatttcaaagccctgcctctgtgtagccgccctgagagagaatagagctgccactgggcacctgcgcacaggtgggaggaaagggcctggccagtcctggtcctggctgcactcttgaactgggcgaatgtcttatttaattaccgtgagtgacatagcctcatgttctgtgggggtcatcagggagggttaggaaaaccacaaacggagcccctgaaagcctcacgtatttcacagagcacgcctgccatcttctccccgaggctgccccaggccggagcccagatacgggggctgtgactctgggcagggacccggggtctcctggaccttgacagagcagctaactccgagagcagtgggcaggtggccgcccctgaggcttcacgccgggagaagccaccttcccaccccttcataccgcctcgtgccagcagcctcgcacaggccctagctttacgctcatcacctaaacttgtactttatttttctgatagaaatggtttcctctggatcgttttatgcggttcttacagcacatcacctctttgcccccgacggctgtgacgcagccggagggaggcactagtcaccgacagcggccttgaagacagagcaaagcgcccacccaggtcccccgactgcctgtctccatgaggtactggtcccttccttttgttaatgtgatgtgccactatattttacacgtatctcttggtatgcatcttttatagacgctcttttctaagtggcgtgtgcatagcgtcctgccctgccccctcgggggcctgtggtggctccccctctgcttctcggggtccagtgcattttgtttctgtatatgattctctgtggttttttttgaatccaaatctgtcctctgtagtattttttaaataaatcagtgtttacattagaattcttggcagattgcttcggcctgtgatcctgccctgttgttctgagcctgtgcggtggcggggccgggatgtagtgggttctggtttcccgacggggctggggcccggcatcaggtcttacagagcagaacggtggcaggttgcccccagctgcccagggcctctgcggcctgggtgcccacagccatctttcaggcacttgccctgctatgctcggaccctttctgtacccttggcgcttacctgctggcagcctggccccaccggcatcactgggagtgggctgtgccaccatacaagccacatctgactggcggtatcaggctgtcgcagcgacgtggaagtggggtgaggaggtcacgtcccgtgcttcttgctggctgagggcaaatccctccccacgtgcgcctgttctctctccacctttccgccctaagcccccaggtgcccttactcactcatgttccttgagccaggtgtcttaggtctttgtgtggatgaggaggagcggaggtgtgaggtgtgctgggccttcagggcctgggaaggccatcccagactgagccccaccgccctttcccagctcagtccccaccgagctgacagcttggaaaggggcggttgggaagtgagtagcaccctctgataatgatactgatcaggccagcaggtttgtcaggggtgcacatcctgctcagcagagcatatgaagatcacagcttggtgaagctccactcgagagacctggagcgagactgctgtgcggtgggtgacaggtggaactccagccgggccggggctggtggagcccactgcgagcagtgccaggcacaagattctccccctctcatttcacagggacaaaaccaggctggggcccccaatttccttgccggttgaaccatagctggccaccagatccaccaagcctggggcttctcttgtcctttgaatggctgcttctcccaggtctgaacgaagacataggacaactctggtgacagccacagctggtggccgcttcctcgtgtcagatgtggacggtcaccccgccctcccagcgctaagcgctgagactgcgtgtccagagtcggctcctgcacgtgaggccaattggtcacactgggccagtgtggaggaagatgcctctcatctcccaaatggggatctttcatgggtgtcacctgagcttatagagcttagtttagtctagccattccaagacagtggtttcttaaccttttctaggtcacaaaacctcctgagaacctaatgaaaactggatcccagccccagaaaaatgcacctgtgtgcacacacccagcagtttccaggtcatttcgagtcctgccttcgaggtccattgttattatttacaaaacaccagcctaaggtattggacattttcttaaaaggccaggcaaggtggctcatgcctgtaatcccaacactttgggaggctgaggtgggtggattgcttgaggccgggagttcaagaccagcctgggcaacatagaccccatctcacaaaaaatacaaaaacaagctgggtatggtggcacctgtagtccagctactcaggaagctgaggtgggaggattgcttgagcccaggaggtggaggttgcagcaagctatgatcgtgccactggattccagctccagagtgagaccctgtctcaaaaaaaatttttttttcttttttctttttgagacagagtttcgctcttgtctcccaggctggagtgcaatggcacaatctccgctcactgcaacctctgcctcctgggttcaagcgattctcctgcctcagcctcccgagtagctgggactagaggtgcgcaccaccagacccggctaatttttgtatttttagtagggacggagtttcaccatgttggtcaggatggtctcgatctcttgacctcatgatccgcccaccttggactcccaaagtgcttggattacaggcatgagccagcgcgcccggcccaccactttttttttttttttttttttttaagacgagtctcacactgtcgcccagtctgtagtgcagtggtgccatctcggctcactgcaagctccgcctcccaggttcata

SEQ ID NO: 31828 - DNA, 3484 bp, Homo Sapiens
ggggccttgtttgactaaagcagggggcgtgggccatcctctaaagcaaactgcccatcccggggacctgagctcatccaggcctggggctggcctcctttctttcctttgctttctttcttttattgtccaacacttgtcaggctcctgggaaatcaagggaagtctcgttttgaggtcataaaattctctgtgatgtaaccgtgcgaaattatgtaaataaagccgggcaggcctccttgaacacacagagaaccggatcctgcctgcgcctctgcctgtaatttgcgtaatgagaattgtcctgaaaaggcttctagtctcctcaggccttgcccctgccgcccgcaccctgaggagggggcatgccaaggaaaacatttggaaggtgggagggtccctggtgaatacacagacttggaccctgggtttggtcctgttccacctgtcctctctcccttcccttcctcccttccttccttccttccttccttctttccttctttccttcctccctccctctttccctctctcccttccttccttcctctttttctcctcctcctcctccttttctgtcttaaggaggcagtgcagggagacctggaacagcaggaccagctcttcccagacctgtttggatctgagcctgaatctctaggaaggcgcagtaggagagggggagagatttggttctcatcactcactgctcctttattttattattttattattttttatttattgagagatggggtcttgctgtgtcacccagggtacagtgcaggggtgcagtctcgctcactgcagccttcaactcctgggcttcccggaacctcccttcctggcccccgactggcctcagttctcctcttgcctctgggtcaatccactgctaccaaagccggctcctgtggagaggaagctcctgcgatgggccctgtttaacagggacactcagacgtctcctagacaaaaaaaaaaaaaaaaattggtctcattaactccaaactatccatttccacttggtggtcctgagtccgcattccttggggagtgggcactgatagtgagggaacagccccgccctctgcagggccaggccttggcgctggggccttgagtgtagtggtacaagcagcaacgggaggggctggggcgaggaccggagccggctgtgggcctcactgccctttggtccccagcccaggcgcagtcgaacctcctggggaagtgccgccggccgcgcaccgccttcaccagccagcagctgctggagctggagcaccagttcaagttcaacaagtacctgtcgcggcccaagcgcttcgaggtggccacctcgctcatgctcaccgagacccaggtgcgcgccctccccgcccccgacgcatcccggcctcccaggggacactgttacctttgcacttgtgacccacgggcggtctgaggcatctagcgctgcgcctcgacggttcagacggcgggcgcacgggttcatctaaggtgcccagagcgccgattcagtagcttcgggtggggcccaagaatcagcacttaaccacccctcctttcattctgaagaaggtgatccccaggccgcattcgagaaattttgttccagaaagagaggagggaacatcctgagatttaccgcgacgtagccagctgccctgacccttcctccgcagacggagggcgcgggtagaaaagtccccggcctgggtcgttggggacatagtcctagctcccacggagctccagcccagctctggggtttgctgctgagtggggggttgcggggaggaggaagctacgagccccctccccattccgcttctaagtctcaccctgaggccattccagggccgacccaatggggcccaggcgcacgcggggggactccggggacaggaagccctggggtggcggtggccggtttctcacgcccgcttgtgcccgcaggtgaagatttggttccagaaccggcggatgaaatggaaacgcagcaaaaaggccaaagagcaggcggcgcaggaagcggagaaacagaagggcggcggcgggggcgcggggaagggcggcgcggaggagccgggagccgaggagctgctggggccgccagcgccgcgagacaagggcagcggaccgcctgcggacttgagggacagtgaccccgaggaggacgaggacgaggacgacgaggaccatttcccctacagcaacggcgccagcgtccacgccgcctcctccgactgctcctcggaggacgactcgccgcccccgcggcccagccaccagcccgcgccccagtaggagccccgcgcccagcaggtgcggcgcgcacggagccgccggccggcggcttctcccggaggccccggcgcccgcacccacccggcccggccccgagagcaggctcgaccgccgccccatggacccctcgcccaggccggggctggagggattcggccgcggctccggtcctgggcgcttcccttttaagcaagggcgcctcacctgctcttcaagaaacagcgagagggagacccagggggctgaaacttgaactctggttcttttaaaattaattttggttggtgttgggggaggcgcgagtgcgtgtgagaagaaccgacccaccccgcgcaaggggaagcctcctgtctcccctttccccgcgtccgagaaggcggaaacccacagtgttacctgacttatgaaacttgaaaccgcctctggagccgccattctgcagagtatttggaaaaagaaaaaagggtttatgcttacgtctctggggtcggggggattatgtcacgagcgttcaaactgctggaaatctcaaaactgtactgtctttatttttgtatattgtatttatatataaaaagaaacgtctacgtatgcatgctaaattattatttagcttctcccatcgcccacgatggaatgtaaaataaattggttttgtactggatcagcgtgcacgagttttgggggattatgcccgcggcattacaatttgcttgtagaaatgatggggagggtgtctactcggcggttggcagctgagggtgaaaatcggagtctcaagtgggtgtcaggaccacctccgcgcctgctactggggagtcgcaatgtgaagtgttggcaaaaatacctgtggccaggtgtcagcgcatgcccggctgcctggtgcacacctgtcccgggacacgtgtccctcggaagcggagctgtggactctatttattttcctatttccttgctagctgttgcttcgttggcactccagaagtggaaatacgctatttggacgtttcagaaaataagcttaaaacgactaggcgttagtagcatgtggggtccctgtgacctccaggcgctactgaggcacatttcccggaacgcaccgaattgcgcggtgcttctctctctcctcgaccccggtctctgttagcagaaccttccttggctggcc

SEQ ID NO: 31829 - DNA, 2260 bp, Homo Sapiens
atgccgctggcgcagctggcggacccgtggcagaagatggctgtggagagcccgtccgacagcgctgagaatggacagcaaattatggatgaacctatgggagaggaggagattaacccacaaactgaagaagtcagtatcaaagaaattgcaatcacacatcatgtaaaggaaggacatgaaaaggcagatccttcccagtttgaacttttaaaagtattagggcagggatcatttggaaaggttttcttagttaaaaaaatctcaggctctgatgctaggcagctttatgccatgaaggtattgaagaaggccacactgaaagttcgagaccgagttcggacaaaaatggaacgtgatatcttggtagaggttaatcatccttttattgtcaagttgcattatgcttttcaaactgaagggaagttgtatcttattttggattttctcaggggaggagatttgtttacacgcttatccaaagaggtgatgttcacagaagaagatgtcaaattctacttggctgaacttgcacttgctttagaccatctacatagcctgggaataatttatagagacttaaaaccagaaaatatacttcttgatgaagaaggtcacatcaagttaacagatttcggcctaagtaaagagtctattgaccatgaaaagaaggcatattctttttgtggaactgtggagtatatggctccagaagtagttaatcgtcgaggtcatactcagagtgctgactggtggtcttttggtgtgttaatgtttgaaatgcttactggtacactccctttccaaggaaaagatcgaaaagaaacaatgactatgattcttaaagccaaacttggaatgccacagtttttgagtcctgaagcgcagagtcttttacgaatgcttttcaagcgaaatcctgcaaacagattaggtgcaggaccagatggagttgaagaaattaaaagacattcatttttctcaacgatagactggaataaactgtatagaagagaaattcatccgccatttaaacctgcaacgggcaggcctgaagatacattctattttgatcctgagtttactgcaaaaactcccaaagattcacctggcattccacctagtgctaatgcacatcagctttttcgggggtttagttttgttgctattacctcagatgatgaaagccaagctatgcagacagttggtgtacattcaattgttcagcagttacacaggaacagtattcagtttactgatggatatgaagtaaaagaagatattggagttggctcctactctgtttgcaagagatgtatacataaagctacaaacatggagtttgcagtgaagattattgataaaagcaagagagacccaacagaagaaattgaaattcttcttcgttatggacagcatccaaacattatcactctaaaggatgtatatgatgatggaaagtatgtgtatgtagtaacagaacttatgaaaggaggtgaattgctggataaaattcttagacaaaaatttttctctgaacgagaggccagtgctgtcctgttcactataactaaaaccgttgaatatcttcacgcacaaggggtggttcatcgagacttgaaacctagcaacattctttatgtggatgaatctggtaatccggaatctattcgaatttgtgattttggctttgcaaaacagctgagagcggaaaatggtcttctcatgactccttgttacactgcaaattttgttgcaccagaggttttaaaaagacaaggctatgatgctgcttgtgatatatggagtcttggtgtcctactctatacaatgcttaccggttacactccatttgcaaatggtcctgatgatacaccagaggaaatattggcacgaataggtagcggaaaattctcactcagtggtggttactggaattctgtttcagacacagcaaaggacctggtgtcaaagatgcttcatgtagaccctcatcagagactgactgctgctcttgtgctcagacatccttggatcgtccactgggaccaactgccacaataccaactaaacagacaggatgcaccacatctagtaaagggtgccatggcagctacatattctgctttgaaccgtaatcagtcaccagttttggaaccagtaggccgctctactcttgctcagcggagaggtattaaaaaaatcacctcaacagccctgtgaagtgacctcagtgagatatttggatccatggtgtaaa

SEQ ID NO: 31830 - DNA, 3225 bp, Homo Sapiens
ggcggtgttgaggttgggtccgggatgcggggtctttgactgaaggggtaggccaagtggaggtatcagggacgtcgcgcggcacagaagaggaccagcctggaggccggggacgctgtcatgtacggcgcgagcgggggccgcgccaaacccgagaggaaaagcggcgcgaaggaggaggccgggccaggcggtgccggcggtgggggcagccgagtggagctcttggttttcggctatgcctgcaagctgttccgggacgacgagcgggcccaggctcaggaacagggacagcacctcatcccctggatgggggaccacaagatcctcatcgacagatatgatggacgtggtcacctgcatgacctttctgagtacgatgctgagtattccacgtggaacagagattatcagctgtctgaagaggaggcgcgaatagaggccctgtgtgatgaagagaggtatttagccttgcatacggacttgcttgaggaggaggcaaggcaagaggaagaatacaagcgattcagtgaagcactagcagaggatgggagctacaatgccgtggggttcacttacggtagcgactattacgacccgtcagagccgacggaggaggaggagccttccaaacagagagaaaaaaatgaggccgaaaatttagaggaaaatgaagagcccttcgttgcccccttaggattgagcgtcccgtctgacgtggagttgccaccaaccgctaaaatgcacgccatcatcgagcgcacggccagcttcgtgtgcaggcagggagcacagtttgagatcatgctgaaggccaagcaggccccgaactcccagtttgactttctgcgcttcgaccactacctcaacccctactataagttcatccagaaagccatgaaagagggacgctacactgtcctggcagaaaacaaaagtgacgagaaaaaaaaatcaggagtcagctctgacaatgaagatgatgatgatgaagaagatgggaattaccttcatccctctctctttgcctccaagaagtgtaaccgccttgaagagctgatgaagcccttgaaggtagtggacccagatcatcccctcgcagcacttgttcgtaaggcacaggctgacagttccactcccaccccacacaacgcagacggtgcgcctgtgcagccctcccaggtggagtacacggcagactcgaccgtggcagccatgtattacagctactacatgctaccggacggcacttactgcctggcgccgccccctcccggaatcgatgtgactacttactacagcacccttcctgctggcgtgaccgtgtctaactcccctggagtgacgaccaccgccccaccacctcctgggaccacaccaccaccgcccccaaccacagcagagactagcagcggggccacctccacaaccaccaccacaagtgcacttgcccccgtggccgccatcatccccccgccccccgacgtccagcccgtgattgacaagctggccgagtatgtcgccaggaacggcctgaagttcgagaccagtgttcgtgccaagaatgatcaaagatttgagttcctgcagccgtggtaccagtataatgcttattatgagtttaagaagcagttcttcctccagaaagaagggggcgatagcatgcaggctgtgtctgcaccagaagaggctcccacagactctgctcccgagaagccaagtgatgctggggaggatggcgcgcctgaagacgcagccgaggtgggagcacgggcaggctcaggcgggaagaaggaggcatcgtccagtaagaccgtcccggacgggaagctggtgaaagcttcctttgctccaataagctttgcaatcaaggccaaagaaaatgatctgcttcccctggaaaaaaatcgtgttaagctagatgatgacagtgatgatgatgaagaaagcaaagaaggccaagaaagttctagtagtgctgcaaacactaacccagcagttgccccaccctgtgtagttgttgaggagaagaagcctcaacttacccaggaggagctagaagcaaagcaagcaaagcaaaagctggaagatcgcctcgcagctgctgcccgggaaaagctcgcccaggcgtctaaggagtcaaaagagaaacagcttcaagcagaacgtaaaaggaaagcggcgttatttttacagaccctcaaaaatcctctgccggaagcagaagctgggaaaattgaggagagtcctttcagtgtcgaggaatccagcactacgccctgccctctactgactggaggtaggcctctgcctactttagaagttaaaccacccgataggccttcgagcaaaagcaaagatccaccgagagaagaagagaaagaaaagaaaaagaaaaagcacaaaaaaagatctcgaacaagatcacgttctcccaagtaccattcgtcatccaagtccaggtctagatcacactcaaaagcaaagcattctcttcccagtgcctatcggacagtgcggcggtcgaggtcccgctcccggtcccctcggaggagagcccactcccctgagagacggagggaagagaggagtgtgcccactgcctaccgcgtgagccgcagccctggggccagcaggaagcggacccgctccagaagtccccacgagaagaagaagaagaggcggtcccggtcgcggaccaagtccaaggccaggtctcagtcggtgtcacccagcaagcaggcagcgccccggcccgcggcccccgcggcccactcggcgcactcagccagcgtctcccctgtggagagtcggggctccagccaggagcgctccaggggagtctctcaggaaaaagaagcccagatctcttcagcaatcgtttcttccgtgcagagcaaaatcactcaggatctcatggccaaagtcagagcgatgcttgcagcttccaaaaacctgcaaaccagcgcttcctgagacggggccagcggaggcagagccgggaggctgcgtgggcttctgggcaggctcacgcagacgccggccacaccatccacctggccgcctccatggacccttggtggcttttgtaaattaatttttgatgacattttgagttttaagatttctgaccagcagtctcttacctgtatatttgtaaatatatcatgtttctgtgaaaatgtattatgaaataaaatgggaggaaacaccttttctagctag

SEQ ID NO: 31831 - DNA, 2374 bp, Homo Sapiens
ggttggtgcgagcttccagcttggccgcagttggttcgtagttcggctctggggtcttttgtgtccgggtctggcttggctttgtgtccgcgagtttttgttccgctccgcagcgctcttcccgggcaggagccgtgaggctcggaggcggcagcgcggtccccggccaggagcaagcgcgccggcgtgagcggcggcggcaaaggctgtggggagggggcttcgcagatccccgagatgccggagttcctggaagacccctcggtcctgacaaaagacaagttgaagagtgagttggtcgccaacaatgtgacgctgccggccggggagcagcgcaaagacgtgtacgtccagctctacctgcagcacctcacggctcgcaaccggccgccgctccccgccggcaccaacagcaaggggcccccggacttctccagtgacgaagagcgcgagcccaccccggtcctcggctctggggccgccgccgcgggccggagccgagcagccgtcggcaggaaagccacaaaaaaaactgataaacccagacaagaagataaagatgatctagatgtaacagagctcactaatgaagatcttttggatcagcttgtgaaatacggagtgaatcctggtcctattgtgggaacaaccaggaagctatatgagaaaaagcttttgaaactgagggaacaaggaacagaatcaagatcttctactcctctgccaacaatttcttcttcagcagaaaatacaaggcagaatggaagtaatgattctgacagatacagtgacaatgaagaagactctaaaatagagctcaagcttgagaagagagaaccactaaagggcagagcaaagactccagtaacactcaagcaaagaagagttgagcacaatcaggtgggagaaaaaacagaggaaagaagagtagaaagggatattcttaaggaaatgttcccctatgaagcatctacaccaacaggaattagtgctagttgccgcagaccaatcaaaggggctgcaggccggccattagaactcagtgatttcaggatggaggagtctttttcatctaaatatgttcctaagtatgttcccttggcagatgtcaagtcagaaaagacaaaaaagggacgctccattcccgtatggataaaaattttgctgtttgttgttgtggcagtttttttgtttttggtctatcaagctatggaaaccaaccaagtaaatcccttctctaattttcttcatgttgaccctagaaaatccaactgaatggtatctctttggcacgttcaacttggtctcctattttcaataactgttgaaaaacatttgtgtacacttgttgactccaagaactaaaaataatgtgatttcgcctcaataaatgtagtatttcattgaaaagcaaacaaaatatatataaatggacttcattaaaatgtttttgaactttggactagtaggagatcactttgtgccatatgaataatcttttttagctctggaactttttgtaggctttatttttttaatgtgggcatcttatttcatttttgaaaaaatgtatatgttttttgtgtatttgggaaacgaagggtgaaacatggtagtataatgtgaagctacacatttaaatacttagaattcttacagaaaagattttaagaattattctctgctgaataaaaactgcaaatatgtgaaacataatgaaattcagtaagaggaaaagtaacttggttgtactttttgtaactgcaacaaagtttgatggtgtttatgaggaaaagtacagcaataatctcttctgtaacctttattaatagtaatgttgttgtagccctatcatactcactttttaagacacagtatcatgaaagtcctatttcagtaagacccatttacatacagtagatttttagcagagatcttttagtgtaacatacatattttagagaattgttggctagctgtacatgttttgaaaagctgtttagctagctataaggctataattggaaatttgtattttttatttacagcaaaacatttattcagtcatccagtttgctaccaaaatatgttttagataagtgtgtgtatgtttgtttagaagttagaaattgtaaacactggtcttatgtttcatttggattcattattgcattgtcttgttaccagaaacaaattttgccgagctttttttgccctatatttcccagcataatttgattagaaagtacaaaaagggccgggcgcggtggcttacgcctgtaatcccagcactttgggaggccagggcgggtggatcacgaggtcaggagatcgggaccatcctggccaacatggtgaaaccccgtctctacta

SEQ ID NO: 31832 - DNA, 3951 bp, Homo Sapiens
gctgtcacttggctctctggctggagcttgaggacgcaaggagggtttgtcactggcagactcgagactgtaggcactgccatggcccctgtgctcagtaaggactcggcggacatcgagagtatcctggctttaaatcctcgaacacaaactcatgcaactctgtgttccacttcggccaagaaattagacaagaaacattggaaaagaaatcctgataagaactgctttaattgtgagaagctggagaataattttgatgacatcaagcacacgactcttggtgagcgaggagctctccgagaagcaatgagatgcctgaaatgtgcagatgccccgtgtcagaagagctgtccaactaatcttgatattaaatcattcatcacaagtattgcaaacaagaactattatggagctgctaagatgatattttctgacaacccacttggtctgacttgtggaatggtatgtccaacctctgatctatgtgtaggtggatgcaatttatatgccactgaagagggacccattaatattggtggattgcagcaatttgctactgaggtattcaaagcaatgagtatcccacagatcagaaatccttcgctgcctcccccagaaaaaatgtctgaagcctattctgcaaagattgctctttttggtgctgggcctgcaagtataagttgtgcttcctttttggctcgattggggtactctgacatcactatatttgaaaaacaagaatatgttggtggtttaagtacttctgaaattcctcagttccggctgccgtatgatgtagtgaattttgagattgagctaatgaaggaccttggtgtaaagataatttgcggtaaaagcctttcagtgaatgaaatgactcttagcactttgaaagaaaaaggctacaaagctgctttcattggaataggtttgccagaacccaataaagatgccatcttccaaggcctgacgcaggaccaggggttttatacatccaaagactttttgccacttgtagccaaaggcagtaaagcaggaatgtgcgcctgtcactctccattgccatcgatacggggagtcgtgattgtacttggagctggagacactgccttcgactgtgcaacatctgctctacgttgtggagctcgccgagtgttcatcgtcttcagaaaaggctttgttaatataagagctgtccctgaggagatggagcttgctaaggaagaaaagtgtgaatttctgccattcctgtccccacggaaggttatagtaaaaggtgggagaattgttgctatgcagtttgttcggacagagcaagatgaaactggaaaatggaatgaagatgaagatcagatggtccatctgaaagccgatgtggtcatcagtgcctttggttcagttctgagtgatcctaaagtaaaagaagccttgagccctataaaatttaacagatggggtctcccagaagtagatccagaaactatgcaaactagtgaagcatgggtatttgcaggtggtgatgtcgttggtttggctaacactacagtggaatcggtgaatgatggaaagcaagcttcttggtacattcacaaatacgtacagtcacaatatggagcttccgtttctgccaagcctgaactacccctcttttacactcctattgatctggtggacattagtgtagaaatggccggattgaagtttataaatccttttggtcttgctagcgcaactccagccaccagcacatcaatgattcgaagagcttttgaagctggatggggttttgccctcaccaaaactttctctcttgataaggacattgtgacaaatgtttcccccagaatcatccggggaaccacctctggccccatgtatggccctggacaaagctcctttctgaatattgagctcatcagtgagaaaacggctgcatattggtgtcaaagtgtcactgaactaaaggctgacttcccagacaacattgtgattgctagcattatgtgcagttacaataaaaatgactggacggaacttgccaagaagtctgaggattctggagcagatgccctggagttaaatttatcatgtccacatggcatgggagaaagaggaatgggcctggcctgtgggcaggatccagagctggtgcggaacatctgccgctgggttaggcaagctgttcagattcctttttttgccaagctgaccccaaatgtcactgatattgtgagcatcgcaagagctgcaaaggaaggtggtgccaatggcgttacagccaccaacactgtctcaggtctgatgggattaaaatctgatggcacaccttggccagcagtggggattgcaaagcgaactacatatggaggagtgtctgggacagcaatcagacctattgctttgagagctgtgacctccattgctcgtgctctgcctggatttcccattttggctactggtggaattgactctgctgaaagtggtcttcagtttctccatagtggtgcttccgtcctccaggtatgcagtgccattcagaatcaggatttcactgtgatcgaagactactgcactggcctcaaagccctgctttatctgaaaagcattgaagaactacaagactgggatggacagagtccagctactgtgagtcaccagaaagggaaaccagttccacgtatagctgaactcatggacaagaaactgccaagttttggaccttatctggaacagcgcaagaaaatcatagcagaaaacaagattagactgaaagaacaaaatgtagctttttcaccacttaagagaagctgttttatccccaaaaggcctattcctaccatcaaggatgtaataggaaaagcactgcagtaccttggaacatttggtgaattgagcaacgtagagcaagttgtggctatgattgatgaagaaatgtgtatcaactgtggtaaatgctacatgacctgtaatgattctggctaccaggctatacagtttgatccagaaacccacctgcccaccataaccgacacttgtacaggctgtactctgtgtctcagtgtttgccctattgtcgactgcatcaaaatggtttccaggacaacaccttatgaaccaaagagaggcgtacccttatctgtgaatccggtgtgttaaggtgatttgtgaaacagttgctgtgaactttcatgtcacctacatatgctgatctcttaaaatcatgatccttgtgttcagctctttccaaattaaaacaaatatacattttctaaataaaaatatgtaatttcaaaatacatttgtaagtgtaaaaaatgtctcatgtcaatgaccattcaattagtggcataaaatagaataattcttttctgaggatagtagttaaataactgtgtggcagttaattggatgttcactgccagttgtcttatgtgaaaaattaactttttgtgtggcaattagtgtgacagtttccaaattgccctatgctgtgctccatatttgatttctaattgtaagtgaaattaagcattttgaaacaaagtactctttaacatacaagaaaatgtatccaaggaaacattttatcaataaaaattacctttaattttaatgctgtttctaagaaaatgtagttagctccataaagtacaaatgaagaaagtcaaaaattatttgctatggcaggataagaaagcctaaaattgagtttgtggactttattaagtaaaatccccttcgctgaaattgcttatttttggtgttggatagaggatagggagaatatttactaactaaataccattcactactcatgcgtgagatgggtgtacaaactcatcctcttttaatggcatttctctttaaactatgttcctaaccaaatgagatgataggatagatcctggttaccactcttttactgtgcacatatgggccccggaattc

SEQ ID NO: 31833 - DNA, 2553 bp, Homo Sapiens; identical to SEQ ID NO: 29390

SEQ ID NO: 31834 - DNA, 3090 bp, Homo Sapiens
ctcatatctagaattttgggtaggtactttgaatcattacgatctatctacttcttaggtgaggaaatagaggtttaaaatttagtccacagtctcgcaaggatggagcctggatcaaattttgggttatcagattccaatcacgtttcttagcttttcttttttttttccaactccagtttctgtcttgctccaaaaaaggggaaggagcggctgcggcgctcggtttcccgcctcctagggaagggaagggagacgagcaacgcggaggctggggcccccttccgggcggggcctactagtgggcggggcctgtcagtgagcggcccctgcccggaaggagccagtccggggcggagccgatggccttacaggggccggaagtggcctgcgggcggagaagtgcctcaggagtcctgacgcagtgtcttgggcgctaacggcggcggcggccttgtgtttagactccagaactccccacttgccgcgttctcgccgccgcaggctcccgggacgatggtgccccgcctgctgctgcgcgcctggccccggggccccgcggttggtccgggagcccccagtcggcccctcagcgccggctccgggcccggccagtacctgcagcgcagcatcgtgcccaccatgcactaccaggacagcctgcccaggctgcctattcccaaacttgaagacaccattaggagatacctcagtgcacagaagcctctcttgaatgatggccagttcaggaaaacagaacaattttgcaagagttttgaaaatgggattggaaaagaactgcatgagcagctggttgctctggacaaacagaataaacatacaagctacatttcgggaccctggtttgatatgtacctatctgctcgagactccgttgttctgaactttaatccatttatggctttcaatcctgacccaaaatctgagtataatgaccagctcacccgggcaaccaacatgactgtttctgccatccggtttctgaagacactccgggctggccttctggagccagaagtgttccacttgaaccctgcaaaaagtgacactatcaccttcaagagactcatacgctttgtgccttcctctctgtcctggtatggggcctacctggtcaatgcgtatcccctggatatgtcccagtattttcggcttttcaactcaactcgtttacccaaacccagtcgggatgaactcttcactgatgacaaggccagacacctcctggtcctaaggaaaggaaatttttatatctttgatgtcctggatcaagatgggaacattgtgagcccctcggaaatccaggcacatctgaagtacattctctcagacagcagccccgcccccgagtttcccctggcatacctgaccagtgagaaccgagacatctgggcagagctcaggcagaagctgatgagtagtggcaatgaggagagcctgaggaaagtggactcggcagtgttctgtctctgcctagatgacttccccattaaggaccttgtccacttgtcccacaatatgctgcatggggatggcacaaaccgctggtttgataaatcctttaacctcattatcgccaaggatggctctactgccgtccactttgagcactcttggggtgatggtgtggcagtgctcagattttttaatgaagtatttaaagacagcactcagacccctgccgtcactccacagagccagccagctaccactgactctactgtcacggtgcagaaactcaacttcgagctgactgatgccttaaagactggcatcacagctgctaaggaaaagtttgatgccaccatgaaaaccctcactattgactgcgtccagtttcagagaggaggcaaagaattcctgaagaagcaaaagctgagccctgacgcagttgcccagctggcattccagatggccttcctgcggcagtacgggcagacagtggccacctacgagtcctgtagcactgccgcattcaagcacggccgcactgagaccatccgcccggcctccgtctatacaaagaggtgctctgaggcctttgtcagggagccctccaggcacagtgctggtgagcttcagcagatgatggttgagtgctccaagtaccatggccagctgaccaaagaagcagcaatgggccagggctttgaccgacacttgtttgctctgcggcatctggcagcagccaaagggatcatcttgcctgagctctacctggaccctgcatacgggcagataaaccacaatgtcctgtccacgagcacactgagcagcccagcagtgaaccttgggggctttgcccctgtggtctctgatggctttggtgttgggtatgctgttcatgacaactggataggctgcaatgtctcttcctacccaggccgcaatgcccgggagtttctccaatgtgtggagaaggccttagaagacatgtttgatgccttagaaggcaaatccatcaaaagttaacttctgggcagatgaaaagctaccatcacttcctcatcatgaaaactgggaggccgggcatggtggctcatgcctgtaatcccagcattttgagaggctgaggcgggtggatcacttgaggtcaggagtttgagaccaacctggccaacatggtgaaaccttgtctctactaaaaatacaagaattagctgggtgtggtggcatgtgcctatatcccagctactgggaggttgaagcagaattgcttgaacccaggaggtggaggttgcagtgagctgagatcacaccactgcactccggcctgggcgacagagcgagactgtctcaaaaagacaaaaaagaaaaaaaactggggcctgtgtagccagtgggtgctattctgtgaaactaatcataagctgcctaggcagccagctacaggcttgagctttaaattcatggttttaaagctaaacgtaatttccacttgggactagatcacaactgaagataacaagagatttaagttttaagggcatttaatcaggaggaaaggtttggaaaactaactcaggtgtatttattgtttaagcagaaataaagtttaatttttgcttg

SEQ ID NO: 31835 - DNA, 2196 bp, Homo Sapiens
aattccggagccatggtgaacgaagccagaggaaacagcagcctcaacccctgcttggagggcagtgccagcagtggcagtgagagctccaaagatagttcgagatgttccaccccgggcctggaccctgagcggcatgagagactccgggagaagatgaggcggcgattggaatctggtgacaagtggttctccctggaattcttccctcctcgaactgctgagggagctgtcaatctcatctcaaggtttgaccggatggcagcaggtggccccctctacatagacgtgacctggcacccagcaggtgaccctggctcagacaaggagacctcctccatgatgatcgccagcaccgccgtgaactactgtggcctggagaccatcctgcacatgacctgctgccgtcagcgcctggaggagatcacgggccatctgcacaaagctaagcagctgggcctgaagaacatcatggcgctgcggggagacccaataggtgaccagtgggaagaggaggagggaggcttcaactacgcagtggacctggtgaagcacatccgaagtgagtttggtgactactttgacatctgtgtggcaggttaccccaaaggccaccccgaagcagggagctttgaggctgacctgaagcacttgaaggagaaggtgtctgcgggagccgatttcatcatcacgcagcttttctttgaggctgacacattcttccgctttgtgaaggcatgcaccgacatgggcatcacttgccccatcgtccccgggatctttcccatccagggctaccactcccttcggcagcttgtgaagctgtccaagctggaggtgccacaggagatcaaggacgtgattgagccaatcaaagacaacgatgctgccatccgcaactatggcatcgagctggccgtgagcctgtgccaggagcttctggccagtggcttggtgccaggcctccacttctacaccctcaaccgcgagatggctaccacagaggtgctgaagcgcctggggatgtggactgaggaccccaggcgtcccctaccctgggctctcagtgcccaccccaagcgccgagaggaagatgtacgtcccatcttctgggcctccagaccaaagagttacatctaccgtacccaggagtgggacgagttccctaacggccgctggggcaattcctcttcccctgcctttggggagctgaaggactactacctcttctacctgaagagcaagtcccccaaggaggagctgctgaagatgtggggggaggagctgaccagtgaagcaagtgtctttgaagtctttgttctttacctctcgggagaaccaaaccggaatggtcacaaagtgacttgcctgccctggaacgatgagcccctggcggctgagaccagcctgctgaaggaggagctgctgcgggtgaaccgccagggcatcctcaccatcaactcacagcccaacatcaacgggaagccgtcctccgaccccatcgtgggctggggccccagcgggggctatgtcttccagaaggcctacttagagtttttcacttcccgcgagacagcggaagcacttctgcaagtgctgaagaagtacgagctccgggttaattaccaccttgtcaatgtgaagggtgaaaacatcaccaatgcccctgaactgcagccgaatgctgtcacttggggcatcttccctgggcgagagatcatccagcccaccgtagtggatcccgtcagcttcatgttctggaaggacgaggcctttgccctgtggattgagcggtggggaaagctgtatgaggaggagtccccgtcccgcaccatcatccagtacatccacgacaactacttcctggtcaacctggtggacaatgacttcccactggacaactgcctctggcaggtggtggaagacacattggagcttctcaacaggcccacccagaatgcgagagaaacggaggctccatgaccctgcgtcctgacgccctgcgttggagccactcctgtcccgccttcctcctccacagtgctgcttctcttgggaactccactctccttcgtgtctctcccaccccggcctccactcccccacctgacaatggcagctagactggagtgaggcttccaggctcttcctggacctgagtcggccccacatgggaacctagtactctctgctcta

SEQ ID NO: 31836 - DNA, 6115 bp, Homo Sapiens
caaatacaaaagattttgactcttctgaagatgagaaacacagcaaaaaaggaatggataatcaagggcacaaaaatttgaagacctcacaagaaggatcatctgatgatcgtgaaagaaaacaagagagagagactttctcttcagcagaaggcacagttgataaagacacgaccatcatggaattaagagatcgacttcctaagaagcagcaagcaagtgcttccactgatggtgtcgataagctttctgggaaagagcagagttttacttctttggaagttagaaaagttgctgaaactaaagaaaagagcaagcatctcaaaaccaaaacatgtaaaaaagtacaggatggcttatctgatattgcagagaaattcctaaagaaagaccagagcgatgaaacttctgaagatgataaaaagcagagcaaaaagggaactgaagaaaaaaagaaaccttcagactttaagaaaaaagtaattaaaatggaacaacagtatgaatcttcatctgatggcactgaaaagttacctgagcgagaagaaatttgtcattttcctaagggcataaaacaaattaagaatggaacaactgatggagaaaagaaaagtaaaaaaataagagataaaacttctaaaaagaaggatgaattatctgattatgctgagaagtcaacagggaaaggagatagttgtgactcttcagaggataaaaagagtaagaatggagcatatggtagagagaagaaaaggtgcaagttgcttggaaagagttcaaggaagagacaagattgttcatcatctgatactgagaaatattccatgaaagaagatggttgtaactcttctgataagagactgaaaagaatagaattgagggaaagaagaaatttaagttcaaagagaaatactaaggaaatacaaagtggctcatcatcatctgatgctgaggaaagttctgaagataataaaaagaagaagcaaagaacttcatctaaaaagaaggcagtcattgtcaaggagaaaaagagaaactccctaagaacaagcactaaaaggaagcaagctgacattacatcctcatcttcttctgatatagaagatgatgatcagaattctataggtgagggaagcagcgatgaacagaaaattaagcctgtcactgaaaatttagtgctgtcttcacatactggattttgccaatcttcaggagatgaagccttatctaaatcagtgcctgtcacagtggatgatgatgatgacgacaatgatcctgagaatagaattgccaagaagatgcttttagaagaaattaaagccaatctttcctctgatgaggatggatcttcagatgatgagccagaagaagggaaaaaaagaactggaaaacaaaatgaagaaaacccaggagatgaggaagcaaaaaatcaagtcaattctgaatcagattcagattctgaagaatctaagaagccaagatacagacataggcttttgcggcacaaattgactgtgagtgacggagaatctggagaagaaaaaaagacaaagcctaaagagcataaagaagtcaaaggcagaaacagaagaaaggtgagcagtgaagattcagaagattctgattttcaggaatcaggagttagtgaagaagttagtgaatccgaagatgaacagcggcccagaacaaggtctgcaaagaaagcagagttggaagaaaatcagcggagctataaacagaaaaagaaaaggcgacgtattaaggttcaagaagattcatccagtgaaaacaagagtaattctgaggaagaagaggaggaaaaagaagaggaggaggaagaggaggaggaggaggaagaggaggaggaagatgaaaatgatgattccaagtctcctggaaaaggcagaaagaaaattcggaagattcttaaagatgataaactgagaacagaaacacaaaatgctcttaaggaagaggaagagagacgaaaacgtattgctgagagggagcgtgagcgagaaaaattgagagaggtgatagaaattgaagatgcttcacccaccaagtgtccaataacaaccaagttggttttagatgaagatgaagaaaccaaagaacctttagtgcaggttcatagaaatatggttatcaaattgaaaccccatcaagtagatggtgttcagtttatgtgggattgctgctgtgagtctgtgaaaaaaacaaagaaatctccaggttcaggatgcattcttgcccactgtatgggccttggtaagactttacaggtggtaagttttcttcatacagttcttttgtgtgacaaactggatttcagcacggcgttagtgggtttgtcctcctcaatacttgcttttaattggatgaatgaatttgagaagtggcaagagggattaaaagatgatgagaagcttgaggtttctgaattagcaactgtgaaacgtcctcaggagagaagctacatgctgcagaggtggcaagaagatggtggtgttatgatcataggctatgagatgtatagaaatcttgctcaaggaaggaatgtgaagagtcggaaacttaaagaaatatttaacaaagctttggttgatccaggccctgattttgttgtttgtgatgaaggccatattctaaaaaatgaagcatctgctgtttctaaagctatgaattctatacgatcaaggaggaggattattttaacaggaacaccacttcaaaataacctaattgagtatcattgtatggttaattttatcaaggaaaatttacttggatccattaaggagttcaggaatagatttataaatccaattcaaaatggtcagtgtgcagattctaccatggtagatgtcagagtgatgaaaaaacgtgctcacattctctatgagatgttagctggatgtgttcagaggaaagattatacagcattaacaaaattcttgcctccaaaacacgaatatgtgttagctgtgagaatgacttctattcagtgcaagctctatcagtactacttagatcacttaacaggtgtgggcaataatagtgaaggtggaagaggaaaggcaggtgcaaagcttttccaagattttcagatgttaagtagaatatggactcatccttggtgtttgcagctagactacattagcaaagaaaataagggttattttgatgaagacagtatggatgaatttatagcctcagattctgatgaaacctccatgagtttaagctccgatgattatacaaaaaagaagaaaaaagggaaaaaggggaaaaaagatagtagctcaagtggaagtggcagtgacaatgatgttgaagtgattaaggtctggaattcaagatctcggggaggtggtgaaggaaatgtggatgaaacaggaaacaatccttctgtttctttaaaactggaagaaagtaaagctacttcttcttctaatccaagcagcccagctccagactggtacaaagattttgttacagatgctgatgctgaggttttagagcattctgggaaaatggtacttctctttgaaattcttcgaatggcagaggaaattggggataaagtccttgttttcagccagtccctcatatctctggacttgattgaagattttcttgaattagctagtagggagaagacagaagataaagataaaccccttatttataaaggtgaggggaagtggcttcgaaacattgactattaccgtttagatggttccactactgcacagtcaaggaagaagtgggctgaagaatttaatgatgaaactaatgtgagaggacgattatttatcatttctactaaagcaggatctctaggaattaatctggtagctgctaatcgagtaattatattcgacgcttcttggaatccatcttatgacatccagagtatattcagagtttatcgctttggacaaactaagcctgtttatgtatataggttcttagctcagggaaccatggaagataagatttatgatcggcaagtaactaagcagtcactgtcttttcgagttgttgatcagcagcaggtggagcgtcattttactatgaatgagcttactgaactttatacttttgagccagacttattagatgaccctaattcagaaaagaagaagaagagggatactcccatgctgccaaaggataccatacttgcagagctccttcagatacataaagaacacattgtaggataccatgaacatgattctcttttgaccacaaagaagaagaagaggttgactgaagaagaaagaaaagcagcttgggctgagtatgaaggagagaagagggtactgaccatgcgtttcaacataccaactgggaccaatttaccccctgtcagtttcaactctcaaactccttatattcctttcaatttgggagccctgtcagcaatgagtaatcaacagctggaggacctcattaatcaaggaagagaaaaagttgtagaagcaacaaacagtgtgacagcagtgaggattcaacctcttgaggatataatttcagctgtatggaaggagaacatgaatctctcagaggcccaagtacaggcgttagcattaagtagacaagccagccaggagcttgatgttaaacgaagagaagcaatctacaatgatgtattgacaaaacaacagatgttaatccagctgtgttcagcgaatacttatgaacagaaggctccagcagcagtacaatcagcagcaacagcaacaaatgacttatcaacaacaacactgggtcaccacatgatgccaaagccccgaaatttgatcatgaatccttctaactaccagcagattgatatgagaggaatgtatcagccagtggctggtggtatgcagccaccaccattacagcggtgcaccacccccaatgagaagcaaaaaatccaggaccttcccaagggaaatcaatgtgattttgcactaaaagcttaatggattgttaaaatcatagaaagatcttttatttttttaggaatcaatgacttaacagaactcaactgtataaatagtttggtccccttaaatgccaatcttccatattagttttacttttttttttttaaatagggcataccatttcttcctgacatttgtcagtgatgttgcctagaatcttcttacacacgctgagtacagaagatatttcaaattgttttcagtgaaaacaagtccttccataatagtaacaactccacagatttcctctctaaatttttatgcctgcttttagcaaccataaaattgtcataaaattaataaatttaggaaagaataaagatttatatattcattctttacatataaaaacacacagctgagttcttagagttgattcctcaagttatgaaatacttttgtacttaatccatttcttgattaaagtgattgaaatggttttaatgttcttttgagctgaagtcctgaaactgggctcctgctttattgtctctgtgacctgaaagttagaaactgaggggttatctttgacacagaatttgtgtgcaaatattcttaaatcctactgccctaaaagttggagaagtcttgcagttatcttagcattgtataaacagccttaagtagagcctaagaagagaattcctttccctcctttagtccttctccattttttattttcagttatatgtgctgaaataattactggtaaaattcagggttgtggattatcttccacacatgaattttctctctcctggcacgaatataaagcacatctcttaactgcatggtgccagtgctaatgcttcatcctgttgctggcagtgggatgtggacttagaaaatcaagttctagcattttagtaggttaacactgaagttgtggttgttaggttcacaccctgttttataaacaacatcaaaatggcagaaccattgctgactttaggttcacatgaggaatgtacttttaacaattcccagtactatcagtattgtggaaataattcctctgaaagataaggatcactggcttctatgcgcttcttttctctcatcatcatgttcttttaccccagtttccttacattttttaaattgtttcagag

SEQ ID NO: 31837 - DNA, 3908 bp, Homo Sapiens
ctaaaggttagcccaaataaatcgagattctcagggaatgacagagtttcctggaggagggatggaggcgcaacatgttacgctgtgcttgacagaggcagtcaccgtggcagatggtgacaacttagaaaatatggaaggcgtaagcttgcaagcagtaacacttgcagatggttctactgcttacatacaacacaattctaaagatgcaaaactcatagatggccaggtcattcagttggaagatggttctgcggcctatgttcaacatgtacccatacctaaaagtacaggggacagtttgcgtctagaggatggtcaagcagtacagttagaagatggtaccacagcatttattcaccacacctccaaagatagttatgaccagagtgcattacaggcggttcagctggaagatggtaccacagcttatatccaccatgcagtgcaagtcccgcagtctgacaccatcttggcaattcaggctgatgggacagtggcaggtctgcacactggggatgctacaattgaccctgacaccatcagtgctttggaacagtatgcagcaaaggtgtccattgatggaagtgaaagtgtagcaggtactggaatgattggagaaaatgagcaagagaaaaaaatgcagattgttttacaaggacatgctacaagagtaactgctaaatctcaacagagtggagagaaggcatttcgatgtgaatatgatggatgtggaaaattatatacaacagctcatcatctcaaggtccatgagaggtcacacacaggagatcggccttatcagtgtgagcatgcaggctgtgggaaggcatttgcaacaggttatggattaaaaagtcacgtcagaactcatacaggagaaaagccatatcggtgttcggaagataattgtactaaatctttcaaaacttcaggagatctacagaaacacatcagaactcatacaggagaaaggccctttaagtgtcccttcgaaggctgcggtcggtcctttacaacatcaaatatcagaaaagtgcacgttaggacacacacaggagaaagaccttattactgcacagagccaggatgtgggagggcatttgccagtgcaacaaattataaaaaccatgtgaggatacacacaggagaaaagccatatgtttgtacagttcctgggtgtgacaaaaggtttacagaatattccagtttgtacaaacatcatgttgtccacactcattccaaaccttacaactgtaaccactgtgggaagacatacaagcagatctccacgctggccatgcacaaacggacagcccacaacgacactgagcccatcgaggaggagcaggaagccttctttgagccgcccccaggtcaaggtgaagatgttcttaaagggtcccagattacgtatgttacaggtgtagaaggggacgacgttgtttctacacaagtagccacagtaacccaatctggactgagtcaacaagttacactcatatcccaggatgggactcagcatgtcaacatatctcaagctgacatgcaggccattggcaacaccatcacaatggtaacgcaggatggcacgcccatcacagtccccgcccatgatgcagtcatctcctcagcaggaacgcactctgttgctatggttactgctgagggtacagaaggggaacaggttgcaattgtagctcaagacttggcagcattccatactgcctcatcagaaatggggcaccagcagcatagccatcacttagtaaccacagaaaccagacctctgaccttagtagcaacatccaatggcacccagattgcagttcagcttggagaacagccatctctggaagaagccatcagaatagcgtctagaatccaacaaggagaaacgccagggttggatgattaatcctcagaacaatggagcaataaagcagaaggagtctttcatcttctggcagcagaaatccatgaagcccgggcccaggaaaattagaagttttccattcctgatacactgtacacatttttatgcgagagtggagaacattttattcttgacacttttgtgtatataacccttggaatagattctcagagtgattcattgtgtacaaggaagtatgaaattagggcaatacagtaaattttcatgttactcttttatcagatcacaaactcctagagtctacatgcaagactagtaaagtcttatggagtcttatgatggatttttaacttcccgtggaaaaaaaaataaaggctgtatctaaaataaaaaaaaaaaaaaaaattttttaagtaagagcaatgtttactgagcgatacaggactgagtactatgaagggtttacaaggatggaaatgcaccccgcccccgccctggccacccccgacacccagaagactacagtacttaggagttacacacaacggccgtaactggtggctatctgttcataacaaacaaaccatagcatatttatactgtatcacatcgagtgattatagaaatccatatatatattgcttgtataaaatctttttttttgtaaaaaatattaaaaaaaaaaaaaaaaaaaaaggaaagtataaaaaacatgtgcagttgaaagccctgccaggacagccagtctgtaaacattcggtgagtatgtgctttggaaggcgcccgcgcctcagtgcccacagcaaactccagcagggctggcgagggtgcgcccggctgccgcctcctgggcagggccgcgctggaccgaggtgggtgggggcatcagggccccgcagcacgcccctctccagttcgcatcagggcgaggggcagggctgggggcaggtgggttgcagtttcattctgagttccatcctcagccgcgttttggttgcaactcatggcttttcctggctgttcggaggttccttggatgggtgccctggtgaagaggccagagaagagcccagggctgcctcgttgggcgtctccctggcctcggtgcctctgtcctgcctccttcaagtggggccccaggcaggacaaccctacccgagggtcaactttggtctcagcgcttggtccctctgggtttcctcagcccgctcttcctcctgggtggctgatctgagttcacaaaaaagctcggctgatgctggctgtgctgaacctcattgtacagtttttcatgcaccaaaggaagggccatctggggcccccctcctcctctctcttcgtcacttttccttctcctcttcctcctcctccacctcctcccagcccatggtcacttcttctcgagctgctcgagcagtgggttgccttctgactcgggggtcttgacactgtcggtccggacgatgcaggtggggcggtgtcggttcagcatcaggatggaggctgctgccgctcctgcttcagctcctcaatctgggtcttcagctctgcgttcatgagttccagccgctcggattcccgctgcagaaactccgtgcgctccttcttcttgttccggcatcgggctgctgcgactttgttcttctcccggcgccttttccttcgctcctcttcctcatctagctcacttttcacgggctggggcctcttgcccagtttcacctccaggaagtgcaagggtgcaatcatggccccgaggttgcggatgtcagcgtatttcagctcctccacagtcagggccgagctggggagcccggtcagggggccaagccctggcagggagcctgtggtcaccgaagggtccgggatctgcccaggcatcatagcaggaggagtggcaggccagccttaacctcccccgccgccttgggcgccctcctcaccgcgagagcgctcgcgctcctctccccgcggggcgtcccgcgctttagagcacactggggtaccggat

SEQ ID NO: 31838 - DNA, 2417 bp, Homo Sapiens
tatattggcagttattgagggtaaagcaatatattgtaacagaatgtataaatatttttgataaaacagtctatattttattaaaaaatgaattataacccattttcagttttgcctgcatcataagagtgagcactccattgctttctttcctggccacactgctacaatccagcactaactatccatgtccagggtaaggatcgagatcgagaagcccacactgccagtgaaaaagctacgtctttactgcataaattagaggaagcaatttcggaacaacggaaccttcaaactataaatactgaattatcgaacacttgccaggcacttcagcagaagacaaggaaactgaagaagctttttagatgaggaatttcctcactatgattccctgtcctgcgcagatgcaattcaacaacctcttcaagaaaaattgaagcagtgttgccacaaactatatggtggtcaagaagcaagaatacatcagacacccctgaccttgaaacatacgtgctggtacacacctctgctggatgccttatctctggatagttttacagcagttccaaccctggaatcaacacctttctcaggtgtagccaaccaaatccacactctgtgtgaaaggcccacatatggagaagtaaaggatggtgctttggatgtaaaaagacaacacaagtgcccaggccccacaagtggccccagcccaggaacgaatctctcaggctgcatcaggatgaatgatgacccaagtatggaagagaatggtgttgaacgcgtgtgtcctgagagcctgctgcagtccaggggatattcctcactaccattacccagacacacttcatcgacagacggtactataacttcaagtgatcctggattagaaattctgaatatggcttcttgtgaccttgacagaaactcgctctgtaagaaagaggaggatacaagatcagcttctcccacgatagaggcccaaggcacaagtccagctcatgataatattgcattccaagactctacgagtaaggataaaaccatattaaatctggaagccaaagaggaaccagaaacaatagaagaacataaaaaagaacatgcttcaggagactctgtggtttcccctcttcctgtaaccactgtgaaatcggttaacgttagacaaagtgagaacacttctgctaatgagaaggaggtggaggcagaatttctcagattatctttgggatttaagtgtgactggtttaccttggagaagagagtgaagcttgaagagaggtcccgtgactgggcagaagaaaatttgaagaaagaaatcactaactctttaaaactattagagtctttaacacctctgtgtgaagatgacaaccaggcacaggaaatcattaagaagctggagaagagtataaagtttcttagccagtgtgcagcacgagtggccagtagggctgagatgttgggagccatcaatcaggaaagccgggttagtaaagcagttgaagtgatgattcagcacgtagaaaacttgaagaggatgtatgccaaagagcacgctgaattagaagaactgaaacaggttcttctgcagaatgaaaggtctttcaatcctcttgaagatgatgatgactgccaaattaaaaaacgttcagcttctctaaactccaagccatcttctctacgaagagtgactattgcctctttacccagaaatattggaaatgcaggaatggtggctgggatggaaaataatgatcgattcagtagaaggtcaagcagttggcgtattttggggtcaaagcagagtgaacaccgtccctcattacctcgatttattagcacctattcctgggcagatgctgaagaagaaaaatgtgaactaaaaactaaagatgactcagagccatctggagaagaaacagtagaaaggacaaggaagccaagtctttctgaaaagaaaaataatccatcaaagtgggatgtctcttcagtttatgacacaatagcttcctgggcaacaaatctcaagtcctccatcagaaaggctaataaggccctctggctctctattgcattcattgtactgtttgcagctttgatgagcttcctcacaggccaattattccagaagtctgtggatgccgctcccacacagcaagaggactcatggacgtctctagaacatatcttgtggccatttaccagactccgacacaatgggccaccaccagtgtgacagcaggacatcctaatatatggatcttgatttttaagtttcagtatctgaacttcgtaaattagtaacttttagctgggaaagtatagcatgaaaccagaggttctcagaatgaccgtaagatagcttacatttcctctttttgcctttatctccccaactaaaatacaatggg

SEQ ID NO: 31839 - DNA, 2212 bp, Homo Sapiens
tgccggctgctcctcgaccaggcctccttctcaacctcagcccgcggcgccgacccttccggcaccctcccgccccgtctcgtactgtcgccgtcaccgccgcggctccggccctggccccgatggctctgtgcaacggagactccaagctggagaatgctggaggagaccttaaggatggccaccaccactatgaaggagctgttgtcattctggatgctggtgctcagtacgggaaagtcatagaccgaagagtgagggaactgttcgtgcagtctgaaattttccccttggaaacaccagcatttgctataaaggaacaaggattccgtgctattatcatctctggaggacctaattctgtgtatgctgaagatgctccctggtttgatccagcaatattcactattggcaagcctgttcttggaatttgctatggtatgcagatgatgaataaggtatttggaggtactgtgcacaaaaaaagtgtcagagaagatggagttttcaacattagtgtggataatacatgttcattattcaggggccttcagaaggaagaagttgttttgcttacacatggagatagtgtagacaaagtagctgatggattcaaggttgtggcacgttctggaaacatagtagcaggcatagcaaatgaatctaaaaagttatatggagcacagttccaccctgaagttggccttacagaaaatggaaaagtaatactgaagaatttcctttatgatatagctggatgcagtggaaccttcaccgtgcagaacagagaacttgagtgtattcgagagatcaaagagagagtaggcacgtcaaaagttttggttttactcagtggtggagtagactcaacagtttgtacagctttgctaaatcgtgctttgaaccaagaacaagtcattgctgtgcacattgataatggctttatgagaaaacgagaaagccagtctgttgaagaggccctcaaaaagcttggaattcaggtcaaagtgataaatgctgctcattctttctacaatggaacaacaaccctaccaatatcagatgaagatagaaccccacggaaaagaattagcaaaacgttaaatatgaccacaagtcctgaagagaaaagaaaaatcattggggatacttttgttaagattgccaatgaagtaattggagaaatgaacttgaaaccagaggaggttttccttgcccaaggtactttacggcctgatctaattgaaagtgcatcccttgttgcaagtggcaaagctgaactcatcaaaacccatcacaatgacacagagctcatcagaaagttgagagaggagggaaaagtaatagaacctctgaaagattttcataaagatgaagtgagaattttgggcagagaacttggacttccagaagagttagtttccaggcatccatttccaggtcctggcctggcaatcagagtaatatgtgctgaagaaccttatatttgtaaggactttcctgaaaccaacaatattttgaaaatagtagctgatttttctgcaagtgttaaaaagccacataccctattacagagagtcaaagcctgcacaacagaagaggatcaggagaagctgatgcaaattaccagtctgcattcactgaatgccttcttgctgccaattaaaactgtaggtgtgcagggtgactgtcgttcctacagttacgtgtgtggaatctccagtaaagatgaacctgactgggaatcacttatttttctggctaggcttatacctcgcatgtgtcacaacgttaacagagttgtttatatatttggcccaccagttaaagaacctcctacagatgttactcccactttcttgacaacaggggtgctcagtactttacgccaagctgattttgaggcccataacattctcagggagtctgggtatgctgggaaaatcagccagatgccggtgattttgacaccattacattttgatcgggacccacttcaaaagcagccttcatgccagagatctgtggttattcgaacctttattactagtgacttcatgactggtatacctgcaacacctggcaatgagatccctgtagaggtggtattaaagatggtcactgagattaagaagattcctggtatttctcgaattatgtatgacttaacatcaaagcccccaggaactactgagtgggagtaataaacttc

SEQ ID NO: 31840 - DNA, 5117 bp, Homo Sapiens
ccccagccgcatgacgcgcggaggaggcagcgggacgagcgcgggagccgggaccgggtagccgcgcgctgggggtgggcgccgctcgctccgccccgcgaagcccctgcgcgctcagggacgcggcccccccgcggcagccgcgctaggctccggcgtgtggccgcggccgccgccgcgctgccatgtctccgggcaagccggggcgggcggagcggggacgaggcggaccggctggcggaggaggaggcgaaggagacggcaggaggcggcgacgacggtgcccgggctcgggcgcacggcggggcccgattcgcgcgtccggggcacgttccagggcgcgcggggcatgaagccggcggcgcgggaggcgcggctgcctccgcgctcgcccgggctgcgctgggcgctgccgctgctgctgctgctgctgcgcctgggccagatcctgtgcgcaggtggcacccctagtccaattcctgacccttcagtagcaactgttgccacaggggaaaatggcataacgcagatcagcagtacagcagaatcctttcataaacagaatggaactggaacacctcaggtggaaacaaacaccagtgaggatggtgaaagctctggagccaacgatagtttaagaacacctgaacaaggatctaatgggactgatggggcatctcaaaaaactcccagtagcactgggcccagtcctgtgtttgacattaaagctgtttccatcagtccaaccaatgtgatcttaacttggaaaagtaatgacacagctgcttctgagtacaagtatgtagtaaagcataagatggaaaatgagaagacaattactgttgtgcatcaaccatggtgtaacatcacaggcttacgtccagcgacttcatatgtattctccatcactccaggaataggcaatgagacttggggagatcccagagtcataaaagtcatcacagagccgatcccagtttctgatctccgtgttgccctcacgggtgtgaggaaggctgctctctcctggagcaatggcaatggcaccgcctcctgccgggttcttcttgaaagcattggaagccatgaggagttgactcaagactcaagacttcaggtcaatatctcggacctgaagccaggggttcaatacaacatcaacccgtatcttctacaatcaaataagacaaagggagaccccttgggcacagaaggtggcttggatgccagcaatacagagagaagccgggcagggagccccaccgcccctgtgcatgatgagtccctcgtgggacctgtggacccatcctccggccagcagtcccgagacacggaagtcctgcttgtcgggttagagcctggcacccgatacaatgccaccgtttattcccaagcagcgaatggcacagaaggacagccccaggccatagagttcaggacaaatgctattcaggtttttgacgtcaccgctgtgaacatcagtgccacaagcctgaccctgatctggaaagtcagcgataacgagtcgtcatctaactatacctacaagatacatgtggcgggggagacagattcttccaatctcaacgtcagtgagcctcgcgctgtcatccccggactccgctccagcaccttctacaacatcacagtgtgtcctgtcctaggtgacatcgagggcacgccgggcttcctccaagtgcacaccccccctgttccagtttctgacttccgagtgacagtggtcagcacgacggagatcggcttagcatggagcagccatgatgcagaatcatttcagatgcatatcacacaggagggagctggcaattctcgggtagaaataaccaccaaccaaagtattatcattggtggcttgttccctggaaccaagtattgctttgaaatagttccaaaaggaccaaatgggactgaaggggcatctcggacagtttgcaatagaactgttcccagtgcagtgtttgacatccacgtggtctacgtcaccaccacggagatgtggctggactggaagagccctgacggtgcttccgagtatgtctaccatttagtcatagagtccaagcatggctctaaccacacaagcacgtatgacaaagcgattactctccagggcctgattccgggcaccttatataacatcaccatctctccagaagtggaccacgtctggggggaccccaactccactgcacagtacacacggcccagcaatgtgtccaacattgatgtaagtaccaacaccacagcagcaactttaagttggcagaactttgatgacgcctctcccacgtactcctactgccttcttattgagaaggctggaaattccagcaacgcaacacaagtagtcacggacattggaattactgacgctacagtcactgaattaatacctggctcatcatacacagtggagatctttgcacaagtaggggatgggatcaagtcactggaacctggccggaagtcattctgtacagatcctgcgtccatggcctccttcgactgcgaagtggtccccaaagagccagccctggttctcaaatggacctgccctcctggcgccaatgcaggctttgagctggaggtcagcagtggagcctggaacaatgcgacccacctggagagctgctcctctgagaatggcactgagtatagaacggaagtcacgtatttgaatttttctacctcgtacaacatcagcatcaccactgtgtcctgtggaaagatggcagcccccacccggaacacctgcactactggcatcacagatccccctcctccagatggatcccctaatattacatctgtcagtcacaattcagtaaaggtcaagttcagtggatttgaagccagccacggacccatcaaagcctatgctgtcattctcaccaccggggaagctggtcacccttctgcagatgtcctgaaatacacgtatgacgatttcaaaaagggagcctcagatacttatgtgacatacctcataagaacagaagaaaagggacgttctcagagcttgtctgaagttttgaaatatgaaattgacgttgggaatgagtcaaccacacttggttattacaatgggaagctggaacctctgggctcctaccgggcttgtgtggctggcttcaccaacattaccttccaccctcaaaacaaggggctcattgatggggctgagagctatgtgtccttcagtcgctactcagatgctgtttccttgccccaggatccaggtgtcatctgtggagcggtttttggctgtatctttggtgccctggttattgtgactgtgggaggcttcatcttctggagaaagaagaggaaagatgcaaagaataatgaagtgtccttttctcaaattaaacctaaaaaatctaagttaatcagagtggagaattttgaggcctacttcaagaagcagcaagctgactccaactgtgggttcgcagaggaatacgaagatctgaagcttgttggaattagtcaacctaaatatgcagcagaactggctgagaatagaggaaagaatcgctataataatgttctgccctatgatatttcccgtgtcaaactttcggtccagacccattcaacggatgactacatcaatgccaactacatgcctggctaccactccaagaaagattttattgccacacaaggacctttaccgaacactttgaaagatttttggcgtatggtttgggagaaaaatgtatatgccatcattatgttgactaaatgtgttgaacagggaagaaccaaatgtgaggagtattggccctccaagcaggctcaggactatggagacataactgtggcaatgacatcagaaattgttcttccggaatggaccatcagagatttcacagtgaaaaatatccagacaagtgagagtcaccctctgagacagttccatttcacctcctggccagaccacggtgttcccgacaccactgacctgctcatcaacttccggtacctcgttcgtgactacatgaagcagagtcctcccgaatcgccgattctggtgcattgcagtgctggggtcggaaggacgggcactttcattgccattgatcgtctcatctaccagatagagaatgagaacaccgtggatgtgtatgggattgtgtatgaccttcgaatgcataggcctttaatggtgcagacagaggaccagtatgttttcctcaatcagtgtgttttggatattgtcagatcccagaaagactcaaaagtagatcttatctaccagaacacaactgcaatgacaatctatgaaaaccttgcgcccgtgaccacatttggaaagaccaatggttacatcgcctaattccaaaggaataacctttctggagtgaaccagaccgtcgcacccacagcgaaggcacatgccccgatgtcgacatgtttttatatgtctaatatcttaattctttgttctgttttgtgagaactaattttgagggcatgaagctgcatatgatagatgacaaattggggctgtcgggggctgtggatgggtggggagcaaatcatctgcattcctgatgaccaatgggatgaggtcacttttttttttttcccccttgaggattgcggaaaaccaggaaaagggatctatgatttttttttccaaaacaatttcttttttaaaaagactattttatatgattcacatgctaaagccaggattgtgttgggttgaatatattttaagtatcagaggtctatttttacctactgtgtcttggaatctagccgatggaaaatacctaattgtggatgatgattgcgcagggaggggtacgtggcacctcttccgaatgggttttctatttgaacatgtgccttttctgaattatgcttccacaggcaaaactcagtagagatctatatttttgtactgaatctcataattggaatatacggaatatttaaacagtagcttagcatcagaggtttgcttcctcagtaacatttctgttctcatttgatcaggggaggcctctttgccccggccccgcttcccctgcccccgtgtgatttgtgctccattttttcttcccttttccctcccagttttc

SEQ ID NO: 31841 - DNA, 5969 bp, Homo Sapiens
tttgaatttgcatctcttcaagacacaagattaaaacaaaatttacgctaaattggattttaaattatcttccgttcatttatccttcgtctttcttatgtggatatgcaagcgagaagaagggactggacattcccaacatgctcactcccttaatctgtccgtctagaggtttggcttctacaaaccaagggagtcgacgagttgaagatgaagcccagagcggagtgctgttctcccaagttctggttggtgttggccgtcctggccgtgtcaggcagcagagctcgttctcagaagagcccccccagcattggcattgctgtcatcctcgtgggcacttccgacgaggtggccatcaaggatgcccacgagaaagatgatttccaccatctctccgtggtaccccgggtggaactggtagccatgaatgagaccgacccaaagagcatcatcacccgcatctgtgatctcatgtctgaccggaagatccagggggtggtgtttgctgatgacacagaccaggaagccatcgcccagatcctcgatttcatttcagcacagactctcaccccgatcctgggcatccacgggggctcctctatgataatggcagataaggatgaatcctccatgttcttccagtttggcccatcaattgaacagcaagcttccgtaatgctcaacatcatggaagaatatgactggtacatcttttctatcgtcaccacctatttccctggctaccaggactttgtaaacaagatccgcagcaccattgagaatagctttgtgggctgggagctagaggaggtcctcctactggacatgtccctggacgatggagattctaagatccagaatcagctcaagaaacttcaaagccccatcattcttctttactgtaccaaggaagaagccacctacatctttgaagtggccaactcagtagggctgactggctatggctacacgtggatcgtgcccagtctggtggcaggggatacagacacagtgcctgcggagttccccactgggctcatctctgtatcatatgatgaatgggactatggcctccccgccagagtgagagatggaattgccataatcaccactgctgcttctgacatgctgtctgagcacagcttcatccctgagcccaaaagcagttgttacaacacccacgagaagagaatctaccagtccaatatgctaaataggtatctgatcaatgtcacttttgaggggaggaatttgtccttcagtgaagatggctaccagatgcacccgaaactggtgataattcttctgaacaaggagaggaagtgggaaagggtggggaagtggaaagacaagtccctgcagatgaagtactatgtgtggccccgaatgtgtccagagactgaagagcaggaggatgaccatctgagcattgtgaccctggaggaggcaccatttgtcattgtggaaagtgtggaccctctgagtggaacctgcatgaggaacacagtcccctgccaaaaacgcatagtcactgagaataaaacagacgaggagccgggttacatcaaaaaatgctgcaaggggttctgtattgacatccttaagaaaatttctaaatctgtgaagttcacctatgacctttacctggttaccaatggcaagcatgggaagaaaatcaatggaacctggaatggtatgattggagaggtggtcatgaagagggcctacatggcagtgggctcactcaccatcaatgaggaacgatcggaggtggtcgacttctctgtgcccttcatagagacaggcatcagtgtcatggtgtcacgcagcaatgggactgtctcaccttctgccttcttagagccattcagcgctgacgtatgggtgatgatgtttgtgatgctgctcatcgtctcagccgtggctgtctttgtctttgagtacttcagccctgtgggttataacaggtgcctcgctgatggcagagagcctggtggaccctctttcaccatcggcaaagctatttggttgctctggggtctggtgtttaacaactccgtacctgtgcagaacccaaaggggaccacctccaagatcatggtgtcagtgtgggccttctttgctgtcatcttcctggccagctacactgccaacttagctgccttcatgatccaagaggaatatgtggaccaggtttctggcctgagcgacaaaaagttccagagacctaatgacttctcaccccctttccgctttgggaccgtgcccaacggcagcacagagagaaatattcgcaataactatgcagaaatgcatgcctacatgggaaagttcaaccagaggggtgtagatgatgcattgctctccctgaaaacagggaaactggatgccttcatctatgatgcagcagtgctgaactatatggcaggcagagatgaaggctgcaagctggtgaccattggcagtgggaaggtctttgcttccactggctatggcattgccatccaaaaagattctgggtggaagcgccaggtggaccttgctatcctgcagctctttggagatggggagatggaagaactggaagctctctggctcactggcatttgtcacaatgagaagaatgaggtcatgagcagccagctggacattgacaacatggcaggggtcttctacatgttgggggcggccatggctctcagcctcatcaccttcatctgcgaacaccttttctattggcagttccgacattgctttatgggtgtctgttctggcaagcctggcatggtcttctccatcagcagaggtatctacagctgcatccatggggtggcgatcgaggagcgccagtctgtaatgaactcccccaccgcaaccatgaacaacacacactccaacatcctgcgcctgctgcgcacggccaagaacatggctaacctgtctggtgtgaatggctcaccgcagaggcccctggacttcatccgacgggagtcatccgtctatgacatctcagagcaccgccgcagcttcacgcattctgactgcaaatcctacaacaacccgccctgtgaggagaacctcttcagtgactacatcagtgaggtagagagaacgttcgggaacctgcagctgaaggacagcaacgtgtaccaagatcactaccaccatcaccaccggccccatagtattggcagtgccagctccatcgatgggctctacgactgtgacaacccacccttcaccacccagtccaggtccatcagcaagaagcccctggacatcggcctcccctcctccaagcacagccagctcagtgacctgtacggcaaattctccttcaagagcgaccgctacagtggccacgacgacttgatccgctccgatgtctctgacatctcaacccacaccgtcacctatgggaacatcgagggcaatgccgccaagaggcgtaagcagcaatataaggacagcctgaagaagcggcctgcctcggccaagtcccgcagggagtttgacgagatcgagctggcctaccgtcgccgaccgccccgctcccctgaccacaagcgctacttcagggacaaggaagggctacgggacttctacctggaccagttccgaacaaaggagaactcaccccactgggagcacgtagacctgaccgacatctacaaggagcggagtgatgactttaagcgcgactccgtcagcggaggagggccctgtaccaacaggtctcacatcaagcacgggacgggcgacaaacacggcgtggtcagcggggtacctgcaccttgggagaagaacctgaccaacgtggagtgggaggaccggtccgggggcaacttctgccgcagctgtccctccaagctgcacaactactccacgacggtgacgggtcagaactcgggcaggcaggcgtgcatccggtgtgaggcttgcaagaaagcaggcaacctgtatgacatcagtgaggacaactccctgcaggaactggaccagccggctgccccagtggcggtgacgtcaaacgcctccaccactaagtaccctcagagcccgactaattccaaggcccagaagaagaaccggaacaaactgcgccggcagcactcctacgacaccttcgtggacctgcagaaggaagaagccgccctggccccgcgcagcgtaagcctgaaagacaagggccgattcatggatgggagcccctacgcccacatgtttgagatgtcagctggcgagagcacctttgccaacaacaagtcctcagtgcccactgccggacatcaccaccacaacaaccccggcggcgggtacatgctcagcaagtcgctctaccctgaccgggtcacgcaaaaccctttcatccccacttttggggacgaccagtgcttgctccatggcagcaaatcctacttcttcaggcagcccacggtggcgggggcgtcgaaagccaggccggacttccgggcccttgtcaccaacaagccggtggtctcggcccttcatggggccgtgccagcccgtttccagaaggacatctgtatagggaaccagtccaacccctgtgtgcctaacaacaaaaaccccagggctttcaatggctccagcaatgggcatgtttatgagaaactttctagtattgagtctgatgtctgagtgagggaacagagaggttaaggtgggtacgggagggtaaggctgtgggtcgcgtgatgcgcatgtcacggagggtgacgggggtgaacttggttcccatttgctcctttcttgttttaatttatttatggggatcctggagttctggttcctactgggggcaaccctggtgaccagcaccatctctcctccttttcacagttctctccttcttccccccgctgtcagccattcctgttcccatgagatgatgccatgggtctcagcaggggagggtagagcggagaaaggaagggcagcatgcgggcttcctcctggtgtggaagagctccttgatatcctctttgagtgaagctgggagaaccaaaaagaggctatgtgagcacaaaggtagcttttcccaaactgatcttttcatttaggtgaggaagcaaaagcatctatgtgagaccatttagcacactgcttgtgaaaggaaagaggctctggctaaattcatgctgcttagatgacatctgtctaggaatcatgtgccaagcagaggttgggaggccatttgtgtttatatataagccaaaaaatgcttgcttcaaccccatgagactcgatagtggtggtgaacagaacaaaaggtcattggtggcagagtggattcttgaacaaactggaaagtacgttatgatagtgtcccacggtgccttggggacaagagcaggtggattgtgcgtgcatgtgtgttcatgcacacttgcacccatgtgtagtcaggtgcctcaagagaaggcaaccttgactctttctattgtttctttcaatatccccaagcagtgtgattgtttggcttatatacagacagagatggccatgtattacctgaattttggctgtgtctcccttcatccttctggaataaggagaatgaaaattcttgataaagaagattctgtggtctaaacaaaaaaaggcggtgagcaatcctgcaagagcaaggtacataaacaagtcctcagtggttggcaactgtttcaacctgtttgaaccaagaaccttccaggaaggctaaagggaaaccgaatttcacagccatgattcttttgcccacacttgggagcaaaagattctacaaagctcttttgagcatttagactctcgactggccaaggtttggggaagaacgaagccacctttgaagaagtaaggagtcgtgtatggtagggtaagtgagagagggggatgtttccaatgctttgatcccttcttacttaacctgaagctagacgagcaggcttcttccccccaaaact

SEQ ID NO: 31842 - DNA, 6642 bp, Homo Sapiens
ttcccggacccctgtttgctttagagccgagccgcgccgcgccgatgccctcacactctgcgcctcctctcccgggactttaacaccacgctctcctccaccgaccaggtgaccttttgctctgagccagatcagagaagaattcggtgtccgtgcgggacgatgcctgagcaggagagacagatcacagccagagaaggggccagtcggaaaatcttatctaagctttctttgcctacccgtgcctgggaaccagcaatgaagaagagttttgcttttgacaatgttggctatgaaggtggtctggatggcctgggcccttcttctcaggtggccaccagcacagtcaggatcttgggcatgacttgccagtcatgtgtgaagtccattgaggacaggatttccaatttgaaaggcatcatcagcatgaaggtttccctggaacaagacagtgccactgtgaaatatgtgccatcggttgtgtgcctgcaacaggtttgccatcaaattggggacatgggcttcgaggccagcattgcagaaggaaaggcagcctcctggccctcaaggtccttgcctgcccaggaggctgtggtcaagctccgggtggagggcatgacctgccagtcctgtgtcagctccattgaaggcaaggtccggaaactgcaaggagtagtgagagtcaaagtctcactcagcaaccaagaggccgtcatcacttatcagccttatctcattcagcccgaagacctcagggaccatgtaaatgacatgggatttgaagctgccatcaagagcaaagtggctcccttaagcctgggaccaattgatattgagcggttacaaagcactaacccaaagagacctttatcttctgctaaccagaattttaataattctgagaccttggggcaccaaggaagccatgtggtcaccctccaactgagaatagatggaatgcattgtaagtcttgcgtcttgaatattgaagaaaatattggccagctcctaggggttcaaagtattcaagtgtccttggagaacaaaactgcccaagtaaagtatgacccttcttgtaccagcccagtggctctgcagagggctatcgaggcacttccacctgggaattttaaagtttctcttcctgatggagccgaagggagtgggacagatcacaggtcttccagttctcattcccctggctccccaccgagaaaccaggtccagggcacatgcagtaccactctgattgccattgccggcatgacctgtgcatcctgtgtccattccattgaaggcatgatctcccaactggaaggggtgcagcaaatatcggtgtctttggccgaagggactgcaacagttctttataatccctctgtaattagcccagaagaactcagagctgctatagaagacatgggatttgaggcttcagtcgtttctgaaagctgttctactaaccctcttggaaaccacagtgctgggaattccatggtgcaaactacagatggtacacctacatctgtgcaggaagtggctccccacactgggaggctccctgcaaaccatgccccggacatcttggcaaagtccccacaatcaaccagagcagtggcaccgcagaagtgcttcttacagatcaaaggcatgacctgtgcatcctgtgtgtctaacatagaaaggaatctgcagaaagaagctggtgttctctccgtgttggttgccttgatggcaggaaaggcagagatcaagtatgacccagaggtcatccagcccctcgagatagctcagttcatccaggacctgggttttgaggcagcagtcatggaggactacgcaggctccgatggcaacattgagctgacaatcacagggatgacctgcgcgtcctgtgtccacaacatagagtccaaactcacgaggacaaatggcatcacttatgcctccgttgcccttgccaccagcaaagcccttgttaagtttgacccggaaattatcggtccacgggatattatcaaaattattgaggaaattggctttcatgcttccctggcccagagaaaccccaacgctcatcacttggaccacaagatggaaataaagcagtggaagaagtctttcctgtgcagcctggtgtttggcatccctgtcatggccttaatgatctatatgctgatacccagcaacgagccccaccagtccatggtcctggaccacaacatcattccaggactgtccattctaaatctcatcttctttatcttgtgtacctttgtccagctcctcggtgggtggtacttctacgttcaggcctacaaatctctgagacacaggtcagccaacatggacgtgctcatcgtcctggccacaagcattgcttatgtttattctctggtcatcctggtggttgctgtggctgagaaggcggagaggagccctgtgacattcttcgacacgccccccatgctctttgtgttcattgccctgggccggtggctggaacacttggcaaagagcaaaacctcagaagccctggctaaactcatgtctctccaagccacagaagccaccgttgtgacccttggtgaggacaatttaatcatcagggaggagcaagtccccatggagctggtgcagcggggcgatatcgtcaaggtggtccctgggggaaagtttccagtggatgggaaagtcctggaaggcaataccatggctgatgagtccctcatcacaggagaagccatgccagtcactaagaaacccggaagcactgtaattgcgaggtctataaatgcacatggctctgtgctcattaaagctacccacgtgggcaatgacaccactttggctcagattgtgaaactggtggaagaggctcagatgtcaaaggcacccattcagcagctggctgaccggtttagtggatattttgtcccatttatcatcatcatgtcaactttgacgttggtggtatggattgtaatcggttttatcgattttggtgttgttcagaaatactttcctaaccccaacaagcacatctcccagacagaggtgatcatccggtttgctttccagacgtccatcacggtgctgtgcattgcctgcccctgctccctggggctggccacgcccacggctgtcatggtgggcaccggggtggccgcgcagaacggcatcctcatcaagggaggcaagcccctggagatggcgcacaagataaagactgtgatgtttgacaagactggcaccattacccatggcgtccccagggtcatgcgggtgctcctgctgggggatgtggccacactgcccctcaggaaggttctggctgtggtggggactgcggaggccagcagtgaacaccccttgggcgtggcagtcaccaaatactgtaaagaggaacttggaacagagaccttgggatactgcacggacttccaggcagtgccaggctgtggaattgggtgcaaagtcagcaacgtggaaggcatcctggcccacagtgagcgccctttgagtgcaccggccagtcacctgaatgaggctggcagccttcccgcagaaaaagatgcagtcccccagaccttctctgtgctgattggaaaccgtgagtggctgaggcgcaacggtttaaccatttctagcgatgtcagcgacgctatgacagaccacgagatgaaaggacagacagccatcctggtggctattgacggtgtgctctgtgggatgatcgcaatcgcagacgctgtcaagcaggaggctgccctggctgtgcacacgctgcagagcatgggtgtggacgtggttctgatcacgggggacaaccggaagacagccagagctattgccacccaggttggcatcaacaaagtctttgcagaggtgctgccttcgcacaaggtggccaaggtccaggagctccagaataaagggaagaaagtcgccatggtgggggatggggtcaatgactccccggccttggcccaggcagacatgggtgtggccattggcaccggcacggatgtggccatcgaggcagccgacgtcgtccttatcagaaatgatttgctggatgtggtggctagcattcacctttccaagaggactgtccgaaggatacgcatcaacctggtcctggcactgatttataacctggttgggatacccattgcagcaggtgtcttcatgcccatcggcattgtgctgcagccctggatgggctcagcggccatggcagcctcctctgtgtctgtggtgctctcatccctgcagctcaagtgctataagaagcctgacctggagaggtatgaggcacaggcgcatggccacatgaagcccctgacggcatcccaggtcagtgtgcacataggcatggatgacaggtggcgggactcccccagggccacaccatgggaccaggtcagctatgtcagccaggtgtcgctgtcctccctgacgtccgacaagccatctcggcacagcgctgcagcagacgatgatggggacaagtggtctctgctcctgaatggcagggatgaggagcagtacatctgatgacttcaggcaggcggcccggggcagggacttgcctccactcaccacaagctgagcaggacagccagcagcaggatgggctgagctagcctccagctttggggacttccgctccctggatatgtccagtcatcctgccctgcagcacgcggccttgtctgggtgcagctgggcttggcctggagaggacggccctgcctgcctcttggcctcacgggaccgtcagcatgggctttgtcttggactctagtccttggctggactgtagaaggtgagaggcgagtcaccctcctcacagacctctgcttggagtatttaggatgactgctgtgaaatggagaacagtttcatcaggaccaaaaaacctcactgggcctttccagagaactgcagacctcactgtcagggtctttctgatgacgcctgtctgtgtgcatcatgtttctgagaccacagtttacctcaggtgtgcctgttgctttcttcctgcatagtctgttcctttcttcgtacatagtctgttccttttctctcctgtgtgcttgtcagtggggacccctcgcaaccctgcctgtcacctgggagggtgggaccaatgtccttgtggtctttgctgctgctctcaggcgcttctccaatgctctggagtgtgcatttcagcttgaacctgcttcctggctcacacatccccagccagggagcttgccacactcttcttcaagttgaggagagttcttttttgcttaaagcccccttctccatggagtgttggcttctcaatagagtgttgttgctgaccagctggagtgagggcctcagagcctgacctgagagtccgtactcggcttcctgtggggtgtaggttctcgcgattcaggacgtccttccatatccctgcccagcctgtggtgcttgaaacgtttgccccatgggaaacgtatgtgtgcaggagcctccctgcacggcccaaggggcttcgttttcagtcttctgactgtcacctcgtggggttcagtagagaattcaattactagcgcctggccttgtgtggcttggaggaaatggtactgcccaaataggaggaaaacacagcctccctgagcctgcattctgcacgctgcccaggggcttcagaaaaggagtggccacagcaccccgaagggagcatctatttacctggcagtggctctcagagcagcagaacgggttcagttttagactctgaagttggttgtgattgacagaaccctttgggagcaaactagtagagttggattaaattctgggtgaaacccttttctcccacacaaaatagttttagtgatttttttcattgtccattacttgccaggggcagttttagcagcacttttgatagattacgtctaatcctcccaaccaaccagcagggtagctattactgtccacattttacaggcaaggaaacaggctccaagaggctgaggactttgcccaggatgacatagccaatggacaagcagtgtctgtcagctgtgaaggcttcactcttattgtccttctaccttgaatagaagttttcctgataagaataaacgaggaaaaggtccttgcctcctggaagaacaaatctaccaggtgatctattcattgtttcaactcagaatgcacttgattcaggaggtcatctgaccttcaccttggatggttagtttcactttttacatatagtttttgcagggttttattttataaaatccaagcgcgctgttgattgtgttttccttgttttcagccccccgactccagcccgcagcacatttccgctgtccgtcagtaattgtgtcctctctttatgcttgcttggggaatgttgttttctgactaggctgatcattatctaaagaatctaattctgttgatttttaaaacttttaggaccataaacgttgtgttcatatatggacatggaaatatttatataattttatagaaaataaccttttagatggtcaaagtgtaaggagtttttttgtcagataatcatttctacttcaaaaacatttcatgcaatattagaataaagttcctgtcattcctcta

SEQ ID NO: 31843 - DNA, 1580 bp, Homo Sapiens
tcctgatctctctcgctgtgagacatgtctgagactcctgctcagtgtagcattaagcaggaacgaatttcatatacacctccagagagcccagtgccgagttacgcttcctcgacgccacttcatgttccagtgcctcgagcgctcaggatggaggaagactcgatccgcctgcctgcgcacctgcgcttgcagccaatttactggagcagggatgacgtagcccagtggctcaagtgggctgaaaatgagttttctttaaggccaattgacagcaacacgtttgaaatgaatggcaaagctctcctgctgctgaccaaagaggactttcgctatcgatctcctcattcaggtgatgtgctctatgaactccttcagcatattctgaagcagaggaaacctcggattcttttttcaccattcttccaccctggaaactctatacacacacagccggaggtcatactgcatcagaaccatgaagaagataactgtgtccagaggacccccaggccatccgtggataatgtgcaccataaccctcccaccattgaactgttgcaccgctccaggtcacctatcacgacaaatcaccggccttctcctgaccccgagcagcggcccctccggtcccccctggacaacatgatccgccgcctctccccggctgagagagctcagggacccaggccgcaccaggagaacaaccaccaggagtcctaccctctgtcagtgtctcccatggagaataatcactgcccagcgtcctccgagtcccacccgaagccatccagcccccggcaggagagcacacgcgtgatccagctgatgcccagccccatcatgcaccctctgatcctgaacccccggcactccgtggatttcaaacagtccaggctctccgaggacgggctgcatagggaagggaagcccatcaacctctctcatcgggaagacctggcttacatgaaccacatcatggtctctgtctccccgcctgaagagcacgccatgcccattgggagaatagcagactgtagactgctttgggattacgtctatcagttgctttctgacagccggtacgaaaacttcatccgatgggaggacaaagaatccaaaatattccggatagtggatcccaacggactggctcgactgtggggaaaccataagaacagaacaaacatgacctatgagaaaatgtccagagccctgcgccactactacaaactaaacattatcaggaaggagccaggacaaaggcttttgttcaggtttatgaaaaccccagatgaaatcatgagtggccgaacagaccgtctggagcacctagagtcccaggagctggatgaacaaatataccaagaagatgaatgctgaaggaaccaacagtccacctcagcgggccagcagcccagggaacccctgcccaccaggattgctggaagtgtgacggagcaggcgggctgaggagagtggaaaaggaagcgacccagaaatggcagggacacttctcttgcagaccaagagggaccctggagcaccttagacaaactacccagcacaggcggggctgg

SEQ ID NO: 31844 - DNA, 1966 bp, Homo Sapiens
cctgatggagaatgctgtcctcgctgttggcgtaagtttctcaaatggcatagctattcttcagtgactaggtcagttctacatacatcctagacagccgagcacaacactggaaccccacccccatctccatcatgcttccattcagtttcttgctgcagcagctggttaactgactgcttatctgctgtacagatcccaaaactccattatgaagtacatcgtaattacccatctggattgcagtaatggcagtgaaggaatatgatcttggtatagctcattaattctgattttttgctttgaggaaaagagatacgtggcagcaacagctctaagttgactgcttttaatttaaccttagtggcacagagttaagaaaaatctgctcaccagagatattgacaggcttactgtgtaagcattggcctgatcgggcctggaagttttgcccctttcatctgtagggataagagggcctaagagaatagcagcaatctgagctctagagcaccaaaagaaataaggcacgatattgttccatagcacgttatccctggcttttgttaccagtaaaatgaatgactttgctgagacatacttagtgtagcaggtacaagttataaaagtgattcattacaactaagataaggaagaaaacaggaaaacagcacttgcccttcacacacacagaaacacacatgcacacacacacaaacacacccttgtcacagctcagaataaccaattccatccagggatcatattagcgatattggcactgtaatggtcgtttttacatttacatttattttctgttccgcattcacttaacatgtgcgtaaaagggaacaaagctagctggaggtagcaaagttttgaacttgaatcagggattgctaagaaaacttacaactaatgaccacagaaagtaagttctttgtcttctgtctgatacagctagatgtgattgtagccgtggtgcctgggcagatggtaaagaaacatgctgtcctcttatgacaatatgtgcagagaaggccccaaacgctggggtgagaggaacaacaaactgactaactcacggccgagttggagccagaaccaacaacagctcggctgccttcacactcatctgtcaaacacatggtgtatggctcccctgacagaaatgactcctataagcttcctcatactcgcgcattcttggaagtctgagactggaaatgcctacccagatatgttaagtcagtaaaggaaaactcatttgcaatgctgagaggagaaagaaaatcaatgaataggagagcatacactgtgggaaggctcagctgtactgagccaggcaaagcatccgattaccccactgctgtacacatcatgacctgggataaaccccttgggccgttggcctaagaaatatgttgcttttcatcctgtataactgcaactttgtgccggctcatattatgttctagagagctcatgtacaccatggtgaccatagttaataatactggattgtatgcttaaaatttgctaagagagtagatcttaagtcatcaccaaaaaaagtaactgtaagatgatggagatgtgttaattagcttgacggtggtaatcacaatatatgtgtatatcaaaacatcacattatacaccttaaatgtatataatatttgtcaattatcctcagtaaagccaaaaagaaataaatatattgcttttcaccctctggcgtggagggccctgaacagagccctctaaagaacagcttgtcctaatcatcatgtacctgatgaacctctgcttcccctgcagccagcgactctgcggacgatggctggtctccatggtccgagtggacctcctgttctacgagctgtggcaatggaattcagcagcgcgggcgctcctgcgatagcctcaacaaccgatgtgagggctcctcggtccagacacggacc

SEQ ID NO: 31845 - DNA, 2682 bp, Homo Sapiens
attcctgcgccgaggatggagggcctggcagtgcggttgctgcgcggcagcaggctgctaagaagaaatttcctgacttgtttgtcttcttggaagattcctcctcatgtctcaaaatcttcccagtcagaagctctactcaatataacaaataatggaatacactttgctcccctgcaaacatttacagatgaggaaatgatgataaagagttcagttaaaaaatttgctcaggaacaaattgcacctttggtttcaaccatggatgaaaattcgaaaatggagaaatcagtaatacaaggattatttcaacaagggttgatgggtattgaagttgacccagaatatggaggcacaggagcttcttttttatccactgtgctcgtgatagaggaattagccaaagttgatgcatctgtggctgtcttttgtgagatccagaacacattaattaacacactgattagaaaacatggaacagaagaacaaaaggccacctatttgcctcagctcactacagaaaaagtaggaagtttctgcctttcagaggctggagcaggtagtgactcatttgctttgaagaccagagctgataaagagggagattattatgtcctcaatggatcaaagatgtggatcagcagtgctgagcatgcagggctctttctggtgatggcaaatgtagaccctaccattggatataagggaattacctccttcttagtagatcgtgatactccgggccttcatatagggaaacctgaaaacaaattggggctcagagcttcttccacctgcccgttaacattcgaaaatgtcaaggttccagaagccaatatcttgggacaaattggacatggctataagtatgccatagggagtctcaatgaaggtagaataggaattgctgcacagatgctgggactggcgcaaggatgttttgactacactattccatatattaaagaaaggatacaatttggcaaaagactatttgattttcagggcctccaacaccaagtggctcacgtggccacccagctggaagctgcaagattactaacatacaatgctgctaggcttttagaagctggaaagccattcataaaagaagcgtcaatggccaaatactatgcatcagagattgcaggacaaacaacgagtaaatgtatcgagtggatggggggagtaggctacaccaaagattaccctgtggagaaatacttccgagatgcaaagattggtacgatatatgaaggagcttccaacatccagttgaacaccattgcaaagcatatcgatgcagaatactgacgtctataggagtgggacccctccctggtgtcactgctgtaaaattttaaacggttgtgtcttgttgggagtaagtgccttgcgtgggaataaacttccacagcattcgaatattttaatgaagcccttagtcagggtcctggtgttggcctttttggttttctcttttcaggctgtttaacttaggcacaggagatccacttttaaacttgggaaataagcacctgtatttttttccaaaactgtttttaaagctgtatacgcatacatatatatatttttactctgtcttactctgtcacccaggctagagtgcagtggcgcgatctcagctcactgcagccttgacctcctgggttccggtgattctcatgcctcatcctcccaagtagctggaactacaggtgtgcaccaccatgcctggttcatttttgtgtttttagtagagatggggttttaccatattgcccaggctggtcttctggcttctggatatcgcccaccttggcctcccaaagtgctgggattacagggatgagccaccatgcctggctgggtatttatattatcattctagtttcagagtatacagaagtttcatcccatcatttggaaaaataaaggcatctgaagtacaatattacttatagaaatagtttatattcctattaaatcttaatcttgtggcatcagggaaatatttgttacatagtaggcaatttttatccgtactttatagattcaactctaagttgcaagcgaagtcaaaactgatgaaaatttatttagaaaaatctaaaaattctggttttaaatatgagaatcagtggaaaataagggtataattttgtaggtcatatgattgaagaaaatattattttaacaatgtaaagcaatatgatttgttactataattaacctgtataaaagatacattttatggtggtttcagtaggtcattttaaaaaccaatgtgcattagttttcaagtataaggtttaagtaatttggtttaataatcagaaaatattcaatacagtgttggatatctgtcatgcactattttcagttgacaatttctgtattttaattgaatactgtttcttcagtcatggttattattgcactttatcctgaataatagttcagaaattgggttttggttcagtgattctcaagaaaaagatctcttgcccattaagaagtgtatcaaaatctcataaggaatgagggagagaagggggctgtacagtttgaaaaagcatattcaatattaaaatagttttatatttgggaaggcaaaaatgaatctattgttttgcaatataggttatacaggaaaatgcaataaaatatatatctggttgt

SEQ ID NO: 31846 - DNA, 1456 bp, Homo Sapiens
tgccccctcccgctgcggctctctggacgccatcccctcctcacctcgaagccaacatgaaggagacccggggctacggaggggatgcccccttctgcacccgcctcaaccactcctacacaggcatgtgggcgcccgacggttccgccgaggcgcggggcaacctcacgcgccctccagggtctggcgaggattgcggatcggtgtccgtggccttcccgatcaccatgctgctgactggtttcgtgggcaacgcactggccatgctgctcgtgtcgcgcagctaccggcgccgggagagcaagcgcaagaagtccttcctgctgtgcatcggctggctggcgctcaccgacctggtcgggcagcttctcaccaccccggtcgtcatcgtcgtgtacctgtccaagcagcgttgggagcacatcgacccgtcggggcggctctgcacctttttcgggctgaccatgactgttttcgggctctcctcgttgttcatcgccagcgccatggccgtcgagcgggcgctggccatcagggcgccgcactggtatgcgagccacatgaagacgcgtgccacccgcgctgtgctgctcggcgtgtggctggccgtgctcgccttcgccctgctgccggtgctgggcgtgggccagtacaccgtccagtggcccgggacgtggtgcttcatcagcaccgggcgagggggcaacgggactagctcttcgcataactggggcaaccttttcttcgcctctgcctttgccttcctggggctcttggcgctgacagtcaccttttcctgcaacctggccaccattaaggccctggtgtcccgctgccgggccaaggccacggcatctcagtccagtgcccagtggggccgcatcacgaccgagacggccattcagcttatggggatcatgtgcgtgctgtcggtctgctggtctccgctcctgataatgatgttgaaaatgatcttcaatcagacatcagttgagcactgcaagacacacacggagaagcagaaagaatgcaacttcttcttaatagctgttcgcctggcttcactgaaccagatcttggatccttgggtttacctgctgttaagaaagatccttcttcgaaagttttgccagatgagaaaaagaagactcagagagcaagaggaattttggggaaattaaaacctgcctttctgccaggatcacatcactggaagctccatgactctctttttgtaaaagaaaaaaaaatcacagaaacacccacctcccaaactattctcttttacttcttcccccaagcccacccccaaatataactgttatccagaagctgttatgtcctgtttccatacatgtttttgtacttttactatatctacatacatcaattaaacttatgtcctattgttttgtgaatttatatttgcgtatacattatcgtatgtccggaattc

SEQ ID NO: 31847 - DNA, 2510 bp, Homo Sapiens
ggcggcagcagccacccgatgtcttcggcgcccgagaagcagcagccaccgcacggcggcggcggcggcggcggcgggggaggcggcgcggccatggaccccgcgtcgtccggcccgtccaaggccaagaagaccaacgccggcatccggcgcccggagaagccgccctattcctacatcgcgctcatcgtcatggccatccagagttcacccaccaagcgcctgacgctgagcgagatctaccagttcctgcagagccgcttccccttcttccggggctcctaccagggctggaagaactccgtgcgccacaacctctcgctcaacgagtgcttcatcaagctacccaagggccttgggcggcccggcaagggccactactggaccatcgacccggccagcgagttcatgttcgaggagggctcctttcggcggcggccgcgcggcttccgaaggaaatgccaggcgctcaagcccatgtacagcatgatgaacgggctcggcttcaaccacctcccggacacctacggcttccagggctcggccggcggcctctcgtgcccgcccaacagcctggcgctggagggcggcctgggcatgatgaacggccacttgccgggcaacgtggacggcatggccctgcccagccactcggtgccccacctgccttccaacggcggccactcgtacatgggcggctgcggcggcgcggcggccggcgagtacccgcaccacgacagctcggtgcccgcctccccgctgctgcccaccggcgccggtggggtcatggagccgcacgccgtctactcgggctcggcggcggcctggccgccctcggcgtccgcggcgctcaacagcggcgcctcttatatcaagcagcagcccctgtccccctgtaaccccgcggccaaccccctgtccggcagcctctccacgcactccctggagcagccgtatctgcaccagaacagccacaacgccccagccgagctgcaaggcatcccgcggtatcactcgcagtcgcccagcatgtgtgaccgaaaggagtttgtcttctctttcaacgccatggcgtcctcttccatgcactcggccggcgggggctcctactaccaccagcaggtcacctaccaagacatcaagccttgcgtgatgtgaggctgccgccgcaggccctcctggtgcaggcaggcgggtcacagggaccctggaccggcacaagaaactgctttcttctcgaggtataaccgtcggcagaagaaaagggttccacctctccccaaccggagtttttggcaaggagtccccaatgcaaagacacagcgctgcggttggcacctccttcctcactccctcaaaattgttaagaaatgttagtggtgggtctgatctgactgcagccatcggtaaataaaagtttttgatcctgttgaacccgcctgagacggtgctgtgcaggggaaagccccgcacccacacaggaattctgctgaggtccccctccttccggccaatggcagaagtgggggaaaatttttagaagaaaagcaacatgtgagaccaatcattatcaaatacttttatttttgggtgagtattaaccttttaatttttaatttttttttgaaagaatgtcttggaatgcgcaagtctccctttagagccgtcttttgcagggagcgggaagtgacaagagctcagatctccctcccgatctccctccccacctccgaagtctcctccgtggaccacaggtggatctttgtgcgaacaacttgcatttcggaagccactgtccgtctttaaacagaaagtcaaaggagccacgaagcaagcggccgtccgggcgtccgcctccgtccccttccatgttcctcctcttccttcgcttcagcctcttctgttatgttttgtcttgaattttatttagactttttcagtgggtatttttctgtctcccaacctctactgtaaactttctggtccgagaacgagccgaacacagcgcgacgcagggactaggacggcccggtgaccgcgcggattcaggattgcggggacgcagaaaggttaaggcacttttaaaaactatagcaaggctcctgtttatttattctactttctttccctaataatcaaaacaccgcgtaggctcctccgtttatcagtattaatggtgtaactttgttggcaatatttgccgtgtagaattttttttagatatccattgtaaatttgaaacaaagaccgatctgtgtaaaaacaaatttccatatgttttatataaatatatatataatatgaaggactaccctcctttttttttttttgtattttggctgctagagtgcagcatttgtgacacgtatttgaaatttgaaatttccttctgcactgtataaaaggaccatttgaggatgttttgccttttgtgtattttttcctaaaaaaagaacaaaaataaaaatgtataacatttgtacatggcctttaaaattgtatcaactaga

SEQ ID NO: 31848 - DNA, 2187 bp, Homo Sapiens
agcccgggcggcgggctagggcgctcgcagggcttctgggccgaccccgctccggcgcctccgcttcccgcccggggcccgccctcgcggcccggcctcgctcccgggtcccagatgaccaccgagggcgggccgccgccggccccgctccgccgcgcgtgcagcccggtccccggcgcgctccaggccgccctgatgagcccgccgcccgccgccgccgccgccgccgccgccgccccggagaccacctcctcctcctcgtcgtcgtcctccgcctcctgcgcctcgtcctcgtcctcctccaattcggccagcgccccctcggctgcctgcaagagcgcgggcggcggcggcgcgggcgccgggagcgggggcgccaagaaggcgagctcggggctgcggcggcccgagaagccgccctactcgtacatcgcgctcatcgtcatggccatccagagctcgcccagcaagcgcctgacgctcagcgagatctaccagttcctgcaggcgcgcttccccttcttccgcggcgcctaccagggctggaagaactcggtgcgccacaatctctcgctcaacgagtgcttcatcaagctgcctaagggcctcgggcggcccggcaagggccactactggaccatcgacccggccagcgagttcatgttcgaggagggctcgttccgccgccggccgcgcggcttcaggcggaagtgccaggcgctcaagcccatgtaccaccgcgtggtgagcggcttgggcttcggggcgtcgctgctgccccagggcttcgacttccaggcgcccccgtcggcgccgctcggctgccacagccagggcggctacggcggcctcgacatgatgcccgcgggctacgacgccggcgcgggcgcccccagccacgcgcaccctcaccaccaccaccaccaccacgtcccgcacatgtcgcccaacccgggttccacctacatggccagctgcccggtgcccgcgggacccgggggcgtcggtgcggccgggggcggcggcggcggcgactacgggccggacagcagcagcagcccggtaccctcgtccccggccatggcgagcgccatcgaatgccactcgccctacacgagccctgcggcgcactggagctcgcctggcgcctcgccttacctcaagcagccgcctgccctgacgcccagcagcaaccccgccgcctcggcaggcctgcactccagcatgtcctcctactcgctggagcagagctacttgcaccagaacgctcgcgaggacctctcagtgggactgccccgttaccagcatcactctactccagtgtgtgacagaaaagatttcgtcctcaacttcaatgggatttcttctttccatccctcagctagcgggtcgtattatcaccatcaccaccagagcgtctgtcaggatattaagccctgcgtcatgtgaacggaaagaggccaagcgatggccgctctctcctctcccctcctcagagggggcagatagaaactgggacggattcaagtcacatgcacgcggatagcagtaagccacacacctgccacttagccagaatgcccaggatcgcgttggtcactgttatttgcctactgctggaagaaggacaaccgctggcaaggtagcgttccccaatctgaatacctgcaggctcccacatgagggagagggcagactcaggtgggaagatgtgccatgcgtaaggcatcaacgtgtatctgtgggatcttcgttgccttcagtaatcagggtgtgaaaaaagcagacaagttgtgtgtgtgtgtgtgtgtctaagaaaacttgtgtgcttttcaaaaaggcagtgctaagcacaagatttcaagaaagcctcttcttgttgcctagctgagtgggagagtcattttccccagacactacatttggatacaggtgccaaagaacattattaaggaattatttagaaacaatgtgtctagtttaagaaagtggttttcagtattgtgacaatacaacgtttttacaaggttgttttctaccaccatattttaaagatatttttatgaccgtgtatactcacactttgcttgtattttaaaaggaggatatatttgcacttatgtatacttttacagtttgccaaaatattttgttgtaaaattttttttcaataaaatgtatataaca

SEQ ID NO: 31849 - DNA, 42999 bp, Homo Sapiens
  misc_feature (21526)..(21527): n is a, c, g, or t
  misc_feature (23183)..(23183): n is a, c, g, or t
  misc_feature (24975)..(24977): n is a, c, g, or t
  misc_feature (28197)..(28197): n is a, c, g, or t
  misc_feature (28699)..(28699): n is a, c, g, or t
  misc_feature (28945)..(28945): n is a, c, g, or t
  misc_feature (34074)..(34074): n is a, c, g, or t
  misc_feature (34474)..(34474): n is a, c, g, or t
gctgacacgctgtcctctggcgacctgtcgtcggagaggttgggcctccggatgcgcgcggggctctggcctcacggtgaccggctagccggccgcgctcctgccttgagccgcctgccgcggcccgcgggcctgctgttctctcgcgcgtccgagcgtcccgactcccggtgccggcccgggtccgggtctctgacccacccgggggcggcggggaaggcggcgagggccaccgtgccccgtgcgctctccgctgcgggcgcccggggcgccgcacaaccccacccgctggctccgtgccgtgcgtgtcaggcgttctcgtctccgcggggttgtccgccgccccttccccggagtggggggtggccggagccgatcggctcgctggccggccggcctccgctcccggggggctcttcgatcgatgtggtgacgtcgtgctctcccgggccgggtccgagccgcgacgggcgaggggcggacgttcgtggcgaacgggaccgtccttctcgctccgcccgcgcggtcccctcgtctgctcctctccccgcccgccggccggcgtgtgggaaggcgtggggtgcggaccccggcccgacctcgccgtcccgcccgccgccttcgcttcgcgggtgcgggccggcggggtcctctgacgcggcagacagccctgcctgtcgcctccagtggttgtcgacttgcgggcggcccccctccgcggcggtgggggtgccgtcccgccggcccgtcgtgctgccctctcggggggggtttgcgcgagcgtcggctccgcctgggcccttgcggtgctcctggagcgctccgggttgtccctcaggtgcccgaggccgaacggtggtgtgtcgttcccgcccccggcgccccctcctccggtcgccgccgcggtgtccgcgcgtgggtcctgagggagctcgtcggtgtggggttcgaggcggtttgagtgagacgagacgagacgcgcccctcccacgcggggaagggcgcccgcctgctctcggtgagcgcacgtcccgtgctcccctctggcgggtgcgcgcgggccgtgtgagcgatcgcggtgggttcgggccggtgtgacgcgtgcgccggccggccgccgaggggctgccgttctgcctccgaccggtcgtgtgtgggttgacttcggaggcgctctgcctcggaaggaaggaggtgggtggacgggggggcctggtggggttgcgcgcacgcgcgcaccggccgggcccccgccctgaacgcgaacgctcgaggtggccgcgcgcaggtgtttcctcgtaccgcagggccccctcccttccccaggcgtccctcggcgcctctgcgggcccgaggaggagcggctggcgggtggggggagtgtgacccaccctcggtgagaaaagccttctctagcgatctgagaggcgtgccttgggggtaccggatcccccgggccgccgcctctgtctctgcctccgttatggtagcgctgccgtagcgacccgctcgcagaggaccctcctccgcttccccctcgacggggttgggggggagaagcgagggttccgccggccaccgcggtggtggccgagtgcggctcgtcgcctactgtggcccgcgcctcccccttccgagtcgggggaggatcccgccgggccgggcccggcgctcccacccagcgggttgggacgcggcggccggcgggcggtgggtgtgcgcgcccggcgctctgtccggcgcgtgaccccctccgtccgcgagtcggctctccgcccgctcccgtgccgagtcgtgaccggtgccgacgaccgcgtttgcgtggcacggggtcgggcccgcctggccctgggaaagcgtcccacggtgggggcgcgccggtctcccggagcgggaccgggtcggaggatggacgagaatcacgagcgacggtggtggtggcgtgtcgggttcgtggctgcggtcgctccggggcccccggtggcggggccccggggctcgcgaggcggttctcggtgggggccgagggccgtccggcgtcccaggcggggcgccgcgggaccgccctcgtgtctgtggcggtgggatcccgcggccgtgttttcctggtggcccggccgtgcctgaggtttctccccgagccgccgcctctgcgggctcccgggtgcccttgccctcgcggtccccggccctcgcccgtctgtgccctcttccccgcccgccgcccgccgatcctcttcttccccccgagcggctcaccggcttcacgtccgttggtggccccgcctgggaccgaacccggcaccgcctcgtggggcgccgccgccggccactgatcggcccggcgtccgcgtcccccggcgcgcgccttggggaccgggtcggtggcgcgccgcgtggggcccggtgggcttcccggagggttccgggggtcggcctgcggcgcgtgcgggggaggagacggttccgggggaccggccgcggctgcggcggcggcggtggtggggggagccgcggggatcgccgagggccggtcggccgccccgggtgccccgcggtgccgccggcggcggtgaggccccgcgcgtgtgtcccggctgcggtcggccgcgctcgaggggtccccgtggcgtccccttccccgccggccgcctttctcgcgccttccccgtcgccccggcctcgcccgtggtctctcgtcttctcccggcccgctcttccgaaccgggtcggcgcgtcccccgggtgcgcctcgcttcccgggcctgccgcggcccttccccgaggcgtccgtcccgggcgtcggcgtcggggagagcccgtcctccccgcgtggcgtcgccccgttcggcgcgcgcgtgcgcccgagcgcggcccggtggtccctcccggacaggcgttcgtgcgacgtgtggcgtgggtcgacctccgccttgccggtcgctcgccctctccccgggtcggggggtggggcccgggccggggcctcggccccggtcgctgcctcccgtcccgggcgggggcgggcgcgccggccggcctcggtcgccctcccttggccgtcgtgtggcgtgtgccacccctgcgccggcgcccgccggcggggctcggagccgggcttcggccgggccccgggccctcgaccggaccggctgcgcgggcgctgcggccgcacggcgcgactgtccccgggccgggcaccgcggtccgcctctcgctcgccgcccggacgtcggggccgccccgcggggcgggcggagcgccgtccccgcctcgccgccgcccgcgggcgccggccgcgcgcgcgcgcgcgtggccgccggtccctcccggccgccgggcgcgggtcgggccgtccgcctcctcgcgggcgggcgcgacgaagaagcgtcgcgggtctgtggcgcggggcccccggtggtcgtgtcgcgtggggggcgggtggttggggcgtccggttcgccgcgccccgccccggccccaccggtcccggccgccgcccccgcgcccgctcgctccctcccgtccgcccgtccgcggcccgtccgtccgtccgtccgtcgtcctcctcgcttgcggggcgccgggcccgtcctcgcgaggccccccggccggccgtccggccgcgtcgggggctcgccgcgctctaccttacctacctggttgatcctgccagtagcatatgcttgtctcaaagattaagccatgcatgtctaagtacgcacggccggtacagtgaaactgcgaatggctcattaaatcagttatggttcctttggtcgctcgctcctctcctacttggataactgtggtaattctagagctaatacatgccgacgggcgctgacccccttcgcgggggggatgcgtgcatttatcagatcaaaaccaacccggtcagcccctctccggccccggccggggggcgggcgccggcggctttggtgactctagataacctcgggccgatcgcacgccccccgtggcggcgacgacccattcgaacgtctgccctatcaactttcgatggtagtcgccgtgcctaccatggtgaccacgggtgacggggaatcagggttcgattccggagagggagcctgagaaacggctaccacatccaaggaaggcagcaggcgcgcaaattacccactcccgacccggggaggtagtgacgaaaaataacaatacaggactctttcgaggccctgtaattggaatgagtccactttaaatcctttaacgaggatccattggagggcaagtctggtgccagcagccgcggtaattccagctccaatagcgtatattaaagttgctgcagttaaaaagctcgtagttggatcttgggagcgggcgggcggtccgccgcgaggcgagccaccgcccgtccccgccccttgcctctcggcgccccctcgatgctcttagctgagtgtcccgcggggcccgaagcgtttactttgaaaaaattagagtgttcaaagcaggcccgagccgcctggataccgcagctaggaataatggaataggaccgcggttctattttgttggttttcggaactgaggccatgattaagagggacggccgggggcattcgtattgcgccgctagaggtgaaattcttggaccggcgcaagacggaccagagcgaaagcatttgccaagaatgttttcattaatcaagaacgaaagtcggaggttcgaagacgatcagataccgtcgtagttccgaccataaacgatgccgaccggcgatgcggcggcgttattcccatgacccgccgggcagcttccgggaaaccaaagtctttgggttccggggggagtatggttgcaaagctgaaacttaaaggaattgacggaagggcaccaccaggagtggagcctgcggcttaatttgactcaacacgggaaacctcacccggcccggacacggacaggattgacagattgatagctctttctcgattccgtgggtggtggtgcatggccgttcttagttggtggagcgatttgtctggttaattccgataacgaacgagactctggcatgctaactagttacgcgacccccgagcggtcggcgtcccccaacttcttagagggacaagtggcgttcagccacccgagattgagcaataacaggtctgtgatgcccttagatgtccggggctgcacgcgcgctacactgactggctcagcgtgtgcctaccctacgccggcaggcgcgggtaacccgttgaaccccattcgtgatggggatcggggattgcaattattccccatgaacgagggaattcccgagtaagtgcgggtcataagcttgcgttgattaagtccctgccctttgtacacaccgcccgtcgctactaccgattggatggtttagtgaggccctcggatcggccccgccggggtcggcccacggccctggcggagcgctgagaagacggtcgaacttgactatctagaggaagtaaaagtcgtaacaaggtttccgtaggtgaacctgcggaaggatcattaacggagcccggagggcgaggcccgcggcggcgccgccgccgccgcgcgcttccctccgcacacccacccccccaccgcgacgcggcgcgtgcgcgggcggggcccgcgtgcccgttcgttcgctcgctcgttcgttcgccgcccggccccgccgccgcgagagccgagaactcgggagggagacgggggggagagagagagagagagagagagagagagagagagagagagaaagaagggcgtgtcgttggtgtgcgcgtgtcgtggggccggcgggcggcggggagcggtccccggccgcggccccgacgacgtgggtgtcggcgggcgcgggggcggttctcggcggcgtcgcggcgggtctgggggggtctcggtgccctcctccccgccggggcccgtcgtccggccccgccgcgccggctccccgtcttcggggccggccggattcccgtcgcctccgccgcgccgctccgcgccgccgggcacggccccgctcgctctccccggccttcccgctagggcgtctcgagggtcgggggccggacgccggtcccctcccccgcctcctcgtccgcccccccgccgtccaggtacctagcgcgttccggcgcggaggtttaaagaccccttggggggatcgcccgtccgcccgtgggtcgggggcggtggtgggcccgcgggggagtcccgtcgggaggggcccggcccctcccgcgcctccaccgcggactccgctccccggccggggccgcgccgccgccgccgccgcggcggccgtcgggtgggggctttacccggcggccgtcgcgcgcctgccgcgcgtgtggcgtgcgccccgcgccgtgggggcgggaacccccgggcgcctgtggggtggtgtccgcgctcgcccccgcgtgggcggcgcgcgcctccccgtggtgtgaaaccttccgacccctctccggagtccggtcccgtttgctgtctcgtctggccggcctgaggcaaccccctctcctcttgggcggggggggcggggggacgtgccgcgccaggaagggcctcctcccggtgcgtcgtcgggagcgccctcgccaaatcgacctcgtacgactcttagcggtggatcactcggctcgtgcgtcgatgaagaacgcagctagctgcgagaattaatgtgaattgcaggacacattgatcatcgacacttcgaacgcacttgcggccccgggttcctcccggggctacgcctgtctgagcgtcgcttgccgatcaatcgccccgggggtgcctccgggctcctcggggtgcgcggctgggggttccctcgcagggcccgccgggggccctccgtccccctaagcgcagacccggcggcgtccgccctcctcttgccgccgcgcccgccccttccccctccccccgcgggccctgcgtggtcacgcgtcgggtggcgggggggagaggggggcgcgcccggctgagagagacggggagggcggcgccgccgccggaagacggagagggaaagagagagccggctcgggccgagttcccgtggccgccgcctgcggtccgggttcctccctcggggggctccctcgcgccgcgcgcggctcggggttcggggttcgtcggccccggccgggtggaaggtcccgtgcccgtcgtcgtcgtcgtcgcgcgtcgtcggcggtgggggcgtgttgcgtgcggtgtggtggtgggggaggaggaaggcgggtccggaaggggaagggtgccggcggggagagagggtcgggggagcgcgtcccggtcgccgcggttccgccgcccgcccccggtggcggcccggcgtccggccgaccggccgctccccgcgcccctcctcctccccgccgcccctcctccgaggccccgcccgtcctcctcgccctccccgcgcgtacgcgcgcgcgcccgcccgcccggctcgcctcgcggcgcgtcggccggggccgggagcccgccccgccgcccgcccgtggccgcggcgccggggttcgcgtgtccccggcggcgacccgcgggacgccgcggtgtcgtccgccgtcgcgcgcccgcctccggctcgcggccgcgccgcgccgcgccggggccccgtcccgagcttccgcgtcggggcggcgcggctccgccgccgcgtcctcggacccgtccccccgacctccgcgggggagacgcgccggggcgtgcggcgcccgtcccgcccccggcccgtgcccctccctccggtcgtcccgctccggcggggcggcgcgggggcgccgtcggccgcgcgctctctctcccgtcgcctctccccctcgccgggcccgtctcccgacggagcgtcgggcgggcggtcgggccggcgcgattccgtccgtccgtccgccgagcggcccgtccccctccgagacgcgacctcagatcagacgtggcgacccgctgaatttaagcatattagtcagcggaggaaaagaaactaaccaggattccctcagtaacggcgagtgaacagggaagagcccagcgccgaatccccgccccgcggggcgcgggacatgtggcgtacggaagacccgctccccggcgccgctcgtggggggcccaagtccttctgatcgaggcccagcccgtggacggtgtgaggccggtagcggccggcgcgcgcccgggtcttcccggagtcgggttgcttgggaatgcagcccaaagcgggtggtaaactccatctaaggctaaataccggcacgagaccgatagtcaacaagtaccgtaagggaaagttgaaaagaactttgaagagagagttcaagagggcgtgaaaccgttaagaggtaaacgggtggggtccgcgcagtccgcccggaggattcaacccggcggcgggtccggccgtgtcggcggcccggcggatctttcccgccccccgttcctcccgacccctccacccgccctcccttcccccgccgcccctcctcctcctccccggagggggcgggctccggcgggtgcgggggtgggcgggcggggccgggggtggggtcggcgggggaccgtcccccgaccggcgaccggccgccgccgggcgcatttccaccgcggcggtgcgccgcgaccggctccgggacggctgggaaggcccggcggggaaggtggctcggggggccccgtccgtccgtccgtcctcctcctcccccgtctccgccccccggccccgcgtcctccctcgggagggcgcgcgggtcggggcggcggcggcggcggcggtggcggcggcggcgggggcggcgggaccgaaaccccccccgagtgttacagcccccccggcagcagcactcgccgaatcccggggccgagggagcgagacccgtcgccgcgctctcccccctcccggcgcccacccccgcggggaatcccccgcgaggggggtctcccccgcgggggcgcgccggcgtctcctcgtgggggggccgggccacccctcccacggcgcgaccgctctcccacccctcctccccgcgcccccgccccggcgacggggggggtgccgcgcgcgggtcggggggcggggcggactgtccccagtgcgccccgggcgggtcgcgccgtcgggcccgggggaggttctctcggggccacgcgcgcgtcccccgaagagggggacggcggagcgagcgcacggggtcggcggcgacgtcggctacccacccgacccgtcttgaaacacggaccaaggagtctaacacgtgcgcgagtcgggggctcgcacgaaagccgccgtggcgcaatgaaggtgaaggccggcgcgctcgccggccgaggtgggatcccgaggcctctccagtccgccgagggcgcaccaccggcccgtctcgcccgccgcgccggggaggtggagcacgagcgcacgtgttaggacccgaaagatggtgaactatgcctgggcagggcgaagccagaggaaactctggtggaggtccgtagcggtcctgacgtgcaaatcggtcgtccgacctgggtataggggcgaaagactaatcgaaccatctagtagctggttccctccgaagtttccctcaggatagctggcgctctcgcagacccgacgcacccccgccacgcagttttatccggtaaagcgaatgattagaggtcttggggccgaaacgatctcaacctattctcaaactttaaatgggtaagaagcccggctcgctggcgtggagccgggcgtggaatgcgagtgcctagtgggccacttttggtaagcagaactggcgctgcgggatgaaccgaacgccgggttaaggcgcccgatgccgacgctcatcagaccccagaaaaggtgttggttgatatagacagcaggacggtggccatggaagtcggaatccgctaaggagtgtgtaacaactcacctgccgaatcaactagccctgaaaatggatggcgctggagcgtcgggcccatacccggccgtcgccggcagtcgagagtggacgggagcggcgggggcggcgcgcgcgcgcgcgcgtgtggtgtgcgtcggagggcggcggcggcggcggcggcgggggtgtggggtccttcccccgcccccccccccacgcctcctcccctcctcccgcccacgccccgctccccgcccccggagccccgcggacgctacgccgcgacgagtaggagggccgctgcggtgagccttgaagcctagggcgcgggcccgggtggagccgccgcaggtgcagatcttggtggtagtagcaaatattcaaacgagaactttgaaggccgaagtggagaagggttccatgtgaacagcagttgaacatgggtcagtcggtcctgagagatgggcgagcgccgttccgaagggacgggcgatggcctccgttgccctcggccgatcgaaagggagtcgggttcagatccccgaatccggagtggcggagatgggcgccgcgaggcgtccagtgcggtaacgcgaccgatcccggagaagccggcgggagccccggggagagttctcttttctttgtgaagggcagggcgccctggaatgggttcgccccgagagaggggcccgtgccttggaaagcgtcgcggttccggcggcgtccggtgagctctcgctggcccttgaaaatccgggggagagggtgtaaatctcgcgccgggccgtacccatatccgcagcaggtctccaaggtgaacagcctctggcatgttggaacaatgtaggtaagggaagtcggcaagccggatccgtaacttcgggataaggattggctctaagggctgggtcggtcgggctggggcgcgaagcggggctgggcgcgcgccgcggctggacgaggcgcgcgccccccccacgcccggggcacccccctcgcggccctcccccgccccacccgcgcgcgccgctcgctccctccccaccccgcgccctctctctctctctctcccccgctccccgtcctcccccctccccgggggagcgccgcgtgggggcgcggcggggggagaagggtcggggcggcaggggccgcgcggcggccgccggggcggccggcgggggcaggtccccgcgaggggggccccggggacccggggggccggcggcggcgcggactctggacgcgagccgggcccttcccgtggatcgccccagctgcggcgggcgtcgcggccgcccccggggagcccggcggcggcgcggcgcgccccccacccccaccccacgtctcggtcgcgcgcgcgtccgctgggggcgggagcggtcgggcggcggcggtcggcgggcggcggggcggggcggttcgtccccccgccctacccccccggccccgtccgccccccgttcccccctcctcctcggcgcgcggcggcggcggcggcaggcggcggaggggccgcgggccggtcccccccgccgggtccgcccccggggccgcggttccgcgcgcgcctcgcctcggccggcgcctagcagccgacttagaactggtgcggaccaggggaatccgactgtttaattaaaacaaagcatcgcgaaggcccgcggcgggtgttgacgcgatgtgatttctgcccagtgctctgaatgtcaaagtgaagaaattcaatgaagcgcgggtaaacggcgggagtaactatgactctcttaaggtagccaaatgcctcgtcatctaattagtgacgcgcatgaatggatgaacgagattcccactgtccctacctactatccagcgaaaccacagccaagggaacgggcttggcggaatcagcggggaaagaagaccctgttgagcttgactctagtctggcacggtgaagagacatgagaggtgtagaataagtgggaggcccccggcgcccccccggtgtccccgcgaggggcccggggcggggtccgcggccctgcgggccgccggtgaaataccactactctgatcgttttttcactgacccggtgaggcgggggggcgagcccgaggggctctcgcttctggcgccaagcgcccgcccggccgggcgcgacccgctccggggacagtgccaggtggggagtttgactggggcggtacacctgtcaaacggtaacgcaggtgtcctaaggcgagctcagggaggacagaaacctcccgtggagcagaagggcaaaagctcgcttgatcttgattttcagtacgaatacagaccgtgaaagcggggcctcacgatccttctgaccttttgggttttaagcaggaggtgtcagaaaagttaccacagggataactggcttgtggcggccaagcgttcatagcgacgtcgctttttgatccttcgatgtcggctcttcctatcattgtgaagcagaattcgccaagcgttggattgttcacccactaatagggaacgtgagctgggtttagaccgtcgtgagacaggttagttttaccctactgatgatgtgttgttgccatggtaatcctgctcagtacgagaggaaccgcaggttcagacatttggtgtatgtgcttggctgaggagccaatggggcgaagctaccatctgtgggattatgactgaacgcctctaagtcagaatcccgcccaggcgaacgatacggcagcgccgcggagcctcggttggcctcggatagccggtcccccgcctgtccccgccggcgggccgcccccccctccacgcgccccgccgcgggagggcgcgtgccccgccgcgcgccgggaccggggtccggtgcggagtgcccttcgtcctgggaaacggggcgcggccggaaaggcggccgccccctcgcccgtcacgcaccgcacgttcgtggggaacctggcgctaaaccattcgtagacgacctgcttctgggtcggggtttcgtacgtagcagagcagctccctcgctgcgatctattgaaagtcagccctcgacacaagggtttgtccgcgcgcgcgtgcgtgcggggggcccggcgggcgtgcgcgttcggcgccgtccgtccttccgttcgtcttcctccctcccggcctctcccgccgaccgcggcgtggtggtggggtgggggggagggcgcgcgaccccggtcggccgccccgcttcttcggttcccgcctcctccccgttcacgccggggcggctcgtccgctccgggccgggacggggtccggggagcgtggtttgggagccgcggaggcgccgcgccgagccgggccccgtggcccgccggtccccgtcccgggggttggccgcgcggcgcggtggggggccacccggggtcccggccctcgcgcgtccttcctcctcgctcctccgcacgggtcgaccgacgaaccgcgggtggcgggcggcgggcggcgagccccacgggcgtccccgcacccggccgacctccgctcgcgacctctcctcggtcgggcctccggggtcgaccgcctgcgcccgcgggcgtgagactcagcggcgtctcgccgtgtcccgggtcgaccgcggccttctccaccgagcggcggtgtaggagtgcccgtcgggacgaaccgcaaccggagcgtccccgtctcggtcggcacctccggggtcgaccagctgccgcccgcgagctccggacttagccggcgtctgcacgtgtcccgggtcgaccagcaggcggccgccggacgcagcggcgcacgcacgcgagggcgtcgattccccttcgcgcgcccgcgcctccaccggcctcggcccgcggtggagctgggaccacgcggaactccctctcccacatttttttcagccccaccgcgagtttgcgtccgcgggacctttaagagggagtcactgctgccgtcagccagtactgcctcctcctttttcgcttttaggttttgcttgcctttttttttttttttttttttttttttttctttctttctttctttctttctttctttctttctttctttctttcgcttgtcttcttcttgtgttctcttcttgctcttcctctgtctgtctctctctctctctctctctctgtctctcgctctcgccctctctctcttctctctctctctctctctctctctgtctctcgctctcgccctctctctctctcttctctctgtctctctctctctctctctctctctctctctctgtcgctctcgccctctcgctctctctctgtctctgtctgtgtctctctctctccctccctccctccctccctccctccctccctccccttccttggcgccttctcggctcttgagacttagccgctgtctcgccgtaccccgggtcgaccggcgggccttctccaccgagcggcgtgccacagtgcccgtcgggacgagccggacccgccgcgtccccgtctcggtcggcacctccggggtcgaccagctgccgcccgcgagctccggacttagccggcgtctgcacgtgtcccgggtcgaccagcaggcggccgccggacgcagcggcgcaccgacggagggcgctgattcccgttcacgcgcccgcgcctccaccggcctcggcccgccgtggagctgggaccacgcggaactccctctcctacatttttttcagccccaccgcgagtttgcgtccgcgggacctttaagagggagtcactgctgccgtcagccagtactgcctcctcctttttcgcttttaggttttgcttgcctttttttttttttttttttttttttttttctttctttctttctttctttctttctttctttctttctttctttctttcgctctcgctctctcgctctctccctcgctcgtttctttctttctctttctctctctctctctctctctctctctctctgtctctcgctctcgccctctctctctctttctctctctctctgtctctctctctctctctctctctctctctctctccctccctccctccccctccctccctctctccccttccttggcgccttctcggctcttgagacttagccgctgtctcgccgtgtcccgggtcgaccggcgggccttctccaccgagcggcgtgccacagtgcccgtcgggacgagccggacccgccgcgtccccgtctcggtcggcacctccggggtcgaccagctgccgcccgcgagctccggacttagccggcgtctgcacgtgtcccgggtcgaccagcaggcggccgccggacgctgcggcgcaccgacgcgagggcgtcgattccggttcacgcgccggcgacctccaccggcctcggcccgcggtggagctgggaccacgcggaactccctctcccacatttttttcagccccaccgcgagtttgcgtccgcgggacttttaagagggagtcactgctgccgtcagccagtaatgcttcctccttttttgctttttggttttgccttgcgttttctttctttctttctttctttctttctttctttctttctttctctctctctctctctctctctctctgtctctctctctctgtctctctcccctccctccctccttggtgccttctcggctcgctgctgctgctgcctctgcctccacggttcaagcaaacagcaagttttctatttcgagtaaagacgtaatttcaccattttggccgggctggtctcgaactcccgacctagtgatccgcccgcctcggcctcccaaagactgctgggagtacagatgtgagccaccatgcccggccgattccttccttttttcaatcttattttctgaacgctgccgtgtatgaacatacatctacacacacacacacacacacacacacacacacacacacacacacacacacaccccgtagtgataaaactatgtaaatgatatttccataattaatacgtttatattatgttacttttaatggatgaatatgtatcgaagccccatttcatttacatacacgtgtatgtatatccttcctcccttccttcattcattatttattaataattttcgtttatttattttcttttcttttggggccggcccgcctggtcttctgtctctgcgctctggtgacctcagcctcccaaatagctgggactacagggatctcttaagcccgggaggagaggttaacgtgggctgtgatcgcacacttccactccagcttacgtgggctgcggtgcggtggggtggggtggggtggggtggggtgcagagaaaacgattgattgcgatctcaattgccttttagcttcattcataccctgttatttgctcgtttattctcatgggttcttctgtgtcattgtcacgttcatcgtttgcttgcctgcttgcctgtttatttccttccttccttccttccttccttccttccttccttccttccttccctcccttactggcagggtcttcctctgtctctgccgcccaggatcaccccaacctcaacgctttggaccgaccaaacggtcgttctgcctctgatccctcccatccccattacctgagactacaggcgcgcaccaccacaccggctgacttttatgttgtttctcatgttttccgtaggtaggtatgtgtgtgtgtgtgtgtgtgtgtgtgtgtgtgtgtgtgtgtgtgtgtgtgtgtgtgtgtatctatgtatgtacgtatgtatgtatgtatgtgagtgagatgggtttcggggttctatcatgttgcccacgctggtctcgaactcctgtcctcaagcaatccgcctgcctgcctcggccgcccacactgctgctattacaggcgtgagacgctgcgcctggctccttctacatttgcctgcctgcctgcctgcctgcctgcctatcaatcgtcttctttttagtacggatgtcgtctcgctttattgtccatgctctgggcacacgtggtctcttttcaaacttctatgattattattattgtaggcgtcatctcacgtgtcgaggtgatctcgaacttttaggctccagagatcctcccgcatcggcctcccggagtgctgtgatgacacgcgtgggcacggtacgctctggtcgtgtttgtcgtgggtcggttctttccgtttttaatacggggactgcgaacgaagaaaattttcagacgcatctcaccgatccgccttttcgttctttctttttattctctttagacggagtttcactcttgtcgcccagggtggagtacgatggcggctctcggctcaccgcaccctccgcctcccaggttcaagtgattctcctgcctcagccttcccgagtagctggaatgacagagatgagccatcgtgcccggctaatttttctatttttagtacagatggggtttctccatcttggtcaggctggtcttcaacttccgaccgttggagaatcttaactttcttggtggtggttgttttcctttttctttttttttcttttcttttctttccttctcctcccccccccaccccccttgtcgtcgtcctcctcctcctcctcctcctcctcctcctcctcctcctcctcctcctcctctttcatttctttcagctgggctctcctacttgtgttgctctgttgctcacgctggtctcaaactcctggccttgactcttctcccgtcacatccgccgtctggttgttgaaatgagcatctctcgtaaaatggaaaagatgaaagaaataaacacgaagacggaaagcacggtgtgaacgtttctcttgccgtctcccggggtgtaccttggacccggaaacacggagggagcttggctgagtgggttttcggtgccgaaacctcccgagggcctccttccctctcccccttgtccccgcttctccgccagccgaggctcccaccgccgcccctggcattttccataggagaggtatgggagaggactgacacgccttccagatctatatcctgccggacgtctctggctcggcgtgccccaccggctacctgccaccttccagggagctctgaggcggatgcgacccccacccccccgtcacgtcccgctaccctcccccggctggcctttgccgggcgaccccaggggaaccgcgttgatgctgcttcggatcctccggcgaagacttccaccggatgccccgggtgggccggttgggatcagactggaccaccccggaccgtgctgttcttgggggtgggttgacgtacagggtggactggcagccccagcattgtaaagggtgcgtgggtatggaaatgtcacctaggatgccctccttcccttcggtctgccttcagctgcctcaggcgtgaagacaacttcccatcggaacctcttctcttccctttctccagcacacagatgagacgcacgagagggagaaacagctcaatagataccgctgaccttcatttgtggaatcctcagtcatcgacacacaagacaggtgactaggcagggacacagatcaaacactatttccgggtcctcgtggtgggattggtctctctctctctctctctctctctctctctctctctctctctcgcacgcgcacgcgcgcacacacacacacaatttccatatctagttcacagagcacactcacttccccttttcacagtacgcaggctgagtaaaacgcgccccaccctccacccgttggctgacgaaaccccttctctacaattgatgaaaaagatgatctgggccgggcacgctagctcacgcctgtcactccggcactttgggaggccgaggcgggtggatcgcttggggccgggagttcgagaccaggctggccgacgtggcgaaaccccgtctctctgaaaaatagaacgattagccgggcctggtggcgtgggcttggaatcacgaccgctcgggagactggggcgggcgacttgttccaaccggggaggccgaggccgcgatgagctgagatcgtgccgtggcgatgcggcctggatgacggagcgagaccccgtctcgagagaatcatgatgttattataagatgagttgtgcgcggtgatggccgcctgtagtcgcggctactcgggaggctgagacgaggagaagatcacttgaggccccacaggtcgaggcttcggtcggccgtgacccactgtatcctgggcagtcaccggtcaaggagatatgccccttccccgtttgcttttcttttcttcccttctcttttcttctttttgcttctcttttctttctttctttctttctttctttctttctttctttctttctttttctttttctctcttcccctctttctttcctgccttcctgcctttcttcttttcttctttcctcccttcctcccttccttctttcctcccgcctcagcctcccaaagtgctgggatgactggcgggaggcaccatgcctgcttggcccaaagagaccctcttggaaagtgagacgcagagagcgccttccagtgatctcattgactgatttagagacggcatctcgctccgtcaccccggcagtggtgccgtcgtaactcactccctgcagcgtggacgctcctggactcgagcgatccttccacctcagcctccagagtacagagcctgggaccgcgggcacgcgccactgtgcccacaccgtttttaattgtttttttttcccccgagacagagtttcactctcgtggcctagactgcagtgcggtggcgcgatcttggctcaccgcaacctctgcctcccggtttcaagcgattctcctgcatcggcctcctgagtagccgggattgcgggcatgcgctgccacgtctggctgatttcgtatttttagtggagacggggcttctccatgtcgatcgggctggtttcgaactcccgacctcaggtgatccgccctccccggcctccggaagtgctgggatgacaggcgtgagccaccgcgcccggccttcatttttaaatgttttcccacagacggggtctcatcatttctttgcaaccctcctgcccggcgtctcaaagtgctggcgtgacgggcgtgagccactgcgcctggactccggggaatgactcacgaccaccatcgctctactgatcctttctttctttctttctttctttctttctttctttctttctttctttctttctttcttgatgaattatcttatgatttatttgtgtacttattttcagacggagtctcgctctgggcggggcgaggcgaggcgaggcacagcgcatcgctttggaagccgcggcaacgcctttcaaagccccattcgtatgcacagagccttattcccttcctggagttggagctgatgccttccgtagccttgggcttctctccattcggaagcttgacaggcgcagggccacccagaggctggctgcggctgaggattagggggtgtgttggggctgaaaactgggtcccctatttttgatacctcagccgacacatcccccgaccgccatcgcttgctcgccctctgagatcccccgcctccaccgccttgcaggctcacctcttactttcatttcttcctttcttgcgtttgaggagggggtgcgggaatgagggtgtgtgtggggagggggtgcggggtggggacggaggggagcgtcctaagggtcgatttagtgtcatgcctctttcaccaccaccaccaccaccgaagatgacagcaaggatcggctaaataccgcgtgttctcatctagaagtgggaacttacagatgacagttcttgcatgggcagaacgagggggaccggggacgcggaagtctgcttgagggaggaggggtggaaggagagacagcttcaggaagaaaacaaaacacgaatactgtcggacacagcactgactacccgggtgatgaaatcatctgcacactgaacacccccgtcacaagtttacctatgtcacaatcttgcacatgtatcgcttgaacgacaaataaaagttaggggggagaagagaggagagagagagagagagagagacagagagagacagagagagagagagaggagggagagaggaaaacgaaacaccacctccttgacctgagtcagggggtttctggccttttgggagaacgttcagcgacaatgcagtatttgggcccgttctttttttttcttcttcttttctttctttttttttggactgagtctctctcgctctgtcacccaggctgcggtcgcggtggcgctctctcggctcactgaaacctctgcttcccgggttccagtgattcttcttcggtagctgggattacaggcgcacaccatgacggcgggctcatattcctattttcagtagagacggggtttctccacgttggccacgctggtctcgaactcctgacctcaaatgatccgccttcctgggcctcccaaagtgctggaaacgacaggcctgagccgccgggatttcagcctttaaaagcgcggccctgccacctttcgctgtggcccttacgctcagaatgacgtgtcctctctgccgtaggttgactccttgagtcccctaggccattgcactgtagcctgggcagcaagagccaaactccgnncccccacctcctcgcgcacataataactaactaacaaactaactaactaactaaactaactaactaactaaaatctctacacgtcacccataagtgtgtgttcccgtgagagtgatttctaagaaatggtactgtacactgaacgcagtggctcacgtctgtcatcccgaggtcaggagttcgagaccagcccggccaacgtggtgaaaccccgtctctactgaaaatacgaaatggagtcaggcgccgtggggcaggcacctgtaaccccagctactcgggaggctggggtggaagaattgcttgaacctggcaggcggaggctgcagtgacccaagatcgcaccactgcactacagcctgggcgacagagtgagacccggtctccagataaatacgtacataaataaatacacacatacatacatacatacatacatacatacatacatacatccatgcatacagatatacaagaaagaaaaaaagaaaagaaaagaaagagaaaatgaaagaaaaggcactgtattgctactgggctagggccttctctctgtctgtttctctctgttcgtctctgtctttctctctgtgtctctttctctgtctgtctgtctctttctttctctctgtctctgtctctgtctttgtctctctctctccctctctgcctgtctcactgtgtctgtcttctgtcttactctctttctctccccgtctgtctctctctctctctctccctccctgtttgtttctctctctccctccctgtctgtttctctctctctctttctgtctgtttctgtctctctctgtctgtctatgtctttctctgtctgtctctttctctgtctgtctgcctctctctttctttttctgtgtctctctgtcggtctctctctctctgtctgtctgtctgtctctctctctctctctctgtgcctatcttctgtcttactctctttctctgcctgtctgtctgtctctccctccctttctgtttctctctctctctctctctctctccccctctccctgtctgtttctctccgtctctctctctttctgtctgtttctcactgtctctctctgtccatctctctctctctctgtctgtctctttcgttctctctgtctgtctgtctctctctctctctctctctctctctctctctccctgtctgtctgtttctctctatctctcgctgtccatctctgtctttctatgtctgtctctttctctgtcagtctgtcagacacccccgtgccgggtagggccctgccccttccacgaaagtgagaagcgcgtgcttcggtgcttagagaggccgagaggaatctagacaggcgggccttgctgggcttccccactcggtgtatgatttcgggaggtcgaggccgggtccccgcttggatgcgaggggcattttcagacttttctctcggtcacgtgtggcgtccgtacttctcctatttccccgataagctcctcgacttcaacataaacggcgtcctaagggtcgatttagtgtcatgcctctttcaccgccaccaccgaagatgaaagcaaagatcggctaaataccgcgtgttctcatctagaagtgggaacttacagatgacagttcttgcatgggcagaacgagggggaccgggnacgcggaagcctgcttgagggrggaggggyggaaggagagacagcttcaggaagaaaacaaaacacgaatactgtcggacacagcactgactacccgggtgatgaaatcatctgcacactgaacacccccgtcacaagtttacctatgtcacagtcttgctcatgtatgcttgaacgacaaataaaagttcgggggggagaagagaggagagagagagagagacggggagagaggggggagagggggggggagagagagagagagagagagagagagagagagagagagaaagagaagtaaaaccaaccaccacctccttgacctgagtcagggggtttctggccttttgggagaacgttcagcgacaatgcagtatttgggcccgttctttttttcttcttcttcttttctttctttttttttggactgagtctctctcgctctgtcacccaggctgcggtgcggtggcgctctctcggctcactgaaacctctgcttcccgggttccagtgattcttcttcggtagctgggattacaggtgcgcaccatgacggccggctcatcgttctatttttagtagagacggggtttctccacgttggccacgctggtctcgaactcctgaccacaaatgatccaccttcctgggcctcccaaagtgctggaaacgacaggcctgagccgccgggatttcagcctttaaaagcgcgcggccctgccacctttcgctgcggcccttacgctcagaatgacgtgtcctctctgccataggttgactccttgagtcccctaggccattgcactgtagcctgggcagcaagagccaaactccgtccccccacctccccgcgcacataataactaactaactaactaactaactaaaatctctacacgtcacccataagtgtgtgttcccgtgaggagtgatttctaagaaatggtactgtacactgaacgcaggcttcacgtctgtcatcccgaggtcaggagttcgagaccagcccggcccacgtggtgaaacccccgtctctactgaaaatacgaaatggagtcaggcgccgtggggcaggcacctgtaaccccagctactcgggaggctggggtggaagaattgcttgaacctggcaggcggaggctgcagtgacccaagatcgcaccactgcactacagcctgggcgacagagtgagacccggtctccagataaatacgtacataaataaatacacacatacatacatacatacatacaacatacatacatacagatatacaagaaagaaaaaaagaaaagaaaagaaagagaaaatgaaagaaaaggcactgtattgctactgggctagggccttctctctgtctgtttctctctgttcgtctctgtctttctctctgtgtctctttctctgtctgtctgtctgtctgtctgtctgtctctttctttctttctgtctctgtctttgtccctctctctccctctctgccctgtctcactgtgtctgtcttctatcttactctctttctctccccgtctgtctctctctcactccctccctgtctgtttctctctctctctctttctgtctgtttctgtctctctctgtctgcctctctctttctctatctgtctctttctctgtctgtctgcccctctctttctttttctgtgtctctctgtctgtctctctctctctctgtgcctatcttctgtcttactctctttctctgcctgtctgtctgtctctctctgtctctccctccctttctgcttctctctctctctctctctctnnnccctccctgtctgtttctctctgtctccctctctttctgtctgtttctcactgtctctctctgtctgtctgtttcattctctctgtctctgtctctgtctctctctctctctgtctctccctctctgtgtgtatcttttgtcttactctccttctctgcctgtccgtctgtctgtctgtctctctctctccctgtccctctctctttctgtctgtttctctctctctctctctctctctctctctgtctctgtctttctctgtctgtccctttctctgtctgtctgcctctctctttctctttctgtgtctctctgtctctctctctgtgcctatcttctgtcttactctctttctctgcctgtctatctgtctgtctctctctgtctctctccctgcctttctgtttctctctctctccctctctcgctctctctgtctttctctctttctctctgtttctctgtctctctctgtccgtctctgtctttttctgtctgtctgtctctctctttctttctgtcgtctgtctctgtctctgtctctgtctctctctctctctctctccttgtctctctcactgtgtctgtcttctgtcttactctccttctctgcctgtccatctgtctgtctgtctctctctctctctccctacctttctgtttctctctcgctagctctctctctctctgcctgtttctctctttctctctctgtctttctctgtctgtctctttctctgtctgtctgtctctttctctctgtctctgtctctgtctctctctctctctctctctctctctctgcctctctcactgtgtctgtcttctgtcttattctctttctctctctgtctctctctctctctcctttactgtctgtttctctctctctctctctctttctgcctgtttctctctgtctgtctctgtctttctctgtctgtctgcctctctctttctttttctgcgtctctctgtctctctctctctctctctgttcctatcttctgtcttactctgtttccttgcctgcctgcctgtctgtgtgtctgtctctctctctctctctctctctctctccctccctttctctttctctgtctctctctctctttctgggtgtttctctctgtctctctgtccatctctgtctttctatgtctgtctctctctttctctctgtctctgtctctgcctctctctctctctctctctctctctctctgtctgtctctctcactgtgtgtgtctgtcttctgtcttactctccttctctgcctgtccgtctgtctgtctgtctctccctctctctccctccctttctgtttctctctctctctctttctgtctgtttctctctttctctctctgtctgtctctttctctgtctgtctgtctctctctttctttttctctgtctctctgtctctctctgtgtctgtctctctgtctgtgcctatcttctgtcttactctctttctctggctgtctgcctgtctctctctctctctctgtctgtctccgtccctctctccctgtctgtctgtttctctctctgcctctctctctctctgtctgtctctttctctgtctgtctgtctctctctttctttttctctgtctctctgtctctctctgtgtctgtctctctttctgtgcctatcttctgtcttactctctttctctggctgtctgcctgtctctctctctctgcctgtctccgtccctccctccctgtctgtctgtttctctctctgtctctgtctctctgtccatctctgtctgtctctttctctttctctctctctgtctctgtctctctctctctctgcctgtctctctcactgtgtctgtcttctgtcttactctctttctcttgcctgcctctctgtctgtctgtctctctccctccatgtctctctctctctctcactcactctctctccgtctctctctctttctgtctgtttctctctctgtctgtctctctccctccatgtctctctctctctctctcactcactctctctccgtctctctctctctttctgtctgtttctctctctgtctgtctctctccctccatgtctctctctctccctctcactcactctctctccgtctctctctctctttctgtctgtttctttgtctgtctgtctgtctgtctgtctgtctctctctctctctctctctctctctctctctgtttgtctttctccctccctgtctgtctgtctgtctctctctctctgtctctgtctctgtctctctctctttctctttctgtctgtttctctctatctctcgctgtccatctctgtctttctatgtctgtctctttctctgtcagtctgtcagacacacccgtgccggtagggccctgcccttccacgagagtgagaagcgcgtgcttcggtgcttagagaggccgagaggaatctagacaggcgggccttgctgggcttccccactcggtgtacgatttcgggaggtcgaggccgggtccccgcttggatgcgaggggcattttcagacttttctctcggtcacgtgtggcgtccgtacttctcctatttccccgataagtctcctcgacttcaacataaactgttaaggccggacgccaacacggcgaaaccccgtctctactaaaaatacaaagctgagtcgggagcggtggggcaggccctgtaatgccagctcctcgggaggctgaggcgggagaatcgcttgaaccagggaagcggaggctgcagggagccgagatcgcgccactgcactacggcccaggctgtagagtgagtgagactcggtctctaaataaatacggaaattaattaattcattaattcttttccctgctgacggacatttgcaggcaggcatcggttgtcttcgggcatcacctagcggccactgttattgaaagtcgacgttgacacggagggaggtctcgccgacttcaccgagcctggggcaacgggtttctctctctcccttctggaggcccctccctctctccctcgttgcctagggaacctcgcctagggaacctccgccctgggggccctattgttctttgatcggcgctttacttttctttgtgttttggcgcctagactcttctacttgggctttgggaagggtcagtttaattttcaagttgccccccggctccccccactacccacgtcccttcaccttaatttagtgagncggttaggtgggtttcccccaaaccgcccccccccccccgcctcccaacaccctgcttggaaaccttccagagccaccccggtgtgcctccgtcttctctccccttcccccaccccttgccggcgatctcattcttgccaggctgacatttgcatcggtgggcgtcaggcctcactcgggggccaccgtttttgaagatgggggcggcacggtcccacttccccggaggcagcttgggccgatggcatagccccttgacccgcgtgggcaagcgggcgggtctgcagttgtgaggcttttccccccgctgcttcccgctcaggcctccctccctaggaaagcttcaccctggctgggtctcggtcaccttttatcacgatgttttagtttctccgccctccggccagcagagtttcacaatgcgaagggcgccacggctctagtctgggccttctcagtacttgcccaaaatagaaacgctttctgaaaactaataactttnctcacttaagatttccagggacggcgccttggcccgtgtttgttggcttgttttgtttcgttctgttttgttttgttcgtgtttttcctttctcgtatgtctttcttttcaggtgaagtagaaatccccagttttcaggaagacgtctattttccccaagacacgttagctgccgttttttcctgttgtgaactagcgcttttgtgactctctcaacgctgcagtgagagccggttgatgtttacnatccttcatcatgacatcttattttctagaaatccgtaggcgaatgctgctgctgctcttgttgctgttgttgttgttgttgttgtcgtcgttgctgttgtcgttgtcgttgttgttgtcgttgtcgttgttttcaaagtataccccggccaccgtttatgggatcaaaagcattataaaatatgtgtgattatttcttgagcacgcccttcctccccctctctctgtctctctgtctgtctctgtctctctctttctctgtctgtcttctctctctctctctctctgtgtctctctctctctgcctgtctgtttctctctctctgcctctctctctctctctctctctgcctgtctctctcactgtgtctgtcttctgtcttactccctttctctgtctgtctgtcggtctctctctctctctctccctgtctgtatgtttctctctgtctctgtctctctctctctttctgtttctctctctccgtctctgtctttctctgactgtctctctctttccttctctctgtctctctctgcctgtctctctcactctgtcttctgtcttatctctctctctgcctgcctgtctctctcactctctctctctgtgtgtctctctctctctttctgtttctctctgtctctctgtccgtctctgtctttctctgtctgtctctttgtctgtctgtctttgtctttccttctctctgtctctgtctctctcactgtgtctgtcttctgtcttagtctctctctctctctctccctgtctgtctgtctctctctctctctccccctgtctgtttctctctctctctctctctctctctctctctgtctttgtctttctttctgtctctgtctctctctctctctctgtgtgtctgtcttctgtcttactgtctttctctgcctgtctgtctgtctgtctctctctgtctgtctctctctctctctccccctgtcggctgtttctctgtctctgtctgtgtctctctttctgtctgtttctctctgtctgtctttctctctctgtctctttctctctgtctctctgtctgtctctgtctctctctctgtctctctctctctgtgggggtgtgtgtgtgtgtgtgtatgtgtgtgtgtgtgtgtgtgtgtgtctgccttctgtcttactctctttctctgcctgtctgtctgcctgtctgtttgtctctctctctctgcctgtctctctcccttcctgtctgtttctctctctttctgtttctctctgtctctgtccatctctgtctttctccgtctgtctctttatctgtctctctccgtctgtctctttatctgtctctctctctctttctgtctttctctctctgtgtatcgttgtctctctctgtctgtctctgtctctgtctctctgtctctctctctctctctctctctctgtctgtctgtccgtctgtctgtctcggtctctgcgtctcgctatctcccgccctctctttttttgcaaaagaagctcaagtacatctaatctaatcccttaccaaggcctgaattcttcacttctgacatcccagatttgatctccctacagaatgctgtacagaactggcgagttgatttctggacttggatacctcatagaaactacatatgaataaagatccaatcctaaaatctggggtggcttctccctcgactgtctcgaaaaatcgtacctctgttcccctaggatgccggaagagttttctcaatgtgcatctgcccgtgtcctaagtgatctgtgaccgagccctgtccgtcctgtctcaaatatgtacgtgcaaacacttctctccatttccacaactacccacggccccttgtggaaccactggctctttgaaaaaaatcccagaagtggttttggctttttggctaggaggcctaagcctgctgagaactttcctgcccaggatcctcgggaccatgcttgctagcgctggatgagtctctggaaggacgcacgggactccgcaaagctgacctgtcccaccgaggtcaaatggatacctctgcattggcccgaggcctccgaagtacatcaccgtcaccaaccgtcaccgtcagcatccttgtgagcctgcccaaggccccgcctccggggagactcttgggagcccggccttcgtcggctaaagtccaaagggatggtgacttccacccacaaggtcccactgaacggcgaagatgtggagcgtaggtcagagaggggaccaggaggggagacgtcccgacaggcgacgagttcccaaggctctggccaccccacccacgccccacgccccacgtcccgggcacccgcgggacaccgccgctttatcccctcctctgtccacagccggccccaccccaccacgcaacccacgcacacacgctggaggttccaaaaccacacggtgtgactagagcctgacggagcgagagcccatttcacgaggtgggaggggtgggggtggggtgggttgggggttgtggggtctgtggcgagcccgattctccctcttgggtggctacaggctagaaatgaatatcgcttcttggggggaggggcttccttaggccatcaccgcttgcgggactacctctcaaaccctcccttgaggccacaaaatagattccaccccacccatcgacgtttcccccgggtgctggatgtatcctgtcaagagacctgagcctgacaccgtcgaattaaacaccttgactggctttgtgtgtttgtttgtttctgagatggagtcttgctctgtcccccaggctggagtgcagtggcgtgatctcagctcactggaacctctgcctcctgggttcaagtgattctcctgtctcagcgccaccatggccggctcattttttttttttttttttttggtagacacggggtttcaccctctttcattggttttcactggagattctagattcgagccacacctcattccgtgccacagagagacttcttttttttttttttttttttaagcgcaacgcaacatgtctgccttatttgagtggcttcctatatcattataattgtgttatagatgaagaaacggtattaaacactgtgctaatgatagtgaaagtgaagacaaaagaaaggctatctattttgtggttagaataaagttgctcagtatttagaagctacctaaatacgtcagcatttacactcttcctagtaaaagctggccgatctgaataatcctcctttaaacaaacacaatttttgatagggttaagatttttttaagaatgcgactcctgcaaaatagctgaacagacgatacacatttaaaaaaataacaacacaaggatcaaccagacttgggaaaaaatcgaaaaccacacaagtcttatgaagaactgagttcttaaaataggacggagaacgtagctatcggaagagaaggcagtattggcaagttgattgttacgttggtcagcagtagctggcactatctttttggccatctttcgggcaatgtaactactacagcaaaatgagatatgatccattaaacaacatattcgcaaatcaaaaagtgtttcagtaatataatgcttcagatttagaagcaaatcaaatgatagaactccactgctgtaataagtcaccccaaagatcaccgtatctgacaaaataactaccacagggttatgacttcagaatcatactttcttcttgatatttacttatgtatttattttttttaatttatttctcttgagacgcgtctcgctctgtcgcccaggctggagtgcgatggtgtgatctcggctcactgcaaccgccacctccctgggttcaagcgattctcctgcctcagcctcccgagtagctgggactacaggtgcccgccaccacgcccagctaatctttatacttttaatagagacggggtttcaccgtgtcggcccggatggtctcgatctcttgacctcgtgacccgcccgcctcggcctcccaaagtgctgggatgacaggcgtgagccactgagcccggccttctcttgacgtttaaactatgaagtcagtccagagaaacgcaataaatgtcaacggtgaggatggtgttgaggcagaagtaggaccacactttttcctatcttattcagttgataacaatatgacctaggtagtaatttcctatgtgcctacttatacacgagtacaaaagagtaaaacagagagactgctaaattaaagggtacgtgaagttcttcatagtaactccgtaaactggaacactgtcaaaaagcagcagctagtgaattgtttccatgtatttttctattatccaataagtgaactatgctattcctttccagtctcccaagcacttcttgtccccatcaccacttcggtgctcgaagaaaaagtaagcaaatcaaggaacacaagctaaagaaacacacacacaaaccaaagacaactacagcgtctgcaaaagtttgctagaagactgaaactgttgagtataaggatctggtattctacgatcatgagttcacttcagagtttgttcaagacatacgtttcgtaaggaaacatcttagttagaagttattcagcagtaggtaccatccctaagtatttttcaccaaatccgtgacaataaagagctatctaaccagaaaaattagcgagtacgggcaccatccatagggctttgtctttacgcttcattagcacttaccatgccttacaatgtctaggattgaccctgatagcatttcgaaaacaagctaatgctttgtccagttcttcagtgaagacaactcacgccctaatgcgctataggcataagcatcatttggatccacttcgagagttctctggaagaattgaatcgcaatatcgtgttcccgtttgcagaccgaaacagtttccctgcagcacaccaggcctctggctggcgaatttttatccatgtctgtgaagtctttggacagaactgaaagagcaacctctttcggaggatgccaaagtgttgtagagtagatctccatgccttcgactctgtaattctcaatcctcctaacctctgagaattgtctttcagcttgcgtggactctgaaagtttacaataggccntttccgatttggcacagtacccaaccggtattgcagtggtgagaagctagatggctcaagatgctgatagcttctttgccgtggtaagaacacaaagctaaataacctttccccctttcacgaagaaggctcatcaagccttccgctgctgctttttgtagattaaaagcctgaatctgaggcgcgattgcggctattttcccttctgaaatgacggaagagtccaattttgtcacttccaggctatcacttatgttcggtggagttattgctcctttattagttttacttttggttcttctgtttgggattttaggtggaaacttcatttttaattttctcctaattctcctcggttgtggagctgtcactagtcaagagtcgtgaatttcttcgaggncggtgcatttgggggagatgccatagtggggctcaatacctgaggtgttgcccttgtcggcggaccagaactttgtgtttttgcaaggactggagttacctttcggctctttcccctctgcgagaagacagacggtgttccggtttggccgattctggcaacaggcttttctgaaggggctccggtggatggcacgtcagtgacagacggtgtctcataccagtgcagttttgtcaatagggtccgtctccgggacttggggtttctaatggcaaaatgccaacacttggggttaatggactaacagctgctggtcctcctaataaacttcgaccagtttttggtttatgttgaacctgtttagatcatatggaagttcctgttcccagtgggacagtatcaggtgaaaggacagctgaatcgatagaagacactggggagtctgtattcaaggagtactttgaattggaagattctaaattccatccgtttcattcgacggtgtcctggggtgtttccgtaagaacggtctcgggctgtctgtgacataaactaggacgaggtccaagtgttgtggcgcaacacttggacaggcagttgctaaagctctctagagaggtgaatcaaaatgtttggtcaggatctggcttttcccccctatttcacatcatgattcaaagggacaccagaggaaaggatttcaacgaaggctcttttggtcacattctgatcctttggtaagccgatctgtcttgcaatatacatgtcccgacgatggaaggggaaagcgagctgaatcaccaaactcaggaacgataatatcatcgtggcttttctgcttatgaaacactccacccgataagatttgatccccttctgcaagcttgctgagatcaacacaacatttcgcaagcaggcatttgcattgcggggtagtacaactgtgtcctttcaagagtctatatgttttataggcctttcctgagcggtaagaacaggtcgccagtaagaacaaggcttcttctgagtgtacttctgcataaaggcgttctgcgggggaaaccgcatctcggtaggcatagtggtttagtgcttgccatatagcagcctggacgggtccctgcagcaccgccatcctcgaggctcaggcccactttctgcagtgccacaggcacccccccccccccatagcggctccggcccggccagccccggctcatttaaaggcaccagccgccgttaccgggggatgggggagtccgagacagaatgacttctttatcctgctgactctggaaagcccggcgccttgtgatccattgcaaaccgagagtcacctcgtgtttagaacacggatccactcccaagttcagtggggggatgtgaggggtgtggcaggtaggacgaaggactctcttccttctgattcggtctgcacagtggggcctagggctggagctctctccgtgcggaccgctgactccctctaccttgggttccctcggccccaccctggaacgccgggccttggcagattctggccctttctggcccttcagtcgctgtcagaaaccccatctcatgctcggatgccccgagtgactgtggctcgcacctctccggaaacattggaaatctctcctctacgcgcggccacctgaaaccacaggagctcgggacacacgtgctttcgggagagaatgctgagagtctctcgccgactctctcttgacttgagttcttcgtgggtgcgtggttaagacgtagtgagaccagatgtattaactcaggccgggtgctggtggctcacgcctgtaaccccaacactttgggaggccgaggccgtaggatccctcgaggaatcgcctaaccctggggaggttgaggttgcagtgagtgagccatagttgtgtcactgtgctccagtctgggcgaaagacagaatgaggccctgccacaggcaggcaggcaggcaggcaggcagaaagacaacagctgtattatgttcttctcagggtaggaagcaaaaataacagaatacagcacttaattaattttttttttttccttcggacggagtttcactcttggtgcccacgctggagtgcagtggcaccatctcggctcaccgcaacctccacctcccgcgttcaagcgattctcctgcctcagcctcctgagtagctgggattacagggaggagccaccacacccagctgattttgtattgttagtagagacggcatttctccatgtgggtcaggctggtctcgaactggcgaccccagtggatctgcccgccccggcctcccaaagtgctggggtgacaggcgtgagccatcgtgactggccggctacgtttatttatttatttttttaattattttacttttttttagttttccattttaatctatttatttatttacatttatttatttatttatttatttacttatttatttattttcgagacagactctcgctctgctgcccaggctggagtgcagcggcgtgatctcggctcactgcaacgtccgcctcccgggttcacgccattctcctgcctcagcctcccaagtagctgggactacaggcgcccgccaccgtgcccggctaactttttgtattttgagtagagatggggtttcactgtggtagccaggatggtctcgatctcctgaccccgtgatccgtccacctcggcctcccaaagtgctgggatgacaggcgtgagccaccggccccggcctatttatctatttattaactttgagtccaggttatgaaaccagttagtttttgtaattttttttttttttttttttttttgagacgaggtttcaccgtgttgccaaggcttggaccgagggatccaccggccctcggcctcccaaaagtgcggggatgacaggcgcgagcctaccgcgcccggaccccccctttccccttcccccgcttgtcttcccgacagacagtttcacggcagagcgtttggctggcgtgcttaaactcattctaaatagaaatttgggacgtcagcttctggcctcacggactctgagccgaggagtcccctggtctgtctatcacaggaccgtacacgtaaggaggagaaaaatcgtaacgttcaaagtcagtcattttgtgatacagaaatacacggattcacccaaaacacagaaaccagtcttttagaaatggccttagccctggtgtccgtgccagtgattcttttcggtttggaccttgactgagaggattcccagtcggtctctcgtctctggacggaagttccagatgatccgatgggtgggggacttaggctgcgtccccccaggagccctggtcgattagttgtggggatcgccttggagggcgcggtgacccactgtgctgtgggagcctccatccttccccccaccccctccccagggggatcccaattcattccgggctgacacgctcactggcaggcgtcgggcatcacctagcggtcactgttactctgaaaacggaggcctcacagaggaagggagcaccaggccgcctgcgcacagcctggggcaactgtgtcttctccaccgcccccgcccccacctccaagttcctccctcccttgttgcctaggaaatcgccactttgacgaccgggtctgattgacctttgatcaggcaaaaacgaacaaacagataaataaataaaataacacaaaagtaactaactaaataaaataagtcaatacaacccattacaatacaataagatacgatacgataggatgcgataggatacgataggatacaatacaataggatacgatacaatacaatacaatacaatacaatacaatacaatacaatacaatacaatacaatacaatacgccgggcgcggtggctcatgcctgtcatcccgtcactttgggatgccgaggtggacgcatcacctgaagtcgggagttggagacaagcccgaccaacatggagaaatcccgtctcaattgaaaatacaaaactagccgggcgcggtggcacatgcctataatcccagctgctaggaaggctgaggcaggagaatcgcttgaacctgggaagcggaggttgcagtgagccgagattgcgccatcgcactccagtctgagcaacaagagcgaaactccgtctcaaaaataaatacataaataaatacatacatacatacatacatacatacatacatacatacataaattaaaataaataaataaaataaaataaataaatgggccctgcgcggtggctcaagcctgtcatcccctcactttgggaggccaaggccggtggatcaagaggcggtcagaccaacagggccagtatggtgaaaccccgtctctactcacaatacacaacattagccgggcgctgtgctgtgctgtactgtctgtaatcccagctactcgggaggccgagctgaggcaggagaatcgcttgaacctgggaggcggaggttgcagtgagccgagatcgcgccactgcaacccagcctgggcgacagagcgagactccgtctccaaaaaatgaaaatgaaaatgaaacgcaacaaaataattaaaaagtgagtttctggggaaaaagaagaaaagaaaaaagaaaaaaacaacaaaacagaacaaccccaccgtgacatacacgtacgcttctcgcctttcgaggcctcaaacacgttaggaattatgcgtgatttctttttttaacttcattttatgttattatcatgattgatgtttcgagacggagtctcggaggcccgccctccctggttgcccagacaaccccgggagacagaccctggctgggcccgattgttcttctccttggtcaggggtttccttgtctttcttcgtgtctttaacccgcgtggactcttccgcctcgggtttgacagatggcagctccactttaggccttgttgttgttggggactttcctgattctccccagatgtagtgaaagcaggtagattgccttgcctggccttgcctggccttgccttttctttctttctttctttctttattactttctctttttcttcttcttcttcttcttttttttgagacagagtttcactcttgttgcccaggctagagggcaatggcgcgatctcggctcaccgcaccctccgcctcccaggttcaagcgattctcctgcctcagcctcctgattagctgggattacaggcatgggccaccgtgctggctgatgtttgtacttttagtagagacggtgtttttccatgttggtcaggctggtctcccactcccaacctcaggtggtccgcctgccttagcctcccaaagtgctgggatgacaggcgtgcaaccgcgcccagcctctctctctctctctctctctctcgctcgcttgcttgcttgctttcgtgctttcttgctttcccgttttcttgctttctttctttctttcgtttctttcatgcttgctttcttgcttgcttgcttgctttcgtgctttcttgctttcctgttttctttctttctttctttctttctttcttttgtttctttcttgcttgctttcttgcttgcttgcttgctttcgtgctttcttgctttcctgttttctttctttctttctttcttttctttctttcttgcttgctttcctgcttgcttgctttcgtgctttcttgttttctcgatttctttctttcttttgtttctttcctgcttgctttcttgcttgcttgctttcgtgcttcttgctttcctgttttctttctttctttctttcttttgtttctttcttgcttgctttcttgcttgcttgctttcgtgctgtcttgtttctcgatttctttctttcttttgtttctttcctgcttgctttcttgcttgattgctttcgtgctttcttgctttcttgttttctttctttcttttgtttctttctttcttgcttccttgttttcttgctttcttgcttgcttgctttcgtgctttcttgttttcttgctttctttcttttgtttctttcttgcttgctttcttgcttccttgttttcttgctttcttgcttgcttgctttcgtgctttctttcttgctttcttttctttctttcttttctttttctttctttcttgctttcttttctttcatcatcatctttctttctttcctttctttctttctttctttctatctttctttctttctttctttctttctttctttctttctttctgtttcgtccttttgagacagagtttcactcttgtttccacggctagagtgcaatggcgcgatcttggctcaccgcaccttccgcctcccgggttcgagcgcttctcctgcctccagcctcccgattagcggggattgacagggaggcacccccacgcctggcttggctgatgtttgtgtttttagtaggcacgccgtgtctctccatgttgctcaggctggtctccaactcccgacctcctgtgatgcgcccacctcggcctctcgaagtgctgggatgacgggcgtgacgaccgtgcccggcctgttgactcatttcgcttttttatttctttcgtttccacgcgtttacttatatgtattaatgtaaacgtttctgtacgcttatatgcaaacaacgacaacgtgtatctctgcattgaatactcttgcgtatggtaaatacgtatcggttgtatggaaatagacttctgtatgatagatgtaggtgtctgtgttatacaaataaatacacatcgctctataaagaagggatcgtcgataaagacgtttattttacgtatgaaaagcgtcgtatttatgtgtgtaaatgaaccgagcgtacgtagttatctctgttttctttcttcctctccttcgtgtttttcttccttcctttcttcctttctctccttctttaggtttttcttcctctcttcctttccttctttctctctttctgtccttttttccttcgtgctttatttctctttcgttccctgtgtttccttcttttttctttcctctctgtttctttttcccttctttccttcgtttctttcctcattctttctctctttttcgttgtttctttccttcccgtctgtcttttaaaaaattggagtgtttcagaagtttactttgtgtatctacgttttctaaattgtctctcttttctccattttcttcctccctccctccctccctccctgctcccttccctccctccttccctttcgccatctgtctcttttccccactcccctccccccgtctgtctctgcgtggattccggaagagcctaccgattctgcctctccgtgtgtctgcagcgaccccgcgaccgagtccttgtgtgttctttctccctccctccctccctccctccctccctccctccctgcttccgagaggcatctccagagaccgcgccgtgggttgtcttctgactctgtcgcggtcgaggcagagacgcgttttgggcaccgtttgtgtggggttggggcagaggggctgcgttttcggcctcgggaagagcttctcgactcacggtttcgctttcgcggtccacgggccgccctgccagccggatctgtctcgctgacgtccgcggcggttgtcgggctccatctggcggccgctttgagatcgtgctctcggcttccggagctgcggtggcagctgccgagggaggggaccgtccccgctgtgagctaggcagagctccggaaagcccgcggtcgtcagcccggctggcccggtggcgccagagctgtggccggtcgcttgtgagtcacagctctggcgtgcaggtttatgtgggggagaggctgtcgctgcgcttctgggcccgcggcgggcgtggggctgcccgggccggtcgaccagcgcgccgtagctcccgaggcccgagccgcgacccggcggacccgccgcgcgtggcggaggctggggacgcccttcccggcccggtcgcggtccgctcatcctggccgtctgaggcggcggccgaattcgtttccgagatccccgtggggagccggggaccgtcccgcccccgtcccccgggtgccggggagcggtccccgggccgggccgcggtccctctgccgcgatcctttctggcgagtccccgtggccagtcggagagcgctccctgagccggtgcggcccgagaggtcgcgctggccggccttcggtccctcgtgtgtcccggtcgtaggaggggccggccgaaaatgcttccggctcccgctctggagacacgggccggcccctgcgtgtggccagggcggccgggagggctccccggcccggcgctgtccccgcgtgtgtccttgggttgaccagagggaccccgggcgctccgtgtgtggctgcgatggtggcgtttttggggacaggtgtccgtgtccgtgtcgcgcgtcgcctgggccggcggcgtggtcggtgacgcgacctcccggccccgggggaggtatatctttcgctccgagtcggcaattttgggccgccgggttatat

SEQ ID NO: 31850 - DNA, 3063 bp, Homo Sapiens
ggcacgagtggctgcttgcggctagtggatggtaattgcctgcctcgcgctagcagcaagctgctctgttaaaagcgaaaatgaaacaattgcctgcggcaacagttcgactcctttcaagttctcagatcatcacttcggtggtcagtgttgtaaaagagcttattgaaaactccttggatgctggtgccacaagcgtagatgttaaactggagaactatggatttgataaaattgaggtgcgagataacggggagggtatcaaggctgttgatgcacctgtaatggcaatgaagtactacacctcaaaaataaatagtcatgaagatcttgaaaatttgacaacttacggttttcgtggagaagccttggggtcaatttgttgtatagctgaggttttaattacaacaagaacggctgctgataattttagcacccagtatgttttagatggcagtggccacatactttctcagaaaccttcacatcttggtcaaggtacaactgtaactgctttaagattatttaagaatctacctgtaagaaagcagttttactcaactgcaaaaaaatgtaaagatgaaataaaaaagatccaagatctcctcatgagctttggtatccttaaacctgacttaaggattgtctttgtacataacaaggcagttatttggcagaaaagcagagtatcagatcacaagatggctctcatgtcagttctggggactgctgttatgaacaatatggaatcctttcagtaccactctgaagaatctcagatttatctcagtggatttcttccaaagtgtgatgcagaccactctttcactagtctttcaacaccagaaagaagtttcatcttcataaacagtcgaccagtacatcaaaaagatatcttaaagttaatccgacatcattacaatctgaaatgcctaaaggaatctactcgtttgtatcctgttttctttctgaaaatcgatgttcctacagctgatgttgatgtaaatttaacaccagataaaagccaagtattattacaaaataaggaatctgttttaattgctcttgaaaatctgatgacgacttgttatggaccattacctagtacaaattcttatgaaaataataaaacagatgtttccgcagctgacatcgttcttagtaaaacagcagaaacagatgtgctttttaataaagtggaatcatctggaaagaattattcaaatgttgatacttcagtcattccattccaaaatgatatgcataatgatgaatctggaaaaaacactgatgattgtttaaatcaccagataagtattggtgactttggttatggtcattgtagtagtgaaatttctaacattgataaaaacactaagaatgcatttcaggacatttcaatgagtaatgtatcatgggagaactctcagacggaatatagtaaaacttgttttataagttccgttaagcacacccagtcagaaaatggcaataaagaccatatagatgagagtggggaaaatgaggaagaagcaggtcttgaaaactcttcggaaatttctgcagatgagtggagcaggggaaatatacttaaaaattcagtgggagagaatattgaacctgtgaaaattttagtgcctgaaaaaagtttaccatgtaaagtaagtaataataattatccaatccctgaacaaatgaatcttaatgaagattcatgtaacaaaaaatcaaatgtaatagataataaatctggaaaagttacagcttatgatttacttagcaatcgagtaatcaagaaacccatgtcagcaagtgctctttttgttcaagatcatcgtcctcagtttctcatagaaaatcctaagactagtttagaggatgcaacactacaaattgaagaactgtggaagacattgagtgaagaggaaaaactgaaatatgaagagaaggctactaaagacttggaacgatacaatagtcaaatgaagagagccattgaacaggagtcacaaatgtcactaaaagatggcagaaaaaagataaaacccaccagcgcatggaatttggcccagaagcacaagttaaaaacctcattatctaatcaaccaaaacttgatgaactccttcagtcccaaattgaaaaaagaaggagtcaaaatattaaaatggtacagatccccttttctatgaaaaacttaaaaataaattttaagaaacaaaacaaagttgacttagaagagaaggatgaaccttgcttgatccacaatctcaggtttcctgatgcatggctaatgacatccaaaacagaggtaatgttattaaatccatatagagtagaagaagccctgctatttaaaagacttcttgagaatcataaacttcctgcagagccactggaaaagccaattatgttaacagagagtctttttaatggatctcattatttagacgttttatataaaatgacagcagatgaccaaagatacagtggatcaacttacctgtctgatcctcgtcttacagcgaatggtttcaagataaaattgataccaggagtttcaattactgaaaattacttggaaatagaaggaatggctaattgtctcccattctatggagtagcagatttaaaagaaattcttaatgctatattaaacagaaatgcaaaggaagtttatgaatgtagacctcgcaaagtgataagttatttagagggagaagcagtgcgtctatccagacaattacccatgtacttatcaaaagaggacatccaagacattatctacagaatgaagcaccagtttggaaatgaaattaaagagtgtgttcatggtcgcccattttttcatcatttaacctatcttccagaaactacatgattaaatatgtttaagaagattagttaccattgaaattggttctgtcataaaacagcatgagtctggttttaaattatctttgtattatgtgtcacatggttattttttaaatgaggattcactgacttgtttttatattgaaaaaagttccacgtattgtagaaaacgtaaataaactaataac

SEQ ID NO: 31851 - DNA, 3046 bp, Homo Sapiens; identical to SEQ ID NO: 29459

SEQ ID NO: 31852 - DNA, 2032 bp, Homo Sapiens
gatccggagatgtggtggaggggtgaggctaacatttcctacaacctcctgcaaaggatggaagcgcgtgccgctctcccgggtttcgggaggcagcctgttttgtagcctctgaggctccggggaaaggtttggctgcgtctaagagagacgtttggagccatccgtcttattttgtttgaaaagtcactcgttcaagttgtcactgtgtgacagctcagaataaaaccaatttgcggccgcccctcctcctcgcttcccggaggatctcctgggaggcacgaggcggacgcggtgctgagttgggccgggactcagggcggcaacatttgggcaagggcccaggaaagatgaggggctttgccgaggacacggactcctggaataaaagcagaatgaggtcaagagaagggaagcaaaggggccaaagcgcgctccgctctccaccgggaggcgggctttgcagagccctaaagagtgagattaccgtcccttccccacgcccccaactcgccccgggtgacaagcgcttcaggaaagctcctgtgatcaaccctccttgccccgtggcggttcggagctgcagaagttagaagagagtcagagccctccggagcggctgcctggcccctacgcagagtagcaagaagcactgcgatgtgcgctactaagcccacgcggccgcagcaaaaactttggcgtggccggggcgtggctagggtccggccaggccccctcgttcctaattcccctccactccccgctcccattggtcacgaggatgaccaatgagcgctcggatcgaggtcctaccccgggcctgactcgaaagctcctgccaaaactttgggagtttttagagacgagtttttttttttttctattacttttccccccccctaactaacggactattattgttgttgttttaaatttagctcttagggcttagctatttgggttttcttgcggtgtccggctcccgtctccctggctcccccgcccgccctgcggccccagcgcccctcgctctcctccagcccgcgaggagtgcgggcgccgcgccgcctttaaagcgaggccagggagcgaggcggtgaccggccgagatccggccctcgcctcctccctcggtggcgctagggctcccggcctctcttcctcagtgcgggcggagaagcgaaagcggatcgtcctcggctgccgccgccttctccgggactcgcgcgcccctccccgcgcgcccacccacccagtccggctggactgcggcagccgcgcggctcaccccggcaggatgttcgcagccgggctggctcccttctacgcctccaacttcagcctctggtcggccgcttactgctcctcggccggcccaggcggctgctccttccccttggaccccgccgccgtcaaaaagccctccttctgcatcgcagacattctgcacgccggcgtgggggatctgggggcggccccggagggcctggcaggggcctcggccgccgccctcaccgcgcacttgggctcggttcacccgcacgcctctttccaagcggcggccagatccccgcttcgacccaccccagtggtggcgccctccgaagtcccggctggcttcccgcagcggctgtctccgctcccagccgcctaccaccaccatcacccgcaacaacaacagcagcagcaacagccgcagcagcaacagcctccgcctccgccccgggctggcgccctgcagcccccggcctcggggacgcgagtggttccgaacccccaccacagtggctctgccccggccccctccagcaaagacctcaaatttggaattgaccgcattttatctgcagaatttgacccaaaagtcaaagaaggcaacacgctgagaggtaggtcttgggcgggaggctgcaggcctctgaccactgacccactccccggaccccgggctggcttggggtgcctttgagtgtttttacaattaaggacaaatcggtaaaacgggagagaagaaaacgaattgtaagaaaac

SEQ ID NO: 31853 - DNA, 1388 bp, Homo Sapiens
gcggacttctgccaagcaccggctcatgtgaggctcgcggcacagcgttctctgggctccccagaagccagcctttcgctcccggacccggcagcccgagcaggagccgtgggaccgggcgccagcaccctctgcggcgtgtcatgggcccgcgccgccggagccgaaagcccgaggccccgaggaggcgcagcccgagcccgaccccgacccccggcccctcccggcggggcccctccttaggcgcttcctcccatcaacacagtcggcggagacaaggttggctaaaggagatccgaaagcttcagaagagcacacacctcttgataaggaagctgcccttcagccgcctggcaagagaaatatgtgttaaattcactcgtggtgtggacttcaattggcaagcccaggccctattggccctacaagaggcagcagaagcatttctagttcatctctttgaggacgcctatctcctcaccttacatgcaggccgagttactctcttcccaaaggatgtgcaactggcccggaggatccggggccttgaggagggactcggctgagctcctgcacccagtgtttctgtcagtctttcctgctcagccaggggggatgataccggggactctccagagccatgactagatccaatggattctgcgatgctgtctggactttgctgtctctgaacagtatgtgtgtgttgctttaaatatttttcttttttttgagaaggagaagactgcatgactttcctctgtaacagaggtaatatatgagacaatcaacaccgttccaaaggcctgaaaataattttcagataaagagactccaaggttgactttagtttgtgagttactcatgtgactatttgaggattttgaaaacatcagatttgctgtggtatgggagaaaaggttatgtacttattattttagctctttctgtaatatttacattttttaccatatgtacatttgtacttttattttacacataagggaaaaaataagaccactttgagcagttgcctggaaggctgggcatttccatcatatagacctctgcccttcagagtagcctcaccattagtggcagcatcatgtaactgagtggactgtgcttgtcaacggatgtgtagcttttcagaaacttaattggggatgaatagaaaacctgtaagctttgatgttctggttacttctagtaaattcctgtcaaaatcaattcagaaattctaacttggagaatttaacattttactcttgtaaatcatagaagatgtatcataacagttcagaattttaaagtacattttcgatgcttttatgggtatttttgtagtttctttgtagagagataataaaaatcaaaatatttaatga

SEQ ID NO: 31854 - DNA, 4999 bp, Homo Sapiens
gggccccactactctccagcgccatttagccgcagtactagtgactaccaccgcaaaggaaaaggaaacaaggccagcgcggcggctcacgcctgtcatcccagcactttgggaggccgaggcggcagatcacgaggtcaggagatcgagaccatcctggctaacacggtgaaaccccgtctctattaaaaatacaaaattagccgggcgtggtggtgcatgcctgtaatcccagctactcgggaggctgagacgggagaatcgcctgatcccaggaggcagaggttgccgtgagccgagatgtcgccattgcactccagcctgggcaacaagagtgaaactccatctcaaaaaaagaaaaaaagaaaaaggaaccaaggcatgctaattgaaaaataacttttcatatctagaaaaaccaggtgaattcataaactattgaaactaagaagtccacaagatcaacccacaaaaagttattaacattcctagcaataacaatactattttaacagcaacctaaatactaaaataaatgtaacaaaagttttggacaaaattatgaaacatgatagaaggtcataaaagaaggcctaaatgggagatttttatggatgggacaattcagtatcaccaaagtgttaactctcccccaagttaatctgtgtatttcatcaaaattccaacagaattctttgtggaattaggaagttgattgtaataaacatagaagataaaggtctgagtatagccgtggtgattcggggagcagaggcaggaggaggagggctcacctaccaggcatctggatagatcataaacctgtcatcagtcgtgacaagggggagagaggctaaactggtcgagcagaattcagattcccaggcagggatgtgtgcagggacctggcttgtcctggggctggtcaatctttggcacggaatggcctcttcaggaacgggtgttattgggacagctgcctttccatgtggatgatggcataaaagtatagcccccccaaacttaagattaaaacattattatgaggaaacagaatattcttattgcctagggcaaggatagatttcttacaaaagacaagctacactttaagagatggacaaaaagataagatggacaatctgagcacatcccatggtgaatttctctccacgctaagaccccggacaagggtgaaaagcaggaccaaggcccagagaagaaaaattctgctcaaaatcataactgttcaaccttgcatacattctctctcttaaactgaaagttagcatcctacagcactggtgtgacacccggcaggcccgagggctcagctgcctccagctgtggccccaagaaggcaaagcacccgggtggggtggagggagcagccccgtgctctactggctgacagtggtgcccaggcccagctgccttctctgcacagacagcagagttccgcttagcacaggcttttcctcgccagtgcacacactgtcagccattggaactggcctgcaagacagcttgctgtggcggctttgcaggcacagggcacacaggcatccgtgcacgcagctcctctgtcctcccatgccctgcaccctctgtcacaaggaaacccttgcttctaggattgcaccaaataggatttggaaccaattggtgcccaagctcaaatcctgttagtggctgcctgtttccctggcatacatgcgtcctgccgagatgcatttggcaccaggtgggatgtgctcactggttcccaaaacgagaacacatagcagtttccctggatgtttgttcaatactattcccgggacctgcccgtagattccaattccttatgggtgtggaagagcctggaaatcacgtgtgtgtaggtgtgtggcatgtgtataggggtgtgtttatgtggtgtgactttggggtatgagtgtggcatgtgtacggtgtgtgtgagtgtggtatgtgtatggcgtgagtttgggttgtgcgagcgtggttctcatgtacgagtgtgagcatggagattctttggtagggaaggagtcagggtctccctctgtcgcccaggcttgagtgcagtggcacaatctcagctcattgcaacctctgcctcccgggttctctgtctctgggaccacaggcatgaaccaccaagcccagctaatttttttattttttgtctagctttggtcttgctatgttgcccaggttggtctggaactcctttcctcaagcgatcctcagtcctcagcctcccaaagtgctgggattacaggcatgagccaccacccaagagattctgatgtcacagacatctgactcacacactccctggacagctcacgtgtgcccaccaccacagtcagggatggctgcagatgaacaaggtgctgacgtggtttctgtagcccccaaacaagcaacttgccttgagatgacaaccaaagttttcctgtgtcctccacactcaagagtgactgtgaggcggaggggcccagcccttcttgcaggcgggaatgagtggatgggtggatcaacagaggctgcccacaggagagagggaggcctggcctgggaacagagctgtgaccgtgcccttccccagggtaggggctgaaggaccctcccatcctagtgacagggccacagcatgtccaaggaggccccagaggaggtcccgggagtcctgggagagcctggttagcctccctgaagggaggaagtggggttttgtgagagggatggtgcagcagcccccacacctgctactccgtgtggccgggtccagccccaggcaaggttccaggcatgcccctgggacagacgtgggagggagaccagcaggcaggtccccctcagggaggtatggagcgggtccccggggccaggtggagcccctcacacctgtgtcctcaaggacccacaccaggacaatggccataggcgggcacctgcagccgccctggccagcagtgagacgggcagagagcccagccagatagcccggttcctgccccctcccgcctgcccgcacagagagggctgcatgcaggtgagggtccatcacctgaagagcttcaccagccccgaggccatgagccactgaatctctcagggggttttggcgcttgaggttccccaggtcattctgctgcccagagagggttgaggacctctgacctggagccccaaaggggaagggtaccctaagaccagccagccatctactctcaggtgggaaaggggtagggtttagatatggccccctcccctccacgtcctgaaattaccttgggctgtgctggccgagagccgcggggaccagatttgagctggacgtgagctttattccagacggagcagctactttgtaagcgatctccctgggatcgatatcatggaggggcacagatgggcttcagctgtgctgggtggaagagaaaacatgccctgtcggcccctcagcaagtgctctgctctctggactgagatgcaggtcagcagcaagcagggaggctttgggggtgctgggggctgctttgaaaggcacccctgagctaagacttggctgttgggaaggaatcacctccctccctccagccgtaaaaagaactggacatcagcttccaaagaagtcatcagcaatgcaactgttccacatggaggatactccctgcttgaggggtcagacaggcctgctgggcaacccaggaggcttggatgaccgtctaccccagtgtttttgggatggaaagttccacattctgagaaccctcagtccctgggcaacctggggtggttagtcaccacagcttgtggcttgggcccatgacagcaggtagaaatgacgtggactgccgccagccgggcacagtggctcacgcctgtaatcccagcactttgggaggctgaggcatgtggatcacttgaggtcaggagttcgaaaccagcctggtcaacacggtgaaaccccatctctgctaaaaaaaaaaaaaatatatatatatatatatataaattagccaggcatggtgacgtgcacctgtggtcccagctactcaggaggctgaggcacaagaatcacttgaacccgggaggtggaggttgcagtgagattgcaccagtgcactctccagcctggcaacagagcaagactctgtctcaaacaaacaaaacaaaacaaacaaaaagacgtaagatgtggaccgctggagaatgggggtgctgcctgcagtcaaaacggagtgggggtgcccagctcagggccagaatgatcctattcccggcacttctcagtgaggctctgtggctcacctaagaaaccagcctcccttgcaggcaacggcctagctggcctggtctggaggctctcttcaaatatttacatccacacccaagatacggtcttgagatttgactcgcatgattgctatgggacaagttttcatctgcagtttaaatctgtttcccaacttacattaggggtttggaattctagatcgtatttgaagtgttggtgccacacacaccttaacacctgcacgctggcaacaaaaccgtccgctctgcagcacagctggggtcacctgacctttctcctgtcccccccacttgagctcagtggctgggcagcaggggatgcatggccactggccggccaggtgcagctctcagctggggtgttcagaggacgcctgtgtcctcccctcccccatccctctgtcacccttggaggcagagaactttgcccgtcagtcccatggggaatgtcaacaggcaggggcagcactgcagagatttcatcatggtctcccaggccctcaggctcctctgccttctgcttgggcttcagggctgcctggctgcaggtgcgtccggggaggttttctccataaacttggtggaagggcagtgggcaaatccaggagccagcccgggcttcccaaaccccgcccttgctccggacacccccatccaccaggagggtttt

SEQ ID NO: 31855 - DNA, 1100 bp, Homo Sapiens
agtccccaacatggcggctccccaagacgtccacgtccggatctgtaaccaagagattgtcaaatttgacctggaggtgaaggcgcttattcaggatatccgtgattgttcaggacccttaagtgctcttactgaactgaatactaaagtaaaagagaaatttcaacagttgcgtcacagaatacaggacctggagcagttggctaaagagcaagacaaagaatcagagaaacaacttctactccaggaagtggagaatcacaaaaagcagatgctcagcaatcaggcctcatggaggaaagctaatctcacctgcaaaattgcaatcgacaatctagagaaagcagaacttcttcagggaggagatctcttaaggcaaaggaaaaccaccaaagagagcctggcccagacatccagtaccatcactgagagcctcatggggatcagcaggatgatggcccagcaggtccagcagagcgaggaggccatgcagtctctagtcacttcttcacgaacgatcctggatgcaaatgaagaatttaagtccatgtcgggcaccatccagctgggccggaagcttatcacaaaatacaatcgccgggagctgacggacaagcttctcatcttccttgcgctacgcctgtttcttgctacggtcctctatattgtgaaaaagcggctctttccatttttgtgagatcccaaaggtgccagttctggccctttcagctcctgtttcaggatctgtcctggttcctgagctctaggctgctaagctgagccacacacccctccgttttgcaccagttgcctgcaggttggatggaacacagtgccccacttttctgcaagtagctggcttgtaaagggtgaacagagccatgggaggaaggtctggcattgggatgccgccctggggacatacgaaccgcctccttccaccattgtgcactatgggaggccgctgctgcgtggagcacttaaagtccagcctccaggaccggatgcccctcctgtctcccgctcccatcgtgcccttaaatgccagatctggtggagggaagagagaagaggtaggaagaaaggtgatgaaaactcct

SEQ ID NO: 31856 - DNA, 3046 bp, Homo Sapiens
atcttatttttctttttggtggtggtggtggaaggggggaggtgctagcagggccagccttgaactcgctggacagagctacagacctatggggcctggaagtgcccgctgagaaagggagaagacagcagaggggttgccgaggcaacctccaagtcccagatcatgtctctgtggggtctggtctccaagatgcccccagaaaaagtgcagcggctctatgtcgactttccccaacacctgcggcatcttctgggtgactggctggagagccagccctgggagttcctggtcggctccgacgccttctgctgcaacttggctagtgccctactttcagacactgtccagcaccttcaggcctcggtgggagagcagggggaggggagcaccatcttgcaacacatcagcacccttgagagcatatatcagagggaccccctgaagctggtggccactttcagacaaatacttcaaggagagaaaaaagctgttatggaacagttccgccacttgccaatgcctttccactggaagcaggaagaactcaagtttaagacaggcttgcggaggctgcagcaccgagtaggggagatccaccttctccgagaagccctgcagaagggggctgaggctggccaagtgtctctgcacagcttgatagaaactcctgctaatgggactgggccaagtgaggccctggccatgctactgcaggagaccactggagagctagaggcagccaaagccctagtgctgaagaggatccagatttggaaacggcagcagcagctggcagggaatggcgcaccgtttgaggagagcctggccccactccaggagaggtgtgaaagcctggtggacatttattcccagctacagcaggaggtaggggcggctggtggggagcttgagcccaagacccgggcatcgctgactggccggctggatgaagtcctgagaaccctcgtcaccagttgcttcctggtggagaagcagcccccccaggtactgaagactcagaccaagttccaggctggagttcgattcctgttgggcttgaggttcctgggggccccagccaagcctccgctggtcagggccgacatggtgacagagaagcaggcgcgggagctgagtgtgcctcagggtcctggggctggagcagaaagcactggagaaatcatcaacaacactgtgcccttggagaacagcattcctgggaactgctgctctgccctgttcaagaacctgcttctcaagaagatcaagcggtgtgagcggaagggcactgagtctgtcacagaggagaagtgcgctgtgctcttctctgccagcttcacacttggccccggcaaactccccatccagctccaggccctgtctctgcccctggtggtcatcgtccatggcaaccaagacaacaatgccaaagccactatcctgtgggacaatgccttctctgagatggaccgcgtgccctttgtggtggctgagcgggtgccctgggagaagatgtgtgaaactctgaacctgaagttcatggctgaggtggggaccaaccgggggctgctcccagagcacttcctcttcctggcccagaagatcttcaatgacaacagcctcagtatggaggccttccagcaccgttctgtgtcctggtcgcagttcaacaaggagatcctgctgggccgtggcttcaccttttggcagtggtttgatggtgtcctggacctcaccaaacgctgtctccggagctactggtctgaccggctgatcattggcttcatcagcaaacagtacgttactagccttcttctcaatgagcccgacggaacctttctcctccgcttcagcgactcagagattgggggcatcaccattgcccatgtcatccggggccaggatggctctccacagatagagaacatccagccattctctgccaaagacctgtccattcgctcactgggggaccgaatccgggatcttgctcagctcaaaaatctctatcccaagaagcccaaggatgaggctttccggagccactacaagcctgaacagatgggtaaggatggcaggggttatgtcccagctaccatcaagatgaccgtggaaagggaccaaccacttcctaccccagagctccagatgcctaccatggtgccttcttatgaccttggaatggcccctgattcctccatgagcatgcagcttggcccagatatggtgccccaggtgtacccaccacactctcactccatccccccgtatcaaggcctctccccagaagaatcagtcaacgtgttgtcagccttccaggagcctcacctgcagatgccccccagcctgggccagatgagcctgccctttgaccagcctcacccccagggcctgctgccgtgccagcctcaggagcatgctgtgtccagccctgaccccctgctctgctcagatgtgaccatggtggaagacagctgcctgagccagccagtgacagcgtttcctcagggcacttggattggtgaagacatattccctcctctgctgcctcccactgaacaggacctcactaagcttctcctggaggggcaaggggagtcggggggagggtccttgggggcacagcccctcctgcagccctcccactatgggcaatctgggatctcaatgtcccacatggacctaagggccaaccccagttggtgatcccagctggagggagaacccaaagagacagctcttctactacccccacagacctgctctggacacttgctcatgccctgccaagcagcagatggggagggtgccctcctatccccacctactcctgggtcaggaggaaaagactaacaggagaatgcacagtgggtggagccaatccactccttcctttctatcattcccctgcccacctccttccagcactgactggaagggaagttcaggctctgagacacgccccaacatgcctgcacctgcagcgcgcacacgcacgcacacacacatacagagctctctgagggtgatggggctgagcagg

SEQ ID NO: 31857 - DNA, 2805 bp, Homo Sapiens
gatggtcgcaagatggcggcgctgaaggaggataggagctacgggctgtcgtgcgggcgggttagcgacggcagcaaggtgtcggtgttccacgtgaagctcaccgacagtgccctgagggccttcgagagctaccgcgccagacaggattctgtttcactgaggccatctatccgatttcaaggaagccaagggcacatctccatcccccagcctgactgccccgcagaggcgcggacgttctccttctacctctccaacatcggccgcgacaacccccagggcagcttcgactgcatccagcagtatgtctccagtcatggggaagttcacctggactgcctgggcagcatacaggacaagatcacggtgtgtgccaccgacgactcctaccagaaggcgcggcagagcatggcccaggcggaggaggagacgcggagccgaagtgccattgtcatcaaggctggaggccgctacctgggcaagaaggttcagtttcggaaaccagccccaggtgcaacagacgcggtgccctcccggaagcgggcaacccccatcaacttggcgagtgccatcaggaagagtggtgccagtgccgtgagtgggggcagcggggtgtcccagaggcccttccgtgaccgagtgctgcacctcctggcactacggccctaccgcaaggctgagctgctgctgcgactgcagaaggacggcctgacgcaggcggacaaggacgcgctggatggcctcctccagcaggtggccaacatgagtgctaaggacggcacgtgtacactgcaggactgcatgtacaaggatgtgcagaaggactggcctggctactcggagggggaccagcagctgctgaagcgggtgctcgtccggaagctgtgccagccacagagcactggcagcctccttggagaccctgctgcctccagccccccaggcgagcgtgggcgctcggcctcgcccccacagaagcggctgcagcctcctgatttcatcgaccccctagccaacaagaaaccccggatatcgcacttcactcagagagctcagcctgccgtcaacgggaagctgggcgtgcccaatggccgtgaggccttgctgcccaccccgggcccaccagccagcacggacaccctcagctccagcactcacctgcccccgcggctggagcccccgagggcccacgaccccctggccgatgtcagcaatgacctgggccacagcggccgagactgtgagcacggagaggcggctgccccagcccccactgtgcgcctcggcctgcccctgctgacggactgtgcccagcccagcaggccacacggcagcccctcgcgcagcaagcccaagaagaagtccaagaagcacaaagacaaggagagggcggctgaggacaagccccgggcccagcttccagactgtgcacctgccacccatgccacccccggagccccagcagacaccccaggtttaaacggaacctgcagcgtttccagtgttcccacgtccacgtcggagacgcctgactacttgctgaagtacgcagccatctcctcttcggagcagcgccagagctacaagaacgacttcaatgccgagtacagcgagtaccgcgacctgcacgcccgcattgagcgcatcacgcggcggttcacccagctcgacgcccagctccggcagctctcccagggctccgaggagtatgagactactcgagggcagattttgcaggaatatcgaaaaatcaaaaagaccaacaccaactacagccaggagaagcaccgctgcgagtacctgcacagcaagctggcccacatcaagaggctcatcgccgagtacgaccagcggcagctgcaggcttggccctagccgccctccccgatggcggggatctgggagggtcgggggagcaaaaggcggtgagagaggatttatttaaaaaaataaacccgaggaagatgctcatctgagccagcaccgccggctttcagggcagcccctgcagacgtctggccctggcgggtggctgcaagcccacctcggccctccctgcgcttcctgagcagtccctgcttatgatgggctccccaggaagcccactgcctcctccctggctgcagcctccggggttcagcctcctgtctcgccagaagactcctaggcccttggggtggcgcgcctgccttttctagttttatacaaagacagccacttttagctactgctaatgagacttgagtctatttttgtacaaaagagaagcaaaatcttttttctaaacctgtgcctccctctcctcggacacccagggtctagccgctgccctgggtcctgcctgcagtattacagaggtcgtcgaaaggtgcagctgcgttctgagggcgtggggaatgggcaggtggcctctgctggtctctggctctacgtttaggcacccctttccccagcctctcctccttgggcagggtctctgctccagcaagcaaacagggtggcccaggtggctattttgagaactccagctggtgcccccagacagctgctcagagccaagggggcagagggctttcagcgcccccaggcctgccctgctatttcaggccctcagctgtcgggggccactgtgtttctgtgctccaagttgagactcggccgcagcggcgtcagacttttctttgcgatgtcctcggtttcccatttgttgctgctgctgctcattccacactgttgagaccttgtggtctcgatgctgctggcctccctccgtccctctgtccacttgtgggtcctggggtc

SEQ ID NO: 31858 - DNA, 5521 bp, Homo Sapiens
cgccccgcatcgtgcccggccccgtcgcggagatcccggacgaccgtcgcgggttgatggtcgcattccagatgtaaacagcttcagaagcctgacggtcatatggtagaatcactgtggactgagacccacctttctagacctgaagcccaggaggaggaagaggaggctggttggtaccatgggcataatgctctgaatcctagtctctcacctagtatgtgagcagtccctgcagatggcccatttggagatcttgacaaagcctcttctgtttccaatggggtttttggcgcattctcacagacttagatgaaactgtgatggccaccgcagggggcaggtgctgacatcgtccccagccctgtggctgttcatccggacatcatttccaacctcaatatctaaatgccacagtgctcttggagcaagttgggctggggaccactgttgccttttaagaccataaaaccatgggaaacgcagaaagtcaacatgtagagcacgagttttatggagaaaagcatgccagcctggggcgcaacgacacttcccgctccctgcgcctctcgcacaagacgcggaggaccaggcacgcttcctcggggaaggtgatccacaggaactccgaagtgagcacccgatccagcagcacccccagcatcccccagtccctggctgaaaatggcctggagcccttctcccaagatggtaccctagaagacttcgggagccccatctgggtggaccgagtggacatgggcttgagacctgtgtcttacactgactcttctgtcactcccagcgtagacagcagcatcgtcctcacagcagcctctgtgcagagcatgccagacactgaggagagcaggctttacggggatgacgctacatatttggctgagggaggcaggaggcagcattcctatacatccaatgggcccactttcatggagacggcgagctttaagaagaaacgctccaaatctgcagacatctggcgggaggacagcctggaattctcactctctgatctgagccaagaacatttaacaagcaacgaagaaatcttgggttccgccgaagagaaggactgcgaggaggctcgggggatggaaacgcgggcgagtccgcggcagctcagcacctgtcagagagccaattccttgggtgacttgtatgctcagaaaaactctggagtgacagcaaacatggggccggggagcaaatttgcaggctactgtcggaatttggtgtctgatattcccaatcttgcaaaccataagatgccaccagctgctgctgaagagactcctccgtacagtaattataacacacttccctgtaggaaatctcactgtctctctgaaggtgccaccaacccacaaattagccatagcaacagcatgcaaggcagaagagctaaaacaactcaggatgttaatgcaggcgagggcagtgagtttgcagacagtgggattgaaggggccactaccgacacggacctcctgtccaggcgatctaatgccaccaactccagctactcacccaccacaggccgggcctttgtgggcagcgacagcggcagcagctccaccggggatgcggctcgtcagggggtgtacgagaacttccggcgggagctggagatgagcaccaccaacagcgagagcctggaggaggccggctctgcgcacagcgatgagcagagcagcggcaccctgagctctccgggccagtcggacatcctgctgaccgccgcacagggcacggtgcgcaaggccggcgccctggccgtcaagaacttcctggtgcacaagaagaacaagaaggtggagtcagccacccggaggaagtggaagcactactgggtgtccctgaaaggatgcacgctatttttctacgagagcgacggcaggtctgggatagaccacaacagcatccccaaacacgccgtctgggtggagaacagcattgtgcaggctgtgcctgagcaccccaagaaggactttgtcttctgcctcagcaattccctgggtgatgccttcctttttcagaccactagccagacggagcttgaaaactggatcaccgccatccactctgcctgcgccactgcggtcgcgaggcaccaccacaaggaagacacgctccgactcctgaaatcagagatcaaaaaactggaacagaagattgacatggatgaaaagatgaagaaaatgggtgaaatgcagctgtcttcagtcactgactcaaagaaaaagaaaacaatattagatcagatctttgtctgggagcaaaatctcgagcagttccaaatggacctgtttcgtttccgctgttatttagccagccttcagggtggggagctgccaaaccccaaaaggcttctcgcttttgcaagtcgaccaacgaaagtggccatgggccgccttggaatcttttcggtatcatcgtttcatgccctggtggcagcacgcactggtgaaactggagtgagaagacgtactcaggccatgtccagatccgcgagcaagcgaaggagcaggttttcttctctgtggggtctggatactacctccaaaaagaagcagggacggccaagcatcaatcaggtgtttggagagggaaccgaagctgtaaagaaatctttagagggaatatttgatgacattgttccagatggcaagagggagaaagaagtggtcttacctaacgttcaccagcacaaccctgactgcgacatttgggtccacgagtatttcactccatcctggttctgtctgcccaataatcagcctgccctgacggtcgtccggccaggcgacactgcacgggacaccctggagctgatttgcaagacacatcaactggatcattctgctcattacctgcgcctgaaatttctaatagaaaacaaaatgcagctctatgttccacagcccgaggaagacatctatgagctgctgtacaaagaaattgaaatctgtccaaaagtcactcacagcatccacattgagaagtcagatacagctgctgatacttacgggttttcactttcttctgtggaagaagatggtattcgaaggctgtacgtgaatagtgtgaaggaaaccggtttagcttccaagaaaggcctgaaagcaggagatgagattcttgagatcaataatcgtgctgctgacgccctgaactcttctatgctcaaagatttcctctcacaaccctcgctgggcctcctggtgaggacctaccccgagctggaggaaggagtggagctgctggaaagcccgccccaccgagtggacggccctgccgaccttgacgagagccccctcgcctttctcaccagcaacccagggcacagcctttgcagcgagcagggcagcagtgctgagaccgctccagaggagaccgaggggccagacttggaatcctcagatgagactgatcacagcagcaagagtacagaacaggtggccgcattttgccgcagtttgcatgagatgaacccctctgaccagaacccatctcctcaggactccacggggcctcagctggcgaccatgagacaactctcggatgcagataacgtgcgcaaggtgatctgcgagctcctggagacggagcgcacctacgtgaaggatttaaactgtcttatggagagatacctaaagcctcttcaaaaagaaacttttctcacccaggatgagcttgacgtgctttttggaaatttaacggaaatggtagagtttcaagtagaattccttaaaactctagaagatggagtgagactggtacctgatttggaaaagcttgagaaggttgatcaatttaagaaagtgctgttctctctggggggatcattcctgtattatgctgaccgcttcaagctctacagtgccttctgcgccatccacacaaaagttcccaaggtcctggtgaaagccaagacagacacggctttcaaggcattcttggatgcccagaacccgaagcagcagcactcatccacgctggagtcgtacctcatcaagcccatccagaggatcctcaagtacccacttctgctcagggagctgttcgccctgaccgatgcggagagcgaggagcactaccacctggacgtggccatcaagaccatgaacaaggttgccagtcacatcaatgagatgcagaaaatccatgaagagtttggggctgtgtttgaccagctgattgctgaacagactggtgagaaaaaagaggttgcagatctgagcatgggagacctgcttttgcacactaccgtgatctggctgaacccgccggcctcgctgggcaagtggaaaaaggaaccagagttggcagcattcgtcttcaaaactgctgtggtccttgtgtataaagatggttccaaacagaagaagaaacttgtaggatctcacaggctttccatttatgaggactgggaccccttcagatttcgacacatgatccccacggaagcgctgcaggttcgagctttggcgagtgcagatgcagaggcaaatgccgtgtgtgaaattgtccatgtaaaatccgagtctgaagggaggccggagagggtctttcacttgtgctgcagctccccagagagccgaaaggatttcctaaaggctgtgcattcaatcctgcgtgataagcacagaagacagctcctcaaaaccgagagccttccctcatcccagcaatatgtcccttttggaggcaaaagattgtgtgcactgaagggggccaggccggccatgagcagggcagtgtctgccccaagcaagtctcttgggaggaggaggcggcggctggctcgaaacaggtttaccattgattctgatgccgtctccgcaagcagcccggagaaagagtcccagcagccccccggtggtggggacactgaccgatgggtagaggagcagtttgatcttgctcagtatgaggagcaagatgacatcaaggagacagacatcctcagtgacgatgatgagttctgtgagtccgtgaagggtgcctcagtggacagagacctgcaggagcggcttcaggccacctccatcagtcagcgggaaagaggccggaaaaccctggatagtcacgcgtcccgcatggcacagctcaagaagcaagctgccctgtcggggatcaatggaggcctggagagcgcaagcgaggaagtcatttgggttaggcgtgaagactttgccccctccaggaaactgaacactgagatctgactgcgtcacctgccccgtagagaatgtgtgtagatacttcctgccctaactctgcccaccctcctgtaccgtcgacaagaatgtccccttaggtcgcgctcttgcacacacggttttggcagctgacttggttctgaagccatgtagccacccaactttgtcattttcaacaacatcagaaagaattgatcagaatcccaaataaaacccaaaagtgtctaatgtattcattcattagctaactaaaagcccaaaaaagacaagacacccag

SEQ ID NO: 31859 - DNA, 11185 bp, Homo Sapiens
gctgccccgagcctttctggggaagaactccaggcgtgcggacgcaacagccgagaacattaggtgttgtggacaggagctgggaccaagatcttcggccagccccgcatcctcccgcatcttccagcaccgtcccgcaccctccgcatccttccccgggccaccacgcttcctatgtgacccgcctgggcaacgccgaacccagtcgcgcagcgctgcagtgaattttccccccaaactgcaataagccgccttccaaggccaagatgttcataaatataaagagcatcttatggatgtgttcaaccttaatagtaacccatgcgctacataaagtcaaagtgggaaaaagcccaccggtgaggggctccctctctggaaaagtcagcctaccttgtcatttttcaacgatgcctactttgccacccagttacaacaccagtgaatttctccgcatcaaatggtctaagattgaagtggacaaaaatggaaaagatttgaaagagactactgtccttgtggcccaaaatggaaatatcaagattggtcaggactacaaagggagagtgtctgtgcccacacatcccgaggctgtgggcgatgcctccctcactgtggtcaagctgctggcaagtgatgcgggtctttaccgctgtgacgtcatgtacgggattgaagacacacaagacacggtgtcactgactgtggatggggttgtgtttcactacagggcggcaaccagcaggtacacactgaattttgaggctgctcagaaggcttgtttggacgttggggcagtcatagcaactccagagcagctctttgctgcctatgaagatggatttgagcagtgtgacgcaggctggctggctgatcagactgtcagatatcccatccgggctcccagagtaggctgttatggagataagatgggaaaggcaggagtcaggacttatggattccgttctccccaggaaacttacgatgtgtattgttatgtggatcatctggatggtgatgtgttccacctcactgtccccagtaaattcaccttcgaggaggctgcaaaagagtgtgaaaaccaggatgccaggctggcaacagtgggggaactccaggcggcatggaggaacggctttgaccagtgcgattacgggtggctgtcggatgccagcgtgcgccaccctgtgactgtggccagggcccagtgtggaggtggtctacttggggtgagaaccctgtatcgttttgagaaccagacaggcttccctccccctgatagcagatttgatgcctactgctttaaacctaaagaggctacaaccatcgatttgagtatcctcgcagaaactgcatcacccagtttatccaaagaaccacaaatggtttctgatagaactacaccaatcatccctttagttgatgaattacctgtcattccaacagagttccctcccgtgggaaatattgtcagttttgaacagaaagccacagtccaacctcaggctatcacagatagtttagccaccaaattacccacacctactggcagtaccaagaagccctgggatatggatgactactcaccttctgcttcaggacctcttggaaagctagacatatcagaaattaaggaagaagtgctccagagtacaactggcgtctctcattatgctacggattcatgggatggtgtcgtggaagataaacaaacacaagaatcggttacacagattgaacaaatagaagtgggtcctttggtaacatctatggaaatcttaaagcacattccttccaaggaattccctgtaactgaaacaccattggtaactgcaagaatgatcctggaatccaaaactgaaaagaaaatggtaagcactgtttctgaattggtaaccacaggtcactatggattcaccttgggagaagaggatgatgaagacagaacacttacagttggatctgatgagagcaccttgatctttgaccaaattcctgaagtcattacggtgtcaaagacttcagaagacaccatccacactcatttagaagacttggagtcagtctcagcatccacaactgtttcccctttaattatgcctgataataatggatcatccatggatgactgggaagagagacaaactagtggtaggataacggaagagtttcttggcaaatatctgtctactacaccttttccatcacagcatcgtacagaaatagaattgtttccttattctggtgataaaatattagtagagggaatttccacagttatttatccttctctacaaacagaaatgacacatagaagagaaagaacagaaacactaataccagagatgagaacagatacttatacagatgaaatacaagaagagatcactaaaagtccatttatgggaaaaacagaagaagaagtcttctctgggatgaaactctctacatctctctcagagccaattcatgttacagagtcttctgtggaaatgaccaagtcttttgatttcccaacattgataacaaagttaagtgcagagccaacagaagtaagagatatggaggaagactttacagcaactccaggtactacaaaatatgatgaaaatattacaacagtgcttttggcccatggtactttaagtgttgaagcagccactgtatcaaaatggtcatgggatgaagataatacaacatccaagcctttagagtctacagaaccttcagcctcttcaaaattgccccctgccttactcacaactgtggggatgaatggaaaggataaagacatcccaagtttcactgaagatggagcagatgaatttactcttattccagatagtactcaaaagcagttagaggaggttactgatgaagacatagcagcccatggaaaattcacaattagatttcagccaactacatcaactggtattgcagaaaagtcaactttgagagattctacaactgaagaaaaagttccacctatcacaagcactgaaggccaagtttatgcaaccatggaaggaagtgctttgggtgaagtagaagatgtggacctctctaagccagtatctactgttccccaatttgcacacacttcagaggtggaaggattagcatttgttagttatagtagcacccaagagcctactacttatgtagactcttcccataccattcctctttctgtaattcccaagacagactggggagtgttagtaccttctgttccatcagaagatgaagttctaggtgaaccctctcaagacatacttgtcattgatcagactcgccttgaagcgactatttctccagaaactatgagaacaacaaaaatcacagagggaacaactcaggaagaattcccttggaaagaacagactgcagagaaaccagttcctgctctcagttctacagcttggactcccaaggaggcagtaacaccactggatgaacaagagggcgatggatcagcatatacagtctctgaagatgaattgttgacaggttctgagagggtcccagttttagaaacaactccagttggaaaaattgatcacagtgtgtcttatccaccaggtgctgtaactgagcacaaagtgaaaacagatgaagtggtaacactaacaccacgcattgggccaaaagtatctttaagtccagggcctgaacaaaaatatgaaacagaaggtagtagtacaacaggatttacatcatctttgagtccttttagtacccacattacccagcttatggaagaaaccactactgagaaaacatccctagaggatattgatttaggctcaggattatttgaaaagcccaaagccacagaactcatagaattttcaacaatcaaagtcacagttccaagtgatattaccactgccttcagttcagtagacagacttcacacaacttcagcattcaagccatcttccgcgatcactaagaaaccacctctcatcgacagggaacctggtgaagaaacaaccagtgacatggtaatcattggagaatcaacatctcatgttcctcccactacccttgaagatattgtagccaaggaaacagaaaccgatattgatagagagtatttcacgacttcaagtcctcctgctacacagccaacaagaccacccactgtggaagacaaagaggcctttggacctcaggcgctttctacgccacagcccccagcaagcacaaaatttcaccctgacattaatgtttatattattgaggtcagagaaaataagacaggtcgaatgagtgatttgagtgtaattggtcatccaatagattcagaatctaaagaagatgaaccttgtagtgaagaaacagatccagtgcatgatctaatggctgaaattttacctgaattccctgacataattgaaatagacctataccacagtgaagaaaatgaagaagaagaagaagagtgtgcaaatgctactgatgtgacaaccaccccatctgtgcagtacataaatgggaagcatctcgttaccactgtgcccaaggacccagaagctgcagaagctaggcgtggccagtttgaaagtgttgcaccttctcagaatttctcggacagctctgaaagtgatactcatccatttgtaatagccaaaacggaattgtctactgctgtgcaacctaatgaatctacagaaacaactgagtctcttgaagttacatggaagcctgagacttaccctgaaacatcagaacatttttcaggtggtgagcctgatgttttccccacagtcccattccatgaggaatttgaaagtggaacagccaaaaaaggggcagaatcagtcacagagagagatactgaagttggtcatcaggcacatgaacatactgaacctgtatctctgtttcctgaagagtcttcaggagagattgccattgaccaagaatctcagaaaatagcctttgcaagggctacagaagtaacatttggtgaagaggtagaaaaaagtacttctgtcacatacactcccactatagttccaagttctgcatcagcatatgtttcagaggaagaagcagttaccctaataggaaatccttggccagatgacctgttgtctaccaaagaaagctgggtagaagcaactcctagacaagttgtagagctctcagggagttcttcgattccaattacagaaggctctggagaagcagaagaagatgaagatacaatgttcaccatggtaactgatttatcacagagaaatactactgatacactcattactttagacactagcaggataatcacagaaagcttttttgaggttcctgcaaccaccatttatccagtttctgaacaaccttctgcaaaagtggtgcctaccaagtttgtaagtgaaacagacacttctgagtggatttccagtaccactgttgaggaaaagaaaaggaaggaggaggagggaactacaggtacggcttctacatttgaggtatattcatctacacagagatcggatcaattaattttaccctttgaattagaaagtccaaatgtagctacatctagtgattcaggtaccaggaaaagttttatgtccttgacaacaccaacacagtctgaaagggaaatgacagattctactcctgtctttacagaaacaaatacattagaaaatttgggggcacagaccactgagcacagcagtatccatcaacctggggttcaggaagggctgaccactctcccacgtagtcctgcctctgtctttatggagcagggctctggagaagctgctgccgacccagaaaccaccactgtttcttcattttcattaaacgtagagtatgcaattcaagccgaaaaggaagtagctggcactttgtctccgcatgtggaaactacattctccactgagccaacaggactggttttgagtacagtaatggacagagtagttgctgaaaatataacccaaacatccagggaaatagtgatttcagagcgattaggagaaccaaattatggggcagaaataaggggcttttccacaggttttcctttggaggaagatttcagtggtgactttagagaatactcaacagtgtctcatcccatagcaaaagaagaaacggtaatgatggaaggctctggagatgcagcatttagggacacccagacttcaccatctacagtacctacttcagttcacatcagtcacatatctgactcagaaggacccagtagcaccatggtcagcacttcagccttcccctgggaagagtttacatcctcagctgagggctcaggtgagcaactggtcacagtcagcagctctgttgttccagtgcttcccagtgctgtgcaaaagttttctggtacagcttcctccattatcgacgaaggattgggagaagtgggtactgtcaatgaaattgatagaagatccaccattttaccaacagcagaagtggaaggtacgaaagctccagtagagaaggaggaagtaaaggtcagtggcacagtttcaacaaactttccccaaactatagagccagccaaattatggtctaggcaagaagtcaaccctgtaagacaagaaattgaaagtgaaacaacatcagaggaacaaattcaagaagaaaagtcatttgaatcccctcaaaactctcctgcaacagaacaaacaatctttgattcacagacatttactgaaactgaactcaaaaccacagattattctgtactaacaacaaagaaaacttacagtgatgataaagaaatgaaggaggaagacacttctttagttaacatgtctactccagatccagatgcaaatggcttggaatcttacacaactctccctgaagctactgaaaagtcacattttttcttagctactgcattagtaactgaatctataccagctgaacatgtagtcacagattcaccaatcaaaaaggaagaaagtacaaaacattttccgaaaggcatgagaccaacaattcaagagtcagatactgagctcttattctctggactgggatcaggagaagaagttttacctactctaccaacagagtcagtgaattttactgaagtggaacaaatcaataacacattatatccccacacttctcaagtggaaagtacctcaagtgacaaaattgaagactttaacagaatggaaaatgtggcaaaagaagttggaccactcgtatctcaaacagacatctttgaaggtagtgggtcagtaaccagcacaacattaatagaaattttaagtgacactggagcagaaggacccacggtggcacctctccctttctccacggacatcggacatcctcaaaatcagactgtcaggtgggcagaagaaatccagactagtagaccacaaaccataactgaacaagactctaacaagaattcttcaacagcagaaattaacgaaacaacaacctcatctactgattttctggctagagcttatggttttgaaatggccaaagaatttgttacatcagcaccaaaaccatctgacttgtattatgaaccttctggagaaggatctggagaagtggatattgttgattcatttcacacttctgcaactactcaggcaaccagacaagaaagcagcaccacatttgtttctgatgggtccctggaaaaacatcctgaggtgccaagcgctaaagctgttactgctgatggattcccaacagtttcagtgatgctgcctcttcattcagagcagaacaaaagctcccctgatccaactagcacactgtcaaatacagtgtcatatgagaggtccacagacggtagtttccaagaccgtttcagggaattcgaggattccaccttaaaacctaacagaaaaaaacccactgaaaatattatcatagacctggacaaagaggacaaggatttaatattgacaattacagagagtaccatccttgaaattctacctgagctgacatcggataaaaatactatcatagatattgatcatactaaacctgtgtatgaagacattcttggaatgcaaacagatatagatacagaggtaccatcagaaccacatgacagtaatgatgaaagtaatgatgacagcactcaagttcaagagatctatgaggcagctgtcaacctttctttaactgaggaaacatttgagggctctgctgatgttctggctagctacactcaggcaacacatgatgaatcaatgacttatgaagatagaagccaactagatcacatgggctttcacttcacaactgggatccctgctcctagcacagaaacagaattagacgttttacttcccacggcaacatccctgccaattcctcgtaagtctgccacagttattccagagattgaaggaataaaagctgaagcaaaagccctggatgacatgtttgaatcaagcactttgtctgatggtcaagctattgcagaccaaagtgaaataataccaacattgggccaatttgaaaggactcaggaggagtatgaagacaaaaaacatgctggtccttcttttcagccagaattctcttcaggagctgaggaggcattagtagaccatactccctatctaagtattgctactacccaccttatggatcagagtgtaacagaggtgcctgatgtgatggaaggatccaatcccccatattacactgatacaacattagcagtttcaacatttgcgaagttgtcttctcagacaccatcatctcccctcactatctactcaggcagtgaagcctctggacacacagagatcccccagcccagtgctctgccaggaatagacgtcggctcatctgtaatgtccccacaggattcttttaaggaaattcatgtaaatattgaagcaactttcaaaccatcaagtgaggaataccttcacataactgagcctccctctttatctcctgacacaaaattagaaccttcagaagatgatggtaaacctgagttattagaagaaatggaagcttctcccacagaacttattgctgtggaaggaactgagattctccaagatttccaaaacaaaaccgatggtcaagtttctggagaagcaatcaagatgtttcccaccattaaaacacctgaggctggaactgttattacaactgccgatgaaattgaattagaaggtgctacacagtggccacactctacttctgcttctgccacctatggggtcgaggcaggtgtggtgccttggctaagtccacagacttctgagaggcccacgctttcttcttctccagaaataaaccctgaaactcaagcagctttaatcagagggcaggattccacgatagcagcatcagaacagcaagtggcagcgagaattcttgattccaatgatcaggcaacagtaaaccctgtggaatttaatactgaggttgcaacaccaccattttcccttctggagacttctaatgaaacagatttcctgattggcattaatgaagagtcagtggaaggcacggcaatctatttaccaggacctgatcgctgcaaaatgaacccgtgccttaacggaggcacctgttatcctactgaaacttcctacgtatgcacctgtgtgccaggatacagcggagaccagtgtgaacttgattttgatgaatgtcactctaatccctgtcgtaatggagccacttgtgttgatggttttaacacattcaggtgcctctgccttccaagttatgttggtgcactttgtgagcaagataccgagacatgtgactatggctggcacaaattccaagggcagtgctacaaatactttgcccatcgacgcacatgggatgcagctgaacgggaatgccgtctgcagggtgcccatctcacaagcatcctgtctcacgaagaacaaatgtttgttaatcgtgtgggccatgattatcagtggataggcctcaatgacaagatgtttgagcatgacttccgttggactgatggcagcacactgcaatacgagaattggagacccaaccagccagacagcttcttttctgctggagaagactgtgttgtaatcatttggcatgagaatggccagtggaatgatgttccctgcaattaccatctcacctatacgtgcaagaaaggaacagttgcttgcggccagccccctgttgtagaaaatgccaagacctttggaaagatgaaacctcgttatgaaatcaactccctgattagataccactgcaaagatggtttcattcaacgtcaccttccaactatccggtgcttaggaaatggaagatgggctatacctaaaattacctgcatgaacccatctgcataccaaaggacttattctatgaaatactttaaaaattcctcatcagcaaaggacaattcaataaatacatccaaacatgatcatcgttggagccggaggtggcaggagtcgaggcgctgatccctaaaatggcgaacatgtgttttcatcatttcagccaaagtcctaacttcctgtgcctttcctatcacctcgagaagtaattatcagttggtttggatttttggaccaccgttcagtcattttgggttgccgtgctcccaaaacattttaaatgaaagtattggcattcaaaaagacagcagacaaaatgaaagaaaatgagagcagaaagtaagcatttccagcctatctaatttctttagttttctatttgcctccagtgcagtccatttcctaatgtataccagcctactgtactatttaaaatgctcaatttcagcaccgatggccatgtaaataagatgatttaatgttgattttaatcctgtatataaaataaaaagtcacaatgagtttgggcatatttaatgatgattatggagccttagaggtctttaatcattggttcggctgcttttatgtagtttaggctggaaatggtttcacttgctctttgactgtcagcaagactgaagatggcttttcctggacagctagaaaacacaaaatcttgtaggtcattgcacctatctcagccataggtgcagtttgcttctacatgatgctaaaggctgcgaatgggatcctgatggaactaaggactccaatgtcgaactcttctttgctgcattcctttttcttcacttacaagaaaggcctgaatggaggacttttctgtaaccagg

SEQ ID NO: 31860 - DNA, 1616 bp, Homo Sapiens
ggctgagcactcaggcaatcacactctcagaaactgcggcggctctggactgcagcctccaaggctccatgccagacaaagctatgcgtagtcacacttgctacaatagcctggatggtttcttttgtctccaattattcacacacagcaaatattttgccagatatcgaaaatgaagatttcatcaaagactgcgttcgaatccataacaagttccgatcagaggtgaaaccaacagccagtgatatgctatacatgacttgggacccagcactagcccaaattgcaaaagcatgggccagcaattgccagttttcacataatacacggctgaagccaccccacaagctgcacccaaacttcacttcactgggagagaacatctggactgggtctgtgcccattttttctgtgtcttccgccatcacaaactggtatgacgaaatccaggactatgacttcaagactcggatatgcaaaaaagtctgtggccactacactcaggttgtttgggcagatagttacaaagttggctgcgcagttcaattttgccctaaagtttctggctttgacgctctttccaatggagcacattttatatgcaactacggaccaggagggaattacccaacttggccatataagagaggagccacctgcagtgcctgccccaataatgacaagtgtttggacaatctctgtgttaaccgacagcgagaccaagtcaaacgttactactctgttgtatatccaggctggcccatatatccacgtaacagatacacttctctctttctcattgttaattcagtaattctaatactgtctgttataattaccattttggtacagcacaagtaccctaatttagttcttttggactaatacaattcaggaaagaaaaaacccaaaaaccaacctcattcacatatggctttttttttaacccaataacaattaggtgtaccttcctatttaaacatttcataaaaaaatatatgttatagcaatactcttactcaaaagaagaaatttcctaactctatcagataaactcatctttagtataaataagcattatttgcaggttgcctacaggtggacttttagtaagtaacctaacccatgtttcagcttctaaatctcgaaaatgagcaaggtacaggtacagtagcacatttttaggtgattcttagtaactccagtagccttcattagttaaaaacattattattttttgcatgctgcttcgactctaaatatcttgttttccctgtctttttggtttactacttccccagattcagaacagaggagtaactaggggatctgattttagaggcctaattttctgttcatggactgttaaaagtaaaaccaaactttcaaaagggataaacctaaatatttacttgttatcattagagagggaacatcaaatgctggcactatatacatacgatcagcctgattatgatatcacaatggtcgtaatgtatacaaagacttatataccactttctcgtataaatttttcaaaaaatacaataataatataatttataaagaacactcttctatgaacaaccaccaccaccaaaaaaaaaaaaaaaaaa

SEQ ID NO: 31861 - DNA, 4992 bp, Homo Sapiens
ccgcggtgagccgcgaggaagagaggcgagcgagagtggaggaggaggcggcggctgcgggacggtccccaggaatgtcgctgccccccccccccctgccgttgaggaggagacggaggagaccgacgttgttagggaagatgatccctatgatctgccgctgtttctgcacagaaatgagggaaatacaaagaaccaaatacagttctaaatttgggatctgtattttgagatgattttattttcagaatgagaagcatatctggttacctttatgaatgtagagacatgagaagagagttatgatggcaaaaaacaaagagcctcgtcccccatcctataccatcagtatagttggactctctgggactgaaaaagacaaaggtaactgtggagttggaaagtcttgtttgtgcaatagatttgtacgctcaaaagcagatgaatattatccagagcatacttctgtgcttagcaccattgactttggaggacgagtagtaaacaatgatcactttttgtactggggtgacataatacaaaatagtgaagatggagtagaatgcaaaattcatgtcattgaacaaacagagttcattgatgaccagactttcttgcctcatcggagtacgaatttgcaaccatatataaaacgtgcagctgcatctaaattgcagtcagcagaaaaactaatgtacatttgcactgatcagctaggcttagaacaagactttgaacagaagcaaatgcctgaagggaagctcaacgtagatggatttttattatgcattgatgtaagtcaaggatgcaataggaagtttgatgatcaacttaaatttgtgaataacctttttgtccagttatcaaaatcaaaaaaacctgtaataatagcagcaactaaatgtgatgaatgcgtgggtcattatcttagagaagttcaggcatttgcttcaaataaaaagaaccttcttgtagtggaaacactcagcgcaataaaagtcaacattgaaacatgttttactgcactggtacaaatgttggataaaactcgtagcaagcctaaaattattccctatttggatgcttataaaacacagagacaacttgttgtcacagcaacagataagtttgaaaaacttgtgcagactgtgagagattatcatgcaacttggaaaactgttagtaataaattaaaaaatcatcctgattatgaagaatacatcaacttagagggaacaagaaaggccagaaatacattctcaaaacatatagaacaacttaaacaggaacatataagaaaaaggagagaagagtatataaatactttaccaagagcttttaacactcttttgccaaatctagaagagattgaacatttgaattggtcagaagctttgaagttaatggaaaagagagcagatttccagttatgttttgtggtgctagaaaaaactccttgggatgaaactgaccatatagacaaaattaatgataggcggattccatttgacctcctgagcactttagaagctgaaaaagtctatcagaaccatgtacagcatctgatatccgagaagaggagggtggaaatgaaggaaaaattcaaaaagactttggaaaaaattcaattcatttcaccagggcagccatgggaggaagttatgtgctttgttatggaggatgaagcctacaaatatatcactgaggctgatagcaaagaggtatatggtaggcatcagcgagaaatagttgaaaaagccaaagaagagtttcaagaaatgctttttgagcattctgaacttttttatgatttagatcttaatgcaacacctagttcagataaaatgagtgaaattcatacagttctgagtgaagaacctagatataaagctttacagaaacttgcacctgatagggaatcccttctacttaagcatataggatttgtttatcatcccactaaagaaacatgtcttagtggccaaaattgtacagacattaaagtggagcagttacttgctagtagtcttttacagttggatcatggccgcttaagattatatcacgatagtaccaatatagataaagttaacctttttattttagggaaggatggccttgcccaagaactagcaaatgagataaggacacaatccactgatgatgagtatgccttagatggaaaaatttatgaacttgatcttcggccggttgatgccaaatcgccttactttttgagtcagttatggactgccgcctttaaaccacatgggtgcttctgtgtatttaattccattgagtcattgagttttattggggaatttattgggaaaataagaactgaagcttctcagatcagaaaagataaatacatggctaatcttccatttacattaattctggctaatcagagagattccattagtaagaatctaccaattctcaggcaccaagggcagcagttggcaaacaagttgcaatgtccttttgtagatgtacctgctggtacatatcctcgtaaatttaatgaaacccaaataaagcaagctctcagaggagtattggaatcagttaaacacaatttggatgtggtgagcccaattcctgccaataaggacttatcagaagctgacttgagaattgtcatgtgcgccatgtgtggagatccatttagtgtggatcttattctttcacccttccttgattctcattcttgcagtgctgctcaagctggacagaataattccctaatgcttgataaaatcattggtgaaaaaaggaggcgaatacagatcacaatattatcataccactcttcaattggagtaagaaaagatgaactagttcatgggtatatattagtttactctgcaaaacggaaagcttcgatgggaatgcttcgagcatttctatcagaagttcaagacaccattcctgtacagctggtggcagttactgacagccaagcagatttttttgaaaatgaggctatcaaagagttaatgactgaaggagaacacattgcaactgagatcactgctaaatttacagcactgtattctttatctcagtatcatcggcaaactgaggtctttactctgttttttagtgatgttctagagaaaaaaaatatgatagaaaattcttatttgtctgataatacaagggaatcaacccatcaaagtgaagatgtttttctaccatctcccagagactgttttccctataataactaccctgattcagatgatgacacagaagcaccacctccttatagtccaattggggatgatgtacagttgcttccaacacctagtgaccgttccagatatagattagatttggaaggaaatgagtatcctattcatagtaccccaaactgtcatgaccatgaacgcaaccataaagtgcctccacctattaaacctaaaccagttgtacctaagacaaatgtgaaagcgctcgttccaaaccttttaagggcaattgaagctggtattggtaaaaatccaagaaagcagacttcccgggtgcctttcggtcctgaagatatggatccttcagataactatgcggaacccattgatacaattttcaaacagaagggctattctgatgagatttatgttgtcccagatgatagtcaaaatcgtattaaaattcgaaactcatttgtaaataacacccaaggagatgaagaaaatgggttttctgatagacctcaaaaagtcatggggaacggaggccttcaaaatacaaatataaatctaaaaccttgtttagtaaagccaagtcatactatagaagaacacattcagatgccagtgatgatgaggctttcaccacttctaaaaccaaaaagaaaaggaagacatcgtggaagtgaagaagatccacttctttctcctgttgaaacttggaaaggtggtattgataatcctgcaatcacttctgaccaggagttagatgataagaagatgaagaagaaaacccacaaagtgaaagaagataaaaaaaagaaaactaagaacttcaatccaccaacacgtagaaattgggaaagtaattactttgggatgcccctccaggatctggttacagctgagaagcccataccactatttgttgagaaatgtgtggaatttattgaagatacagggttatgtaccgagagactctaccgtgtcagcgggaataaaactgaccaagaaaatattcaaaagcagtttgttcaagatcataatatcaatctagtgtcaatggaagtaacagtaaatgctgtagctggagcccttaaagctttctttgcagatctgccagatcctttaattccatattctcttcatccagaactattggaagcagcaaaaatcccggataaaacagaacgtcttcatgccttgaaagaaattgttaagaaatttcatcctgtaaactatgatgtattcagatacgtgataacacatctaaacagggttagtcagcaacataaaatcaacctaatgacagcagacaacttatccatctgttttggccaacccttgatgagacctgatttgaaatcgatggagtttctgtctactactaagattcatcaatctgttgttgaaacattcattcagcagtgtcagtttttcttttacaatggagaaattgtagaaacgacaaacattgtggctcctccaccaccttcaaacccaggacagttggtggaaccaatggtgccacttcagttgccgccaccattgcaacctcagctgatacaaccacaattacaaacggatcctcttggtattatatgagtaggaagtgattgcaaacaggctggatttggacaaaaagcaaatctagacatgcatgtttcagggttcagtagtatacttcatgtttcatacagataattcacattcaaaattacattttctctttgaactagatggtattccttattcacttacattacaaatctaagaccatgtgataagcatgact

SEQ ID NO: 31862 - DNA, 5633 bp, Homo Sapiens
cccgagtgtcggttcactgtggagacagcggtggcggagtgggtctccagggctctgggctggcaaggcccccggaggggtggggcgcggaggaggctacagatccgcttccgcgcggcggggccgggtgcttgggacgcggctctgggctcccgggataaggggctcccgggacaaggggctcccggagagcccagtggttagcgatgctgctgtcgccgtcgctgctgctgctgctgctgctggggggcgccgcgggctgcgccgagggtgtggcggcggcgcttacccccgagcggctcctggagtggcaggataaaggaatatttgttatccaaagtgagagtctcaagaaatgcattcaagcaggtaaatcggttctgaccctcggtagaactggaagcaagcaagcaaacaagcacatgctgtggaaatgggtttcaaaccatggcctctttaacataggaggcagcggttgcctgggcctgaatttctccgccccagagcagccattaagcttatatgaatgtgactccaccctcgtttccttacggtggcgctgtaacaggaagatgatcacaggcccgctgcagtactctgtccaggtggcgcatgacaacacagtggtggcctcacggaagtatattcataagtggatttcttatgggtcaggtggtggagacatttgtgaatatctacacaaagatttgcatacaatcaaagggaacacccacgggatgccgtgtatgtttcccttccagtataaccatcagtggcatcatgaatgtacccgtgaaggtcgggaagatgacttactgtggtgtgccacgacaagccgttatgaaagagatgaaaagtggggattttgccctgatcccacctctgcagaagtaggttgtgatactatttgggagaaggacctcaattcacacatttgctaccagttcaacctgctttcatctctctcttggagtgaggcacattcttcatgccagatgcaaggaggtacgctgttaagtattacagatgaaactgaagaaaatttcataagggagcacatgagcagtaaaacagtggaggtgtgggttggcctcaatcagcttgatgaagacgctggctggcagtggtctgatggaacgccgctcaactatctgaattggagcccagaggtaaattttgagccatttgttgaagatcactgtggaacatttagttcatttatgccaagtgcctggaggagtcgggattgtgagtccaccttgccatatatatgtaaaaaatatctaaaccacattgatcatgaaatagttgaaaaagatgcgtggaaatattatgctacccactgtgagcctggctggaatccctacaatcgtaattgctacaaacttcagaaagaagaaaagacctggcatgaggctctgcgttcttgtcaggctgataacagtgcattaatagacataacctcattagcagaggtggagtttcttgtaaccctccttggagatgaaaatgcatcagaaacatggattggtttgagcagcaataaaattccagtttcctttgaatggtctaatgactcttcagtcatctttactaattggcacacacttgagccccacatttttccaaatagaagccagctgtgtgtctcagcagagcagtctgagggacactggaaagtcaaaaattgtgaagaaagacttttttacatttgtaaaaaagcaggccatgtcctctctgatgctgaatcaggatgtcaagagggatgggaggagacatgtggattctgttacaaaattgacacagtccttcgaagctttgaccaagcttccagcggttattactgtcctcctgcacttgtaaccattacaaacaggtttgaacaggcttttattaccagtttgatcagtagtgtggtaaaaatgaaggacagttatttttggatagctcttcaggaccaaaatgatacgggagaatacacttggaagccagtagggcagaaacccgagccggtgcagtacacacactggaacacacaccaaccgcgctacagtggtggctgtgttgccatgcgaggaaggcatccacttggtcgctgggaagtgaagcactgtcggcactttaaggcaatgtccttgtgcaagcagccagttgaaaatcaggaaaaagcagagtatgaagagagatggccctttcacccctgctatttggactgggagtcagagcctggtctggccagttgcttcaaggtatttcatagtgaaaaagttctgatgaaaagaacatggagagaagctgaagcattttgcgaagaatttggagctcatcttgcaagctttgcccatattgaggaagagaattttgtgaatgagctcttacacccaaaatttaattggacagaagaaaggcagttctggattggatttaataaaagaaacccactgaatgccggctcatgggagtggtctgatagaactcctgttgtctcttcgtttttagacaacacttattttggagaagatgcaagaaactgtgctgtttataagccaaacaaaacattgctgcccttacactgtggttccaaacgtgaatggatatgcaaaatcccaagagatgtgaaacccaagattccgttctggtaccagtacgatgtaccctggctcttttatcaggatgcagaatacctttttcatacctttgcctcagaatggttgaactttgagtttgtctgtagctggctgcacagtgatcttctcacaattcattctgcacatgagcaagaattcatccacagcaaaataaaagcgctatccaagtatggtgcaagttggtggattggacttcaagaagaaagagccaatgatgaatttcgctggagagatggaacaccagtgatataccagaactgggacacaggaagagaaagaactgtgaataatcagagccagagatgtggctttatttcttctataacaggactctggggtagtgaagagtgttcagtttctatgcctagtatctgtaagcgaaaaaaggtttggctcatagagaaaaagaaagatacaccaaaacaacatggaacgtgtcccaaaggatggctatattttaactataagtgccttctgctgaatatccccaaagacccaagcagttggaagaactggacgcatgcccaacatttctgtgctgaagaaggggggaccctggtcgccattgaaagtgaggtggagcaagctttcattactatgaatctttttggccagaccaccagtgtgtggataggtttacaaaatgatgattatgaaacatggctaaatggaaaacctgtggtatattctaactggtctccatttgatataataaatattccaagtcacaataccactgaagttcagaaacacattcctctctgtgccttactctcaagtaatcctaattttcatttcactggaaaatggtattttgaagactgtggaaaggaaggctatgggtttgtttgtgaaaaaatgcaagatacttctggacacggtgtaaatacatctgatatgtatccaatgcccaataccttagaatatggaaacagaacttacaaaataattaatgcaaatatgacttggtatgcagcaataaaaacctgcctgatgcacaaagcacaactggtcagcatcacagaccagtatcaccagtccttcctcactgttgtcctcaaccggctaggatatgcccactggattggactgttcaccacagataatggtcttaattttgactggtctgatggcaccaaatcttctttcactttttggaaagatgaggagtcctccctccttggtgactgcgtttttgccgacagcaacggacgctggcatagcacagcctgcgactcatttctgcaaggtgccatttgtcatgtaccacctgaaacaagacaatctgaacacccagagttgtgctcagaaacatctattccctggataaaatttaaaagtaattgctacaagttttctacagtcctagacagtatgagttttgaggctgctcatgaattttgcaaaaaggaaggttctaatcttttaacaatcaaggatgaggctgaaaatgcatttctcctagaagagctgtttgcttttggttcttctgtccagatggtttggttgaatgctcaatttgatggtaacaatgaaaccataaagtggtttgatggaactcccacagaccagtcaaactggggcattcggaagccagacacagactacttcaagccccatcattgtgttgccttgaggatccctgaaggattatggcagctatccccgtgtcaagaaaaaaaaggctttatatgtaaaatggaggcagatattcacactgcagaggcgctgccagaaaaaggaccaagtcacagcatcattcctcttgcggttgtactgacactgatagtcattgtggccatttgcacactttccttctgcatatacaagcataacggtggcttcttcaggagacttgcagggtttcggaatccttactatcctgcaaccaactttagtacagtatatttagaagaaaatattctcatttctgatcttgagaagagtgaccaataataatgaggtcagagaatgccacagacaccagggtaagtaaagaagactaaacaggagtctcatctgtctttccctttacagcacagatgccattagaatgtgaattgggtcactattttaattattcttgaagtgattactggttttgaatcttaaccaaatcagatgggttttgatttattcatttccctaaactgtgatccattcttaaaaggggtaaattatgcattggttatttttcagaaagacaagaactattaaaagaaactccctattgaaaactctgaaatcaatgcgaataatagtttttgcattaatgtatctctactaaaatttgggggaattttaaaactaatctggtatctattcagacatttacctgcactcgtaccattaagaaagacagaaagaagccaaaaaaaattaatcttgtatatgaggggaaaaggaaagggcttctgagaggattcttagttgtttcttttgaattccttttaatagcaggatttggaaaatactaatttctgtgcttaagggtcacaggttctgggctctcaactgatatttaaggtgacattcatttttattaggtctaacatctcaagctaaaggagaaagaaaaatacctccttttaaatggcaaagaccttcattagcagcacacttttataaacacccatatagttaaaatgtggccttaaactttcaattactaaatgatgattaagttggatattttaaaatgtcttatacataagcttaaagtaatatattgaaactttaacagttgtgctgtaaaaactcatggactttctgggattctaaatatattatataatatgttacactcttaataactggtagatataaaatgtaacttggatttaaaggagtagagctaaagatctgtattatagtctcattagtaccagacagatgttgttgagaagtactaaataaattagtaatctagatatccttattatgtaaatgagtttaggtgttctatttaataaactattttctgga

SEQ ID NO: 31863 - DNA, 3110 bp, Homo Sapiens
cgcgagcgcggcgatggggagcggcggcgtggtccactgtaggtgtgccaagtgtttctgttatcctacaaagcgaagaataaggaggaggccccgaaacctgaccatcttgagtctccccgaagatgtgctctttcacatcctgaaatggctttctgtagaggacatcctggccgtccgagctgtacactcccagctgaaggacctggtggacaaccacgccagtgtgtgggcatgtgccagcttccaggagctgtggccgtctccagggaacctgaagctctttgaaagggctgctgaaaaggggaatttcgaagctgctgtgaagctgggcatagcctacctctacaatgaaggcctgtctgtgtctgatgaggcccgcgcagaagtgaatggcctgaaggcctctcgcttcttcagtctcgctgagcggctgaatgtgggtgccgcacctttcatctggctcttcatccgccctccgtggtcggtgagcggaagctgctgcaaggccgtggttcacgagagcctcagggcagagtgccagctgcagaggactcacaaagcatccatattgcactgcttgggcagagtgctgagtctgttcgaggatgaggagaagcagcagcaggcccatgacctgtttgaggaggctgctcatcagggatgtctgaccagctcctacctcctctgggaaagcgacaggaggacagatgtgtcagatcctgggcgatgcctccacagcttccgaaaactcagggactacgctgccaaaggctgctgggaagcgcagctgtctttagccaaagcctgtgcaaatgcaaaccagcttggactggaggtgagagcttccagtgagatcgtctgccagctatttcaggcttcccaggctgtcagtaaacaacaagtcttctccgtgcagaagggactcaatgacacaatgaggtacattctgatcgactggctggtggaagttgccaccatgaaggacttcacaagcctgtgcctgcacctgaccgtggagtgtgtggaccggtacctgcggaggaggctggtgccgcggtacaggctccagctgctgggcatcgcctgcatggtcatctgcacccggtttatcagtaaagagatcctgaccatccgggaggccgtatggctcacggacaacacttacaagtacgaggacctggtgagaatgatgggcgagatcgtctccgccttggaagggaagattcgagtccccactgtggtggattacaaggaggtcctgctgacgctagtccctgtggagctgagaacccagcacctgtgcagcttcctctgcgagctctccctgctgcacaccagcctgtccgcctacgccccagcccgcctggctgccgcagccctgctcctggccagactgacgcacgggcagacacagccctggaccactcagctgtgggacctcaccggattctcctatgaagacctcattccctgcgtcttgagcctccataagaagtgcttccatgatgacgcccccaaggactacaggcaagtctctctgaccgccgtgaagcagcggtttgaggacaagcgctatggagaaatcagccaggaagaggtgctgagctacagccagttgtgtgctgcattaggagtgacacaagacagccccgaccccccgactttcctcagcacaggggagatccacgccttcctcagctctccctcggggcggagaaccaaacggaagcgggagaacagcctccaggaagacagaggcagcttcgttaccacccccactgcggagctgtccagccaggaggagacgctgctgggcagcttcctcgactggagcctggactgctgctctggctatgaaggcgaccaggagagtgagggcgagaaggagggcgacgtgacagctcccagcggcatcctcgatgtcaccgtggtctacctgaacccagaacagcattgctgccaggaatccagtgatgaggaggcttgtccagaggacaagggaccccaggacccacaggcactggcgctggacacccagatccctgcaacccctggacccaaacccctggtccgcaccagccgggagccagggaaggacgtcacgacctcagggtactcctccgtcagcaccgcaagttccacaagctccgtggacggtggcttgggggccctgccccaacctacctcagtgctgtccctggacagtgactcgcacacacagccctgccaccatcaggccaggaagtcatgtttacagtgtcgtcccccaagtcccccggagagcagtgttccccagcaacaggtgaagcggataaacctatgcatacacagtgaggaggaggacatgaacctgggccttgtgaggctgtaagtgtgtcagcacatttgccgcagtggatgtgtactgagggggctggaggcgaagggtgggagcatagcataggaacgctgcatagaccatggaggcctttgcgcagagagcagagaggatgacttgcggccaccaagtttctgtctccgcgggagtcccgtgcaagccatcagaatgttgaaatgagggtgaagagctcagatccctctctttggaaagtttagcctggaagcagttggccacactgtgtggagggcacctctctgtcccttccgtgtctcactgtctctggaagcttcagcccatgtgtgtcctggtgttcccagccccaccagagccccgtgccgggagctgacagctttcacgcttaaggcacgtgtgacctgggtagtcagacaccacttgagcccctgcccacatctgctggtttggggcttcagtggggagctgacagctgtgagcacaccactgtcccctcatccacctcggcctgcatggggcacccacttccttctgggtggggcttccatggtaagggggcctgcgtccctgcacactgcgaggactgccttggccacaggcccactccctacgacacgtgactcgttttagagctctgtcccagaggcgttcgtatgtgacccacagatggcgtcaatgtgaacacctctctttgtgctgaatttctgggccattcttttcctgtcttatttctaaatttccttcttccaggata

SEQ ID NO: 31864 - DNA, 2171 bp, Homo Sapiens
tcaacacgtgaattcccacagaagctgctcagggactatccatggcctccccgtggccaacttgagtctgctctgcagctttaggcccgacttggaaggcccatgggctgcagatgaggaaactgaggtccagacagccgaagagtggtagtgtccaggacacacaactgggccggcggcggcggctgccccgagggacgcggccctaggcggtggcgatggggaccgcccggatcgcacccggcctggcgctcctgctctgctgccccgtgctcagctccgcgtacgcgctggtggatgcagatgacgtcatgactaaagaggaacagatcttcctgctgcaccgtgctcaggcccagtgcgaaaaacggctcaaggaggtcctgcagaggccagccagcataatggaatcagacaagggatggacatctgcgtccacatcagggaagcccaggaaagataaggcatctgggaagctctaccctgagtctgaggaggacaaggaggcacccactggcagcaggtaccgagggcgcccctgtctgccggaatgggaccacatcctgtgctggccgctgggggcaccaggtgaggtggtggctgtgccctgtccggactacatttatgacttcaatcacaaaggccatgcctaccgacgctgtgaccgcaatggcagctgggagctggtgcctgggcacaacaggacgtgggccaactacagcgagtgtgtcaaatttctcaccaatgagactcgtgaacgggaggtgtttgaccgcctgggcatgatttacaccgtgggctactccgtgtccctggcgtccctcaccgtagctgtgctcatcctggcctactttaggcggctgcactgcacgcgcaactacatccacatgcacctgttcctgtccttcatgctgcgcgccgtgagcatcttcgtcaaggacgctgtgctctactctggcgccacgcttgatgaggctgagcgcctcaccgaggaggagctgcgcgccatcgcccaggcgcccccgccgcctgccaccgccgctgccggctacgcgggctgcagggtggctgtgaccttcttcctttacttcctggccaccaactactactggattctggtggaggggctgtacctgcacagcctcatcttcatggccttcttctcagagaagaagtacctgtggggcttcacagtcttcggctggggtctgcccgctgtcttcgtggctgtgtgggtcagtgtcagagctaccctggccaacaccgggtgctgggacttgagctccgggaacaaaaagtggatcatccaggtgcccatcctggcctccattgtgctcaacttcatcctcttcatcaatatcgtccgggtgctcgccaccaagctgcgggagaccaacgccggccggtgtgacacacggcagcagtaccggaagctgctcaaatccacgctggtgctcatgcccctctttggcgtccactacattgtcttcatggccacaccatacaccgaggtctcagggacgctctggcaagtccagatgcactatgagatgctcttcaactccttccagggattttttgtcgcaatcatatactgtttctgcaacggcgaggtacaagctgagatcaagaaatcttggagccgctggacactggcactggacttcaagcgaaaggcacgcagcgggagcagcagctatagctacggccccatggtgtcccacacaagtgtgaccaatgtcggcccccgtgtgggactcggcctgcccctcagcccccgcctactgcccactgccaccaccaacggccaccctcagctgcctggccatgccaagccagggaccccagccctggagaccctcgagaccacaccacctgccatggctgctcccaaggacgatgggttcctcaacggctcctgctcaggcctggacgaggaggcctctgggcctgagcggccacctgccctgctacaggaagagtgggagacagtcatgtgaccaggcgctgggggctggacctgctgacatagtggatggacagatggaccaaaagatgggtggttgaatgatttcccactcagggcctggggccaagaggaaaaacagggaaaaaaagaaaaaaaaaaagaaaagaaaaaaaggaaaaaaaaaaaaaaaaaaaaaaaaaaa

SEQ ID NO: 31865 - DNA, 2815 bp, Homo Sapiens
gcggccgcccgggagccccagggcagccgccccgccgagtcgcaggcacagcgtcaccttcgtcccctccggagctgcacgtggcctgagcaggatggtgccctccagcccagcggtggagaagcaggtgcccgtggaacctgggcctgaccccgagctccggtcctggcggcacctcgtgtgctacctttgcttctacggcttcatggcgcagatacggccaggggagagcttcatcaccccctacctcctggggcccgacaagaacttcacgcgggagcaggtcacgaacgagatcacgccggtgctgtcgtactcctacctggccgtgctggtgcccgtgttcctgctcaccgactacctgcgctacacgccggtgctgctgctgcaggggctcagcttcgtgtcggtgtggctgctgctgctgctgggccactcggtggcgcacatgcagctcatggagctcttctacagcgtcaccatggccgcgcgcatcgcctattcctcctacatcttctctctcgtgcggcccgcgcgctaccagcgtgtggccggctactcgcgcgctgcggtgctgctgggcgtgttcaccagctccgtgctgggccagctgctggtcactgtgggccgagtctccttctccacgctcaactacatctcgctggccttcctcaccttcagcgtggtcctcgccctcttcctgaagcgccccaagcgcagcctcttcttcaaccgcgacgaccgggggcggtgcgaaacctcggcttcggagctggagcgcatgaatcctggcccaggcgggaagctgggacacgccctgcgggtggcctgtggggactcagtgctggcgcggatgctgcgggagctgggggacagcctgcggcggccgcagctgcgcctgtggtccctctggtgggtcttcaactcggccggctactacctggtggtctactacgtgcacatcctgtggaacgaggtggaccccaccaccaacagtgcgcgggtctacaacggcgcggcagatgctgcctccacgctgctgggcgccatcacgtccttcgccgcgggcttcgtgaagatccgctgggcgcgctggtccaagctgctcatcgcgggcgtcacggccacgcaggcggggctggtcttccttctggcgcacacgcgccacccgagcagcatctggctgtgctatgcggccttcgtgctgttccgcggctcctaccagttcctcgtgcccatcgccacctttcagattgcatcttctctgtctaaagagctctgtgccctggtcttcggggtcaacacgttctttgccaccatcgtcaagaccatcatcactttcattgtctcggacgtgcggggcctgggcctcccggtccgcaagcagttccagttatactccgtgtacttcctgatcctgtccatcatctacttcttgggggccatgctggatggcctgcggcactgccagcggggccaccacccgcggcagcccccggcccagggcctgaggagtgccgcggaggagaaggcagcacaggcactgagcgtgcaggacaagggcctcggaggcctgcagccagcccagagcccgccgctttccccagaagacagcctgggggctgtggggccagcctccctggagcagagacagagcgacccatacctggcccaggccccggccccgcaggcagctgaattcctgagcccagtgacaaccccttccccctgcactctgtcgtccgcccaagcctcaggccctgaggctgcagatgagacttgtccccagctggctgtccatcctcctggtgtcagcaagctgggtttgcagtgtcttccaagcgacggtgttcagaatgtgaaccagtgactctcgggcgcccctgtggtaactttgcaggcggccctcagtgcatccccacgacccctgcctcgagggccgcctgccttagcaatgggggcctccgcttatcctgctagcaggccccctaggattccccctgccctgtgccgcactctggcggtggccacagcgtgctggcgacactcagggcagctgcctggccatgctgtccctgcactgtgccccgcgggctttggttgctggaagaggtgggtggtgggcttctgcgtccaccaggcctcactggctcatgccccttggggggcttgagacaaatcctttctgccccccagggctagtgaagtggcctcttggataccagctcaggggacactggccccacaggagttgtgagccctctagggcagggtgggagccggaccctcaggtgtagctgagctgtgacattgctggtcatccttggtgctcttgcttttttgaaagatgcttttttttttttaactgacgtagaatgaagaactgcatgtggcttctctgtctctgtggaaaagccatctcaggttggcggcagacacattgtcatcagaggggagcagcggctctggtcctcggagctggttcctctctcccaccctaagggcagccctccatggtcctgtctgtccttctgaagtgtgtccatcctgacctgcgggtcctcagctgctcccacactggtgccagcccggaggggactggtcccggtcaccgtggacgtgctggccttggtatgtgccaggcttgcctgggctgggcagccttgggggggctgctttgtggtgggcgctggggaagtacgtcccagcggcctcagggtctaaggagcgctagtgccttgcccacaggtgcgggaccatctgatgtgatgtgaatactcttcccacatacattaaacacacttaagtgagaata

SEQ ID NO: 31866 - DNA, 6672 bp, Homo Sapiens
cctcccaactggtgactggttagtgatgaggctgtgtgcttctgagctgggcatccgaaggcatccttggggaagctgagggcacgaggaggggctgccagactccgggagctgctgcctggctgggattcctacacaatgcgttgcctggctccacgccctgctgggtcctacctgtcagagccccaaggcagctcacagtgtgccaccatggagttggggcccctagaaggtggctacctggagcttcttaacagcgatgctgaccccctgtgcctctaccacttctatgaccagatggacctggctggagaagaagagattgagctctactcagaacccgacacagacaccatcaactgcgaccagttcagcaggctgttgtgtgacatggaaggtgatgaagagaccagggaggcttatgccaatatcgcggaactggaccagtatgtcttccaggactcccagctggagggcctgagcaaggacattttcaagcacataggaccagatgaagtgatcggtgagagtatggagatgccagcagaagttgggcagaaaagtcagaaaagacccttcccagaggagcttccggcagacctgaagcactggaagccagctgagccccccactgtggtgactggcagtctcctagtgggaccagtgagcgactgctccaccctgccctgcctgccactgcctgcgctgttcaaccaggagccagcctccggccagatgcgcctggagaaaaccgaccagattcccatgcctttctccagttcctcgttgagctgcctgaatctccctgagggacccatccagtttgtccccaccatctccactctgccccatgggctctggcaaatctctgaggctggaacaggggtctccagtatattcatctaccatggtgaggtgccccaggccagccaagtaccccctcccagtggattcactgtccacggcctcccaacatctccagaccggccaggctccaccagccccttcgctccatcagccactgacctgcccagcatgcctgaacctgccctgacctcccgagcaaacatgacagagcacaagacgtcccccacccaatgcccggcagctggagaggtctccaacaagcttccaaaatggcctgagccggtggagcagttctaccgctcactgcaggacacgtatggtgccgagcccgcaggcccggatggcatcctagtggaggtggatctggtgcaggccaggctggagaggagcagcagcaagagcctggagcgggaactggccaccccggactgggcagaacggcagctggcccaaggaggcctggctgaggtgctgttggctgccaaggagcaccggcggccgcgtgagacacgagtgattgctgtgctgggcaaagctggtcagggcaagagctattgggctggggcagtgagccgggcctgggcttgtggccggcttccccagtacgactttgtcttctctgtcccctgccattgcttgaaccgtccgggggatgcctatggcctgcaggatctgctcttctccctgggcccacagccactcgtggcggccgatgaggttttcagccacatcttgaagagacctgaccgcgttctgctcatcctagacgccttcgaggagctggaagcgcaagatggcttcctgcacagcacgtgcggaccggcaccggcggagccctgctccctccgggggctgctggccggccttttccagaagaagctgctccgaggttgcaccctcctcctcacagcccggccccggggccgcctggtccagagcctgagcaaggccgacgccctatttgagctgtccggcttctccatggagcaggcccaggcatacgtgatgcgctactttgagagctcagggatgacagagcaccaagacagagccctgacgctcctccgggaccggccacttcttctcagtcacagccacagccctactttgtgccgggcagtgtgccagctctcagaggccctgctggagcttggggaggacgccaagctgccctccacgctcacgggactctatgtcggcctgctgggccgtgcagccctcgacagcccccccggggccctggcagagctggccaagctggcctgggagctgggccgcagacatcaaagtaccctacaggaggaccagttcccatccgcagacgtgaggacctgggcgatggccaaaggcttagtccaacacccaccgcgggccgcagagtccgagctggccttccccagcttcctcctgcaatgcttcctgggggccctgtggctggctctgagtggcgaaatcaaggacaaggagctcccgcagtacctagcattgaccccaaggaagaagaggccctatgacaactggctggagggcgtgccacgctttctggctgggctgatcttccagcctcccgcccgctgcctgggagccctactcgggccatcggcggctgcctcggtggacaggaagcagaaggtgcttgcgaggtacctgaagcggctgcagccggggacactgcgggcgcggcagctgcttgagctgctgcactgcgcccacgaggccgaggaggctggaatttggcagcacgtggtacaggagctccccggccgcctctcttttctgggcacccgcctcacgcctcctgatgcacatgtactgggcaaggccttggaggcggcgggccaagacttctccctggacctccgcagcactggcatttgcccctctggattggggagcctcgtgggactcagctgtgtcacccgtttcagggctgccttgagcgacacggtggcgctgtgggagtccctgcggcagcatggggagaccaagctacttcaggcagcagaggagaagttcaccatcgagcctttcaaagccaagtccctgaaggatgtggaagacctgggaaagcttgtgcagactcagaggacgagaagttcctcggaagacacagctggggagctccctgctgttcgggacctaaagaaactggagtttgcgctgggccctgtctcaggcccccaggctttccccaaactggtgcggatcctcacggccttttcctccctgcagcatctggacctggatgcgctgagtgagaacaagatcggggacgagggtgtctcgcagctctcagccaccttcccccagctgaagtccttggaaaccctcaatctgtcccagaacaacatcactgacctgggtgcctacaaactcgccgaggccctgccttcgctcgctgcatccctgctcaggctaagcttgtacaataactgcatctgcgacgtgggagccgagagcttggctcgtgtgcttccggacatggtgtccctccgggtgatggacgtccagtacaacaagttcacggctgccggggcccagcagctcgctgccagccttcggaggtgtcctcatgtggagacgctggcgatgtggacgcccaccatcccattcagtgtccaggaacacctgcaacaacaggattcacggatcagcctgagatgatcccagctgtgctctggacaggcatgttctctgaggacactaaccacgctggaccttgaactgggtacttgtggacacagctcttctccaggctgtatcccatgagcctcagcatcctggcacccggcccctgctggttcagggttggcccctgcccggctgcggaatgaaccacatcttgctctgctgacagacacaggcccggctccaggctcctttagcgcccagttgggtggatgcctggtggcagctgcggtccacccaggagccccgaggccttctctgaaggacattgcggacagccacggccaggccagagggagtgacagaggcagccccattctgcctgcccaggcccctgccaccctggggagaaagtacttctttttttttatttttagacagggtctcactgttgcccaggctggcgtgcagtggtgcgatctgggttcactgcaacctccgcctcttgggttcaagcgattcttctgcttcagcctcccgagtagctgggactacaggcacccaccatcatgtctggctaatttttcatttttggtagagacagggttttgccgtgttggccgggctggtctcgaactcttgacctcgggtgatccacccacctcagcctcccaaagtgctgggattacaagcgtgagccactgcaccgggccacagagaaagtacttctccaccctgctctccgaccagacaccttgacagggcacaccgggcactcagaagacactgatgggcaacccccagcctgctaattccccagattgcaacaggctgggcttcagtggcagctgcttttgtctatgggactcaatgcactgacattgttggccaaagccaaagctaggcctggccagatgcaccagcccttagcagggaaacagctaatgggacactaatggggcggtgagaggggaacagactggaagcacagcttcatttcctgtgtcttttttcactacattataaatgtctctttaatgtcacaggcaggtcccagggtttgagttcataccctgttaccattttggggtacccactgctctggttatctaatatgtaacaagccaccccaaatcatagtggcttaaaacaacactcacatttattctgctcacatatctgtcatttgagcagggctcagcggggacagctccttctgtcctactctgtgtcaggtggggcagcttgagggttgggctggtgtcacctgaagactcattcttctgtacgtctgacaggcaatgctggctgttggctgggggcctcagtgcactacggaatagttggctaggacccctccatgtgggctagttgggcttcctcataagtatggtggctgggttggagggtgtcccaaaaagaaaggaggggatagagagagaccacttttcataacctagccttagaagtcacacagtattacttctgctacatatatatgttttaagaggcagggtctcactctgtgcccccagtctggaatccagtggtatgatcacggctcactgcagcctcaacctcctgggctaagtgatcctcccacctcagcctcccgaatagctgggactacaggtgtgagtcaccaaagcccagttaatctttagttttcatttttgtagagccagggtctcactatgttgcccaggcaggtcttgaactcctggcctcaagtgattctcctgcctcagcctcccaaagtgctgggattacaggtgtgaaccaccacacccagcccacttctgccatattctgttggccagtgtgacaaggattgctactgtcctacccaccctcctttccaccacatgtgcacatgcacgtgtgtgcacgtacacacacatacacacacacgcgtgcacacaccagagcccaccttggctcaagtcctcttttctgagaggacttttctttgtggcttcctaaaattcagtggaaaattaattgtttggggatgagaaaggttgaagcaccaaaagcttaccaaggggaatgtttgcctctgcctctgacacacagctctgtcctgggagtgagctggtttttagcggagacggagtcccaccttggctgcagggagtcgaaaggacttggaagctccgctttctacccagcgagcccctggtggcagtgggagctgcctgttcagctccagctcaccagccccagtgcccacaggatcagtctgattcccaagctctgctcctctccccagcaagtgagagctgggtgtcaagagggtctgaggaatccagacccggctgcgtggttgatgatctttgcagacaggcaagcacctcctgcctcgaactggctgcaaagggtatcaggtgctgccatccaggttcagcttgtaaatagctcaggtgtaccctgcacttgcagactctacagaggccatgggctcctgtgtgtgcggctacaggagtgagcactgaggtgtgctctgatcatccactgtgccatgtgccaggtttttggtctgacccactgcttttggtctgtgtgatgatgaaatgaggtcagagcctcgagttattaacactaacgatttgttaatgatagctactgtttattattttatttaatttttttgagacagagttttcactcttatgcccacgctggagtgcagtgagccgagatcacgccactgcactatagcctaggtgacagagtgagactctgtctcaaaaaaacacaaaagtttctctttttcaaaacattttactttaaaaggagccaatttaaagaaaactgttaatagttcaggtaacaggcagatacaggaaaagctgctgacagtgttgtatgaggtttgaggattttgatccaagctggtccactcagtccatagcagagaatgaaagggcccagagagggtggtgacctctgcctgaagtcacacagtgagtcgaggacagggaggtgaccccaggtttctatgtgtagggcgggaggatgttctgggacacagttcaattctcatttgtcacacactttggctattagagatcaaccccttcgctcctgtgtcttgcaatggcagccttggcaaacgctaaatgaaaatcgtgacaacacttgtgttatgaagcatttactttgtgttcaccttgt

SEQ ID NO: 31867 - DNA, 2320 bp, Homo Sapiens
gaattccggtgcagtgagaggcatgcttccttagaccaggcaacatttcatttgttgcatttccagtttccaataccaactcacctacaaagattttaccaaaaaccttaggaccaataaatgtgaatgttggaccccaaatgattataagcacaccacagagactaaccagttcaggaagtgttctgattgggagtccatatacccctgcaccagcaatggttactcagacacacatagcagaagctactggctgggtccctggtgatagaaaacgggctagaaaatttatagactctgatttttcagaaagtaaacgaagcaaaaaaggagataaaaatgggaaaggcttgagacacttttcaatgaaagtgtgtgagaaagttcaacgaaaaggtacaacatcgtacaatgaagtcgctgatgagctggtgtcagagttcaccaattcaaataaccatttggctgctgattcgcaggcttatgatcagaagaacattaggcgaagagtttatgatgctttaaatgtgctaatggcaatgaacataatttcaaaggaaaaaaaagaaatcaagtggattggcctgcctaccaattctgctcaggaatgtcagaatctggagatagagaagcagaggcggatagaacggataaagcagaagcgggcccagctgcaagaacttctcctacagcaaatcgctttcaaaaacctggtacagagaaatcgacaaaatgagcagcaaaaccagggcccgccggctctgaactctaccattcagctgccattcataatcatcaatacaagcagaaaaacagtcatagattgcagcatctccagtgacaagtttgagtatcttttcaattttgacaacacctttgagatccatgatgacatagaagtactaaagcggatgggaatgtcgtttggcctggagtcaggcaaatgctctctggaggatctgaaacttgcgaaatccctggtgccaaaggctttagaaggttatatcacagatatctccacaggaccttcttggttaaatcagggactacttctgaactctacccaatcagtttcaaatttagacctgaccactggtgccaccttaccccagtcaagtgtaaaccaagggttatgcttggatgcagaagtggccttagcaactgggcagttcctggccccaaacagtcaccagtccagcagtgcggcctctcactgctccgagtcccgaggcgagaccccctgttcgttcaatgatgaagatgaggaagatgatgaggaggattcctcctccccagaataaagacaagagaaagcctacgtttcaatatgtgatgctcatgtgtgtttgtagtgtgagctcttgtttttgaaatgattgcttcagtctttgcctttgtttgcactgtgtgttcagtgaaaactagagaaacacaataagcaaatcacatgaaggctgagatgattgagatgaaagttaacatagtgtgaatgaaagtctggccaacagagcagtagatgatataacacagaaagcatgctttctgaggagatagtggggataatccctgaagagttggcagtgtgagtccaactcatttatcttctgtgaggtgggatttttgtgttccctcaccacccatgtaatattcttagaattgagattgctacacggagcagtccttgacgatcgtgtttctgacgtttctcttccttgcctggactgcctttgacaaggcagaaatgaacatgaaaagtccccaggagaggggagctgtgtagtgagggatactgagggcagtcctgtggctgaggggcacagattgaactgctgaactagttggaggtctagatgaggtgctttacgcatcagctgccttagacagcttctagaaaggagcgagcgctacttcttaagtacttaagtgacatttagataatttatagtaaaactgaaattattattagccaatgcattggtgcatagaatttactagggctacttctggaagcccccaatagaatagcatttccatgtgcattaaatactttgccagcactgcctttgccagcatcctaaatctggagttttaccaagaaggaaactgtatctttaggttaatccaagctatgcatttcatatagctttttcatttaaaacaaggcaaagaaacaaattcctatgaccaaattgcttgcctacagttccctgcagtaattgtatgatctcacccagtgtgcaatttgtggaaatgaaccaaatgtcattacttttgtcttaaagaaaagtctatttcaagaatatggacagcagtggaaaaa

SEQ ID NO: 31868 - DNA, 3542 bp, Homo Sapiens
  misc_feature (11)..(11): n is a, c, g, or t
gaattctgggnttaggcgattctgggttagcaggcttgggcccaagtgctcgagtgctggggttgagttggatgacccggcgaagggtaagcattcctgcagggacccgaggccctggwgggactgatggtcatctgcggttaagccggcaggaggcgtctggggcagggacccaggggtccgaacagcaggaggtgtccaatttaggaatccaggtatccaggcaggaggcagagtcaggcccaaaatccaggtgtccgggcagaaggaggcatctgactcagggatccagtcttccagcaggggggtctgcccagagacctagagattcaggcggaaagaagggtccagccaggaacagaagtctgggagggtggggggtggggggctgagttcccaggtgttaccgcgggagtgcggggtgatggctggcgggagcttcacgcgcattccctgggggcggagtctaaggctggcagtactgaaaatcgtgaggggtctgggagcctcaggcacgagctagcatcatcatctctgatgggagggagcggagctgctcagtctccctgatggggtagatgtttccctaccccaatcttgagccttcgggggcatcccctggatcctatggccctcttccacttatagtaccccttcttctgtctctcctctggtcacacacgtgggaaaaagagacctgcaggacctaggacagggatccccaggaagagacccctgtttagaggcctgggggcattggaggggacagcggtatcctgggaagagccccagggcatgaatgtggggataaggcattgggactctatcaggtatcctgaggagagactcccaccacgtatcctgagaagcacctcaccccctccagaccccaactcccatcacccagcttggtcagcttctcacaaggcctttctcctgcaggtaccatgatgtggggtgcaggcagccctctggcctggctctcagctggctcaggcaacgtgaatgtaagcagcgtgggcccagcagaggggcccacaggtccagccgcaccactgccctcgcctaaggcctgggatgtggtgctctgcatctcaggcaccctggtgtcctgcgagaatgcgctagtggtggccatcatcgtgggcactcctgccttccgtgcccccatgttcctgctggtgggcagcctggccgtggcagacctgctggcaggcctgggcctggtcctgcactttgctgctgtcttctgcatcggctcagcggagatgagcctggtgctggttggcgtgctggcaatggcctttaccgccagcatcggcagtctactggccatcactgtcgaccgctacctttctctgtacaatgccctcacctactattcagagacaacagtgacacggacctatgtgatgctggccttagtgtggggaggtgccctgggcctggggctgctgcctgtgctggcctggaactgcctggatggcctgaccacatgtggcgtggtttatccactctccaagaaccatctggtagttctggccattgccttcttcatggtgtttggcatcatgctgcagctctacgcccaaatctgccgcatcgtctgccgccatgcccagcagattgcccttcagcggcacctgctgcctgcctcccactatgtggccacccgcaagggcattgccacactggccgtggtgcttggagcctttgccgcctgctggttgcccttcactgtctactgcctgctgggtgatgcccactctccacctctctacacctatcttaccttgctccctgccacctacaactccatgatcaaccctatcatctacgccttccgcaaccaggatgtgcagaaagtgctgtgggctgtctgctgctgctgttcctcttccaagatccccttccgatcccgctcccccagtgatgtctagctgagtcttcatgacccttcaaccctgattactacagaattccagaatgttaggctctccagggcttctttccaaacccccagctccacaccccccagacccagctggttctggagttctaggacattgggtgtttcaaggttctgttcagatccctatgggggcccagctggctccacggttccagaatgttcaggtggtcagtgttctactcagaaatgtctcacagcccagctgggttgcaattccagaatgctgggagttttacagtgccattccaagtcccagatgtccctcttcccccaaacttgaccttgaccatgtcactttacgtttgaatttctgagctaaagagtcagagagattagtcacatagttgcctaaataggagagagaaagattatatatgcacatatacaaagacagtgtctatttatgattgatttatttatttataaatttacttatgggtggtaaggggcaaaaaagaggcccacaccttgatatccaggccataccagggtatcccttgtcccttcacccccatttctracctcagttcctggaggggggaaagggtgaaagagaaaccacgtattttgttattattttggattattttttatcgaagagatcatagaaaccagagccttctccccaggcctgccctcctcgggtttggaaggggaacacaccagcctctggttttttatttttttaagaagccatcacctgagcaaccaaaaattcctctgcgctggggtccgactgccctctggtggccatttggggaaaactgcagcccggccaggcagctgggaccagaatgcaaccccagctccactccagcctggcgtccagggccacagccatggcctgggggccaagcctcaccctgcggtgccctaaaggagggggggcacgagccaacaccccacccctctgccaaccggggtatggcccccagtgcattccctgttcccgtctccaacccaactcaataaaaaatgattttgtcataaatatgtttccctatgtgtgtgtggagggtatggagtggggcctgatgggggatggcctggaatgagagggtcaagccaggcctggrgggcctgttgggggatctggggagctggacagagggtggagggtggctggcaggtgactccttctcagatgtcagtgcccctctgctcagacctgggcactgactggcaaggaccttacctcctcctggtgacaggaacctgggtgcttggctcttcctgggtcaaggatgctcacatcctgcccacaccggccactgtggggcttagacatgatgaatatgctcaaagcatgtcagtttccttaataataataggtcctactttttttttttttttttttttttgagacagagtctcgctctgtcccccaggctggagtgcagtggcgtgatctcggctcactgcaagctccacctcccgggttcacgccattctcctgcctcagcctcccgagtagctgggacyacaggcgcccaccatcacgcccggctaattttttttgtayttttagtagagacggggtttcactgtgtaagccaggatggtctcgatc

SEQ ID NO: 31869 - DNA, 1486 bp, Homo Sapiens
ctcaaaatcgggcgttgggctttgccgggtgcttcagatcaatggatgagttccacccgttcatcgaggcactgctgcctcacgtccgcgctttctcctacacctggttcaacctgcaggcgcggaagcgcaagtacttcaagaagcatgaaaagcggatgtcgaaggacgaggagcgggcggtgaaggacgagctgctgggcgagaagcccgagatcaagcagaagtgggcatcccggctgctggccaagctgcgcaaggacatccggcccgagttccgcgaggacttcgtgctgaccatcacgggcaagaagcccccctgctgcgtgctctccaaccccgaccagaagggcaagatccggcggattgactgcctgcgccaggctgacaaggtgtggcggctggacctggtcatggtgattttgtttaaggggatccccctggaaagtactgatggggagcggctctacaagtcgcctcagtgctcgaaccccggcctgtgcgtccagccacatcacattggagtcacaatcaaagaactggatctttatctggcttactttgtccacactccggaatccggacaatcagatagttcaaaccagcaaggagatgcggacatcaaaccactgcccaacgggcacttaagtttccaggactgttttgtgacttccggggtctggaatgtgacggagctggtgagagtatcacagactcctgttgcaacagcatcagggcccaacttctccctggcggacctggagagtcccagctactacaacatcaaccaggtgaccctggggcggcggtccatcacctcccctccttccaccagcaccaccaagcgccccaagtccatcgatgacagtgagatggagagccctgttgatgacgtgttctatcccgggacaggccgttccccagcagctggcagcagccagtccagcgggtggcccaacgatgtggatgcaggcccggcttctctaaagaagtcaggaaagctggacttctgcagtgccctctcctctcagggcagctccccgcgcatggctttcacccaccacccgctgcctgtgcttgctggagtcagaccagggagcccccgggccacagcatcagccctgcacttcccctccacgtccatcatccagcagtcgagcccgtatttcacgcacccgaccatccgctaccaccaccaccacgggcaggactcactgaaggagtttgtgcagtttgtgtgctcggatggctcgggccaggccaccggacagcattcgcaacgacaggcgcctcctctgccaaccggtttgtcagcatcggaccccgggacggcaactttctgaacatcccacagcagtctcagtcctggttcctctgataagatcgacaaaagaaacaacaaaatgagaagaagaggttcctcgaaaggggggagaagaattttgagaatggaaaaatcccccagcccagcccagccccaccgaaa

SEQ ID NO: 31870 - DNA, 3901 bp, Homo Sapiens
gaaggaaggagcgtgaccagcctgtggactgcgcccctggctgggaggaaggactgggggcccagatcctccactcccagtgccccacaagggcgtcgcttcctaagtctctgtgaatttgttggtcagtggacgattctcgtgtctcctcctgtgtggggccttggggtagccagggcaggccgggcctccgtggccaaggtctcggaggccaggatgcctgccctggcatgcctccggaggctgtgtcggcacgtgtccccgcaggctgtccttttcctgctgttcatcttctgcctgttcagcgttttcatctcggcctactacctatatggctggaagcgaggcctggagccctcggcggatgcccccgagcctgactgcggggacccgccgcctgtggcccccagtcgcctgctgccactcaagcctgtgcaggcagccaccccttcccgcacagacccgttggtgctggtctttgtggagagcctctactcgcaactgggccaggaggtggtggccatcctggagtccagccgcttcaaataccgcacagagattgcgccgggcaagggtgacatgcccacgctcactgacaagggccgtggccgcttcgccctcatcatctatgagaacatcctcaagtatgtcaacctggacgcctggaaccgggagctgctggacaagtactgtgtggcctacggcgtgggcatcattggcttcttcaaggccaatgagaacagcctgctgagtgcgcagctcaagggcttccccctgttcctgcactcaaacctgggcctgaaggactgcagcatcaaccccaagtccccgctgctctacgtgacgcgacctagcgaggtggagaaaggtgtgctccccggcgaggactggacggttttccagtcaaatcactccacctatgagccagtgctgctggccaagacgcgctcgtctgagtccatcccacacctgggcgcagacgccggcctgcatgctgcactgcacgccactgtggtccaggacctgggcctgcacgacggcatccagcgcgtgctgtttggcaacaacctgaacttctggctgcacaagcttgtcttcgtggatgccgtggccttcctcacggggaagcgcctctccctgccattggaccgctacatcctggtggacattgatgacatcttcgtgggcaaggagggcacacgcatgaaggtggaggacgtgaaggccctgtttgacacacagaacgaactacgcgcacacatcccaaacttcaccttcaacctgggctactcagggaaattcttccacacaggtaccaatgctgaggacgctggggatgatctgctgctgtcgtatgtgaaggagttctggtggttcccccacatgtggagccacatgcagccccaccttttccacaaccagtccgtgttggccgagcagatggccttgaacaagaagttcgctgtcgagcatggcattcccacagacatggggtatgcagtggcgccccaccactcgggcgtgtaccccgtgcacgtgcagctgtacgaggcttggaagcaggtgtggagcatccgcgtgaccagcacggaggagtacccccacctgaagccagcccgctaccgccgtggcttcatccacaatggcatcatggttctcccacggcagacctgcggcctcttcacacacaccatcttctacaacgagtaccctggcggctccagtgagctggacaaaatcatcaacgggggcgagctcttcctcaccgtgctcctcaatcctatcagcatcttcatgacgcacctgtccaactatgggaatgaccgcctgggcctgtacaccttcaagcacctggtgcgcttcctgcactcctggacgaacctccggctgcagacactgccccctgtgcagttggcgcagaagtacttccagatcttctccgaggagaaggacccgctctggcaggacccctgcgaggacaaacgtcacaaagacatctggtccaaggagaagacgtgtgaccgcttcccaaagctcctcatcatcggcccccagaaaacaggcaccactgccctctacctgttcctgggcatgcaccctgacctaagcagcaactaccccagctctgagacctttgaggagatccagttttttaatggccacaactatcacaaaggcatcgactggtacatggagttcttccccatcccttccaacaccacctccgacttctactttgagaaaagcgccaactactttgattcagaagtggcgccccggcgggcagcagccctcttgcccaaagccaaggtcctgaccatcctcatcaaccccgcggaccgggcctattcctggtaccagcaccagcgagcccatgacgacccagtggccctaaagtacaccttccatgaggtgattaccgccggctctgacgcatcctcgaagctgcgtgccctccagaaccgctgcctggtccctggctggtacgccacccacatcgagcgctggctcagtgcctatcacgccaaccagattctggtcttggatggcaaactgcttcgcacagaacctgccaaagtgatggacatggtgcagaagttccttggggtgaccaacaccattgactaccacaaaaccttggcgtttgatccaaagaaaggattttggtgccaactgcttgaaggaggaaaaaccaagtgtctgggcaaaagcaagggccggaaatatcccgagatggacttggattcccgagccttcctgaaggactattaccgggaccacaacatcgagctctccaagctgctgtataagatgggccagacacttcccacttggctacgagaggacctccagaacaccaggtagccgtggccaccacagccagactgaacgtttgtgaaagctgggacatcccaccacacgctgagccagacctgcagagtgggaagctggaccagggcagctgcgcacttatgagcaatactctgtggaggtctggtggggctgggggagcacccaggcggatctgcaagcacctcggagcacccaccgctgggtctgcggcctaagggacctccctcgccagcagaggtccattccgttcccagctgctcctggggaggccgcttcctggtaggagggagtccacgagactcttttctgtccctcactgtgttccgccgactgtcccctctcgtcacccatcactccctgcttccgcagggcgcccctcagtattcgctgccatatgtccctgtcctccaggctgtaggggaggagagcctggccgggggagacagactggacatttccctgtttcgagccaggctcttccaaggggccagctgggtccccggagtcagtcctaggctggatgggagggtggccccctcaagaggactcccagcctccacatctggttcctaccttcacatctcaccctcccgttctggggaagaatttctggttcctacagtatccactccatcctcaaggcttcccgcagggccttggggcactgccttgccatcgggcccagttctccgggccccacctgcacccctttcttccccctgggatatgatgtgtggtgtttcctgtggtaaaagactgaggcaggccaggggtctgccagtaacatgttcccatgtacagacacggtccccacaccctcccagcctcaggcccaggcagacatgggcgagctggtgagactgccagccacggctttgcttagccacctgtggccgagggctctcagagacccccttaacctcccaaatactaagaagctaaaatattttaatattttgtttttttttttcttggtgccagagtttataccctgggtgctggggtcgcactgtgttatatatatatatatatatatatataatgtgta

SEQ ID NO: 31871 - DNA, 1026 bp, Homo Sapiens
cggtgccgcagacacaccaataaaacccaatcctgtaaacactgggcccacattagaatgggataactatgatttaagggaagatgctttggatgatagtgtcagtagtagctcagtacatgcttctccattggcaagtagccctgtgagaaaaaatcttttccgttttggtgagtcaacaacaggatttaacttcagttttaaatctgctttgagtccatctaagtctcctgccaagttgaatcagagtgggacttcagttggcactgatgaagaatctgatgttactcaagaagaagagagagatggacagtactttgaacctgttgttcctttacctgatctagttgaagtatccagtggtgaggaaaatgaacaagttgtttttagtcacagggcaaaactctacagatatgataaagatgttggtcaatggaaagaaaggggcattggtgatataaagattttacagaattatgataataagcaagttcgtatagtgatgagaagggaccaagtattaaaactttgtgccaatcacagaataactccagacatgactttgcaaaatatgaaagggacagaaagagtatggttgtggactgcatgtgattttgcagatggagaaagaaaagtagagcatttagctgttcgttttaaactacaggatgttgcagactcgtttaagaaaatttgtgatgaagcaaaaacagcccaggaaaaagattctttgataacacctcatgtttctcggtcaagcactcccagagagtcaccatgtggcaaaattgctgtagctgtattagaagaacccacaagagagaggacagatgttattcagggtgatgatgtagcagatgcaacttcagaagttgaagtgtctagcacatctgaaacaacaccaaaagcagtggtttctcctccaaagtttgtatttggctcagagtctgttaaaagcatttttagtagtgaaaaatcaaacccatttgcattcggcaacagttcagccactgggtctttgtgtgg

SEQ ID NO: 31872 - DNA, 5107 bp, Homo Sapiens
gcggcgcaaccggctccggagctgcctggcgcggccgggcgggcggcgccgctcaggctcgggctccggctgggcccggcgcggcctcggggctgcccatggggcgcggggggccgggccggtgacgccggacgcccatggacgcctctgaggagccgctgccgccggtgatctacaccatggagaacaagcccatcgtcacctgtgctggagatcagaatttatttacctctgtttatccaacgctctctcagcagcttccaagagaaccaatggaatggagaaggtcctatggccgggctccgaagatgattcacctagagtctaactttgttcaattcaaagaggagctgctgcccaaagaaggaaacaaagctctgctcacgtttcccttcctccatatttactggacagagtgctgtgataccgaagtgtataaagctacagtaaaagatgacctcaccaagtggcagaatgttctgaaggctcatagctctgtggactggttaatagtgatagttgaaaatgatgccaagaaaaaaaacaaaaccaacatccttccccgaacctctattgtggacaaaataagaaatgatttttgtaataaacagagtgacaggtgtgttgtgctctccgaccccttgaaggactcttctcgaactcaggaatcctggaatgccttcctgaccaaactcaggacattgcttcttatgtcttttaccaaaaacctaggcaagtttgaggatgacatgagaaccttgagggagaagaggactgagccaggctggagcttttgtgaatatttcatggttcaggaggagcttgcctttgttttcgagatgctgcagcagttcgaggacgccctggtgcagtacgacgaactggacgccctcttctctcagtatgtggtcaacttcggggccggggatggtgccaactggctgacttttttctgccagccagtgaagagctggaacggattgatcctccgaaaacccatagatatggagaagcgggaatcgatccagaggcgagaagccaccctgttagatctgcgcagttacctgttctctcgccagtgcaccttgctgctcttcctgcagaggccgtgggaggtggcccagcgcgccctagagctgctgcacaactgcgtgcaggaactgaagctcttagaagtctctgtcccacctggtgctctggactgctgggtgtttctgagctgtctggaggtgttgcagaggatagaaggctgctgtgaccgggcacagatcgactcaaacattgcccacactgtggggctatggagctatgccacagaaaagttaaagtccttgggctatctatgtggacttgtgtcagagaaaggacctaactcagaagatctcaacaggacagttgaccttttggcaggtttgggagctgagcgaccagaaacagccaacacagctcagagtccttataagaaactgaaagaagcattatcgtcagtggaagcttttgaaaaacactacttagatttgtcccatgccaccattgaaatgtatacaagcattgggaggattcgatctgctaagtttgttggaaaagatctggcagagttttacatgaggaaaaaggctccacaaaaggcagaaatctatcttcaaggagcactgaaaaactacctggctgagggctgggcactccccatcacacacacaaggaagcagctggccgaatgtcaaaagcaccttggacaaattgaaaactacctgcagaccagcagcctcttagccagtgaccaccacctcactgaagaggagcgcaagcacttctgccaggagatacttgactttgccagccagccgtcagacagcccaggtcataagatagtgctacccatgcattcctttgcacaactgcgagatctccattttgatccctccaatgccgtggtccacgtgggcggcgttttgtgcgttgagataaccatgtacagccagatgcctgtgcctgttcacgtggagcagattgtggtcaatgtccacttcagcattgagaaaaacagctaccggaagactgcggagtggcttaccaagcacaagacgtccaatgggatcattaactttccacccgagaccgcacctttccctgtatcccaaaacagtttgcccgcgctggagttgtatgaaatgtttgagagaagcccatctgataactccttgaacacgactgggattatctgcagaaacgtccacatgctcctgagaaggcaggagagcagctcctctctagagatgccctcaggggtggctctggaggagggtgcccacgtgctgaggtgcagccacgtgaccctggaaccaggggccaaccagataacattcaggactcaggccaaggaacctggaacgtatacactcaggcagctgtgcgcctcggtgggctccgtgtggttcgtcctccctcacatctaccccattgtgcagtacgacgtgtactcacaggagccccagctgcacgtggagccgctggctgatagccttctggcaggcattcctcagagagtcaagttcactgtcactaccggccatgatacgataaagaatggagacagcctgcagcttagcaatgccgaagccatgctcatcctgtgccaggcggagagcagggctgtggtctactccaacacgagagaacagtcttctgaggccgcgctccggattcagtcctccgacaaggtcacgagcatcagtctgcctgttgcgcctgcgtaccacgtgatcgaatttgaactggaagttctctctttaccttcagccccagcactcggaggggagagtgacatgctggggatggcagagccccacaggaagcataaggacaaacagagaactggccgctgcatggttaccacagaccacaaagtgtcgattgactgcccgtggtccatctactccacagtcatcgcactgaccttcagcgtacccttcaggaccacacacagcctcctgtcctcaggaacacggaaatatgttcaagtttgtgtccagaatttgtcagaacttgactttcagctgtcagatagttatcttgtagataccggtgatagtaccgacctgcaactagtaccactgaacacgcagtcccagcagcccatctacagcaagcagtcggtgttcttcgtctgggaactcaagtggacagaagagcctcccccttctctgcattgccggttctctgttggattttccccagcttctgaggaacagctgtctatctccttaaagccgtatacttatgaatttaaagtggaaaatttttttacattatacaacgtgaaggctgagatctttcccccttcgggaatggagtattgcagaacaggctccctctgctccctggaggttttgatcacgaggctctcagacctcttggaggtggataaagatgaagcactgactgaatctgatgagcatttttcgacaaagcttatgtatgaagttgtcgacaacagtagcaactgggcagtgtgtgggaaaagctgcggtgtcatctccatgccagtggctgctcgggccactcacagggtccacatggaagtgatgccgctcttcgccgggtatctccccctgcccgacgtcaggctgttcaagtacctcccccatcattctgcacactcctcccaactggacgctgacagctggatagaaaacgcagcctgtcagtagacaagcacggggacgaccagccggacagcagcagcctcaagagcaggggcagcgtgcattcggcctgcagcagcgagcacaaaggcctacccatgccccggctgcaggcactgccggccggccaggtcttcaactccagctcgggcacacaagtcctggtcatccccagccaagatgaccacgtcctggaagtcagtgtaacatgacaacgccagggtgaacacacgccacttcccagctaggagtgcactttatgggactgtgactggactcttccgttctggctccagccagaccttcagtggtcctgcctggccgtggggacatcagagagtgtcatcacgcagctggccagctgagttctgttgttgttttcatgccgcctgtgatctcagattcctgcttttctcaccccgtccccatgctggtgtccgacgccgcttactcagagccctggcctccctccccctacctcacacgctgctcatgaaagtttccacccacgctgtctccacggaacagcctccgtctgctggctcttcgtggaaggccatttgtctttcaggtagacactcagcagccctcacggtcttagtgacgtgtgtgcctttctggtcacacagctgcccagtttcctgatcggggtggatttgtgtcccctaaggggtaaaacagccgtttaccgcagatcctctcatacacccttctaggggaggcgggtgggggagggagggatcataaccccttctgtgccttgggatgccggagctgggggacctggaggcccatcagccggagccacgtgaaaggtactgaagaaagctgagacccggctgtgaggagcgcctcagcggtgaggtggtttagggataaatgtttctggaaccctgtggtcccccataatgttgatagatatcatatgcactgggagttaaatatatttaatttaatgatcattatatatgtgggggttaatatgttgtttttctgtccctttaaagtctttacatgtaattgtagctgtataatcgttatttttcttttgcatcttaagtcttagaaattaagatattccatcgtgaggatgagagaggtcctcagtgtgtttttggtctggttgtagggaaggactcaagtcctggaatgtcctccactggtctactgagttgcagtcacactgttccaatggattatttgctttcggttgtaaatttaattgtacatatggttgatttattatttttaaaaatacagactaactgatgtaatgtttatgtataagttgcaccaaaaatcaaggacaaaaataagtgtgtttgtttttacaggtgtgaaagtcacagcttgtaaataagtgttgtatgtattaaaccttttccagttctccaaagcgatgt

SEQ ID NO: 31873 - DNA, 2244 bp, Homo Sapiens
gcacgggacaggccgggccacacccaccggggcgagctcggagggcggcgctctgggcggagggcccggcggctcggcccagggcgcgttacctcgtcgccggggccggagagggcgggcggaggcacggggcctggaggcgccaggcggaggatgcgggcgacacggtggcggcggcgaccgcgcgaccgggcgggcgggcgggcaggggcgagcggagggagggagcggactgcggcaggatctgtcgaggaaaaatcttgcggccggcgattccccgccttttaagcgcagcctgcactccccccaccccacgcaggggcgggccttccccaacgcgggcgcccactggccgccgcgcgccgctcccctccagctcgcctgcgcctctcactctccgtcagccgcattgcccgctcggcgtccggcccccgacccgcgctcgtccgcccgcccgcccgcccgcccgcgccatgaacgccaaggtcgtggtcgtgctggtcctcgtgctgaccgcgctctgcctcagcgacgggaagcccgtcagcctgagctacagatgcccatgccgattcttcgaaagccatgttgccagagccaacgtcaagcatctcaaaattctcaacactccaaactgtgcccttcagattgtagcccggctgaagaacaacaacagacaagtgtgcattgacccgaagctaaagtggattcaggagtacctggagaaagctttaaacaagtaagcacaacagccaaaaaggactttccgctagacccactcgaggaaaactaaaaccttgtgagagatgaaagggcaaagacgtgggggagggggccttaaccatgaggaccaggtgtgtgtgtggggtgggcacattgatctgggatcgggcctgaggtttgccagcatttagaccctgcatttatagcatacggtatgatattgcagcttatattcatccatgccctgtacctgtgcacgttggaatttttattactggggtttttctaagaaagaaattgtattatcaacagcattttcaagcagttagttccttcatgatcatcacaatcatcatcattctcattctcattttttaaatcaacgagtacttcaagatctgaatttggcttgtttggagcatctcctctgctcccctggggagtctgggcacagtcaggtggtggcttaacagggagctggaaaaagtgtcctttcttcagacactgaggctcccgcagcagcgcccctcccaagaggaaggcctctgtggcactcagataccgactggggctgggcgccgccactgccttcacctcctctttcaacctcagtgattggctctgtgggctccatgtagaagccactattactgggactgtgctcagagacccctctcccagctattcctactctctccccgactccgagagcatgcattaatcttgcttctgcttctcatttctgtagcctgatcagcgccgcaccagccgggaagagggtgattgctggggctcgtgccctgcatccctctcctcccagggcctgccccacagctcgggccctctgtgagatccgtctttggcctcctccagaatggagctggccctctcctggggatgtgtaatggtccccctgcttacccgcaaaagacaagtctttacagaatcaaatgcaattttaaatctgagagctcgctttgagtgactgggttttgtgattgcctctgaagcctatgtatgccatggaggcactaacaaactctgaggtttccgaaatcagaagcgaaaaaatcagtgaataaaccatcatcttgccactaccccctcctgaagccacagcagggtttcaggttccaatcagaactgttggcaaggtgacatttccatgcataaatgcgatccacagaaggtcctggtggtatttgtaactttttgcaaggcatttttttatatatatttttgtgcacatttttttttacgtttctttagaaaacaaatgtatttcaaaatatatttatagtcgaacaattcatatatttgaagtggagccatatgaatgtcagtagtttatacttctctattatctcaaactactggcaatttgtaaagaaatatatatgatatataaatgtgattgcagcttttcaatgttagccacagtgtattttttcacttgtactaaaattgtatcaaatgtgacattatatgcactagcaataaaatgctaattgtttcatggta

SEQ ID NO: 31874 - DNA, 2815 bp, Homo Sapiens
gggccgggtccgggagccccagggcagccgccccgccgagtcgcaggcacagtgtcaccttcgtcccctccggagctgcacgtggcctgagcaggatggtgccctccagcccagcggtggagaagcaggtgcccgtggaacctgggcctgaccccgagctccggtcctggcggcgcctcgtgtgctacctttgcttctacggcttcatggcgcagatacggccaggggagagcttcatcaccccctacctcctggggcccgacaagaacttcacgcgggagcaggtcacgaacgagatcacgccggtgctgtcgtactcctacctggccgtgctggtgcccgtgttcctgctcaccgactacctgcgctacacgccggtgctgctgctgcaggggctcagcttcgtgtcggtgtggctgctgctgctgctgggccactcggtggcgcacatgcagctcatggagctcttctacagcgtcaccatggccgcgcgcatcgcctattcctcctacatcttctctctcgtgcggcccgcgcgctaccagcgtgtggccggctactcgcgcgctgcggtgctgctgggcgtgttcaccagctccgtgctgggccagctgctggtcactgtgggccgagtctccttctccacgctcaactacatctcgctggccttcctcaccttcagcgtggtcctcgccctcttcctgaagcgccccaagcgcagcctcttcttcaaccgcgacgaccgggggcggtgcgaaacctcggcttcggagctggagcgcatgaatcccggcccaggcgggaagctgggacacgccctgcgggtggcctgtggggactcagtgctggcgcggatgctgcgggagctgggggacagcctgcggcggccgcagctgcgcctgtggtccctctggtgggtcttcaactcggccggctactacctggtggtctactacgtgcacatcctgtggaacgaggtggaccccaccaccaacagtgcgcgggtctacaacggcgcggcagatgctgcctccacgctgctgggcgccatcacgtccttcgccgcgggcttcgtgaagatccgctgggcgcgctggtccaagctgctcatcgcgggcgtcacggccacgcaggcggggctggtcttccttctggcgcacacgcgccacccgagcagcatctggctgtgctatgcggccttcgtgctgttccgcggctcctaccagttcctcgtgcccatcgccacctttcagattgcatcttctctgtctaaagagctctgtgccctggtcttcggggtcaacacgttctttgccaccatcgtcaagaccatcatcactttcattgtctcggacgtgcggggcctgggcctcccggtccgcaagcagttccagttatactccgtgtacttcctgatcctgtccatcatctacttcttgggggccatgctggatggcctgcggcactgccagcggggccaccacccgcggcagcccccggcccagggcctgaggagtgccgcggaggagaaggcagcacaggcactgagcgtgcaggacaagggcctcggaggcctgcagccagcccagagcccgccgctttccccagaagacagcctgggggctgtggggccagcctccctggagcagagacagagcgacccatacctggcccaggccccggccccgcaggcagctgaattcctgagcccagtgacaaccccttccccctgcactctgtgctccgcccaagcctcaggccctgaggctgcagatgagacttgtccccagctggctgtccatcctcctggtgtcagcaagctgggtttgcagtgtcttccaagcgacggtgttcagaatgtgaaccagtgactctcgggcgcccctgtggtaactttgcaggcggccctcagtgcatccccacgacccctgcctcgagggccgcctgccttagcaatgggggcctccgcttatcctgctagcaggccccctaggattccccctgccctgtgccgcactctggcggtggccacagcgtgctggcgacactcagggcagctgcctggccatgctgtccctgcactgtgccccgcgggctttgttgctggaagaggtgggtggtgggcttctgcgtccaccaggcctcactggctcatgccccttggggggcttgagacaaatcctttctgccccccagggctagtgaagtggcctcttggataccagctcaggggacactggccccacaggagttgtgagccctctagggcagggtgggagccgggaccctcaggtgtagctgagctgtgacattgctggtcatccttggtgctcttgcttttttgaaagatgctttttttttttttaactgacgtagaatgaagaactgcatgtggcttctctgtctctgtggaaaagccatctcaggttggcggcagacacattgtcatcagaggggagcagcggctctggtcctcggagctggttcctctctcccaccctaagggcagccctccatggtcctgtctgtccttctgaagtgtgtccatcctgacctgcgggtcctcagctgctcccacacttgtgccagcccggaggggactggtcccggtcaccgcggacgtgctggccttggtatgtgccaggcttgcctgggctgggcagccttgggggggctgcctttgtggtgggcgctggggaagtacgtcccagcggcctcagggtctaaggagcgctagtgccttgcccacaggtgcgggaccatctgatgtgatgtgaatactcttcccacatacattaaacacacttaagtgaga

SEQ ID NO: 31875 - DNA, 3048 bp, Homo Sapiens
agctggcggtcaccatggcaatgcgggagctggtggaggccgaatgcgggggtgccaacccgctcatgaagctcgccgggcacttcacccaggacaaggcccttcggcaggagggattgaggcctggcccctggccccccggagcaccggcctctgaggcagcctccaagcctttgggagtagcttctgaagatgagttggtggctgaattcctgcaggaccagaatgcaccccttgtgtcccgtgcccctcagaccttcaagatggatgacctcctggctgagatgcagcagattgagcagtcaaacttccgccaggctccccagagagcccctggtgtggcagacttggccttgtctgagaactgggcccaggagtttcttgcagctggagatgctgtggatgtaactcaggattataatgagactgactggtcccaagaattcatctctgaagttacagaccccttgtctgtgtcccctgcccgctgggctgaggaatatttggagcaatcagaggagaagctgtggctgggagaacctgagggaacagccaccgatcgctggtatgatgaatatcatcctgaggaggatctgcagcacacggccagtgactttgtggccaaagtggatgaccccaaattggctaattctgagggtacatcagatgcctgggttgaccagttcacaagaccagtaaacacatctgcccttgatatggagtttgaacgagccaagtcagctatagagtctgatgtcgatttctgggacaagttgcaggcagagttggaggagatggcaaaacgggatgctgaggcccacccctggctttctgactatgatgaccttacgtcagctacctatgataaggggtaccagtttgaggaggagaaccccttgcgtgatcaccctcagccttttgaagaagggctgcggcgccttcaggagggggacctgccaaatgctgtgctgctttttgaggcagctgtgcagcaggatcctaagcacatggaagcttggcagtatctgggtaccacccaggcagagaatgaacaagaactattagccatcagtgcattgcggaggtgtctggagctaaagccagataaccagacagcactgatggcgctggctgtgagcttcaccaacgagtccctgcagcgacaggcctgtgaaatcctacgagactggctgcggtacacaccagcctatgcccatctggtgacacctgctgaagaaggggctggtggggcaggactgggccccagcaagcgtatcctgggatctctcttgtctgactccctgtttcttgaagtgaaagagctcttcctggcagctgtgcggctggaccctacctccattgaccctgatgtgcagtgtggcttgggagtccttttcaacctgagtggggagtatgacaaggccgtggactgcttcacagctgccctcagcgttcgtcccaatgactatttgctgtggaataagctaggcgccaccctggccaatggaaaccagagtgaagaagcagtagctgcgtaccgccgggccctcgagctccagcctggctatatccggtcccgctataacctgggcatcagctgcatcaacctcggggctcaccgggaggctgtggagcactttctggaggccctgaacatgcagaggaaaagccggggcccccggggtgaaggaggtgccatgtcggagaacatctggagcaccctgcgtttggcattgtctatgttaggccagagcgatgcctatggggcagccgacgcgcgggatctgtccaccctcctaactatgtttggcctgccccagtgacagtgggacgggctgccctgtgagtgtccacctggagggatcccgcttttggatgtgattccctctccccaaatgggcctaccaaggggcgggcttgatgaccataagcggtacggcctttcaggagctgcctcaacgtaggggtgggtagtctgtgttctagttcctacataattgtaggaaaatgagctgtgtcatctctgagtcccttggtaattcaagggctgtacatccagctacagatctctctgctcatcatgccctttcttggtgctgctttttgggtaggaccccacgatttagggtaactgttatcatcagctgccatttctgataggtctaccacatctgtaatgtcatgtcctttcccccacttttactgggaattgatagtccagcttccttgggcagtgtaagtaggaggttcatctcctgtgcgcctctaatgtctgtctggatgggatgtgttaggagttggcctgttgggttgaattgttgatttggctgagcagagctgagttttggtaggagtgctcatggttctgtcattcttggacctctcctggctgagctctgattccctgtgagcacgatgctgatgcaatagtcctgtgtcatcactgcagcggtcctcaggagctgccagggccaattgctacagagtgtctgggtgtgtggcataggaggaaggtttgcttgtgaaatgaggctgggtgggagcggggagggactagatcagaagagatcaagggctctattcaggaacgttggtgggaggacagagcaagtgggaagggggtatggtgagtgcggcaatccctcatcctcttagaagcacctgtgaatgggaattgagccaactgttatagaaaattggttcagaaagtgcaatcttgccagatttctagcaaataggttcagtgttaccataagcctttgctgtacttcttgaaatgtttctaggggagagcattggaaaatccccttcccccatctagatcgaaggaagatgagggagcagcttggattcttctcagttgtcccctgcatggggagatacactaacccccagaaatgactgctaagcctcttgccttgtctttagtagctaatgatcagagagattttttttttaaactaccatggtcccaggattccatcctgaaatttatttttctttgtatgaatatgtgtaaatgatttaaaaataaaactgtaaaatatt

SEQ ID NO: 31876 - DNA, 4409 bp, Homo Sapiens
tttcgactcgcgctccggctgctgtcacttggctctctggctggagcttgaggacgcaaggagggtttgtcactggcagactcgagactgtaggcactgccatggcccctgtgctcagtaaggactcggcggacatcgagagtatcctggctttaaatcctcgaacacaaactcatgcaactctgtgttccacttcggccaagaaattagacaagaaacattggaaaagaaatcctgataagaactgctttaattgtgagaagctggagaataattttgatgacatcaagcacacgactcttggtgagcgaggagctctccgagaagcaatgagatgcctgaaatgtgcagatgccccgtgtcagaagagctgtccaactaatcttgatattaaatcattcatcacaagtattgcaaacaagaactattatggagctgctaagatgatattttctgacaacccacttggtctgacttgtggaatggtatgtccaacctctgatctttgtgtaggtggatgcaatttatatgccactgaagagggacccattaatattggtggattgcagcaatttgctactgaggtattcaaagcaatgagtatcccacagatcagaaatccttcgctgcctcccccagaaaaaatgtctgaagcctattctgcaaagattgctctttttggtgctgggcctgcaagtataagttgtgcttcctttttggctcgattggggtactctgacatcactatatttgaaaaacaagaatatgttggtggtttaagtacttctgaaattcctcagttccggctgccgtatgatgtagtgaattttgagattgagctaatgaaggaccttggtgtaaagataatttgcggtaaaagcctttcagtgaatgaaatgactcttagcactttgaaagaaaaaggctacaaagctgctttcattggaataggtttgccagaacccaataaagatgccatcttccaaggcctgacgcaggaccaggggttttatacatccaaagactttttgccacttgtagccaaaggcagtaaagcaggaatgtgcgcctgtcactctccattgccatcgatacggggagtcgtgattgtacttggagctggagacactgcctttgactgtgcaacatctgctctacgttgtggagctcgccgtgtgttcatcgtcttcagaaaaggctttgttaatataagagctgtccctgaggagatggaacttgctaaggaagaaaagtgtgaatttctgccattcctgtccccacggaaggttatagtaaaaggtgggagaattgttgctatgcagtttgttcggacagagcaagatgaaactggaaaatggaatgaagatgaagatcagatggtccatctgaaagccgatgtggtcatcagtgcctttggttcagttctgagtgatcctaaagtaaaagaagccttgagccctataaaatttaacagatggggtctcccagaagtagatccagaaactatgcaaactagtgaagcatgggtatttgcaggtggtgatgtcgttggtttggctaacactacagtggaatcggtgaatgatggaaagcaagcttcttggtacattcacaaatacgtacagtcacaatatggagcttccgtttctgccaagcctgaactacccctcttttacactcctattgatctggtggacattagtgtagaaatggccggattgaagtttataaatccttttggtcttgctagcgcaactccagccaccagcacatcaatgattcgaagagcttttgaagctggatggggttttgccctcaccaaaactttctctcttgataaggacattgtgacaaatgtttcccccagaatcatccggggaaccacctctggccccatgtatggccctggacaaagctcctttctgaatattgagctcatcagtgagaaaacggctgcatattggtgtcaaagtgtcactgaactaaaggctgactttccagacaacattgtgattgctagcattatgtgcagttacaataaaaatgactggacggaacttgccaagaagtctgaggattctggagcagatgccctggagttaaatttatcatgtccacatggcatgggagaaagaggaatgggcctggcctgtgggcaggatccagagctggtgcggaacatctgccgctgggttaggcaagctgttcagattcctttttttgccaagctgaccccaaatgtcactgatattgtgagcatcgcaagagctgcaaaggaaggtggtgccaatggcgttacagccaccaacactgtctcaggtctgatgggattaaaatctgatggcacaccttggccagcagtggggattgcaaagcgaactacatatggaggagtgtctgggacagcaatcagacctattgctttgagagctgtgacctccattgctcgtgctctgcctggatttcccattttggctactggtggaattgactctgctgaaagtggtcttcagtttctccatagtggtgcttccgtcctccaggtatgcagtgccattcagaatcaggatttcactgtgatcgaagactactgcactggcctcaaagccctgctttatctgaaaagcattgaagaactacaagactgggatggacagagtccagctactgtgagtcaccagaaagggaaaccagttccacgtatagctgaactcatggacaagaaactgccaagttttggaccttatctggaacagcgcaagaaaatcatagcagaaaacaagattagactgaaagaacaaaatgtagctttttcaccacttaagagaaactgttttatccccaaaaggcctattcctaccatcaaggatgtaataggaaaagcactgcagtaccttggaacatttggtgaattgagcaacgtagagcaagttgtggctatgattgatgaagaaatgtgtatcaactgtggtaaatgctacatgacctgtaatgattctggctaccaggctatacagtttgatccagaaacccacctgcccaccataaccgacacttgtacaggctgtactctgtgtctcagtgtttgccctattgtcgactgcatcaaaatggtttccaggacaacaccttatgaaccaaagagaggcgtacccttatctgtgaatccggtgtgttaaggtgatttgtgaaacagttgctgtgaactttcatgtcacctacatatgctgatcttttaaaatcatgatccttgtgttcagctctttccaaattaaaacaaatatacattttctaaataaaaatatgtaatttcaaaatacatttgtaagtgtaaaaaatgtctcatgtcaatgaccattcaattagtggtcataaaatagaataattcttttctgaggatagtagttaaataactgtgtggcagttaattggatgttcactgccagttgtcttatgtgaaaaattaacttttttgtggcaattagtgtgacagtttccaaattgccctatgctgtgctccatatttgatttctaattgtaagtgaaattaagcattttgaaacaaagtactctttaacatacaagaaaatgtatccaaggaaacattttatcattaaaaattacctttaattttaatgctgtttctaagaaaatgtagttagctccataaagtacaaatgaagaaagtcaaaaaattatttgctatggcaggataagaaagcctaaaattgagtttgtagaactttattaagtaaaatccccttcgctgaaattgcttatttttggtgttggatagaggatagggagaatatttactaactaaataccattcactactcatgcgtgagatgggtgtacaaactcatcctcttttaatggcatttctctttaaactatgttcctaacaaaatgagatgataggatagatcctggttaccactcttttgctgtgcacatacgggctctgactggttttaatagtcaccttcatgattatagcaactaatgtttgaacaaagctcaaagtatgcaatgcttcattattcaagaatgaaaaatataatgttgataatatatattaagtgtgccaaatcagtttgactactctctgttttagtgtttatgtttaaaagaaatatattttttgttattattagataatatttttgtatttctctattttcataatcagtaaatagtgtcatataaactcatttatctcctcttcatggcatcttcaatatgaatctataagtagtaaatcagaaagtaacaatctatggcttatttctatgacaaattcaagagctagaaaaataaaatgtttcattatgcacttttagaaatgcatatttgccacaaaacctgtattactgaataatatcaaataaaatatcataaagcatttt

SEQ ID NO: 31877 - DNA, 2932 bp, Homo Sapiens
  misc_feature (82)..(82): n is a, c, g, or t
ctgcagtcaggcggtgaactgacttcatcccaatccctcagcccccaccaggaccagtctggagtccctcccctgcccccantgaaatttcccttccgtccccaaacttacctctgatctagaccttactcacctccttcctgtttcctaagactccttcctgccgtccacagaccgagccttttatctttgtccaccctgtgccagacacctccttttccagaaccttctccttactggtgaccttacttatctctgttgctttctggggtcctaggaaatgccagcactcccacccacattgcctgaactttccaacactccctagctgcgctgtgtcctatctcaacacttcctcatgtatttcttgtgtcttctagaacattcccccgccattattacttcaatatggctacacatacttcctaattgccctgcaaaccatctccttctcaccattgcccagcgatgctttcgtctcctccataaacactcccggagaccaatttttgtgtcacccccatactccctcgttgacacactgactccatacataacctccttgaaaaacctctttattaatctcaccatcctccagacttccctcctgtcataattccatccctcctccaacttttccctctcaagctctgcccttcccagcccagcccagcctacccaacctcatctcttccctgtagaccacatcccaccatgttcccctgagcctccaaggaaggggctcagggggccccatggcctcccgctccctgtggccccacagcccccgtgggccaggggaagcgccccagaagccgaagtgcccaccatgggcaaccacacgtgggagggctgccacgtggactcgcgcgtggaccacctctttccgccatccctctacatctttgtcatcggcgtggggctgcccaccaactgcctggctctgtgggcggcctaccgccaggtgcaacagcgcaacgagctgggcgtctacctgatgaacctcagcatcgccgacctgctgtacatctgcacgctgccgctgtgggtggactacttcctgcaccacgacaactggatccacggccccgggtcctgcaagctctttgggttcatcttctacaccaatatctacatcagcatcgccttcctgtgctgcatctcggtggaccgctacctggctgtggcccacccactccgcttcgcccgcctgcgccgcgtcaagaccgccgtggccgtgagctccgtggtctgggccacggagctgggcgccaactcggcgcccctgttccatgacgagctcttccgagaccgctacaaccacaccttctgctttgagaagttccccatggaaggctgggtggcctggatgaacctctatcgggtgttcgtgggcttcctcttcccgtgggcgctcatgctgctgtcgtaccggggcatcctgcgggccgtgcggggcagcgtgtccaccgagcgccaggagaaggccaagatcaagcggctggccctcagcctcatcgccatcgtgctggtctgctttgcgccctatcacgtgctcttgctgtcccgcagcgccatctacctgggccgcccctgggactgcggcttcgaggagcgcgtcttttctgcataccacagctcactggctttcaccagcctcaactgtgtggcggaccccatcctctactgcctggtcaacgagggcgcccgcagcgatgtggccaaggccctgcacaacctgctccgctttctggccagcgacaagccccaggagatggccaatgcctcgctcaccctggagaccccactcacctccaagaggaacagcacagccaaagccatgactggcagctgggcggccactccgccctcccagggggaccaggtgcagctgaagatgctgccgccagcacaatgaaccccgagtggcacagaatccccagttttcccctctcatcccacagtcccttctctcctggtctggtgtatgcaaattgtatggaaaaagggctgtgttaatattcataagaatacaagaacttaggaagagtgaggttggtgtgtcactggtcaacctttgtgctcccagatcccatcacagtttggcgattgtggagggcctcctgaaggaggagatgagtaaatatatttttttggagacagggtctcactgtgttgcccaggctggagtgcagtagtgcagtcgtggctcactgcagcctccacctcctgggctctccagcgatcttcccacatcagcctcccgagtagctgggaccacaaatgtgagcccacccatgcctggctaatttttgtactttttgtataaatggagtctcactatgtttccccaggctgatcttgaactcctgggctcaagagatcctcctgccttggcctcccaaagtgctcagattagagatgtgagccgccatgtctggccagataaattaagtcaaacatttggtttccagaaaataaagacaaatagagaaggttagatttttttttttccaacaagtggataaaagtctgtgactcgggggaaagtggaaggagaaatgcagccgatatagagtcattatgtttgcaaagcccctggtcatacaggccagggaacataagaccgcaattctaagtttctagataaacagcgatctccaagtcaagactgaggatgaagagggagaatgtcagaactcaagtgaagggcaatcagggcagactgcctggaggagtgatgccagaaggtttgggaagaaggtgtgggacaagaagaaagggtatttattcattcattcaacagaggtttatgtagggcactgtgctgggtggggctggggacacaacaatgactgaggcagcctggccttgccttcacagggctcaccatacacaagtaaataaaaaatatgtaatgtttggaattgct

SEQ ID NO: 31878 - DNA, 2810 bp, Homo Sapiens
ttttaattttattttatttttgttgtgggattcttaagcagataagaagaaaagacaccttcctagtgagcagctgcccagctcctgctcagttttgcctcggggtagcacctccagccacagaaagcaagccggtaagtctctccaggtaggacttgctgcaaccccagctcctgctcagttttgcctcggggttagcaccttccagccacagaacgaagccggtagtctctcagtagacttggtgcaacccagctgctggactgatctgaaacggactttgcatactctccgaagtatggtgagttggtgctgacttcaaagttgcctggtgaaccaagataaggtggatcgcagagactaaggggagagggagaagccctgctcctcttctccccaccaaggcacaatgagcaacatctgtcagaggctctgggagtacctagaaccctatctcccctgtttgtccacggaggcagacaagtcaaccgtgattgaaaatccaggggccctttgctctccccagtcacagaggcatggccactactttgtggctttgtttgattaccaggctcggactgctgaggacttgagcttccgagcaggtgacaaacttcaagttctggacactttgcatgagggctggtggtttgccagacacttggagaaaagacgagatggctccagtcagcaactacaaggctatattccttctaactacgtggctgaggacagaagcctacaggcagaggcgtggttctttggagcaatcagaagatcagatgcagagaaacaactattatattcagaaaacaagaccggttcctttctaatcagagaaagtgaaagccaaaaaggagaattctctctttcagttttagatggagcagttgtaaaacactacagaattaaaagactggatgaagggggattttttctcacgcgaagaagaatcttttcaacactgaacgaatttgtgagccactacaccaagacaagtgacggcctgtgtgtcaagctggggaaaccatgcttaaagatccaggtcccagctccatttgatttgtcgtataaaaccgtggaccaatgggagatagaccgcaactccatacagcttctgaagcgattgggatctggtcagtttggcgaagtatgggaaggtctgtggaacaataccactccagtagcagtgaaaacattaaaaccaggttcaatggatccaaatgacttcctgagggaggcacagataatgaagaacctaagacatccaaagcttatccagctttatgctgtttgcactttagaagatccaatttatattattacagagttgatgagacatggaagtctgcaagaatatctccaaaatgacactggatcaaaaatccatctgactcaacaggtagacatggcggcacaggttgcctctggaatggcctatctggagtctcggaactacattcacagagatctggctgccagaaatgtcctcgttggtgaacataatatctacaaagtagcagattttggacttgccagagtttttaaggtagataatgaagacatctatgaatcaagacacgaaataaagctaccggtgaagtggactgcgcccgaagccattcgtagtaataaattcagcattaagtccgatgtatggtcatttggaatccttctttatgaaatcattacttatggcaaaatgccttacagtggtatgacaggtgcccaggtaatccagatgttggctcaaaactatagacttccgcaaccatccaactgtccacagcaattttacaacatcatgttggagtgctggaatgcagagcctaaggaacgacctacatttgagacactgcgttggaaacttgaagactattttgaaacagactcttcatattcagatgcaaataacttcataagatgaacactggagaagaatatcaaataataaagtagcaaaacaaattcaaataataatccattccaaaatacaatgttatcaaccaactgcacaatcagtttatcctgacatattcaagtgataggataaagttggccatgtattatgaaaaagattatttgtgcattttattgactgggcaacactgcaggacagtcaaggtgatatataatttcctcactgcctggtaaaattaagcacactaaaccaagttatttttctttttaagagatacttacatttccatttattgtttgaaatgtcgatcaagagaatcaacagatgatagtccaatttttactcagtgactgttgtagcattttcctgtttactgattagagtggttatcattattcctcagattgctgaatcccatcaggctgttattatgaaggaatttgattgctttgctgcacagcaggacctgtgctttgagatttttttttctcttttaaaatatcctgtaactacaatgatggtaaagccatgttaaatgacttgattgtacttggagtaattgcacattttttttctatgcataaaaaaatgatgcagctgttgagaaaacgaagtctttttcattttgcagaaggaaatgatggaatttttctgtacttcagtatgtgtcaactgagagtcatatacattagttttaatctcttaatattgagaatcaggttgcaaacggatgagttattatctatgaaatgtgagaaatgtctaatagcccataagtctgagaaataggtatcaaaatagtttaggaaaatgagaggagaacagtaggattgctgtggcctagacttctggtaattaataaagaaaaagaagtaccctttggcctaca

SEQ ID NO: 31879 - DNA, 40433 bp, Homo Sapiens
gaattctttattggactatgcatattcccaaacatattattgtcatacaactgagggaaaaatgtaaaactatatctgggaaatgaaaaattataaattctcaaaatgatacataggaaaatgatttacaaagaaaaaaaaggaaaactgaacttagtatctttctactttaaaggggttcaagaacttaggagtagttacacacctcctaaaatcttgaaaaagaggctatgaactcacttcacaaagggttcagatactcacattgtgtccaagagactcagcaattgggaatcttgccagttagattcataaagcaatccgaaagccagaatgcaatttctttaggggtggtttctagatgtttattctagatatttttaaaagattttgtttatttttgatgtgaagaaagaaaattattatagaatctagaaataaatattggctttaaaagtattaatttgccttgtcctttgtaattgtgatccgaaatatctcacaataattttgtttcagtgttattttcttctcaggaggaaaggaatgttaaaaccttactagcaactaacacttgataaagatttaaactatataacaattttaaagaaagtctaaaacaccagatagtcttgaaacctcgcatgcttcaccgtttaataaaattatgactcattttagtaagaacatgcttttttagtaagaaaaaatgctttctgagctaagtttgaactgctggggcacatgggacacccacaaacccagtcagcagaagtctcaaactcctaaaagattaaaggaaaaatacattagtgtgtacagagaatgaaaaaaaaatccccaatggttctaatctataaacggaagtaaaactaaaactcccctaaaatccccccagtcatcaatccttataaattcagcacttatcttcttcctttacttctggagaccctcattaaacaacacgaaagcctttgctgacttttatctcgtaaaatagagccctcaaatgacactaagcagggataccgacctccaaaatcacaaactgttttacttctaaaaccatgcatgcaaacgtggggtttcctgagttctgctaggggcgggctgtctggacccccgtgtattttttttttttttttttttttttttgcaggtgtgcaatccagggtgcgcgctctgtgcagggaggggagcagaggtgtgcggtgggcaccgcctgggccgggcggggcggggtgggtggggcccgggtgtgtgctggggtgagagtgaaggacatgtgacaatacgacggtggcggctgcaggatccgggaggggagtgaaagctccgctggggcgctccattagtgagcggtgatggttgccgcccacttgtattgaagcgtcctttgtcactaacaagttaaattagagatgttatttatttaagaagaaggaaaaaaaaccctagccaaacagcctatgaatacatatgctcacatcccctactcctccaactcctaatttccccgtctccagagggcacagttgtaaaccttgacgaaaatccaatcttctgtgcgggaatttccccccaccgcttgccgcccccgcgacagtgagtgggagctggaggagctctggtcccgctgcccgggagcacgcggagccgggcgaccgcggtgcggcagccagggaggaggggaggcggcgggactgggcgcgggcgggccgccgccgcgacccgggagcggggtttgctcaggaaaaggcgccgtcgcggcccccggccacccctccctggccccgggctccctgcccgcgcgcctcccgggcctccgggcggctagggcaccgcgcgggcgagcgccgaatgggagcggcgacccggccagcccggcagcccgcgggcggcagccagggcgaccgcggaggcggcgggcagggcgcgtgcgcactgcaggggcgccagatttggcgggagggggagtgtccaaagctctttgtttgatggcatctctgtttacagagtttacactttaatatcaacctgtttcctcctcctccttctcctcctcctccgtgacctcctcctcctctttctcctgagaaacttcgccccagcggtgcggagcgccctgcgcagccggggagggacgcaggcaggcggcgggcagcgggaggcggcagcccggtcggtccccgcggctctcgcggagccccgccgcccgccgcgccatggcccgaagaccccggcacaggtaacggggagccgggcgggcggccgagggcgggggcgggggtcgcggggcgccaggctcccgggagcaggtgggaattcgttccgggatcatctgaggggctgtcagaccctccgaggacctggagcccctgcctcggcagcagaagccgctccagagactgatgaatggaagagtctttgcgggaaatgtatccggacgttgggaagcacgccctgcggctcattttgcaagttgcatggggatacatttttctttagggggaaaaagaaagcacgttccagccgagggcagagcggtgcccaccagccccggggagcccaccaggtgcctggcttgatgccgcgggtgtcggcgagggatccgcagcgtaattgctggatgcattgagatatgtttggacttggaagtgcagagcatatggcagatacagggaaaatgctggattgtttagtagctgcaggtagttcatttaaatttcattcattctttatggaggcgaggaccagtgtcagctgacaggcggctgaaaagcagattttagggggataaaggggtctctacttttgcaaattgtcttaagacctggttttggaggttcgaatcatttttctctgaaaggcttttacttccactgcaaacattgcacggcacccacacgccgccgtcgcacatgtcactgcacttagggaggctcgccgggaagatgggtgcagtcccttcacatttttggccggacagatgggaagagggagaggaggaggaggagggaaatcctcgtccgaactgtcagttgctcgttccccagtctccaccggcctctggactttcccagcagcacacgccggggctccctgcgagcggcgggtgcagggctagctcggcagccgtcgcagtcgccactcggctcaaggggacagaggccggcagcacccaaggccgctgcgcgcgcaaccgggacgcgatccccgcgggctctgcccccaggccaaaggtccccgcctggggcgcacgcgtggatgcggctgaggtcgccgcgccttctcgcaccctccttcagccgccttaggtcgccccggccgaggcgcggtgaccggacagatcctcgcgaaggagttctaaggcgaagtccatggaggcaaagcaaatccattcgcctttccttagattgtttgattttctcctactggtttgttgttgagcctgcggcgctggtccccgcgcggcgctgggaagttgcaaagagcgtgggtggagaccctgcagcagcacccgcgggctgggctgggcggggagcagcgccggggcttggttgggctctggggacgagagggcgacttgggggagctccgggctccctatgctcctccggagcctggccgcgcaggacggtgtgctgcccctcgacgctccacttttcgcctttaggacttcacaggacagctaccggggtcatctgtttttttttttttttttttcgagagctgaaactggcagcaggaggagggagtcgggcaggggtgctgggaggaggcgcggcacggctccgccgccccgaggtctcggcccccggggcggggccgcgcaggttccctgaggctccaggtagcccagaggggaggcggctgggaggggcgggagccttgaacctgcctcaggggaagagaaacccgactgcgggctcggagccgtttcttgcaagggcgagcgtcaactcggcagggattatattaaccaggtcagcgaaatgagtttgaacccctccgaatcacagtagcggccacaaggcacttcctcccgctcccctccctcttcctaacccccagcacctcttttctttttcgtttctttgcacggtttgtttccttgacagaatgtaacattcatagttgtactcttgtaaccacaccgggtctagcaggtggggagtcgagtgcatcaaccctgaaatcagcctttgaaaatcctctgactgttgggtctgagatcttgtcagagcagataaaggaaaagttatttcaggttccttagtagaaattaatcatgcttctaggacgacttagagcaagcaaatcgcatgcaaagttcaaaggcgagcctgggtggccagcctggcagggaaactcaggagctgggcgcgtgagcagccccggactcgccctgctgcgtcctggccccttcaggtcctgcagaagtcactctccaccttgcccccaagaccttagttttgcacatctttgcctctgtgcttagcttttaagaggcacggaaggacatggcatggtcatgtattagcgctggaaagtaccttagaaataggatccaagcaagcccttattgtaaaggcgaggaactgaagtcttgagagagaggaagtgatttgtccaagtcatacagctaggtggaggctagactagaacctttgcctccagaaccctagtcctgttgattcccgtgctctcacctgacgttggctgccccctgcgggcggctgaataggttgcttgttcctgggttgttaaaccgctgcggagagagaggtgctcaatgactactctgaaaaatgtgctcagttctgaaaatgtgacctctagatccagccaaacctgaaaagttaattcgacttgaatctatgactgcagtttcagattcctctggttttcttggtgtctctcacatttcacaagggactgcatttggggtctttccaaggagttccctatgaatctttcaaaagatgcagacttacacctctgggctttatagcttttttttttttttttttttttgctttatcatatcgtgttttacatttttgtagttcttgttcagaagttgtttagtgcctcctgttgacagtggaaacagaactaggctattgtttcaaaacacagacactaaatgaaaggaattattacagattataaatatatatttcctgggattttatttggtggtggtggtattttaaatttggattacatcatgtcgccattcaacctggactatcagattgttgcttaaaataatagctttaaattatgagaacccccaattcaggatttttggtaagcacttcagcttcacttgtagggggctggtaatatgcataccagtgagttagtttgggaagacaaaacctgtaatgaatataacttttctttttaaaaacaatgatttacattatgatatggctttatatcattgtttttattggtcttagtttaatgggtttcccaacattgcaatgacaaattttagtgaagtttctaagatagtatttttcctattttaagttttataagaaaaactataaaataaaccgtgtctgtaaaattattgtcatctgatcagttgattagattaacaaacattatgattatgattaacaaacagtaagcatatagttacttcttcaaaagtcataaaatttcctaggttaggttaactaaataaaagaaaaagctttcgaaaatagtaatgggttcttttaaatccatggcttttttctggggaaatcccttctggattaggttacattttataatatttcaaacaccattccatcagagacagaaaaaacaagagtaagtaagactctgactaacaagtggcctaattattcacttagttactctagaaactaagtattgtaaacatgggcacaagttggatcaaccaggcctggagttgtgagcaatttggtattaattttatttacaaaacattaaagcttgatcactcaatgttcttatctttgctttggttttaaaatcctttcctcttagattctcctaatcctctagactttatgggatcactataatcctgttttgcgctgtactacttcttgatttttttcttcttttaataaaacaaaaaccccattggaatagcatagttgaattgtttattatgtttgagaaatattatttaaacgatgtgacagatgccaaagattttgagtgtgcacttatataaaggacatgggttcttcttccttttcttatccttaaccttaagttttcaacttaaaccttcactggttggaaggtggccaaatgtataacttgtccctggtctaatagtaacagcaggttcagacatgcaggggaataggaaggtgccaggtccttggccgtgtctgtggatacccataacagcagaaccagtttacaatactagagcaacagaatgcagcaaacaatcttgttgtgcaagttttcaaagttttgtcttcataacctttgaaaagattgttgaggagttttgtgtaagttttgtaatccagtagtagtctaaatcctcttgtttcagcccacgtctacccattcttatttctgcagcatatatagcagtgacgaggatgatgaggactttgagatgtgtgaccatgactatgatgggctgcttcccaagtctggaaagcgtcacttggggaaaacaaggtggacccgggaagaggtaactaatcattttatcaagacgcagaaaatagatagagtgtataatttataaaaaacaaaatttcaactaaactacaggtgctcaagctcattagcaggctccttgagatcttatcctagcccgcatgtgcagcgtgccctatgccccccacttcattatattatccatttccacactatttgcagttctttgaatgtcctcttctcattttaggcttcatctgtgtttccttttgcctgttgagttctcatccttttgtcccacctcttcttcctacttttacattacccatgaaggcatcacctcttctgtgaagccatccctggcttcgccggacaaggattggatgcatcctcctgtgatcccatgcatgggtgcatgttctactttattgttgctgggacatatatacctcctccagctgactgcaagtctgttgagggcagggctcttgtctattcatctttgtgtttcctgaattcacaaatgcttggacccaaaataggatattaataaatgttctctcaataagtgaatgacttgctactcccaaaaacaaaacaaacaaaagaataaaacaaaacactcagagaactcatctttttacagtgtattgatttaatatccttgatatacttaacagagccatctatatgaaggtatgttttaaaatcatccgataatggatggagacacatctgcttctcctgtttctttttcggctggcttatcaaaagtttgattttgtaggaatggaaaaatattttagaagcaaaattattaatatgtggagaaaagtttctctaatgttcttaaaatttttgcaactaattttagatgattcatgttacaataaatggtattggctcttcttcagtttcactgttctctgcttcatttaaaccagagctccttttaacaggcaggtaggattcccagagaggcccataggaaattcatattttacctattaagattatccacttggataatccttatgatacggaaattctgttgtcaacattggtttcctaattcttgtgtctgtattgtaccagggacctccactgtgtgtgaatgttacctttgcagaaacataagaaggaatgcatttatatacttatgaactggtaggattgtgaacagcatataaactaaaagaactgattagctggaaatgtttaatgtcttttatgttctaacacatctggcctatctaaatctaactgattttcttatatagctttcaaatttaattttaaaaatggtctttatttcttttataaaaagttaaactaactggaaatattctatttcttgctcaagatcctatttattaccataggtaaatgtgtactgaatctagcactggaatgcattttttcctaacagagtaaagcagttatttataataaacactcaatatatgccaggcattatgataaatgttttgcaaaattgcctcatgtaatccccaaataaccctgttaatatcagcctcatgttaataaattgccccatgtaatccccaaataaccctgttaatttccattttatagatggcaatactaaggcccagaaaggtaaaatggtatacccgctttacacaattaatagttgagtcaagatgccaactctggtctgattctaaataaatctatactcccaagtccgtatattacattaatatctcctgtattcggatactttagagagactttttattctagattcgttccctcattcactttaacttgaacagagttatatagtaaataactgatatcctaggattacctttaaatgtcttaggatgaaaaactgaagaagctggtggaacagaatggaacagatgactggaaagttattgccaattatctcccggtaagttagtaagtttttcttataacgaaaggaaagcttctcccaaagatttctataaaatattctaggaggagttattaagatagtgtataatttactcacatttaagaagtgggagaaatgccctacccataacttatattttatattataatgcatataattaaattattagaatttagattattagaatcgattattataatttagattatcaaattttaaaaacagttgcttcttgttttatcttttcatttataggataattagtattttgatgatttgttacatggtagttgattaaacttgatatttcctccaagtcagtttttcctgaattccctatttttgtcaatagcaatacttttggcaccaaggtttaaaattctgaagacctttcttgacttatcacattcccccaacccctacatctaagcagttactaaggaccctggaattcctttatagtcagtcccgtccttttcattctcatggctgtgctgaaggttgggctcctgcctctcatttggactatcatataacttcctaactggcttccccacttgtagttttccatttttctttcttttttttttttttgttttttgtttttttttttttgagatggaatctagctttgttgcccaggctggagtgcagtggcacgatctcagctcactgcaacctccgcctcccaggttcaagcgattctcgtgcctcagcccccttagtagatgggatcacaggtgcccgccaccatgcctggctaatttttgtatttttagtagagacaaggtttcaccatattgatcaggctggtcccaaactcctgacctcaagtgatctgcccacctcagcctcccgaagtgctaggattgcaggcatgagccaccgtgcccagccagtcttctacttttccattcatcccaaacaccattggcaggtggaacttcctaaaatgcagctgtaccttatcttttcaaaaccaaccacagtgacagaatctcacaaattaagtaaactgccttgacttggcacacagaggccctcctctattgccccaacttacagctccagttctgtttcctgcttcctctctctaagcaggtttgcttgaatttatttctgctttacctcctctgggcttttgctcctggtcttcccacctcctagaatattctccctttatgtcaccaattaaagttctgtccatccttcaaagtccttatgaagagctcttcaagactcctcccaaggaaaccatttctcctcctaagaagatgcttctctcctcacttcagtatcattttgctttggtcttttcttccaagtgaatcaaattcagcatctgtgatagtcagtcatctacttgtcttttccttcttataagtttacaaactcctgtaacataggacctatcttttatgcatcttttttctttctgcaatataaatactttggtcctggattgaagcacatctcttgtctgaatgggaagcaaactttagtcttttagggtggtttccatgaaagcctgacaacatagaatctctatcaagcctcaggctatgtagatactctgcaaaagtatctgaggttaaggttaacttggcaggcacatgtgtagtatgatggtcctttagatcatgtggcaggaatgtttccctcaggaggcagagtgtctaattttagatgcaactttgatatattacttgcatgttctgtagcctgtaagtaatgagggatagatgggctctaaacatgctctaaaatgttcttaaatattttcactgcatatggtctatgtgtgattcctattacaacaaaaaattcacgtgcttatcacatcatatctttatggtggtgcatactttatttgtctagaatcgaacagatgtgcagtgccagcaccgatggcagaaagtactaaaccctgagctcatcaagggtccttggaccaaagaagaagatcagagagtaagttctttcttcattggtgtgtgactcataattaagaatattcccaaaatgctaatattttcctatttgaggaagcaggtaaattgggcaaacaggaagtagaggactctattcccatatttccagtgaatgaaagcaaattttggaaattttctaaagatcttgtaacactgaagaatgattatactgactcattacataactttaaaacataggttatttttgtgtgtttatctgaaggtgatagagcttgtacagaaatacggtccgaaacgttggtctgttattgccaagcacttaaaggggagaattggaaaacaatgtagggagaggtggcataaccacttgaatccagaagttaagaaaacctcctggacagaagaggaagacagaattatttaccaggcacacaagagactggggaacagatgggcagaaatcgcaaagctactgcctggacggtaataatatgtcaaaaaatatattgatcgggaagaatgagggagtgggtattgaacattctgctttaaatgtatggtgagtaaattatatttcatcagtcgtaagtgttttattagataaaccagctacatagcttttagagattgaagacatcttagagtttatttggttgagaacttccaggatccacctgacagtgagccctgggtgaagacatttagctttccccagcctcaatttccccatttccaaaatgaatcatacagggccagtgttaggatcaagtaaaatgaatgtcaaaggacttggtaaactataaaactctaaatgcatagaaagaaactgaagacagtttgtctctggcagttcacgtagctggttaagttactcaaaggaactcagctaccattttcctgataaccatcattcatttcttttattttttttaattattattttttagagacagaggcttgttctgtcacacatgagtgacagagtgcagtggcatgatcatagctcaatacatccttgaactcctgggctcaagggatcctcccacctcagcttcttgagtagctaggactacaggtgcaccccactacacccagctgattttaaaatattttttgtagagatggaatcctgctatgttacccaggctggtatcaaactcctggcctcaaacaatcctttcacctcccaaagtgctgggattataggcatgggccaccatacctggccaccagtattcatttcattataccactttgcttaattttttacttcattgattaaagaaataatgtatttcttgaattctcatactacttccaggtttttaaataatgtcagggtaataatgctttctttttaatgaacaaggcaagaaaatgacctcattatgagggataactatggaagctcattttgtcccatttttcccacttaagtagtatataacagattttgttcctttggaaagcaatacttttaatgataaatcttgcattaaaatgatgtagatcaaaaatattaaaaatagttttattcttgagcttcataatccaggagaaagtttatatagtattctctagtgatgctccaaagcatttgcacccttgtggttcagtataaacttagaaattttaagaggttggtaaaaaaaggcctttcctcccatatggcctgagaggatacactgctgattcttctcaaaattaacagggctattgaacttcctctttctttagcatacattcccccacccccattgaaatagaaaaagggagacttaaacggtttttttgaattgagaaactgttttcctgagaatggaaagactttagtaaaaatgcgttgccttttgaaaatatactgggggttaggatctttccctttgggatcccattttccactctcgtctctgtctgattcagaaaacaattggggtggctttcaaagagtaggaggttttttggtctcagaagttctcactagtgctttgagagataaagagtgaagtattcttcatcagcagcatcttatcatccaccagacttcaccatgtccctctcgtggtgtgtaggccctgctgtgccacattcaaaggagtaatttccccaaggcagctggaactttacattgtgttggagtcttgtaccgcgaccggtcagaataaacatgaagcgttatcgtattgaaaatactcctttaccaaggaaatggaatggttaaaagatactgatatttctagaaaacgacatgcattccagattgtgtaactaagagaaatctaactaggcaatagagaaagcctgatctcagagggtggagaagaaggaaacaattaaaaagagaaaacaactaataggcccaagggaaaggtctctgttagaaacagttttctgtcaattcactttaatctgaattgaaatttttgtttgtgaaatttgtgtgatatatttctgtgcagaactgataatgctatcaagaaccactggaattctacaatgcgtcggaaggtcgaacaggaaggttatctgcaggagtcttcaaaagccagccagccagcagtggccacaagcttccagaagaacagtcatttgatgggttttgctcaggctccgcctacagctcaactccctgccactggccagcccactgttaacaacgactattcctattaccacatttctgaagcacaaaatgtaagccattcctgtgaatctagtttaatgagagagacggttagtttagctccaggtaataatcatactttgcagttgtatacttttcagagaactttcctgagcatgatcatggccagtcttcacctatgccctttgaagtagatagggtgtaggtatggtgtgttacccctggtttatgtctccagaaacgaggatggtaagcgctttgcccagggtgacacagctcatagagatagtgctgactagaaaacgagctgtccgattctaaattgctgcttcaaatctaatttgaaggcaacctttgaatgtaaatttacttaaggtactattgaagaataggggaatggagtcgcatttgtagatgtaatgtttttctcttccaaaacgaaaagggaaggtagtattatgtttaaagaggagggagtttgacactgaaattcagtggttatggtatgtttcattctggcagtgatcaggcagacatgtcttaatttattcactcagtaagtgtttaccttcttactctgagtcaggagcagaactttgtgacattcattttctgatgtctccttttagtctccgttggatcagtgtgatcccttccttatttctagatatttatatttagggaaagtgataatccataataggtggaaaaagaagaagaaagaggaaaaaaatcgagaaactttaatcttaagaataacaatattaaatgataaaacttacccaagaatagagagctcatatgcaaattatatgcaaaacatgttcataaatagtttttattcttctctgtccatggatttgactacaaactttacagaaaggtctcagatgaataaattatcataagaagtcctgtgctttttattaaaactcaaaattattccaagaaaaatatttttatttacaaacagctggtgccatcaatttttcccatagaaacaattttgaaacattcattaatgtattttataatatattttttattgtttttttcattgtgtttttctctaattaaggaacacttcccaaaatttaaagtgctcatcaacacctcccaaggatttttcaccatgttcctttagctgtttagccattttaaaggcctggctaaatttcacattaaaaggttttaaaaatttgtttagtgtattttatcagtaaagtgttttttttctctcagtcccagaacgaaacctcaggaagccaagtcccctgaagcatatgtagccctgaatgacgtggcctttgttttgtcttttgcatctaggtctccagtcatgttccataccctgtagcgttacatgtaaatatagtcaatgtccctcagccagctgccgcagccattcaggtaagatcattgatcattcactgttcaaagcaccacttttaagaaatgcttatttctttcatctaaacacatatttttacctgagcaactaaagtaaaaaggaaagggaacatggagaggagagcagagtcttggccagcaatctattaatcttgtcttctagaatgagtttgctctggaattttctgattctttgatgttgcaaggtgaaataactcatcagtcagcatccactctagcctgagatttcacatcactcccttaagtctgaaataacattcacaaagatttctgcaggagccaaatttggttggtggtgttgtcacagtgaggctctttgggctgtgcggcacctcatgaccatattggctacacccattgtatttgcagcttccaatcagacctttgtctttatttcccttactttgtaatttcagagacactataatgatgaagaccctgagaaggaaaagcgaataaaggaattagaattgctcctaatgtcaaccgagaatgagctaaaaggacagcaggtgctaccagtaagactgtcatcatgtgcttgaatgaggggatagcagctttgcctcagtttacctaagcgctcttctcttctaaatattacacttagcaaggctccatatatccattcagaatgtctcaacacaagaagttgcttgtagtaaaatgtagttggtatcagattatatgctgattaaattggaagcagtctttttgtaattgcaataaaaatgcaatatccacttatgattgttatcatcaatttttttcttcagaaggactataatcagtttaaagactagcaaagataaaatgaatgaaaatctgcattttctacagagctatgtatctatatggtaccattttggtttttttctattattttgttaacctatattttcatattttataatttcagacatgatttgatgcatgttcagtatatacatgtaaaaggttatatataaaacctcttcataaataacattagctgctctcttttatttgcatgtgtgaaagttatgtgggccattactgaattctgacatctttagcgactgggcagccaactgggatggctccttgtgctttgcaacatacatagttaaccaacaaagacaataaaagagaagtgatgcccagtaggtattcctaggggtaaatttattttttgttaaataataagatgtttatgtgcacatgctagttcgaccactttttaactttagttaatgttttgcaatttctcctgttgtgtggtcatactgtaaggagacttctgttaatttgctcttctgctttcctaaccacgttgatttggcagtgcttcactgcatcagtgcaatctgtagcattagaaagggatagaagcaacaagaatatgtgtagatcaaagcaactctaactcctgagtcctctagcttttttgtggttagaatgcaaataggacagttcttcagttcttcactcacagcaagcatttatggacctttggcaaattatattaaagtggaattttaagacaatatgataattatacttcgaaatatagacctatgatttgacatttttacaaaatgataacaaggtaatcatataggtacaacctctagcactattaaaaacagggtcttgcattgataaaaggaaacatcttgacaactgtttcataggcgtaagtttgggatgatgcaactactcttatctttcctccaacagcatctgataccttgtgcaacttcattgctaagttccttctccctttcttctgtcctctctttatttctacacccttcccccttccttagacacagaaccacacatgcagctaccccgggtggcacagcaccaccattgccgaccacaccagacctcatggagacagtgcacctgtttcctgtttgggagaacaccactccactccatctctgccagcggatcctggctccctacctgaagaaagcgcctcgccagcaaggtgcatgatcgtccaccagggcaccattctggataatgttaagaacctcttagaatttgcagaaacactccaatttatagattctgtaagtagaattgtgaagggaagttaacgattctggaagataaattagaaaacccatttcttaaatcattgccattttctatagccaagctgttattagcatatattaatgtaaaggtagaagtatgattttcatcttcatgaatatgttttttcaaagatctgatttcatagcctaccgagagagacaaaagtatttataaatacttacaaaataggacttttgaaggaagagttttttttcacattttcacacttttccttcaaaagtcatatttttaaaaatagtcagattgatgacttataaagcagagcttggattatgggaacggaatggtgtttgagttacttttaacttttttttttctttgcttacttcatggtgcttctctagaattttgtcttgcttttgaacagcacattaatgatttggcttactcagagctgaaagcaatcttttagtgtatttgaagtaataatcagctccttggtcatacctggctctttccacaaaatggtgattattgattactggtcccattgcttcactgagatgaatcatctttcgtgaaacaaatttgtattcagcacctcctcagcgaacacttggttcctttcccagttgattaaaaatcatttattgcacactcattggttaggagatgaccattgccgtaatatgccatctagaaaaggtcttcattttgctttccattgcatgcagatgtagagtgtcgggaggtccctgcagcacatcagagggccagccttgaggcagcccactagaccctgctctactgcagtataatagagcaactgctcatcttgaagctgttgctcaagaagccaaaccaacgggcctagtgtttgctttgcgttgagcatctctctctcagtgctgtttcaggtgatgatggcacacactatctcaaagttctgtgcctcccacattgtttcaggattcttcatcatggtgtgatctcagcagttttgaattctttgaagaagcagatttttcacctagccaacatcacacaggcaaagccctacagcttcagcaaagagagggcaatgggactaaacctgcaggagaacctagcccaagggtgaacaaacgtatgttgagtgagagttcacttgacccacccaaggtcttacctcctgcaaggcacagcacaattccactggtcatccttcgaaaaaaacggggccaggccagccccttagccactggagactgtagctccttcatatttgctgacgtcagcagttcaactcccaagcgttcccctgtcaaaagcctacccttctctccctcgcaggtagaacacaatttctgcacagctgttactcattttcaacagacacctgagccttaataatctagaaactaatacttcggaacaaatgactaattactgctgcctttgctgatttcattctgtcgttgaatctagctgttgctaagttatactgcctcccaaagtttaggctgtctgcaggctaactgttgattttggcatcattctctctcttttacttttgggtggttttgaaagatagttgcatgaaacgtacttttatttccttcaacactagagtttaacatttctgtccctttctttttctcccatctgatccctccctttaaaattgttaacatcatttcttcctcgttgttcatttattcttatgcgattcactgacccaggggaggagggaaccaaattgtgtttatataacatttgggttgcaactagaaaatttaaagctagaaaatttaaaggttccaattcatctttaaatggaagagtttgggaagaggatgagaaacaaatgcttaaggaaaagaacatatttttaatttcagtttctcaacattggctcttttgagttgtgccatactattttactagtgcagtttttgccaaggaatatttttatttcatacagcttttttaaggcatgaaaatcacaattcttatcagagatttgtgttcctaaattatttaaataattaaattaatagataatttggcactttaaaacatttttccaattgtatctgttgaatttgttttaagaacagatttaggtatgatataggtatatacatttgggaaacactgaatcaaacaaagttacaagtaggtttcttagctgggcatagtggcatgggcctgtagtcctagctactggggaagctaaggcaagaggattgcttaagcacaggagttcaagttcagcctggtgaacatagcgagatcccatttctttaaaaactttcttttttttaactgcaggccttctcagagttattaatatgccgttgtgccttgtgaatttccaggaggagattatgatatgttgtgtttcccaaatttattttaccttggaattgtttaaggaacacctagttttttcccagaactttagtgttctgagagacacagtttattattcaagaattttccatataatgtaaaccttctgtaatactaattttggttcatagattattaaagagaaaaaacaaagtatgaaaggaaactattaattattaactattattttccccaaaatcactaaagccttttaaatgttaataaagaacacatctcattctctttaatgacaagtgtcatttattgagagtattttctcacagttttgcaagtttttcagcaatgaccctaaattttatttcttggaaaccacacccaaatcctgggtgctcaattgaaataaaacaataccctagtcaatataacatgcttgttagcatctttattatttaatatagtgggtcaggaaaacattcttgttatctaggtgtgatttttaaattggggagaataaagaattaccatctaatctaagtattttttctttctctccatatttagttcttaaacacttccagtaaccatgaaaactcagacttggaaatgccttctttaacttccacccccctcattggtcacaaattgactgttacaacaccatttcatagagaccagactgtgaaaactcaaaaggaaaatactgtgtaagtctttggttcaggaataaaatgatttatcttatttacttatatttaattaatggaatatagttcccagatgtctgatccacttgtatgtgcataattttactgaccatttatatataatcatgtctattcccacattgaatatatctgtcctgggcatattacaactacctacaggtagaagatgggaagataaactagattccttttgtaacttactccaaaatttcctatatatgcacaagtagttttcataaaacttttccattcggtttgtttgttccctccataaggccttcttatgaaagccagattttcaacctcctttcctctctaattgtaagcttcagaataagaacgagtatggtttcttacctagtttgtatttttatttaattttatttgtttattatttatttatttttagtttgtattttttaatcttattttttctttttgaatttatgtgtagataggacctcttctgacatccccaggaatattatatgattagaagccaagggatgagtaagcagtcatttttattcaataaagccttaatcaattcagagaaatggtagagaaagtgtgaattatcagaaaccttgaaaagaaatgcactgttatttcgaagtacaaaaagtaaattttaaaagtttaacatgttttgtagtatgggctctgttttcatgaatagggaaacctgatttgtaaatgacatcaggtcttcttgatgctcatagtcttatacagatcataggcactacatgtgtcttcagagccattaaggaaagatgttaaatcatttaatgcttttagtcttcgaggtataatattttgaaatatttgaaaatatgtgatatgcatattctctttttcttaacgaataacgtgattaatcagcacaccccaattccatatccggaacagagtttattgtattcagtggaaaaatgttaaatgtaacaggtaaagccatgtagggacatttattcttttgtattgagccactgcttgttttctttttaaagttttagaaccccagctatcaaaaggtcaatcttagaaagctctccaagaactcctacaccattcaaacatgcacttgcagctcaagaaattaaatacggtcccctgaagatgctagtaagttctagaaaagtttttggatttcattggtttattagtcccattaggagttctctctgatgcaaaaatacccactcttccgtttagcctcagacaccctctcatctagtagaagatctgcaggatgtgatcaaacaggaatctgatgaatctggaattgttgctgagtttcaagaaaatggaccacccttactgaagaaaatcaaacaagaggtaaacacgcaaccctttggaagcaacaagctgagaatcctgccccctttattccttgtgtgcagcttgatgtgtctgccattggcactgtgcaacaccacgacttttcgtgcaagattttcatacaaggtgcagcgaaaaggtactgccagactgtaggcatcatcaacctttcctttgggaagccaagccatctctatctacttcatgtttggacagaaaacatactagagagtatcaagaaaagggagggaaagaggtttttaatgtacttttaaacattactgattatataaagttgatatttcatttttagatgtgaagaattggaatttaaattaaaataatagtatctttaattaattgtattaaaaaaagggaggctgggcgcggtggctcatacctgtaatcccagcactttgggaggctgaggtgggcagatcacaaggtcaggagttcgagatcatcctggctaacatggtgaaaccccgtatccactaaaaatacaaaaaaattagctgggtttggtgcgggcgcctgtagtcccagctactcaggagtctgaagcaggattatggtgtgaacccgggaggcagatcttgcagtgagccaagatcgtaccactgcactccagcctgggagacagcaagactccgtctcaaaaaaaataaaaattaaaattaaaaaagagaatctaacctgcaaggaacaaagttttagcttgttggcaacagctgttttccaccaggttagatacaagtgcttcttgaatttattttcatgtaaagataagtatttttttttatagctaaaaatctgatttgattatttagtaatggagaattttaccagaatgtgattaaaaaccagtcttttgtcaccaaaagatcttttatgtcaccaaaataaaatccttgacggatacaacactactaggtgtatcattaaaatatattcttaatagaataaacacctagaatcagaacattggttgaaaacgtaggagctttacaggggcagtaaatttggagctagtcacatttcaaatttgccatcagtgtttctttgttgaatccagaagatagagcaaattgagctgatagtgtaagttagcaacatagttttataaaagtatttgagggactggccagaaatatactcctgactgtacatgtttcataggaagttctagaaacaacaaagcactttctatatgcttttaggtggaatctccaactgataaatcaggaaacttcttctgctcacaccactgggaaggggacagtctgaatacccaactgttcacgcagacctcgcctgtggcagatgcaccggtaagtacgtgtgcaccagcccccaagttgttatgtgacactggtgcctcatgaaatcctgtgtgtggcatagggctgctgcggtttcagcactccctctttaacacatcttatttctaaatgttctcctgcacatgatttttaaaaaatgattattaatgtagagtataaagttgagattttttcatgtattagaaacattgcagactttttcattatttgttttctcattatttgagtgccttggccatttaaaaaaatctacatggatataaaaactatgttcatttatatattttcctttatttgtcttctaaataatattgtcttcttgttaagttgtctcttgtttggtttgtgtagcatctcatatggtatcaaccacgttgtctatagtagatgcccagtattgtacccaattgctttgggttactaccaccatttttaaagtttataatttgtgaagggttgtccttatgtcttaaggaaaatcagagctaataacagctgctaagatttatttagtaggtactaagtggtaagtactgctctaggggctttcgatgaattgattcagttaattctcacaattatcctgtaaggttggtattatttttattaatttttattttttttgagacggagtttcgctcttgttgcccagactggagtgcaatggcacgatttcggctcactgcaacctctgcctcccgggttcaagcgattctcctgcctcagtctcccgagaagctgggattacaggcacccgccaccacgcccagctaattttgaatttttagtagagacggggtttctccatgttggtcaggctggtcttgaactcctgacctcaggtgatctacccgcctcggcctcccaaagtgctaggattacaggcgtgagccaccgcgcccggccaggtgggtattattatcatttctattatgtcaactggaaaacagaggcacaaagaggcttagtcatttgctcaagattgtatacctaataagggatggtgctgggttggaactcagaaggtcttgttctaaattccctacttttcaccattttttgccaataatttatagctctaaaatattgatagttctgtaccaatatatgaaataaagtgttctctccccagaacttagtaaatcttctattttgaaaggcatgtatttattaattcatttagcagatgttttttgagtgcctaacacatgcctagaactctgggatcccaaaggagctttgtgttgtggtgatgtttgccacaatgggattaaggttcagacatagttgatttctccttttagctcatagtggggagaatttatggcagatgactgcatttttttatgctaatgtgtatcatctcatagtaatctactctccacagtgttagaaaaatgtggctctcatattatccaacctcatttaaatttcaaattattctcttccctttagaatattcttacaagctccgttttaatggcaccagcatcagaagatgaagacaatgttctcaaagcatttacagtacctaaaaacaggtccctggcgagccccttgcaggtaattactattccaacattggtattttaaaattcattcactgaaaaactgtcatctttggtggtggtggtggtggtggtgatggtagtgctggtggtctgtttttcgttttcaacattttagacataggggagtaatgcttttatacaattcttgatgtctagaaaaatccaataattcctttttgctactcatatgagacatgctagaaatttttatcagtgcagattccccaaagcatgatgaaatgaaacatttcttactgtgactgagactaagatgtattacacgtgtgtcactatcttcttctgccctcaaatgttttataaaaatatatcaatatagtttactttatgttccaaattttttattttttatgctgtatccctaggcaaccaaagctcagagactgttccaattttaaatgaagtctgaaattagtcagacagaaaataattgcaatgtatttgactgtcagaataagaaagtcaactgtcaatgttgtgaggccgatctgaagttgaccatctgctgtcaggttttaatatcaaaagagatttcccttgtaaccctaaagtgggtgtgtgttgatgaaatataaccaattccaaattaatcctgagccaaatgtaaataagaatgcaaattttgcttccctaaattatttaaagcagtttctgacattaaatagcccaatacccagccacctgcagagccctctcctccatccccctgtgccatgcagagggaaacttcataaccctagaggaagtgaagagcctggattcagaagctgaaggtcatatttcttgctgtaagttaaatggcacgatcatcggacagcagcctttgagtctgcccattaccttaaagggatttcccattcttgtgatagtttctccttccaaattgtgagaatctgaaaacttgcccggtaagtatttgtgatgcttagtttttcagggttttttgttgatgttgctttgttttttgaaacagggtcttacccggtggcccaggctggagtgtagtggggtgatctcggctcactgcaacctccgcctcccagattcaagtgattcttatgcctcagcctcccaattagctggaattacaggtgtgagccaccggcaacccagccgtttttttgtatttttggatagagacaaggttttgccatgttggccaggcaggtctcgaattcctggtttcaagtgatctgcccacctcggcctcctacagtgctgggattacaggtgtgagctaccgcacctagccagtgcgtagtattattgtaaaataaggattgcaagcacattttgtttaattaaatcagattgcttccttcctggcctctctctgacagcaattgttttggtaaaatggctgtggactggaatgtgagacagggagtcagtatttatggggaatctggacaagttcctgcgtcagtgaggctggagttggccccgtgtggagaagactcagaataccacaaagaggccagacgcagtggctcatgcctgtaatcccagcactttgggaggccaaggcgggtggataacttgaggtcaggagtttgagaccagcctggccaacacggtgaaaccccatctctactaatcccagctactcgggaggctgagacaggaggatcgcttgaacccaggaggcagaggctgcagtgagccgagatcatgacactgcactccagcctgggtgacagaatgagactccatctcaaaaaaaagaatatcacaaataattgggagatgaggaagagaatgaactccacccagacataagaggaacccagaaagggagttacaaagatttcaaggcaaagggcagccatttcaaaattttcctgaaagctgttcttaggtccagaagaaaagcttttgcttttttttttttttttaattattcccacctaagttacttggctcttggtttctagagaacagaattcaactactgctattcgtgttttaattaagttagattaagttttgcatatattttctaacctagtctggggccaacttgtatttgtagtagtacagaaaaagtctgttctaaatttcaaaaagccaacacatcaatatacttggggacaattaccattacataagttgaaacccatagttcagtattgagctttatcagtatatttgtattttatttaatggaaatattggttatctttgaaactcaaaattaagttatagctctattttattaatctgtattctcctgtctatcagtgagtcatattggcactttatgaattctaacatctgtacactgagattaagttgtgtatggtgaaggtaatatttgtcaattctatcaaactgaataattgagacttgaaagttaattttagagtcaatactcctgtctaaaccatatagtttactggtttacactgaccagatatattttaataatctgctataaagccaggctcagtggctcatgcctgtaatcacaatactttgggaagccaagactggaggatagcttgagaccaggaatttgagaccagcctgggcaacatagtgagactcagtctctattaaaaaataattagctgggctgggcgtggtggctcacgctgtaatcccagcacttttggaggccgaggtgggcggatcacgaggtcaggagatcgagaccatcctggctaacacggtgaaaccccgtctctactaaaaatacaaaaaaattagccgggcgtagtggcgggcacctgtagtcccagctacttgggaggctgaggcaggagaatggcatgaacccaggaggcggagcttgcagtgagctgagatagcgccactacactccggcctgggtgactgagcgagactccatctcaaaaaaaaaaaaaaaaaaaaaaaaataataataataataataattagctgggtgtagtggtacatacctgtaatcctagctacttgggaggctagggcaggaggatcccttaagcccaggagttcaaggttacagtgagctatgattatacccctgcactctagcctgggagacaagaccaagaccttgtctctaaaaaaaattttttaaggccagccgtggtggctcacacctgtaatcccagcactttgggaggcagaggcgggtggatcacaaggtcaggagtttgagaccaacctggccaacatggtgaaactctgtctttactaaaaatacaaaaaatagccaggcgtggtggtgcgcacatgtaatcccagctacttgggaggctgcggcaggagaattgcttgaacccaggaggtgaaagttgcagtgagcccagatcgtgccattgaactccagcctaggcaatagagtgagactctatctcaaacaaacaaacaaaaatttaatctgctataatagatactaatttattttaagaaatacttagtgaatgttgttctacatacttgccaattgggaggaaaaaagaaatattcactaaatgaatgaatgttatacaccaagtatctccttcattttatgtcatggagttctagcttctgatatcacagaaatatgtgatttctaaaatgtttcagactattgtgataagtattggaaaatgcatcaagtgactctaaatatttaaacatacatcacctatatttcatataatcctgattcaataatatttctatagattttttatgcaatttggtaattttgtttgtttgaaacacagtgctatttcatatatttctattgataatccaatttgacctaattaggcatatttctcacacatggtattattgaacatattgcacatttattaaatgatatgtattttacttaagagtactttatataatctataatttttgtaatttgtacttataataaatcaaatattaagtgggattttagccaaaccatctagacatttttgtcataatgtttttattaaaacagcaaaataggagtttcaaaatattttaaaatttgaatacttctaaaatgtaaaatgtttgcaactggtgtaatgcagttgattgtctatccctctaaactgtctaaataacttaggttcaagaacagtttattgaagaacataggaactgcgcaattctgtgttttatcatttcagttttaatcaccccggcttgattatggcaacaacattttagacaagcaattattactatttttgaggcccatatactgggccattatggttttgcttctaacgtacatataaatgcacatgcaatatatataaattatgtttgctgttttaaaattagaaatgccgagaagctatgtgtttgacattttattataaattttgtacacacatagatgtatggaaaatatactatgttctagagtcaacaattgttatcattttgccatatttacctcatctctttttttttttttttgagatgaaatctcattctgttgcccaggctggggtgcagtgacgcaatctcagctcactgtaacctctgcctcccaggttcaagcaattctcctgcctcagtcccctgagtagctgggactacagatatctgcctggctaatttttgtatttttagtagagatagggtttctccatgttggctaggctggtctcgaactgctgacctcaagtgatccacctgcctcggcctcccaaagtgctgggattatagatgtgagccaccagcctgggctacctcatctcttttttatgaagtttttatttttattttttaattttttttttaatttttttttttttttgagacagcgtcttgttctgtcacccaggctggagtgcagtggcatgatctcggctcactgcaacctccacctcttgggttcaagtgattcttctgccttagcctctcgagtagctgggactacaggcgcttgtcaccatgctagctaatttttggtatttttagtagggacggggtttcaccgtgttagccaggatggtctcaatctcctgacctcatgatcggcccgccttggcctaccaaagtgctgggattacagacatgagccactgcacccggccagttttttattttttatttttttgagacaaggccttgctctgtcacccaggctggagtgcagtggcaagatcatggctcactgcagcctacctcctggactcaagcaatcctcctccctcagcctcctgagtagctgggactataggcacatgccaccatgcccagctagtttttttttttttttttagagatggggtctccctgtgttgcccagcctggcctcaaactcctgggctcaagcaatccttctgccttgacctcccaaagtgctgggattacaggcaggagccaccctgcccagcctgaagtattttaaagtaaattccaactaatataacattttattctcatgtacttccagcatgtgtctctaaaaatagacatttttatatataacctaataccatcattacatatttaacaataattctttaatcttctcattctcaggtatatttaaattttcccattaatccaaaaaagaatcaaaattgaaacaatttcacacattgcatttggttaagcctcttaaatctcttttactctctagtccagtgctgtctaatagaacttctacagtgatgtgaaggaaatatctaatatgctgctatccactatgatagccagtggcttttgagcacttgaaatatggcaagtgctgctgaggagcagaattttcaatttgaattaatttaagttgctttaatttaatagccacatttccttactctcttactggaatcagccatttccccatggtgctctgaatcctcttagtgagaaatggtacatagacaccaaaatcagggtgctaagtctgtccattgttatgtggtttgtcattgagatacaaataattttttttgttttgttttgagacagagtctcactctgtcacccaggctgcagtgcagtggtacaatcttggcttactgcaacctccacctccttggtccaagctattctcctgcctcagtttcccaagtagttgggattacaggcacccaccaccacactcagctaattttcgtatttttagtagagacatggtttcaccatgttggccaggccaggctcaaactcccaacctcaggtgatctgcctgtctcagcctcccaaagtgctaggattacaggcgtgagctgccacacctagccaagactcagtgaattttaataatccagagctctccatgtatcccctaatctataatctacagtgcttaaatagaggcttttataagccattatgtacactcatgttatgtttgtttttttaattacttagtctttttccaaaaggaatttgcaacagctacataatcttataattgttatgtttcttttatattttcacagttgttttaattttaaattgtaaaagcaaacaggatattcttataataaaaatgttctgagatgtttttcatatttgtgtctttcatgtggctcagaatatatgagattttcatgtcatatcattgtcagtattcagccttttctccacattgtgtggggtagaggatagagtctagaagcttataaaatggtcacaaatgaggaagtagagaaaacattcagcctagaaagcgtgcatttgtggtatgaaaggcactgtggaatgctgctggattctgcccttcagtagttacccgagagagaccgaggcagacgcatagctccctcctcagcaaggagaaaagagttgcctgctttcctcagcgtgctttccatttcctttgttttgaaaaaagcacattatgctaatcaactttccttaaggtagacatttttattggtagatcaaaaaccgtgctttaagttataagccttctgaacttctgtatttttctcttaaattataatttccttttattcctatttaaaacccaagtgtaaaagatgtgttcataggctttctactcactcacttgcctgtttttcgtaaccacagaatgacagccttaaattttaatttcctgacttggcttgcccatggcctgacttttttaaaacaaggagtttaagttaaagaaatttctccagccattattatttaaacacatttacacagtatcaaagaatttaaaaatgttgctagcagttgatactcccctcagctttctgttcagcgtgttttagattgctcctattttgttatttgtctatgaacttttatatttttcaaaaaaataaggcaagccctttttgcctgataggcactgctgagcagtataataaacaagcatgggggcaacagaacctgggttccaggctagactccaccgttttcaaacggcatgactttaattcatcaagtgaacacaattaagcaaagtataagtttgggaccatggaatatccttcactcatcacacaggttactgtgaagatcaaatggatataatattgctttcaagatggcggcacacttgccactatacacaggtgatattattaggcagagtcgccacatagtccctgtccttgaaatgcaggcaaggagccctcaccaaaggccagggtggttttttgtttttcgggtttttgtttgtttttttcattgtggtatattatttcctctggcatgctattccctgtcccactcttacagaactgtgtcagtgggtcaccaaaagagagagctgattcaactgattccttgaaataaaggtagtcagacctcgcggtatgatggagatgaagcaactgatttactggttttctctatttttctgctgttcgtgttgtcatttaaacagacatggaaaccgtctgcacacgacagagatctttccgagcctttttcatctagtgtgctgtgctgacccgctcccctggatgcctgcacactcatttggttctcccttttggtcacttttttccacttaccctggcagaaattcacgtggctgtcagtagtaattcagtgacctgctttcaaaaaatgttataaattaagcagcttttctgtgtatagcttttgggttgaactgagaagggctaagtgaagggagaagctatgttgagctcagagtcagaatgccctgccccagacattttgagatgtgaatttttcatttgttttgtttggtgacacttagagagaataaacattctgagataaaaatcttccttgggcaggccagcaaagatagaattgctttagagcaatttggcacttggtcttaatcttaatagtttggaactcatatgtgactaaggaaaaggatattgcaaaaagttgtgccaccctaggctatatgatataaacttagaaagtctatcaacgtgaaaggtgaagagacctctagagacatcggggacaaactccaaatttgggaaaggtccatccacatttgcaattgttagttaggcttgggaagtggagtcattggtggatgaggcaacttccaatcaccatctcgatttttatttccctaacttttaagattattttctatagaaaatcagtagtgctgaagttggagtcatttaattgatttgtgccaacctagggaagcatttactctcgagaaaagtttggtaaccattaatcttaccttagcaacatttcagtttaagcttatctctgactttccaaagacaactaaagatttctacagtctctcttataactgatccattttttcaaaagatgtccctttgggaaggaattctcatttttagaattttagtccagaggaagtatttttttttcagataggtgaaataggataagcagaaaattcttattttttactgttttagataccattgatgccatgcttattttaaaacaaaacacaataaaaacatgataccatctgatgagttgctttggttttactttttttttttttttttttttttttttttttagtttatacaagtttcttattaggtcagcaaattgtaaaacacataatttgccaaggcttttgaagccagcagatactgggtgaagttgctgtatgaatataataataagaaccgtttttgttcagcttgatgaaaaaactattcatgttctaaatgaaaatgtgaagatcatctaattctgacagaaaaccacctgtggacatggtcttgtttctttttatttcttctgttttctacaaaagatggcaatatttatttaaagtgctttaacaggatatcccagttaaagctttgacagactgtttatagttcacttctgcccaggggcaattaaaggcacattacaggataagcgagatgactccccggccacaggaggaggatgtgtgggtaggattattaatgttgaaatgaattatgatagagtgacatgtctgcaagagcaccatgggttagtaacttaacaagaattcatatgcagaaacccataattctcagcagttctttagggtaaatgaaactaaagtttagggagagagaacaaggagaatttgcaaagatatgtatgacagtatttaaaaatgttcttccagcacaaagacattaatcttcctttgtcaaaataattctttctgcatgaaaagttggcatggggctcccaggcttcaggtaagatgggagaaagggagcgtttctttttttttgtaccaaagtactcaatcttctgatcttccttgactttcacgacataggcatatgtctactctgaccagtttgtttcatttattgtggtaagatgtgcttgtcttgtgctttcctggtgcagaaaaggagctgcctcgctcatgcttggtggcctttttgttcctacacacagtggttctcgtacatggtggctaccacatcctggtgtttgtctatactgggagaatcaggcgttccaagtcatcttggctgccctagctctgagcttcaggggatatatgactcagaaatgctatgctttctggaatttggatatttcatttttatttgtttcttggtaaattctcttttgacttaggagaagctaactatttggaaaggtctctcagaactctaattacaaatatatggtaccttctttatattgatctcatttttaaatacctagtcctggaggaagagctaaatatgaatacagtgatgagctgtgtaggggatctcacaggaacacagtcagatttcaagttgaaaatagattcagttgataatacttagtactagattctcctgaatcgactttgggaattctgagtcaacctaaggactatattacaaaggatcagaccttgacttttaggccaggtgtagtggctcatgcctgtaatcccagcactttaggaagccaaggcaagtggatcacttcagtccaggaggttgagaccagcctgtgcaacacagcgagaccctgtctctaccaaaaatacaaaaattagccaggtgtagtgtagcacctgcctgtagtctgagctactgaggaggctgaggttggagaatcaactttaaccccggatatggaggctgcagtgagctgtgatcatgccagcctgggcaaggagcaagaccctctctcaaaaacaaaaacaaaaaagacacagaacttgacttttaacaggaggcatagtaatagcaagcataagattgttttaacatagcatttaagataatttacgcatttagaaaattaattctggctggttgtagtagcttatccttaatcctaaccctatgagaggccaaggcaggaagatcacctgaggccaggagtttgagaccagcctaggcaacatagcgagacccctgctctctacaaaaaattttttttaaaaaacatagctgggcatggtgacacactcctgtagtcccagctactcaggaggctgaggcgggaggcttgcttgaggccaggagtttgagggagctgtgatcacgcccctgcactccagcctgggcaacagaatgaggccctatatctaaaaaaaagaaaaatggacaagaaaattctatactgattgaagcccagctaaatagaaaaaaaaaaattctaataggccattttaaagactttggaaaaattcttagctagagtaaaacagaagcaatcctttctttcctggttctcacatctccattctcaccttcattccccttcccctccatttgtttcaagtatttttcttttctatgtgtgtctttatgtaaatttaaatttacctacaagatattatgatattaagatatttcattctgcttcctgttttgtcacttgttctttaagatccaagtccttggctccatgtgcatctaatccttgccataagccctgcatcgtacttcatattcaccatattgaactattcaccctcaagtagtcactattaaatgtcacactgttgtagcgactacaaatgcaagctcagtaactgaaaagataacattaaattttgttttttaattggtttcctgtgtcaatttcatgtttcgggaatttgtatggacagatagacaccagagagatatgcgtatttcacctgcatgcttgaggctagagaaacatgatttattcagaactatttcaaatactgtaactaacctggtaattttgtttaggaaaacattaaattcggaatagaaggcaattcagaatacctgtctgttatctttgtcttgtcatttttgagatactcagttcctggaaaatattatgataatccatcttgctatgtagtatttcaagttatatgttgagcctctgagcttgcagagtgaacatttctattcatagacagtgctgttgacatcagtggggagatggcacaagctttgtgccctaggaaagtttaaaagctagaacattacactgcaaaccctatgtcaggaaactttgttgcagcaactaggcaaggaaaccctaccactgtacccataccttgttttagtagaattatgtttctttgctaagaagtctggtgactctcacaccccatctcagcactttcctggattccaaggccctggtgccctgagcacacaacttcccaggttccttttattgttcctgataagaactcgaattagaggcagcgtctggtactcaccaggggtgtggtcccatgggtgacattcttgctccatcatttcttacccgggtaaccttgagtatggcgcctaaatcctctcttcctttcaaattgcctggtctgtaaaatggatgcagtgaatggtagctatgccacaggtgttttgtgtgagaattaaatgagaggagttatatcaataacacttagaggcatgcggtgcctatagtgagggcttgttttatgttgtcgtttaaccctttctttctcagccctcccccactccacatcccctcccactggcaatgtacaaattgcagcttcctgcctctttcctgctatctcgctccctggatgacatccctgcgtttccacctctctctcccctaatcttagctgttttcaccctttcccctaatcttagctgttttcaccctttccccacagcattgccttgacagttcctcagtgtcccatcccctcttcccatggacaacaccacaaacctgcgcacacggcctgttattattcctcctgtttcacctgtgtccattctgtctcataaaggacactgtaggctctgaacagctaaggcctttcttattcttttgtcccatggaaaataatccctccagatagcaataccaggaatagtgccttttctaacccactggtttccttttgagcttacagccaccaaatcttatatctgtttgtttctgttcccctctctgcattgactgctagagagatcagagtcaagcaggaggttacatctagctggggcactgtgctttatgctggtgtttcgtgtgcaaatctcataccatcttcatgttacagttgttccttagtgtccatgggggatttgtttcagaacccgcaaggacaccaaagtccagggatgctcaagtccctgatataaaatagcattgtgtttgcatataatctacacacatcttaccatataattttttttattatttgtatacattcgtggggtacaagtgtaattttgttacatggatgtattgcatagtggtcaaagtcgaggctgtgagtgtatttatcgttggaataatgtacattgtacccgttcattcctgtatactttaagtcatctctagattacttataatagctaatacaatgtaaatgctatggaaatagttgttatattgttaggggataatgacaaggaaaacacctatacatgttcaatacacagcaattatttttttctgaatatttttgatctgccattgattgaatctatggatgtggaacccacagatatgggacccacagatgcagagggccaactgtgtttattttttccaaatttgtttccctgttatgactcttctttatacacatttttaaactctgttgtcttgtatttgttttctgatcatcttacgtccttttggaaaccaagtggggcataaatagtacatgtttgcatttgaggcaacacagaggcatcgcaggagctggagacagcaaagttcaaagccagtccaccacttacctacagagtggccttgggcaagttacctccattttctgtctccattctcgagcctgtctagagagagaatgaacctgcctcccgaggtgatggtgctgttttaatgaaataatgcatgtgaaatgtgaagtgccactgtccctggcatggagatgctgtccttagatattaggtccatcttgtatcttctagtgtatctttaaaaattaaactatactggcttcatgcctgtaatctcagcactttgggaggccaagaccggcagatcacttgagtccaggagttcaagaccaacctgggcaacatggtgaaaccctgtctctacagaaaatacaaaaattagtggggcttggtggcacgtgcctgtagtcccagctgcttgggtagctgaggtaggaggatcacttgagcccaggaggctgaggctacagtgagctgtgattgcaccaataccgatcagcctggtatgacagagcatgactctgtctcaaaaaaaaaaggaaaaaaattaaactatactgataaatatttctaaagtaattgatgaaaacatatatatgacacttagcaggtgttgatcaattccagtgcgtgcatgagctgctttgcactgtggctacagcactcagcagtttgcttagtgagtagatggccatagctcactttaggtatctggagaataatgctcattcctgtctccagctttgtaaaattgcctaatagacggaaggcattaaaatatgaagatgggattatatcttatgaagctgcttggaatgggttttccctcttaacaaataatttctgatcatccatatcccttaagaacaccggatttctgggggccagggaggtaagattctatctgacaaagccttcctggtgtcaaccacttgccatctgttggtcagtgctggccctgctgggtctatagaatgagcttctttgtctgacgctcctgttgccatccctttctccatcagccttgtagcagtacctgggaacctgcatcctgtggaaagatggaggagcagatgacatcttccagtcaagctcgtaaatacgtgaatgcattctcagcccggacgctggtcatgtgagacatttccagaaaagcattatggttttcagaacacttcaagttgacttgggatatatcattcctcaacatgaaacttttcatgaatgggagaagaacctatttttgttgtggtacaacagttgagagcagcaccaagtgcatttagttgaatgaagtcttcttggatttcacccaactaaaaggatttttaaaaataaataacagtcttacctaaattattaggtaatgaattgtagccagttgttaatatcttaatgcagatttttttaaaaaaaaacataaaatgatttatctgtattttaaaggatccaacagatcagtattttttcctgtgatgggttttttgaaatttgacacattaaaaggtactccagtatttcacttttctcgatcactaaacatatgcatatatttttaaaaatcagtaaaagcattactctaagtgtagacttaataccatgtgacatttaatccagattgtaaatgctcatttatggttaatgacattgaaggtacatttattgtaccaaaccattttatgagttttctgttagcttgctttaaaaattattactgtaagaaatagttttataaaaaattatatttttattcagtaatttaattttgtaaatgccaaatgaaaaacgttttttgctgctatggtcttagcctgtagacatgctgctagtatcagaggggcagtagagcttggacagaaagaaaagaaacttggtgttaggtaattgactatgcactagtatttcagactttttaattttatatatatatacattttttttccttctgcaatacatttgaaaacttgtttgggagactctgcattttttattgtggtttttttgttattgttggtttatacaagcatgcgttgcacttcttttttgggagatgtgtgttgttgatgttctatgttttgttttgagtgtagcctgactgttttataatttgggagttctgcatttgatccgcatcccctgtggtttctaagtgtatggtctcagaactgttgcatggatcctgtgtttgcaactggggagacagaaactgtggttgatagccagtcactgccttaagaacatttgatgcaagatggccagcactgaacttttgagatatgacggtgtacttactgccttgtagcaaaataaagatgtgcccttattttacctacttttgttttctctcttatttgtcactatggacaacagttacactttaaagaaaatggagcagactcaaagcactttcctctaataattgcacaccatatgcacttcgtgtgaagaagccaggaatcattacaatggagaagaaagaacaagcaaactgagttaaatagttcacaaacaatcacatggacaatggggaggaatcttccagaatgcatcagtcagggtctagcggcatttgagtgcggatgctgtaaggggaattcgttcacaaatgtactgataccacagatgtgggcaggggctaggagagcaacagggtgcagcctgaaggcacctggaaggccgcctggagggggacagtcaggaaagcaggagcccttgagaggagcactagcctttgatgagaccactgccatcgaaggagacctcacagggagggagccaagggtaaaccctaactttgtttccccatttctcctatctctgcctaggggtcctcactggcagaaccaaccagaagctggaggacaagggagctc

SEQ ID NO: 31880 - DNA, 3976 bp, Homo Sapiens
gaattccgggcccccggccgtccctcttaaggctcttcctccgctccgccagtgtccggccgcgggccggccttagtgactggggcggcgggccccggggccgcggcgtggggcgggcaggcggacgccggccgcgggctgctttcgtcggctcccaagctctcccggagcgagcagccgcccgcgagccgccgcggagcctcctcgcccgctcccgccggcgagcaagatgatgtgcgaggtgatgccgaccatcagcgaagcagaaggcccccctggaggaggtggaggccatggttccggctccccttcacagccagatgcagattcacattttgaacagttgatggtctccatgctagaagaaagggaccgccttcttgatacactgagagagactcaagaaacgctggccttaacccaggggaagttacacgaggttggtcatgaaagagattccttgcagagacagctcaacacggcacttccacaggagttcgcagcacttactaaagaactcaatgtatgcagggaacagctccttgaaagggaagaagaaattgctgaactgaaagcagaaaggaataacaccaggctgctgttagagcatttggaatgccttgtctccaggcatgagcggtctcttaggatgaccgtggtgaagagacaagcgcagtctccagcaggcgtgtccagcgaagtggaagtgctgaaagcactgaagtccttatttgaacaccacaaagctctggatgaaaaggtgagagagcgattacgagtagcacttgaaagatgtagtttgttagaagaggaattaggtgccacacacaaagagctaatgattcttaaagaacagaataatcagaaaaaaactctaacagatggagtgctggacataaaccatgaacaagaaaatacaccaagcacgagtggaaagagatcttctgatggttctttaagccacgaggaagaccttgctaaagtaattgagctccaagaaatcataagtaagcagtcaagggaacagagccaaatgaaagaacgcctggcttccctttccagtcatgtgacagaactggaagaggatctggacacggctagaaaagatctcatcaaatctgaagaaatgaacacaaaattgcaacgagatgtccgtgaagccatggcccaaaaggaagatatggaagagagaatcactactcttgaaaaacgctacctcgctgcacagcgtgaagccacatctgtgcatgacctcaatgataaacttgaaaatgaaattgcaaataaagattctatgcatcgacagactgaagataaaaaccgccagttacaggagcgcttggaattggcagagcaaaagctgcaacagacactgaggaaggcagagacgctcccggaggtggaggcggagctggcccagagggtggcagcgctttccaaggctgaagagagacacggcaacattgaagaaaggttacgacagatggaagcacagttggaggagaagaatcaagaactgcagcgggcaaggcaaagagaaaaaatgaacgaagaacataataaacgtttatcagacactgttgacaagctgctttcagaatctaatgagaggcttcaacttcatcttaaagagagaatggctgctttggaagataagaactctcttttaagagaagttgaaagtgcaaaaaagcagttagaagaaacacaacacgataaggatcagcttgtcctaaacattgaagcactgagggctgaactagaccacatgagactaagaggtgcttcacttcatcatggccgaccccacttgggcagtgtcccagatttcaggttccccatggcagacggccacacagactcctacagcaccagtgcagtgctgcggcgcccacagaaaggccggctggcagccctgcgagatgagccttccaaggtacaaactcttaatgagcaggattgggaacgtgcccagcaagctagtgtcttggcaaatgtagcacaagcattcgagagtgatgctgacgtgtctgatggtgaagatgacagggacactctcctcagctcagttgacctgctatcgcccagcgggcaggccgacgcgcacacactagccatgatgcttcaggagcagctggacgccatcaacaaagagatcaggttgattcaggaagaaaaagaaaatacagagcagcgggcagaggagattgaaagtcgagttggcagtggaagtctagacaatcttggtcgttttagatcaatgagctccattcccccctaccctgcttcctcgcttgctagctcctcccctccgggcagtgggcgctccaccccacgaaggatccctcacagcccagctcgggaagtggacagactgggcgtcatgacccttttgccaccttccagagaagaggtacgagatgacaagacaaccataaagtgtgaaacctccccgccttcctccccgagagcccttcggttagaccggctgcacaaaggggcgctgcacaccgtcagccacgaggacatcagggacataaggaactccacaggctcccaggatggtcccgtgagcaaccccagcagtagcaacagtagccaggactcgctccacaaagccccaaagaagaaaggcattaagtcctccattggccgcttgtttggcaagaaagaaaagggccgacctggacaaactggcaaagaagcattaggacaagctggtgtttccgagacggataactcatctcaggatgccttgggacttagcaaattggggggacaggctgaaaaaaatcgtaaacttcaaaaaaagcatgaattgctggaggaagcccggagacaaggtttaccttttgcccaatgggacgggccaacggttgtggtctggctagagctctgggttgggatgccagcctggtatgtggctgcctgccgagcaaacgtgaaaagcggggccatcatgtcggccctgtccgacacagagatccagcgtgagattggcatcagcaaccccctgcacaggctgaagctgaggctggccatccaggagatcatgtcgctgaccagcccgtctgccccgcccacatctagaacgacactcgcctatggggacatgaaccacgagtggatcggcaacgagtggctccccagcctgggcctcccccagtaccgcagctacttcatggagtgccttgtagacgccaggatgctggaccacttgaccaagaaagaccttcgagggcagctgaaaatggtcgacagttttcacagaaacagtttccagtgtggaattatgtgcctgagaaggttaaattatgaccggaaagaactggaaagaaaaagagaagaaagtcagagtgaaataaaagacgtgcttgtttggagcaatgatcgagtgattcgctggatcctgtcaattggccttaaagaatatgcaaacaatcttatagagagtggtgttcacggagcacttctggccttagatgaaaccttcgacttcagtgcactggcactgctgttacagatcccgacgcagaacacacaggctcgtgctgtcttggaaagagaatttaacaaccttttggtcatggggactgatagaaggtttgatgaagatgatgataaaagctttaggagagcaccttcatggagaaaaaagtttagaccaaaggacattcgtggcttagctgctgggtcagcagagactctccctgcaaacttccgggtgacttcttctatgtcttccccctctatgcagccaaagaagatgcagatggacggtatgtgatgggtcacactaacctgtcacttgttgggagcatgagcagctttctgtctggaacattaataatgatctaaaacggcctatttaatatgttacaaggcacttgagtatggttgcatgtccaaatataaatgtttttaaattaactctaacatttgtttataaaagtttaaccataataatagaattttt

SEQ ID NO: 31881 - DNA, 4313 bp, Homo Sapiens
gaattccgggcccccggccgtccctcttaaggctcttcctccgctccgccagtgtccggccgcgggccggccttagtgactggggcggcgggccccggggccgcggcgtggggcgggcaggcggacgccggccgcgggctgctttcgtcggctcccaagctctcccggagcgagcagccgcccgcgagccgccgcggagcctcctcgcccgctcccgccggcgagcaagatgatgtgcgaggtgatgccgaccatcagcgaagcagaaggcccccctggaggaggtggaggccatggttccggctccccttcacagccagatgcagattcacattttgaacagttgatggtctccatgctagaagaaagggaccgccttcttgatacactgagagagactcaagaaacgctggccttaacccaggggaagttacacgaggttggtcatgaaagagattccttgcagagacagctcaacacggcacttccacaggagttcgcagcacttactaaagaactcaatgtatgcagggaacagctccttgaaagggaagaagaaattgctgaactgaaagcagaaaggaataacaccaggctgctgttagagcatttggaatgccttgtctccaggcatgagcggtctcttaggatgaccgtggtgaagagacaagcgcagtctccagcaggcgtgtccagcgaagtggaagtgctgaaagcactgaagtccttatttgaacaccacaaagctctggatgaaaaggtgagagagcgattacgagtagcacttgaaagatgtagtttgttagaagaggaattaggtgccacacacaaagagctaatgattcttaaagaacagaataatcagaaaaaaactctaacagatggagtgctggacataaaccatgaacaagaaaatacaccaagcacgagtggaaagagatcttctgatggttctttaagccacgaggaagaccttgctaaagtaattgagctccaagaaatcataagtaagcagtcaagggaacagagccaaatgaaagaacgcctggcttccctttccagtcatgtgacagaactggaagaggatctggacacggctagaaaagatctcatcaaatctgaagaaatgaacacaaaattgcaacgagatgtccgtgaagccatggcccaaaaggaagatatggaagagagaatcactactcttgaaaaacgctacctcgctgcacagcgtgaagccacatctgtgcatgacctcaatgataaacttgaaaatgaaattgcaaataaagattctatgcatcgacagactgaagataaaaaccgccagttacaggagcgcttggaattggcagagcaaaagctgcaacagacactgaggaaggcagagacgctcccggaggtggaggcggagctggcccagagggtggcagcgctttccaaggctgaagagagacacggcaacattgaagaaaggttacgacagatggaagcacagttggaggagaagaatcaagaactgcagcgggcaaggcaaagagaaaaaatgaacgaagaacataataaacgtttatcagacactgttgacaagctgctttcagaatctaatgagaggcttcaacttcatcttaaagagagaatggctgctttggaagataagaactctcttttaagagaagttgaaagtgcaaaaaagcagttagaagaaacacaacacgataaggatcagcttgtcctaaacattgaagcactgagggctgaactagaccacatgagactaagaggtgcttcacttcatcatggccgaccccacttgggcagtgtcccagatttcaggttccccatggcagacggccacacagactcctacagcaccagtgcagtgctgcggcgcccacagaaaggccggctggcagccctgcgagatgagccttccaaggtacaaactcttaatgagcaggattgggaacgtgcccagcaagctagtgtcttggcaaatgtagcacaagcattcgagagtgatgctgacgtgtctgatggtgaagatgacagggacactctcctcagctcagttgacctgctatcgcccagcgggcaggccgacgcgcacacactagccatgatgcttcaggagcagctggacgccatcaacaaagagatcaggttgattcaggaagaaaaagaaaatacagagcagcgggcagaggagattgaaagtcgagttggcagtggaagtctagacaatcttggtcgttttagatcaatgagctccattcccccctaccctgcttcctcgcttgctagctcctcccctccgggcagtgggcgctccaccccacgaaggatccctcacagcccagctcgggaagtggacagactgggcgtcatgacccttttgccaccttccagagaagaggtacgagatgacaagacaaccataaagtgtgaaacctccccgccttcctccccgagagcccttcggttagaccggctgcacaaaggggcgctgcacaccgtcagccacgaggacatcagggacataaggaactccacaggctcccaggatggtcccgtgagcaaccccagcagtagcaacagtagccaggactcgctccacaaagccccaaagaagaaaggcattaagtcctccattggccgcttgtttggcaagaaagaaaagggccgacctggacaaactggcaaagaagcattaggacaagctggtgtttccgagacggataactcatctcaggatgccttgggacttagcaaattggggggacaggctgaaaaaaatcgtaaacttcaaaaaaagcatgaattgctggaggaagcccggagacaaggtttaccttttgcccaatgggacgggccaacggttgtggtctggctagagctctgggttgggatgccagcctggtatgtggctgcctgccgagcaaacgtgaaaagcggggccatcatgtcggccctgtccgacacagagatccagcgtgagattggcatcagcaaccccctgcacaggctgaagctgaggctggccatccaggagatcatgtcgctgaccagcccgtctgccccgcccacatctagaacgacactcgcctatggggacatgaaccacgagtggatcggcaacgagtggctccccagcctgggcctcccccagtaccgcagctacttcatggagtgccttgtagacgccaggatgctggaccacttgaccaagaaagaccttcgagggcagctgaaaatggtcgacagttttcacagaaacagtttccagtgtggaattatgtgcctgagaaggttaaattatgaccggaaagaactggaaagaaaaagagaagaaagtcagagtgaaataaaagacgtgcttgtttggagcaatgatcgagtgattcgctggatcctgtcaattggccttaaagaatatgcaaacaatcttatagagagtggtgttcacggagcacttctggccttagatgaaaccttcgacttcagtgcactggcactgctgttacagatcccgacgcagaacacacaggctcgtgctgtcttggaaagagaatttaacaaccttttggtcatggggactgatagaaggtttgatgaagatgatgataaaagctttaggagagcaccttcatggagaaaaaagtttagaccaaaggacattcgtggcttagctgctgggtcagcagagactctccctgcaaacttccgggtgacttcttctatgtcttccccctctatgcagccaaagaagatgcagatggacggcaatgtatcaggaacacagaggttggattctgctacagtcaggacttactcctgctaaagtctcctgttgtttacccacactacttctacagatgattatgcagcatttgaatccaacaaagactacattttggaaccagtggaatctttaatcttgttaatacttgttatatggaccctaagatattttattacagagtttttaattagtgaaaaattcatgaataccatagagaaaatattttagaatttaatgtttcttatatttatgtaaacttatgactcttcatttatatagttacttactttttcatgtatatccaggctataaatatcctttcaaatcatgttcttatacctaattttagtctttcaaatgaatgtactgtaatgcttgtatgtataaatcctatgaatagagggcttttgtaaattatgcatttattgtaattatcattaattttttaatgataaaccatgacaaaggattttacgtttataaaattatgacagaagccatgtgccccgaattc

SEQ ID NO: 31882 - DNA, 3172 bp, Homo Sapiens
gctgggtttagtaggagacctggggcaaggccccctgtggacgaccatctgccagcttctctcgttccgtcgattgggaggagcggtggcgacctcggccttcagtgtttccgacggagtgaatggcggcggcggctgggatgctgctgctgggcttgctgcaggcgggtgggtcggtgctgggccaggcgatggagaaggtgacaggcggcaacctcttgtccatgctgctgatcgcctgcgccttcaccctcagcctggtctacctgatccgtctggccgccggccacctggtccagctgcccgcaggggtgaaaagtcctccatacattttctccccaattccattccttgggcatgccatagcatttgggaaaagtccaattgaatttctagaaaatgcatatgagaagtatggacctgtatttagttttaccatggtaggcaagacatttacttaccttctggggagtgatgctgctgcactgctttttaatagtaaaaatgaagacctgaatgcagaagatgtctacagtcgcctgacaacacctgtgtttgggaagggagttgcatacgatgtgcctaatccagttttcttggagcagaagaaaatgttaaaaagtggccttaacatagcccactttaaacagcatgtttctataattgaaaaagaaacaaaggaatactttgagagttggggagaaagtggagaaaaaaatgtgtttgaagctctttctgagctcataattttaacagctagccattgtttgcatggaaaggaaatcagaagtcaactcaatgaaaaggtagcacagctgtatgcagatttggatggaggtttcagccatgcagcctggctcttaccaggttggctgcctttgcctagtttcagacgcagggacagagctcatcgggaaatcaaggatattttctataaggcaatccagaaacgcagacagtctcaagaaaaaattgatgacattctccaaactttactagatgctacatacaaggatgggcgtcctttgactgatgatgaagtagcagggatgcttattggattactcttggcagggcagcatacatcctcaactactagtgcttggatgggcttctttttggccagagacaaaacacttcaaaaaaaatgttatttagaacagaaaacagtctgtggagagaatctgcctcctttaacttatgaccagctcaaggatctaaatttacttgatcgctgtataaaagaaacattaagacttagacctcctataatgatcatgatgagaatggccagaactcctcagactgtggcagggtataccattcctccaggacatcaggtgtgtgtttctcccactgtcaatcaaagacttaaagactcatgggtagaacgcctggactttaatcctgatcgctacttacaggataacccagcatcaggggaaaagtttgcctatgtgccatttggagctgggcgtcatcgttgtattggggaaaattttgcctatgttcaaattaagacaatttggtccactatgcttcgtttatatgaatttgatctcattgatggatactttcccactgtgaattatacaactatgattcacacccctgagaacccagttatccgttacaaacgaagatcaaaatgaaaaaggttgcaaggaacgaatatatgtgattatcactgtaagccacaaaggcattcgaagagaatgaagtgtacaaaacaactcttgtagtttactgtttttttaagtgtgtaattctaaaagccagtttatgatttaggattttgttaactgaatggttctatcaaatataatagcatttgacacattttctaatagttatgatacttatacatgtgctttcaggaagttccttggtgaaacaattgttgaggggggatctaggtaattggcagattctaaataatataatttccagatagtaattttaagagtactcatcgctcttgccaaataagttcagggtattcaaatcttggactagtcctgcaaggtataaagaataaaaatcccagtgagatacttggaaaccacagtttattattatttatctgggcaattattgtgtgtgtgaggatggaagggtagggaataatcgaacatctaaagccttgaataagagaatactaattgttttggtatgatgatactcagaaatggagatattataggaaaaagaaatcctttggaattttaactaaaatcactgcatatgggaaattaagagatccaggaccatatttgataagagttcctaaaaataatgtaattattaatgctaaagactgctcatgtatcttgatctaattactaaataaattacatatttatttacctgataaatatgtatctagttctacaaggtcacatttatgtggaagtccaaagtcaagtccttaggggataattttgttttgggctcagttgttccctgcttccttttttttttttttttttttttgagatggagtctcgctctgttgcccaggctggagtgcagtggtgcgatctcagctcactgcatcctctgcctcccgggttcaagcaattctctgcctcagcctcccaagtagttgggattacaggcacctgccaccatgcctggctaattttttgtatttttagtagagacgggggtttcactatgttggctaggctggtcttgaactcctgagcctcgtgagtccacccgccttggcctcccaaagtgctgggattacaggcatgagccaccgcacctggccttccctgcttcctctctagaatccaattagggatgtttgttactactcatattgattaaaacagttaacaaacttttttctttttaaaatgtgagatcagtgaactctggttttaagataatctgaaacaaggtccttgggagtaataaaattggtcacattctgtaaagcacattctgtttaggaatcaacttatctcaaattgtaactcggggcctaactatatgagatggctgaaaaaataccacatcgtctgttttcactaggtgatgccaaaatattttgctttatgtatattacagttctttttaaaacactggaagactcatgttaaactctaattgtgaaggcagaatctctgctaatttttcagattaaaattctctttgaaaaaat

SEQ ID NO: 31883 - DNA, 14063 bp, Homo Sapiens
gctcagcagcaggtcgcggccgcagccccatccagccccgcgcccgccatgccgtccgccggccccgcctgagccgcggcctccgcgcgcgggcgggcctggggacggcggggccatgcgcgcgctgccctaacgatgccgcccgccgcgcccgcccgcctggcgctggccctgggcctgggcctgtggctcggggcgctggcgggggggcccgggcgcggctgcgggccctgcgagcccccctgcctctgcgggccagcgcccggcgccgcctgccgcgtcaactgctcgggccgcgggctgcggacgctcggtcccgcgctgcgcatccccgcggacgccacagagctagacgtctcccacaacctgctccgggcgctggacgttgggctcctggcgaacctctcggcgctggcagagctggatataagcaacaacaagatttctacgttagaagaaggaatatttgctaatttatttaatttaagtgaaataaacctgagtgggaacccgtttgagtgtgactgtggcctggcgtggctgccgcaatgggcggaggagcagcaggtgcgggtggtgcagcccgaggcagccacgtgtgctgggcctggctccctggctggccagcctctgcttggcatccccttgctggacagtggctgtggtgaggagtatgtcgcctgcctccctgacaacagctcaggcaccgtggcagcagtgtccttttcagctgcccacgaaggcctgcttcagccagaggcctgcagcgccttctgcttctccaccggccagggcctcgcagccctctcggagcagggctggtgcctgtgtggggcggcccagccctccagtgcctcctttgcctgcctgtccctctgctccgggcccccggcacctcctgcccccacctgtaggggccccaccctcctccagcacgtcttccctgcctccccaggggccaccctggtggggccccacggacctctggcctctggccagctagcagccttccacatcgctgccccgctccctgtcactgacacacgctgggacttcggagacggctccgccgaggtggatgccgctgggccggctgcctcgcatcgctatgtgctgcctgggcgctatcacgtgacggccgtgctggccctgggggccggctcagccctgctggggacagacgtgcaggtggaagcggcacctgccgccctggagctcgtgtgcccgtcctcggtgcagagtgacgagagcctcgacctcagcatccagaaccgcggtggttcaggcctggaggccgcctacagcatcgtggccctgggcgaggagccggcccgagcggtgcacccgctctgcccctcggacacggagatcttccctggcaacgggcactgctaccgcctggtggtggagaaggcggcctggctgcaggcgcaggagcagtgtcaggcctgggccggggccgccctggcaatggtggacagtcccgccgtgcagcgcttcctggtctcccgggtcaccaggagcctagacgtgtggatcggcttctcgactgtgcagggggtggaggtgggcccagcgccgcagggcgaggccttcagcctggagagctgccagaactggctgcccggggagccacacccagccacagccgagcactgcgtccggctcgggcccaccgggtggtgtaacaccgacctgtgctcagcgccgcacagctacgtctgcgagctgcagcccggaggcccagtgcaggatgccgagaacctcctcgtgggagcgcccagtggggacctgcagggacccctgacgcctctggcacagcaggacggcctctcagccccgcacgagcccgtggaggtcatggtattcccgggcctgcgtctgagccgtgaagccttcctcaccacggccgaatttgggacccaggagctccggcggcccgcccagctgcggctgcaggtgtaccggctcctcagcacagcagggaccccggagaacggcagcgagcctgagagcaggtccccggacaacaggacccagctggcccccgcgtgcatgccagggggacgctggtgccctggagccaacatctgcttgccgctggacgcctcctgccacccccaggcctgcgccaatggctgcacgtcagggccagggctacccggggccccctatgcgctatggagagagttcctcttctccgttcccgcggggccccccgcgcagtactcggtcaccctccacggccaggatgtcctcatgctccctggtgacctcgttggcttgcagcacgacgctggccctggcgccctcctgcactgctcgccggctcccggccaccctggtccccgggccccgtacctctccgccaacgcctcgtcatggctgccccacttgccagcccagctggagggcacttggggctgccctgcctgtgccctgcggctgcttgcacaacgggaacagctcaccgtgctgctgggcttgaggcccaaccctggactgcggctgcctgggcgctatgaggtccgggcagaggtgggcaatggcgtgtccaggcacaacctctcctgcagctttgacgtggtctccccagtggctgggctgcgggtcatctaccctgccccccgcgacggccgcctctacgtgcccaccaacggctcagccttggtgctccaggtggactctggtgccaacgccacggccacggctcgctggcctgggggcagtctcagcgcccgctttgagaatgtctgccctgccctggtggccaccttcgtgcccgcctgcccctgggagaccaacgataccctgttctcagtggtagcactgccgtggctcagtgagggggagcacgtggtggacgtggtggtggaaaacagcgccagccgggccaacctcagcctgcgggtgacggcggaggagcccatctgtggcctccgcgccacgcccagccccgaggcccgtgtactgcagggagtcctagtgaggtacagccccgtggtggaggccggctcggacatggtcttccggtggaccatcaacgacaagcagtccctgaccttccagaacgtggtcttcaatgtcatttatcagagcgcggcggtcttcaagctctcactgacggcctccaaccacgtgagcaacgtcaccgtgaactacaacgtaaccgtggagcggatgaacaggatgcagggtctgcaggtctccacagtgccggccgtgctgtcccccaatgccacgctagcactgacggcgggcgtgctggtggactcggccgtggaggtggccttcctgtggacctttggggatggggagcaggccctccaccagttccagcctccgtacaacgagtccttcccagttccagacccctcggtggcccaggtgctggtggagcacaatgtcacgcacacctacgctgccccaggtgagtacctcctgaccgtgctggcatctaatgccttcgagaacctgacgcagcaggtgcctgtgagcgtgcgcgcctccctgccctccgtggctgtgggtgtgagtgacggcgtcctggtggccggccggcccgtcaccttctacccgcacccgctgccctcgcctgggggtgttctttacacgtgggacttcggggacggctcccctgtcctgacccagagccagccggctgccaaccacacctatgcctcgaggggcacctaccacgtgcgcctggaggtcaacaacacggtgagcggtgcggcggcccaggcggatgtgcgcgtctttgaggagctccgcggactcagcgtggacatgagcctggccgtggagcagggcgcccccgtggtggtcagcgccgcggtgcagacgggcgacaacatcacgtggaccttcgacatgggggacggcaccgtgctgtcgggcccggaggcaacagtggagcatgtgtacctgcgggcacagaactgcacagtgaccgtgggtgcgggcagccccgccggccacctggcccggagcctgcacgtgctggtcttcgtcctggaggtgctgcgcgttgaacccgccgcctgcatccccacgcagcctgacgcgcggctcacggcctacgtcaccgggaacccggcccactacctcttcgactggaccttcggggatggctcctccaacacgaccgtgcgggggtgcccgacggtgacacacaacttcacgcggagcggcacgttccccctggcgctggtgctgtccagccgcgtgaacagggcgcattacttcaccagcatctgcgtggagccagaggtgggcaacgtcaccctgcagccagagaggcagtttgtgcagctcggggacgaggcctggctggtggcatgtgcctggcccccgttcccctaccgctacacctgggactttggcaccgaggaagccgcccccacccgtgccaggggccctgaggtgacgttcatctaccgagacccaggctcctatcttgtgacagtcaccgcgtccaacaacatctctgctgccaatgactcagccctggtggaggtgcaggagcccgtgctggtcaccagcatcaaggtcaatggctcccttgggctggagctgcagcagccgtacctgttctctgctgtgggccgtgggcgccccgccagctacctgtgggatctgggggacggtgggtggctcgagggtccggaggtcacccacgcttacaacagcacaggtgacttcaccgttagggtggccggctggaatgaggtgagccgcagcgaggcctggctcaatgtgacggtgaagcggcgcgtgcgggggctcgtcgtcaatgcaagccgcacggtggtgcccctgaatgggagcgtgagcttcagcacgtcgctggaggccggcagtgatgtgcgctattcctgggtgctctgtgaccgctgcacgcccatccctgggggtcctaccatctcttacaccttccgctccgtgggcaccttcaatatcatcgtcacggctgagaacgaggtgggctccgcccaggacagcatcttcgtctatgtcctgcagctcatagaggggctgcaggtggtgggcggtggccgctacttccccaccaaccacacggtacagctgcaggccgtggttagggatggcaccaacgtctcctacagctggactgcctggagggacaggggcccggccctggccggcagcggcaaaggcttctcgctcaccgtgctcgaggccggcacctaccatgtgcagctgcgggccaccaacatgctgggcagcgcctgggccgactgcaccatggacttcgtggagcctgtggggtggctgatggtggccgcctccccgaacccagctgccgtcaacacaagcgtcaccctcagtgccgagctggctggtggcagtggtgtcgtatacacttggtccttggaggaggggctgagctgggagacctccgagccatttaccacccatagcttccccacacccggcctgcacttggtcaccatgacggcagggaacccgctgggctcagccaacgccaccgtggaagtggatgtgcaggtgcctgtgagtggcctcagcatcagggccagcgagcccggaggcagcttcgtggcggccgggtcctctgtgcccttttgggggcagctggccacgggcaccaatgtgagctggtgctgggctgtgcccggcggcagcagcaagcgtggccctcatgtcaccatggtcttcccggatgctggcaccttctccatccggctcaatgcctccaacgcagtcagctgggtctcagccacgtacaacctcacggcggaggagcccatcgtgggcctggtgctgtgggccagcagcaaggtggtggcgcccgggcagctggtccattttcagatcctgctggctgccggctcagctgtcaccttccgcctacaggtcggcggggccaaccccgaggtgctccccgggccccgtttctcccacagcttcccccgcgtcggagaccacgtggtgagcgtgcggggcaaaaaccacgtgagctgggcccaggcgcaggtgcgcatcgtggtgctggaggccgtgagtgggctgcaggtgcccaactgctgcgagcctggcatcgccacgggcactgagaggaacttcacagcccgcgtgcagcgcggctctcgggtcgcctacgcctggtacttctcgctgcagaaggtccagggcgactcgctggtcatcctgtcgggccgcgacgtcacctacacgcccgtggccgcggggctgttggagatccaggtgcgcgccttcaacgccctgggcagtgagaaccgcacgctggtgctggaggttcaggacgccgtccagtatgtggccctgcagagcggcccctgcttcaccaaccgctcggcgcagtttgaggccgccaccagccccagcccccggcgtgtggcctaccactgggactttggggatgggtcgccagggcaggacacagatgagcccagggccgagcactcctacctgaggcctggggactaccgcgtgcaggtgaacgcctccaacctggtgagcttcttcgtggcgcaggccacggtgaccgtccaggtgctggcctgccgggagccggaggtggacgtggtcctgcccctgcaggtgctgatgcggcgatcacagcgcaactacttggaggcccacgttgacctgcgcgactgcgtcacctaccagactgagtaccgctgggaggtgtatcgcaccgccagctgccagcggccggggcgcccagcgcgtgtggccctgcccggcgtggacgtgagccggcctcggctggtgctgccgcggctggcgctgcctgtggggcactactgctttgtgtttgtcgtgtcatttggggacacgccactgacacagagcatccaggccaatgtgacggtggcccccgagcgcctggtgcccatcattgagggtggctcataccgcgtgtggtcagacacacgggacctggtgctggatgggagcgagtcctacgaccccaacctggaggacggcgaccagacgccgctcagtttccactgggcctgtgtggcttcgacacagagggaggctggcgggtgtgcgctgaactttgggccccgcgggagcagcacggtcaccattccacgggagcggctggcggctggcgtggagtacaccttcagcctgaccgtgtggaaggccggccgcaaggaggaggccaccaaccagacggtgctgatccggagtggccgggtgcccattgtgtccttggagtgtgtgtcctgcaaggcacaggccgtgtacgaagtgagccgcagctcctacgtgtacttggagggccgctgcctcaattgcagcagcggctccaagcgagggcggtgggctgcacgtacgttcagcaacaagacgctggtgctggatgagaccaccacatccacgggcagtgcaggcatgcgactggtgctgcggcggggcgtgctgcgggacggcgagggatacaccttcacgctcacggtgctgggccgctctggcgaggaggagggctgcgcctccatccgcctgtcccccaaccgcccgccgctggggggctcttgccgcctcttcccactgggcgctgtgcacgccctcaccaccaaggtgcacttcgaatgcacgggctggcatgacgcggaggatgctggcgccccgctggtgtacgccctgctgctgcggcgctgtcgccagggccactgcgaggagttctgtgtctacaagggcagcctctccagctacggagccgtgctgcccccgggtttcaggccacacttcgaggtgggcctggccgtggtggtgcaggaccagctgggagccgctgtggtcgccctcaacaggtctttggccatcaccctcccagagcccaacggcagcgcaacggggctcacagtctggctgcacgggctcaccgctagtgtgctcccagggctgctgcggcaggccgatccccagcacgtcatcgagtactcgttggccctggtcaccgtgctgaacgagtacgagcgggccctggacgtggcggcagagcccaagcacgagcggcagcaccgagcccagatacgcaagaacatcacggagactctggtgtccctgagggtccacactgtggatgacatccagcagatcgctgctgcgctggcccagtgcatggggcccagcagggagctcgtatgccgctcgtgcctgaagcagacgctgcacaagctggaggccatgatgctcatcctgcaggcagagaccaccgcgggcaccgtgacgcccaccgccatcggagacagcatcctcaacatcacaggagacctcatccacctggccagctcggacgtgcgggcaccacagccctcagagctgggagccgagtcaccatctcggatggtggcgtcccaggcctacaacctgacctctgccctcatgcgcatcctcatgcgctcccgcgtgctcaacgaggagcccctgacgctggcgggcgaggagatcgtggcccagggcaagcgctcggacccgcggagcctgctgtgctatggcggcgccccagggcctggctgccacttctccatccccgaggctttcagcggggccctggccaacctcagtgacgtggtgcagctcatctttctggtggactccaatccctttccctttggctatatcagcaactacaccgtctccaccaaggtggcctcgatggcattccagacacaggccggcgcccagatccccatcgagcggctggcctcagagcgcgccatcaccgtgaaggtgcccaacaactcggactgggctgcccggggccaccgcagctccgccaactccgccaactccgttgtggtccagccccaggcctccgtcggtgctgtggtcaccctggacagcagcaaccctgcggccgggctgcatctgcagctcaactatacgctgctggacggccactacctgtctgaggaacctgagccctacctggcagtctacctacactcggagccccggcccaatgagcacaactgctcggctagcaggaggatccgcccagagtcactccagggtgctgaccaccggccctacaccttcttcatttccccggggagcagagacccagcggggagttaccatctgaacctctccagccacttccgctggtcggcgctgcaggtgtccgtgggcctgtacacgtccctgtgccagtacttcagcgaggaggacatggtgtggcggacagaggggctgctgcccctggaggagacctcgccccgccaggccgtctgcctcacccgccacctcaccgccttcggcgccagcctcttcgtgcccccaagccatgtccgctttgtgtttcctgagccgacagcggatgtaaactacatcgtcatgctgacatgtgctgtgtgcctggtgacctacatggtcatggccgccatcctgcacaagctggaccagttggatgccagccggggccgcgccatccctttctgtgggcagcggggccgcttcaagtacgagatcctcgtcaagacaggctggggccggggctcaggtaccacggcccacgtgggcatcatgctgtatggggtggacagccggagcggccaccggcacctggacggcgacagagccttccaccgcaacagcctggacatcttccggatcgccaccccgcacagcctgggtagcgtgtggaagatccgagtgtggcacgacaacaaagggctcagccctgcctggttcctgcagcacgtcatcgtcagggacctgcagacggcacgcagcgccttcttcctggtcaatgactggctttcggtggagacggaggccaacgggggcctggtggagaaggaggtgctggccgcgagcgacgcagcccttttgcgcttccggcgcctgctggtggctgagctgcagcgtggcttctttgacaagcacatctggctctccatatgggaccggccgcctcgtagccgtttcactcgcatccagagggccacctgctgcgttctcctcatctgcctcttcctgggcgccaacgccgtgtggtacggggctgttggcgactctgcctacagcacggggcatgtgtccaggctgagcccgctgagcgtcgacacagtcgctgttggcctggtgtccagcgtggttgtctatcccgtctacctggccatcctttttctcttccggatgtcccggagcaaggtggctgggagcccgagccccacacctgccgggcagcaggtgctggacatcgacagctgcctggactcgtccgtgctggacagctccttcctcacgttctcaggcctccacgctgagcaggcctttgttggacagatgaagagtgacttgtttctggatgattctaagagtctggtgtgctggccctccggcgagggaacgctcagttggccggacctgctcagtgacccgtccattgtgggtagcaatctgcggcagctggcacggggccaggcgggccatgggctgggcccagaggaggacggcttctccctggccagcccctactcgcctgccaaatccttctcagcatcagatgaagacctgatccagcaggtccttgccgagggggtcagcagcccagcccctacccaagacacccacatggaaacggacctgctcagcagcctgtccagcactcctggggagaagacagagacgctggcgctgcagaggctgggggagctggggccacccagcccaggcctgaactgggaacagccccaggcagcgaggctgtccaggacaggactggtggagggtctgcggaagcgcctgctgccggcctggtgtgcctccctggcccacgggctcagcctgctcctggtggctgtggctgtggctgtctcagggtgggtgggtgcgagcttccccccgggcgtgagtgttgcgtggctcctgtccagcagcgccagcttcctggcctcattcctcggctgggagccactgaaggtcttgctggaagccctgtacttctcactggtggccaagcggctgcacccggatgaagatgacaccctggtagagagcccggctgtgacgcctgtgagcgcacgtgtgccccgcgtacggccaccccacggctttgcactcttcctggccaaggaagaagcccgcaaggtcaagaggctacatggcatgctgcggagcctcctggtgtacatgctttttctgctggtgaccctgctggccagctatggggatgcctcatgccatgggcacgcctaccgtctgcaaagcgccatcaagcaggagctgcacagccgggccttcctggccatcacgcggtctgaggagctctggccatggatggcccacgtgctgctgccctacgtccacgggaaccagtccagcccagagctggggcccccacggctgcggcaggtgcggctgcaggaagcactctacccagaccctcccggccccagggtccacacgtgctcggccgcaggaggcttcagcaccagcgattacgacgttggctgggagagtcctcacaatggctcggggacgtgggcctattcagcgccggatctgctgggggcatggtcctggggctcctgtgccgtgtatgacagcgggggctacgtgcaggagctgggcctgagcctggaggagagccgcgaccggctgcgcttcctgcagctgcacaactggctggacaacaggagccgcgctgtgttcctggagctcacgcgctacagcccggccgtggggctgcacgccgccgtcacgctgcgcctcgagttcccggcggccggccgcgccctggccgccctcagcgtccgcccctttgcgctgcgccgcctcagcgcgggcctctcgctgcctctgctcacctcggtgtgcctgctgctgttcgccgtgcacttcgccgtggccgaggcccgtacttggcacagggaagggcgctggcgcgtgctgcggctcggagcctgggcgcggtggctgctggtggcgctgacggcggccacggcactggtacgcctcgcccagctgggtgccgctgaccgccagtggacccgtttcgtgcgcggccgcccgcgccgcttcactagcttcgaccaggtggcgcacgtgagctccgcagcccgtggcctggcggcctcgctgctcttcctgcttttggtcaaggctgcccagcacgtacgcttcgtgcgccagtggtccgtctttggcaagacattatgccgagctctgccagagctcctgggggtcaccttgggcctggtggtgctcggggtagcctacgcccagctggccatcctgctcgtgtcttcctgtgtggactccctctggagcgtggcccaggccctgttggtgctgtgccctgggactgggctctctaccctgtgtcctgccgagtcctggcacctgtcacccctgctgtgtgtggggctctgggcactgcggctgtggggcgccctacggctgggggctgttattctccgctggcgctaccacgccttgcgtggagagctgtaccggccggcctgggagccccaggactacgagatggtggagttgttcctgcgcaggctgcgcctctggatgggcctcagcaaggtcaaggagttccgccacaaagtccgctttgaagggatggagccgctgccctctcgctcctccaggggctccaaggtatccccggatgtgcccccacccagcgctggctccgatgcctcgcacccctccacctcctccagccagctggatgggctgagcgtgagcctgggccggctggggacaaggtgtgagcctgagccctcccgcctccaagccgtgttcgaggccctgctcacccagtttgaccgactcaaccaggccacagaggacgtctaccagctggagcagcagctgcacagcctgcaaggccgcaggagcagccgggcgcccgccggatcttcccgtggcccatccccgggcctgcggccagcactgcccagccgccttgcccgggccagtcggggtgtggacctggccactggccccagcaggacaccccttcgggccaagaacaaggtccaccccagcagcacttagtcctccttcctggcgggggtgggccgtggagtcggagtggacaccgctcagtattactttctgccgctgtcaaggccgagggccaggcagaatggctgcacgtaggttccccagagagcaggcaggggcatctgtctgtctgtgggcttcagcactttaaagaggctgtgtggccaaccaggacccagggtcccctccccagctcccttgggaaggacacagcagtattggacggtttctagcctctgagatgctaatttatttccccgagtcctcaggtacagcgggctgtgcccggccccaccccctgggcagatgtcccccactgctaaggctgctggcttcagggagggttagcctgcaccgccgccaccctgcccctaagttattacctctccagttcctaccgtactccctgcaccgtctcactgtgtgtctcgtgtcagtaatttatatggtgttaaaatgtgtatatttttgtatgtcactattttcactagggctgaggggcctgcgcccagagctggcctcccccaacacctgctgcgcttggtaggtgtggtggcgttatggcagcccggctgctgcttggatgcgagcttggccttgggccggtgctgggggcacagctgtctgccaggcactctcatcaccccagaggccttgtcatcctcccttgccccaggccaggtagcaagagagcagcgcccaggcctgctggcatcaggtctgggcaagtagcaggactaggcatgtcagaggaccccagggtggttagaggaaaagactcctcctgggggctggctcccagggtggaggaaggtgactgtgtgtgtgtgtgtgtgcgcgcgcgacgcgcgagtgtgctgtatggcccaggcagcctcaaggccctcggagctggctgtgcctgcttctgtgtaccacttctgtgggcatggccgcttctagagcctcgacacccccccaacccccgcaccaagcagacaaagtcaataaaagagctgtctgactgc

SEQ ID NO: 31884 - DNA, 1158 bp, Homo Sapiens
cagcggactccgagaccagcggatctcggcaaaccctctttctcgaccacccacctaccattcttggaaccatggcggcagtggcggcggcctcggctgaactgctcatcatcggctggtacatcttccgcgtgctgctgcaggtgttcaggtactccctgcagaagctggcatacacggtgtcgcggaccgggcggcaggtgttgggggagcgcaggcagcgagcccccaactgaggccccagctcccagcctgggcggccgtatatagtgctcctgtgcatctcggccagcacgggagccagtgccgcgcaggaatgtggggtcccctgtgttccctcgccagaggagcacttggcaaggtcagtgaggggccagtagacccccggagaagcagtaccgacaatgacgaagataccagatcccttcccaacccctttgcaccggtcccactaaggggcagggtcgagagaggaggggggatagggggagcagaccctgagatctgggcataggcaccgcattctgatctggacaaagtcgggacagcaccatcccagccccgaagccagggccatgccagcaggccccaccatggaaatcaaaacaccgcaccagccagcagaatggacattctgacatcgccagccgacgccctgaatcttggtgcagcacccaccgcgtgcctgtgtggcgggactggagggcacagttgaggaaggagggtggttaagaaatacagtggggccctctcgctgtcccttgcccagggcacttgtattccagcctcgctgcatttgctctctcgattgcccctttcctcctacatgcctcccaagcccaccctactccaaaagtaatgtgtcacttgatttggaactattcaagcagtaaaagtaaatgaatcccacctttactaaaacactttctctgaaccccccttgcccctcactgatcttgcttttccctggtctcatgcagttgtggtcaatattgtggtaatcgctaattgtactgattgtttaagtgtgcattagttgtctctccccagctagattgtaagctcctggaggacagggaccacctctacaaaaaataaaaaaagtacctcccctgtctcgcacagtgtcccaggaccctgcggtgcagtagaggcgca

SEQ ID NO: 31885 - DNA, 1277 bp, Homo Sapiens
aagctgcttccctggagacgggcggggaggccaaacttcctgctgaagctctgtggcctcttttggggtgggggcgggggtccaggcagaaagaaactgtctgctgctcaagacccacaggacgcccggaagactaaatgatcactgcccccagtgaatatggtgaagaagctggtgatggcccagaagcggggagagacacgagccctttgcctgggtgtaaccatggtggtgtgtgccgtcatcacctactacatcctggtcacgactgtgctgcccctctaccagaaaagcgtgtggacccaggaatccaagtgccacctgattgagaccaacatcagggaccaggaggagctgaagggcaagaaggtgccccagtacccatgcctgtgggtcaacgtgtcagctgccggcaggtgggctgtgctgtaccacacggaggacactcgggaccagaaccagcagtgctcctacatcccaggcagcgtggacaattaccagacggcccgggccgacgtggagaaggtcagagccaaattccaagagcagcaggtcttctactgcttctccgcacctcgggggaacgaaaccagcgtcctattccagcgcctctacgggccccaggccctcctcttctccctcttctggcccaccttcctgctgaccggtggcctcctcattatcgccatggtgaagagcaaccagtacctgtccatcctggcggcccagaagtagagccatccatccatgccataccacttgtcagggcacaggggactggctgggcccccagggctgctccccacttgcagcacaatgccttctccacctgccctcccactcttccagtccaatccacgctgtcttctgttgcaggactaacctttgagaaatccttttgtgaagtcattgcctgctcaagaatgtacagtggctccccaatgccttggaggccataaggccagccagttctagctctctattacctgtccccactcaactgactcatacctgtttccggctgcatcactatgtgccccacagagaacgatgatcgtcacctctgtgcctgagttctccctgttgtctcaaagcggtacccatcctcccccagaagctgtccccagcgagcctcccttctttgtttgaattctctaataagagcaacagcagctcccatttctagaacacatttacagtattactattttctaggatataaagtgccatatatatttttaattccaatattaataaatgtatgccaaacaacaata

SEQ ID NO: 31886 - DNA, 2132 bp, Homo Sapiens
tgcggttccaacatggcggacgtgacggtggaggttcgcggctctaacggggctttctacaagggatttatcaaagatgttcatgaagactcccttacagttgtttttgaaaataattggcaaccagaacgccaggttccatttaatgaagttagattaccaccaccacctgatataaaaaaagaaattagtgaaggagatgaagtagaggtatattcaagagcaaatgaccaagagccatgtgggtggtggttggctaaagttcggatgatgaaaggagaattttatgtcattgaatatgctgcttgtgacgctacttacaatgaaatagtcacatttgaacgacttcggcctgtcaatcaaaataaaactgtcaaaaaaaataccttctttaaatgcacagtggatgttcctgaggatttgagagaggcgtgtgctaatgaaaatgcacataaagattttaagaaagcagtaggagcatgcagaattttttaccatccagaaacaacacagctaatgatactgtctgccagtgaagcaactgtgaagagagtaaacatcttaagtgacatgcatttgcgaagtattcgtacgaagttgatgcttatgtccagaaatgaagaggccactaagcatttagaatgcacaaaacaacttgcagcagcttttcatgaggaatttgttgtgagagaagatttaatgggcctggcaataggaacacatggtagtaacatccagcaagctaggaaggttcctggagttaccgccattgagctagatgaagatactggaacattcagaatctacggagagagtgctgatgctgtaaaaaaggctagaggtttcttggaatttgtggaggattttattcaggttcctaggaatctcgttggaaaagtaattggaaaaaatggcaaagttattcaagaaatagtggacaaatctggtgtggttcgagtgagaattgaaggggacaatgaaaataaattacccagagaagacggtatggttccatttgtatttgttggcactaaagaaagcattggaaatgtgcaggttcttctagagtatcatattgcctatctaaaggaagtagaacagctaagaatggaacgcctacagattgatgaacagctgcgacagattggttctaggtcttatagcggaagaggcagaggtcgtcggggacctaattacacctccggttatggtacaaattctgagctgtctaacccctctgaaacggaatctgagcgtaaagacgagctgagtgattggtcattggcaggagaagataatcgagacagccgacatcagcgtgacagcaggagacgcccaggaggaagaggcagaagtgtttcagggggtcgaggtcgtggtggaccacgtggtggcaaatcctccatcagttctgtgctcaaagatccagacagcaatccatacagcttacttgataatacagaatcagatcagactgcagacactgatgccagcgaatctcatcacagtactaaccgtcgtaggcggtctcgtagacgaaggactgatgaagatgctgttctgatggatggaatgactgaatctgatacagcttcagttaatgaaaatgggctagtcacagttgcagattatatttctagagctgagtctcagagcagacaaagaaacctcccaagggaaactttggctaaaaacaagaaagaaatggcaaaagatgtgattgaagagcatggtccttcagaaaaggcaataaacggcccaactagtgcttctggcgatgacatttctaagctacagcgtactccaggagaagaaaagattaataccttaaaagaagaaaacactcaagaagcagcagtcctgaatggtgtttcataaactgaagaagttcctagtttacagttcttttacattacatttacaatagtgcttgtacaagcttgccaaagatagaatatggatcgccagtctttacatcgcactttcagttcctccatttggaattcaaaaaggggagggatcctgaagaaatcatatgttaaacatactttgacacctactgtgttataaaatatatcatcagatgtgccttgagaatagtatatgtaacattaaaaaaaagttgctggcta

SEQ ID NO: 31887 - DNA, 3780 bp, Homo Sapiens; identical to SEQ ID NO: 29738

SEQ ID NO: 31888 - DNA, 3901 bp, Homo Sapiens
cagtttgcaaaagccagaggtgcaagaagcagcgactgcagcagcagcagcagcagcggcggtggcagcagcagcagcagcggcggcagcagcagcagcagcggaggcaccggtggcagcagcagcatcaccagcaacaacaacaaaaaaaaatcctcatcaaatcctcacctaagctttcagtgtatccagatccacatcttcactcaagccaggagagggaaagaggaaaggggggcaggaaaaaaaaaaaacccaacaacttagcggaaacttctcagagaatgctccaaaactcagcagtgcttctggtgctggtgatcagtgcttctgcaacccatgaggcggagcagaatgactctgtgagccccaggaaatcccgagtggcggctcaaaactcagctgaagtggttcgttgcctcaacagtgctctacaggtcggctgcggggcttttgcatgcctggaaaactccacctgtgacacagatgggatgtatgacatctgtaaatccttcttgtacagcgctgctaaatttgacactcagggaaaagcattcgtcaaagagagcttaaaatgcatcgccaacggggtcacctccaaggtcttcctcgccattcggaggtgctccactttccaaaggatgattgctgaggtgcaggaagagtgctacagcaagctgaatgtgtgcagcatcgccaagcggaaccctgaagccatcactgaggtcgtccagctgcccaatcacttctccaacagatactataacagacttgtccgaagcctgctggaatgtgatgaagacacagtcagcacaatcagagacagcctgatggagaaaattgggcctaacatggccagcctcttccacatcctgcagacagaccactgtgcccaaacacacccacgagctgacttcaacaggagacgcaccaatgagccgcagaagctgaaagtcctcctcaggaacctccgaggtgaggaggactctccctcccacatcaaacgcacatcccatgagagtgcataaccagggagaggttattcacaacctcaccaaactagtatcattttaggggtgttgacacaccaattttgagtgtactgtgcctggtttgatttttttaaagtagttcctattttctatcccccttaaagaaaattgcatgaaactaggcttctgtaatcaatatcccaacattctgcaatggcagcattcccaccaacaaaatccatgtgatcattctgcctctcctcaggagaaagtaccctcttttaccaacttcctctgccatgtcttttcccctgctcccctgagaccacccccaaacacaaaacattcatgtaactctccagccattgtaatttgaagatgtggatccctttagaacggttgccccagtagagttagctgataaggaaactttatttaaatgcatgtcttaaatgctcataaagatgttaaatggaattcgtgttatgaatctgtgctggccatggacgaatatgaatgtcacatttgaattcttgatctctaatgagctagtgtcttatggtcttgatcctccaatgtctaattttctttccgacacatttaccaaattgcttgagcctggctgtccaaccagactttgagcctgcatcttcttgcatctaatgaaaaacaaaaagctaacatctttacgtactgtaactgctcagagctttaaaagtatctttaacaattgtcttaaaaccagagaatcttaaggtctaactgtggaatataaatagctgaaaactaatgtactgtacataaattccagaggactctgcttaaacaaagcagtatataataactttattgcatatagatttagttttgtaacttagctttatttttcttttcctgggaatggaataactatctcacttccagatatccacataaatgctccttgtggccttttttataactaagggggtagaagtagttttaattcaacatcaaaacttaagatgggcctgtatgagacaggaaaaaccaacaggtttatctgaaggaccccaggtaagatgttaatctcccagcccacctcaacccagaggctactcttgacttagacctatactgaaagatctctgtcacatccaactggaaattccaggaaccaaaaagagcatccctatgggcttggaccacttacagtgtgataaggcctactatacattaggaagtggtagttctttactcgtcccctttcatcggtgcctggtactctggcaaatgatgatggggtgggagactttccattaaatcaatcaggaatgagtcaatcagcctttaggtctttagtccgggggacttggggctgagagagtataaataaccctgggctgtccagccttaatagacttctcttacattttcgtcctgtagcacgctgcctgccaaagtagtcctggcagctggaccatctctgtaggatcgtaaaaaaatagaaaaaaagaaaaaaaaaagaaagaaagagggaaaaagagctggtggtttgatcatttctgccatgatgtttacaagatggcgaccaccaaagtcaaacgactaacctatctatgaacaacagtagtttctcagggtcactgtccttgaacccaacagtcccttatgagcgtcactgcccaccaaaggtcaatgtcaagagaggaagagagggaggaggggtaggactgcaggggccactccaaactcgcttaggtagaaactattggtgctcgactctcactaggctaaactcaagatttgaccaaatcgagtgatagggatcctggtgggaggagagagggcacatctccagaaaaatgaaaagcaatacaactttaccataaagcctttaaaaccagtaacgtgctgctcaaggaccaagagcaattgcagcagacccagcagcagcagcagcagcacaaacattgctgcctttgtccccacacagcctctaagcgtgctgacatcagattgttaagggcatttttatactcagaactgtcccatccccaggtccccaaacttatggacactgccttagcctcttggaaatcaggtagaccatattctaagttagactcttcccctccctcccacacttcccacccccaggcaaggctgacttctctgaatcagaaaagctattaaagtttgtgtgttgtgtccattttgcaaacccaactaagccaggaccccaatgcgacaagtagttcatgagtattcctagcaaatttctctctttcttcagttcagtagatttccttttttcttttcttttttttttttttttttttttggctgtgacctcttcaaaccgtggtacccccccttttctccccacgatgatatctatatatgtatctacaatacatatatctacacatacagaaagaagcagttctcacatgttgctagttttttgcttctctttcccccaccctactccctccaattccccccttaaacttccaaagcttcgtcttgtgtttgctgcagagtgattcgggggctgacctagaccagtttgcatgattcttctcttgtgatttggttgcactttagacatttttgtgccattatatttgcattatgtatttataatttaaatgatatttaggtttttggctgagtactggaataaacagtgagcatatctggtatatgtcattatttattgttaaattacattttttaagctccatgtgcatataaaggttatgaaacatatcatggtaatgacagatgcaagttattttatttgcttattttttataattaaagatgccatagcataatatgaagcctttggtgaattccttctaagataaaaataataataaagtgttacgttttattggtttcaaaaaaaaaaaaaaaaaaaa

SEQ ID NO: 31889 - DNA, 1953 bp, Homo Sapiens
gatctttggtccttctgttacccagctcctggaggcagtggctgtagcagcccttgctgctccacaccatggccacctgctggcaggccctgtgggcctatcgctcctacctgatcgtgttcttcgtgcccattctcctgctgcctctgcccatcctcgtccccagtaaggaggcctactgcgcgtatgccatcatcctcatggcgctcttctggtgcactgaggccctgcccctggccgtcactgccctcttccccttaatcctgttccctatgatgggcatcgtggatgcctctgaggttgccgtcgagtatcttaaggactccaacctcctgttcttcggggggctgctggtggccatcgcggtggaacactggaacctgcataaacgcatcgccctccgtgtcctcctcatcgttggggtgcggcctgccccgctaatcctgggcttcatgctggtcacggccttcctgtccatgtggatcagcaacacggccacctcagccatgatggtgcccatcgcacatgccgtcctggaccagctgcacagctcgcaagccagcagcaacgtcgaggagggcagcaacaaccccaccttcgagctccaggaaccaagtccccagaaggaggtgaccaagcttgataatgggcaggccctccctgtcacgtctgcctcttcggaggggagggcacatctcagccagaagcatctccacctcacccagtgcatgagcctgtgcgtgtgctactccgccagcatcgggggcatcgccacgctgactggcaccgcacccaacctggtgctgcaaggccagatcaactcgctcttcccccaaaacggcaacgtggtgaacttcgcctcctggttcagcttcgccttccccaccatggtcatcttgctgctgctggcctggttgtggctgcagatcctcttcctgggcttcaacttccggaagaactttggcattggggaaaagatgcaggagcaacagcaggcagcctactgcgtcatccagaccgagcacaggctgctgggccccatgacctttgcagaaaaggccatcagcatcctattcgtcatcctggtgctgctctggttcacccgggagccgggcttttttcttggctggggcaatttggcttttcccaatgccaagggggagagcatggtgtccgatgggacagtggccatcttcatcggcataattatgttcatcataccctccaagttcccagggctgacccaggacccagaaaacccagggaagctgaaggcccctcttggcctcctcgactggaagacggtgaaccagaagatgccgtggaatatcgtgttattgctgggtggtggctatgccctggccaagggcagtgagcgatcgggcctgtcagagtggctgggaaacaagctgaccccactgcagagtgtgccagctccagccattgccatcatcctctccctcctggtggccaccttcaccgagtgcactagcaacgtggccaccactacgatcttcctgcccatcctagcctccatggcccaggccatctgcctccaccctctctacgtcatgctcccctgcactctggccacctccctggccttcatgttgcctgtggccaccccgcccaatgccatcgtcttctctttcggggacctcaaagtgttggatatggcccgggcaggattcctcctcaacatcattggagtcctgatcatcgcactggccatcaacagctggggcatccccctcttcagcctgcactctttcccctcctgggcacagtccaacaccacagcccagtgcctgccaagcctggccaacaccaccacaccaagcccctaggctggggcacagcctggccatgcccaggaagacccaccccattcccactcctctgagcccggaggggacaccccaagctccaagctccaagctccaggccggaatt

SEQ ID NO: 31890 - DNA, 3217 bp, Homo Sapiens
cgaggaccagcacctgaggccgggccgcaggccgacttcacagccaggcgcgcgcgtcgctgctgctgctgcggggctctggcgcgccagccggcgggacagcgggggctggcgggggccggggagcgccagatgatggatttggacatgcttctatgaagaaatgccacatggtccgagagcaaacatgtccaggctactcactttagtgactagggctcggtgccagcacttcccgggtaatcagacgtggtctgaccgaggatcaagaagcacatcatcaccaatgacatcatgacagcaagagagcacagccctcgccatggtgccagggcccgtgcaatgcagcgggcttccaccatcgacgtggcggccgacatgctgggcctctctctggcaggaaatatacaagacccagatgagcccattttagaatttagcttagcttgcagtgagctgcatactccatcgctagatcgaaagccaaatagttttgttgcggtgagtgtcaccacccctcctcaggcattctggacgaagcatgcacagacggagatcattgagggaaccaacaatcctatatttctaagcagtattgccttctttcaagactctcttatcaatcagatgacacaagtcaaactctccgtgtatgatgtcaaagatagatctcagggaacaatgtatttactgggctctggaacgttcattgtcaaagatctgctccaggacaggcatcataggttgcatttaacactaaggtctgcagagagtgaccgtgtaggtaacatcaccgtgattggctggcagatggaggagaagtcagaccaacggccccctgtgacccggtctgtggacactgtcaatgggaggatggttcttcctgtcgatgagagcttgacggaggcgttaggaatccgatccaaatacgcttcattgcgaaaggacactttgctgaaatcggtgttcggtggtgccatctgccgcatgtaccggtttccaaccactgatggtaaccatttgcggatcctggagcagatggcagagagcgtgctctccctgcacgtgccccggcagttcgtgaagctcctactagaggaagatgcagccagagtgtgtgagctggaggagctgggagagctgtccccttgctgggagagcctccggcgccaaattgtcacccagtaccagaccatcatcctcacataccaggagaacctgaccgacctccatcagtacagagggccctcgtttaaagcaagcagtttgaaagcagataaaaagttagaatttgttcccacaaacttgcacatacaaaggatgagagttcaagacgatggaggatcagatcagaactacgacatcgtcaccattggggcgccagcagcacactgccaaggttttaagtcaggaggtctccgcaaaaagctgcacaaatttgaagagaccaagaaacattttgaggagtgttgtacatcatctggctgccagtccataatctacataccccaggatgttgtcagagccaaggagatcatcgcccagatcaacaccctgaaaacccaagtgagttactacgcagagcggctgtcaagggcagccaaggacaggtctgccactggccttgagaggacactcgccatcttggcagacaagacacggcagctggtcacggtctgcgactgcaagctcctggccaactccatccatgggctgaacgctgcacggcctgactacattgcctccaaggcctctcccacttcgactgaggaggagcaggtgatgcttagaaatgaccaggacaccctcatggcccggtggacagggagaaacagccgatcttccctgcaggtggactggcacgaggaggagtgggagaaagtgtggctgaacgtggacaagagcctagagtgcatcattcagcgtgtggacaagctgctgcagaaggagcggctgcatggcgagggctgtgaggatgtcttcccctgtgcaggcagctgcaccagcaagaaagattgcagtccccctcctgaagagtccagcccaggtgaatggagtgaggccctttacccgctgctgaccactctcaccgactgcgtggccatgatgagtgacaaggccaagaaggccatggtattcctgctcatgcaggacagcgcgcccaccatagccacctacctgagcctgcagtaccgccgtgacgtggtcttctgccagacgctgaccgccctcatctgcggcttcatcattaagctgaggaactgcctgcatgacgacggcttcctgcgccagctctacaccatcgggctgctggcccagttcgagagcctgctgagcacctacggggaggagctggcaatgctggaggacatgagccttgggatcatggacttgaggaacgtgaccttcaaagtcactcaggccacttccagcgcctccgcagacatgctgcccgtcatcacaggaaatcgcgacgggtttaacgtgcgggtccctctgccgggcccgctgtttgacgccttgccccgggagatccagagtggcatgctgctgcgagtgcagcccgtcctcttcaacgtgggcatcaatgagcagcagacactggccgagaggtttggcgatacgtctttacaagaagtcatcaacgtggagagtttggtgcggttaaattcctactttgagcagtttaaggaagttttgcctgaggattgcctgcctcggtctcgcagtcagacgtgcctgccagagctgctgcggtttctgggtcagaacgtgcatgcccggaagaataagaacgtcgacattctctggcaagctgctgagatctgccgccgccttaatggggtccggttcaccagctgcaagagcgctaaggaccgtacagccatgtcggtgacactggagcagtgcctgatcctgcaacacgagcatggcatggccccgcaggtcttcacccaggccctggagtgcatgcgcagtgagggttgtcgaagagaaaatacaatgaagaatgttggaagtcgcaaatatgcatttaattccctgcagctgaaggctttccccaagcattacaggcctcccgaagggacttacggaaaagttgaaacgtgaacacacggtttcctctaattagctgttacataataaatgtgggtacctctagtgtcatatatgaattcttcaggagactgaaggattggtttattttgtgttcttt

SEQ ID NO: 31891 - DNA, 1574 bp, Homo Sapiens
gcttctctccatcttgtgattcctttttcctcctgaaccctccagtgggggtgcgagtttgtctttatcaccccccatcccaccgccttcttttcttctcgctctcctacccctccccagcttggtgggcgcctctttcctttctcgccccctttcatttttatttattcatatttatttggcgcccgctctctctctgtccctttgcctgcctccctccctccggatccccgctctctccccggagtggcgcgtcgggggctccgccgctggccaggcgtgatgttgcacgtggagatgttgacgctggtgtttctggtgctctggatgtgtgtgttcagccaggacccgggctccaaggccgtcgccgaccgctacgctgtctactggaacagcagcaaccccagattccagaggggtgactaccatattgatgtctgtatcaatgactacctggatgttttctgccctcactatgaggactccgtcccagaagataagactgagcgctatgtcctctacatggtgaactttgatggctacagtgcctgcgaccacacttccaaagggttcaagagatgggaatgtaaccggcctcactctccaaatggaccgctgaagttctctgaaaaattccagctcttcactcccttttctctaggatttgaattcaggccaggccgagaatatttctacatctcctctgcaatcccagataatggaagaaggtcctgtctaaagctcaaagtctttgtgagaccaacaaatagctgtatgaaaactataggtgttcatgatcgtgttttcgatgttaacgacaaagtagaaaattcattagaaccagcagatgacaccgtacatgagtcagccgagccatcccgcggcgagaacgcggcacaaacaccaaggatacccagccgccttttggcaatcctactgttcctcctggcgatgcttttgacattatagcacagtctcctcccatcacttgtcacagaaaacatcagggtcttggaacaccagagatccacctaactgctcatcctaagaagggacttgttattgggttttggcagatgtcagatttttgttttctttctttcagcctgaattctaagcaacaacttcaggttgggggcctaaacttgttcctgcctccctcaccccaccccgccccacccccagccctggcccttggcttctctcacccctcccaaattaaatggactccagatgaaaatgccaaattgtcatagtgacaccagtggttcgtcagctcctgtgcattctcctctaagaactcacctccgttagcgcactgtgtcagcgggctatggacaaggaagaatagtggcagatgcagccagcgctggctagggctgggagggttttgctctcctatgcaatatttatgccttctcattcagaactgtaagatgatcgcgcagggcatcatgtcaccatgtcaggtccggaggggaggtattaagaatagatacgatattacaccatttcctataggagtatgtaaatgaacaggcttctaaaaggttgagacactggttttttttttt

SEQ ID NO: 31892 - DNA, 5923 bp, Homo Sapiens
gctgccccgagcctttctggggaagaactccaggcgtgcggacgcaacagccgagaacattaggtgttgtggacaggagctgggaccaagatcttcggccagccccgcatcctcccgcatcttccagcaccgtcccgcaccctccgcatccttccccgggccaccacgcttcctatgtgacccgcctgggcaacgccgaacccagtcgcgcagcgctgcagtgaattttccccccaaactgcaataagccgccttccaaggccaagatgttcataaatataaagagcatcttatggatgtgttcaaccttaatagtaacccatgcgctacataaagtcaaagtgggaaaaagcccaccggtgaggggctccctctctggaaaagtcagcctaccttgtcatttttcaacgatgcctactttgccacccagttacaacaccagtgaatttctccgcatcaaatggtctaagattgaagtggacaaaaatggaaaagatttgaaagagactactgtccttgtggcccaaaatggaaatatcaagattggtcaggactacaaagggagagtgtctgtgcccacacatcccgaggctgtgggcgatgcctccctcactgtggtcaagctgctggcaagtgatgcgggtctttaccgctgtgacgtcatgtacgggattgaagacacacaagacacggtgtcactgactgtggatggggttgtgtttcactacagggcggcaaccagcaggtacacactgaattttgaggctgctcagaaggcttgtttggacgttggggcagtcatagcaactccagagcagctctttgctgcctatgaagatggatttgagcagtgtgacgcaggctggctggctgatcagactgtcagatatcccatccgggctcccagagtaggctgttatggagataagatgggaaaggcaggagtcaggacttatggattccgttctccccaggaaacttacgatgtgtattgttatgtggatcatctggatggtgatgtgttccacctcactgtccccagtaaattcaccttcgaggaggctgcaaaagagtgtgaaaaccaggatgccaggctggcaacagtgggggaactccaggcggcatggaggaacggctttgaccagtgcgattacgggtggctgtcggatgccagcgtgcgccaccctgtgactgtggccagggcccagtgtggaggtggtctacttggggtgagaaccctgtatcgttttgagaaccagacaggcttccctccccctgatagcagatttgatgcctactgctttaaacctaaagaggctacaaccatcgatttgagtatcctcgcagaaactgcatcacccagtttatccaaagaaccacaaatggtttctgatagaactacaccaatcatccctttagttgatgaattacctgtcattccaacagagttccctcccgtgggaaatattgtcagttttgaacagaaagccacagtccaacctcaggctatcacagatagtttagccaccaaattacccacacctactggcagtaccaagaagccctgggatatggatgactactcaccttctgcttcaggacctcttggaaagctagacatatcagaaattaaggaagaagtgctccagagtacaactggcgtctctcattatgctacggattcatgggatggtgtcgtggaagataaacaaacacaagaatcggttacacagattgaacaaatagaagtgggtcctttggtaacatctatggaaatcttaaagcacattccttccaaggaattccctgtaactgaaacaccattggtaactgcaagaatgatcctggaatccaaaactgaaaagaaaatggtaagcactgtttctgaattggtaaccacaggtcactatggattcaccttgggagaagaggatgatgaagacagaacacttacagttggatctgatgagagcaccttgatctttgaccaaattcctgaagtcattacggtgtcaaagacttcagaagacaccatccacactcatttagaagacttggagtcagtctcagcatccacaactgtttcccctttaattatgcctgataataatggatcatccatggatgactgggaagagagacaaactagtggtaggataacggaagagtttcttggcaaatatctgtctactacaccttttccatcacagcatcgtacagaaatagaattgtttccttattctggtgataaaatattagtagagggaatttccacagttatttatccttctctacaaacagaaatgacacatagaagagaaagaacagaaacactaataccagagatgagaacagatacttatacagatgaaatacaagaagagatcactaaaagtccatttatgggaaaaacagaagaagaagtcttctctgggatgaaactctctacatctctctcagagccaattcatgttacagagtcttctgtggaaatgaccaagtcttttgatttcccaacattgataacaaagttaagtgcagagccaacagaagtaagagatatggaggaagactttacagcaactccaggtactacaaaatatgatgaaaatattacaacagtgcttttggcccatggtactttaagtgttgaagcagccactgtatcaaaatggtcatgggatgaagataatacaacatccaagcctttagagtctacagaaccttcagcctcttcaaaattgccccctgccttactcacaactgtggggatgaatggaaaggataaagacatcccaagtttcactgaagatggagcagatgaatttactcttattccagatagtactcaaaagcagttagaggaggttactgatgaagacatagcagcccatggaaaattcacaattagatttcagccaactacatcaactggtattgcagaaaagtcaactttgagagattctacaactgaagaaaaagttccacctatcacaagcactgaaggccaagtttatgcaaccatggaaggaagtgctttgggtgaagtagaagatgtggacctctctaagccagtatctactgttccccaatttgcacacacttcagaggtggaaggattagcatttgttagttatagtagcacccaagagcctactacttatgtagactcttcccataccattcctctttctgtaattcccaagacagactggggagtgttagtaccttctgttccatcagaagatgaagttctaggtgaaccctctcaagacatacttgtcattgatcagactcgccttgaagcgactatttctccagaaactatgagaacaacaaaaatcacagagggaacaactcaggaagaattcccttggaaagaacagactgcagagaaaccagttcctgctctcagttctacagcttggactcccaaggaggcagtaacaccactggatgaacaagagggcgatggatcagcatatacagtctctgaagatgaattgttgacaggttctgagagggtcccagttttagaaacaactccagttggaaaaattgatcacagtgtgtcttatccaccaggtgctgtaactgagcacaaagtgaaaacagatgaagtggtaacactaacaccacgcattgggccaaaagtatctttaagtccagggcctgaacaaaaatatgaaacagaaggtagtagtacaacaggatttacatcatctttgagtccttttagtacccacattacccagcttatggaagaaaccactactgagaaaacatccctagaggatattgatttaggctcaggattatttgaaaagcccaaagccacagaactcatagaattttcaacaatcaaagtcacagttccaagtgatattaccactgccttcagttcagtagacagacttcacacaacttcagcattcaagccatcttccgcgatcactaagaaaccacctctcatcgacagggaacctggtgaagaaacaaccagtgacatggtaatcattggagaatcaacatctcatgttcctcccactacccttgaagatattgtagccaaggaaacagaaaccgatattgatagagagtatttcacgacttcaagtcctcctgctacacagccaacaagaccacccactgtggaagacaaagaggcctttggacctcaggcgctttctacgccacagcccccagcaagcacaaaatttcaccctgacattaatgtttatattattgaggtcagagaaaataagacaggacctgatcgctgcaaaatgaacccgtgccttaacggaggcacctgttatcctactgaaacttcctacgtatgcacctgtgtgccaggatacagcggagaccagtgtgaacttgattttgatgaatgtcactctaatccctgtcgtaatggagccacttgtgttgatggttttaacacattcaggtgcctctgccttccaagttatgttggtgcactttgtgagcaagataccgagacatgtgactatggctggcacaaattccaagggcagtgctacaaatactttgcccatcgacgcacatgggatgcagctgaacgggaatgccgtctgcagggtgcccatctcacaagcatcctgtctcacgaagaacaaatgtttgttaatcgtgtgggccatgattatcagtggataggcctcaatgacaagatgtttgagcatgacttccgttggactgatggcagcacactgcaatacgagaattggagacccaaccagccagacagcttcttttctgctggagaagactgtgttgtaatcatttggcatgagaatggccagtggaatgatgttccctgcaattaccatctcacctatacgtgcaagaaaggaacagttgcttgcggccagccccctgttgtagaaaatgccaagacctttggaaagatgaaacctcgttatgaaatcaactccctgattagataccactgcaaagatggtttcattcaacgtcaccttccaactatccggtgcttaggaaatggaagatgggctatacctaaaattacctgcatgaacccatctgcataccaaaggacttattctatgaaatactttaaaaattcctcatcagcaaaggacaattcaataaatacatccaaacatgatcatcgttggagccggaggtggcaggagtcgaggcgctgatccctaaaatggcgaacatgtgttttcatcatttcagccaaagtcctaacttcctgtgcctttcctatcacctcgagaagtaattatcagttggtttggatttttggaccaccgttcagtcattttgggttgccgtgctcccaaaacattttaaatgaaagtattggcattcaaaaagacagcagacaaaatgaaagaaaatgagagcagaaagtaagcatttccagcctatctaatttctttagttttctatttgcctccagtgcagtccatttcctaatgtataccagcctactgtactatttaaaatgctcaatttcagcaccgatggccatgtaaataagatgatttaatgttgattttaatcctgtatataaaataaaaagtcacaatgagtttgggcatatttaatgatgattatggagccttagaggtctttaatcattggttcggctgcttttatgtagtttaggctggaaatggtttcacttgctctttgactgtcagcaagactgaagatggcttttcctggacagctagaaaacacaaaatcttgtaggtcattgcacctatctcagccataggtgcagtttgcttctacatgatgctaaaggctgcgaatgggatcctgatggaactaaggactccaatgtcgaactcttctttgctgcattcctttttcttcacttacaagaaaggcctgaatggaggacttttctgtaaccagg

SEQ ID NO: 31893 - DNA, 1507 bp, Homo Sapiens
ctcgaggccacgaaggccccgacaccatgtcctgccgggatcggacccaggagtttctgtctgcctgcaagtcgctgcagacccgtcagaatggaatccagacaaataagccagctttgcgtgctgtccgacaacgcagtgaattcaccctcatggccaagcgcattgggaaagaccttagcaacacatttgccaagctggagaagctgacaatcttggcaaagcgcaagtccctctttgatgataaagcagtggaaattgaagagctaacatatatcatcaaacaggacatcaatagcctcaacaaacaaattgctcagctccaggatttcgtgagagccaagggcagccagagtggccggcacctgcagacccactccaacaccattgtggtctccttgcagtcgaaactggcttctatgtccaatgacttcaaatcggttttagaagtgaggacagagaacctgaagcagcagaggagccggagagagcagttctcccgggcacctgtgtcagccctgccccttgcccctaaccacctgggcggtggtgctgtggttctgggggcagagtcccatgcctccaaggatgtcgccatcgacatgatggactctcggaccagccagcagctgcagctcattgacgagcaggattcctacatccagagtcgggcagacaccatgcagaacattgagtcgacaattgttgagttgggctccatctttcagcagttggcacacatggttaaggaacaggaggaaaccattcagaggatcgacgagaacgtgctaggagcccagctggacgttgaggccgcccattcagagatcctcaagtacttccagtctgtcacctccaaccggtggctcatggtcaaaatcttcctcatcctcattgtcttcttcatcatctttgtggtcttccttgcttgaaccctctctactctgaggcactctgttggggtttgggaccctcctgggaaggcaagtggccagtgctgccactgagcctgtgcagggtacttgggagaaaggccctgtttccctggaactgctaagaatgaccactgcccctgatcccccaccccttgcctctggccaccctgtcctccccccaccaccctcaggcctatgaaacacacagggttctagatttgaactctgctgtgaagtgactggaagggagcagaggccagctgggggccagtgggggaggttgtttccactaggagatttttataaaccctctccagcctctcccggaaaggaagcgttggcagcaaagggagatgatgcccttacccaccttcctgtgagtgaagagaggaagcagccccagggaccaattttcccaattgacctctttcttcctctttcaccatgtgaggcagggagccctgagcccttcagctgcctgcacaacccctgacattggctgctggtgactcaatctgccaaatgtgctgcagctcgttttctcccaattacagcaagactgtcagcctcca

SEQ ID NO: 31894 - DNA, 3982 bp, Homo Sapiens
ctgggtcctgtgtgtgccacaggggtggggtgtccagcgagcggtctcctcctcctgctagtgctgctgcggcgtcccgcggcctccccgagtcgggcgggaggggagagcgggtgtggatttgtcttgacggtaattgttgcgtttccacgtctcggaggcctgcgcgctgggttgctccttcttcgggagcgagctgttctcagcgatcccactcccagccggggctccccacacacactgggctgcgtgcgtgtggagtgggacccgcgcacacgcgtgtctctggacagctacggcgccgaaagaactaaaattccagatggcaaactcaatgaatggcagaaaccctggtggtcgaggaggaaatccccgaaaaggtcgaattttgggtattattgatgctattcaggatgcagttggaccccctaagcaagctgccgcagatcgcaggaccgtggagaagacttggaagctcatggacaaagtggtaagactgtgccaaaatcccaaacttcagttgaaaaatagcccaccatatatacttgatattttgcctgatacatatcagcatttacgacttatattgagtaaatatgatgacaaccagaaacttgcccaactcagtgagaatgagtactttaaaatctacattgatagccttatgaaaaagtcaaaacgggcaataagactctttaaagaaggcaaggagagaatgtatgaagaacagtcacaggacagacgaaatctcacaaaactgtcccttatcttcagtcacatgctggcagaaatcaaagcaatctttcccaatggtcaattccagggagataactttcgtatcacaaaagcagatgctgctgaattctggagaaagttttttggagacaaaactatcgtaccatggaaagtattcagacagtgccttcatgaggtccaccagattagctctagcctggaagcaatggctctaaaatcaacaattgatttaacttgcaatgattacatttcagtttttgaatttgatatttttaccaggctgtttcagccttggggctctattttgcggaattggaatttcttagctgtgacacatccaggttacatggcatttctcacatatgatgaagttaaagcacgactacagaaatatagcaccaaacccggaagctatattttccggttaagttgcactcgattgggacagtgggccattggctatgtgactggggatgggaatatcttacagaccatacctcataacaagcccttatttcaagccctgattgatggcagcagggaaggattttatctttatcctgatgggaggagttataatcctgatttaactggattatgtgaacctacacctcatgaccatataaaagttacacaggaacaatatgaattatattgtgaaatgggctccacttttcagctctgtaagatttgtgcagagaatgacaaagatgtcaagattgagccttgtgggcatttgatgtgcacctcttgccttacggcatggcaggagtcggatggtcagggctgccctttctgtcgttgtgaaataaaaggaactgagcccataatcgtggacccctttgatccaagagatgaaggctccaggtgttgcagcatcattgacccctttggcatgccgatgctagacttggacgacgatgatgatcgtgaggagtccttgatgatgaatcggttggcaaacgtccgaaagtgcactgacaggcagaactcaccagtcacatcaccaggatcctctccccttgcccagagaagaaagccacagcctgacccactccagatcccacatctaagcctgccacccgtgcctcctcgcctggatctaattcagaaaggcatagttagatctccctgtggcagcccaacaggttcaccaaagtcttctccttgcatggtgagaaaacaagataaaccactcccagcaccacctcctcccttaagagatcctcctccaccgccacctgaaagacctccaccaatcccaccagacaatagactgagtagacacatccatcatgtggaaagcgtgccttccagagacccgccaatgcctcttgaagcatggtgccctcgggatgtgtttgggactaatcagcttgtgggatgtcgactcctaggggagggctctccaaaacctggaatcacagcgagttcaaatgtcaatggaaggcacagtagagtgggctctgacccagtgcttatgcggaaacacagacgccatgatttgcctttagaaggagctaaggtcttttccaatggtcaccttggaagtgaagaatatgatgttcctccccggctttctcctcctcctccagttaccaccctcctccctagcataaagtgtactggtccgttagcaaattctctttcagagaaaacaagagacccagtagaggaagatgatgatgaatacaagattccttcatcccaccctgtttccctgaattcacaaccatctcattgtcataatgtaaaacctcctgttcggtcctgtgataatggtcactgtatgctgaatggaacacatggtccatcttcagagaagaaatcaaacatccctgacttaagcatatatttaaagggagatgtttttgattcagcctctgatcccgtgccattaccacctgccaggcctccaactcgggacaatccaaagcatggttcttcactcaacaggacgccctctgattatgatcttctcatccctccattaggtgaagatgcttttgatgccctccctccatctctcccacctcccccacctcctgcaaggcatagtctcattgaacattcaaaacctcctggctccagtagccggccatcctcaggacaggatctttttcttcttccttcagatccctttgttgatctagcaagtggccaagttcctttgcctcctgctagaaggttaccaggtgaaaatgtcaaaactaacagaacatcacaggactatgatcagcttccttcatgttcagatggttcacaggcaccagccagaccccctaaaccacgaccgcgcaggactgcaccagaaattcaccacagaaaaccccatgggcctgaggcggcattggaaaatgtcgatgcaaaaattgcaaaactcatgggagagggttatgcctttgaagaggtgaagagagccttagagatagcccagaataatgtcgaagttgcccggagcatcctccgagaatttgccttccctcctccagtatccccacgtctaaatctatagcagccagaactgtagacaccaaaatggaaagcaatcgatgtattccaagagtgtggaaataaagagaactgagatggaattcaagagagaagtgtctcctcctcgtgtagcagcttgagaagaggcttgggagtgcagcttctcaaaggagaccgatgcttgctcaggatgtcgacagctgtggcttccttgtttttgctagccatatttttaaatcagggttgaactgacaaaaataatttaaagacgtttacttcccttgaactttgaacctgtgaaatgctttaccttgtttacaatttggcaaagttgcagtttgttcttgtttttagtttagttttgttttggtgttttgatacctgtactgtgttcttcacagaccctttgtagcgtggtcaggtctgctgtaacatttcccaccaactctcttgctgtccacatcaacagctaaatcatttattcatatggatctctaccatccccatgccttgcccaggtccagttccatttctctcattcacaagatgctttgaaggttctgattttcaactgatcaaactaatgcaaaaaaaaaaagtatgtattcttcactactgagtttcttctttggaaaccatcactattgagagatgggaaaaacctgaatgtataaagcatttatttgtcaataaactgccttttgtaaggggttttcacataaaaaaaaaaaaa

SEQ ID NO: 31895 - DNA, 2584 bp, Homo Sapiens
gcaggcggcaatgtggggactcggggcccggggccccgaccgggggctgctgctggcgctggcgctgggcgggctggcgcgggccgggggcgtcgaggtggagcccggcggcgcgcacggcgagagcgggggcttccaggtggtcaccttcgagtgggcccacgtgcaggatccctacgtcatcgcgctctggatcctcgtggccagcttggccaagatcgggttccacctgtcccacaaggtcaccagcgtggttcccgagagcgccctgctcatcgtgctgggcctggtgctgggcggcatcgtctgggcggccgaccacatcgcgtccttcacactgacgcccaccgtcttcttcttctacctgctgccccccatcgtgctggacgccggctacttcatgcccaaccgcctcttcttcggcaacctggggaccatcctgttgtacgccgtcgtgggtaccgtgtggaacgcggccaccaccgggctgtccctctacggcgtcttcctcagtgggctcatgggcgacctgcagattgggctgctggacttcctcctgtttggcagcctcatggcggctgtggacccggtggccgtcctggccgtgtttgaggaggtccatgtcaacgaggtcctgttcatcatcgtcttcggggagtcgctgctgaacgacgcagtcaccgtggttctgtacaatgtgtttgaatctttcgtggcgctgggaggtgacaacgtgactggcgtggactgcgtgaagggcatagtgtccttcttcgtggtgagcctggggggcacgctggtgggggtggtcttcgccttcctgctgtcgctggtgacgcgcttcaccaagcatgtgcgtatcatcgagcccggcttcgtgttcatcatctcctacctgtcctacctgacgtccgagatgctgtcgctgtcggccatcctcgccatcaccttctgtggcatctgctgtcagaagtatgtgaaggccaacatctcggagcagtcggccaccaccgtgcgctacaccatgaagatgctggccagcagcgccgagaccatcatcttcatgttcctgggtatctcggccgtgaacccgttcatctggacctggaacacggccttcgtgctcctgacgctggtcttcatctccgtgtaccgggccatcggtgtggtcctgcagacctggcttctgaaccgctaccgcatggtgcagctggagcccattgaccaggtggtcctgtcctacgggggcctgcgcggggccgtggcctttgccctggtggtgcttctggatggagacaaggtcaaggagaagaacctgttcgtcagcaccaccatcatcgtagtgttcttcaccgtcatcttccagggcctgaccatcaagcctctggtgcagtggctgaaggtgaagaggagcgagcaccgggaacctcggctcaacgagaagctgcacggccgcgctttcgaccacatcctctcggccatcgaggacatatccggacagatcgggcacaattatctcagagacaagtggtcccacttcgacaggaagttcctcagcagggtcctcatgagacggtcggcccagaagtctcgagaccggatcctgaatgtcttccacgagctgaacctgaaggatgccatcagctacgtggctgagggagagcgccgcgggtccctggccttcatccgctcccccagcaccgacaacgtggtcaacgtggacttcacgccacgatcgtccaccgtggaggcctctgtctcctacctcctgagagaaaatgtcagcgctgtctgcctggacatgcagtctctggagcagcgacggcggagcatccgggacgcggaggacatggtcacgcaccacacgctacagcagtacctgtacaagccgcggcaggagtacaagcatctgtacagccgacacgagctcacgcccacggaggacgagaaacaggaccgggaaatcttccacaggaccatgcggaagcgcctggagtccttcaagtcgaccaagctggggctcaaccagaacaagaaggcagccaagctgtacaagcgggagcgtgcccagaagcggagaaacagcagcatccccaatgggaagctgcccatggagagccctgcgcagaatttcaccatcaaggagaaagacttggaactttcagacaccgaggagccccccaactatgatgaggagatgagtggggggatcgagttcctggctagtgtcaccaaggacacagcgtccgactcccctgcaggaattgacaaccctgtgttttctccggacgaggccctggaccgcagcctcctggccaggctgccgccctggctgtctcccggggagacggtggtcccctcgcagagggcccgcacgcagattccctactctcccggcaccttccgccgcctgatgcccttccgcctcagcagcaagtccgtggactccttcctgcaggcagacggccccgaggagcggccccccgccgccctccccgagtccacacacatgtgacaccggctccgacacgccgctaaccggccgctcgtccccgcgccacggtccgcccaccgccgccgccgc

SEQ ID NO: 31896 - DNA, 2279 bp, Homo Sapiens
cctgggccggatgtcccgatgagagagccgcgctgacggccagcgccatggcttaccacccgttccacgcgccacggcccgccgacttccccatgtccgcctttctggcggcggcgcagccctccttcttcccggcactcgcgctgccgcccggcgcgctggccaagccgctgcccgacccgggcctggcgggggcggcggccgcggcggcggcggcggcagcagcggccgaggcggggctgcacgtctcggcactgggcccgcacccgcccgccgcgcatctgcgctccctcaagagcctggagcccgaggacgaggtggaggacgaccccaaggtgacgctggaggccaaggagctgtgggaccagttccacaagctaggcacggagatggtcatcaccaagtccgggaggcggatgttcccccccttcaaggtgcgagtcagcggcctggacaagaaggccaagtatatcctgctgatggacattgtagccgctgacgattgccgctataagttccacaactcgcgctggatggtggcgggcaaggccgaccctgagatgcccaaacgcatgtacatccacccagacagcccagccacgggggagcagtggatggctaagcctgtggccttccacaagctgaagctgaccaacaacatctctgacaagcacggcttcaccatcctaaactccatgcacaagtaccagccgcgattccacatagtgcgagccaacgacatcctgaagctgccttacagcaccttccgcacctacgtgttcccggagaccgacttcatcgccgtcactgcctaccagaatgacaagatcacacagctgaagatcgacaacaacccgtttgccaagggcttccgggacaccgggaacggccggcgggagaaaaggaagcagctgacgctgccgtctctacgcttgtacgaggagcactgcaaacccgagcgcgatggcgcggagtcagacgcctcgtcgtgcgaccctccccccgcgcgggaaccacccacctccccgggcgcagcgcccagtccgctgcgcctgcaccgggcccgagctgaggagaagtcgtgcgccgcggacagcgacccggagcctgagcggttgagcgaggagcgtgcgcgggcgccgctaggccgcagcccggctccagacagcgccagccccactcgcttgaccgaacccgagcgcgcccgggagcggcgttgtcccgagaggggcaaggagccggccgagagcggcggggacggcccgttcggcctgaggagcctggagaaggagcgccccgaagctcggaggaaggacgaggggcgcaaggaggcggccgagggcaaggagcagggcctggcgccgctggtggtgcagacagacagtgcgtcccccctgggcgccggacacctgcccggcctggccttttccagccacttgcacgggcagcagttctttgggccgctgggagccggccagccgctcttcctgcaccctggacagttcaccatgggccctggcgccttctccgccatgggcatgggtcacctactggcctcggtggcaggcggcggcaacggcggaggtggcgggcctgggaccgccgcggggctggacgcaggcgggctgggtcccgcggccagcgcagcaagcaccgccgcgcccttcccgttccacctctcccagcacatgctggcatctcagggaattccaatgcccactttcggaggcctcttcccctacccctacacctacatggcagcagcagccgcagccgcctcggctttgcccgccactagtgctgcagctgccgccgccgcagccgccggctccctctcccggagccccttcctgggcagtgcccggccccgactgcgtttcagcccctatcagatcccggtcaccatcccgcctagcactagcctcctcaccaccgggctggcctctgagggctccaaggccgctggtggaaacagccgggagcctagccccctgcccgagctggctctccgcaaagtaggggccccatcccgcggtgccctgtcgcccagtggctcggccaaggaggcggccaatgaactgctgagcatccagagactggtgagtgggctggagagccagcgagccctctccccaggccgggagtcgcccaagtgaggggctgcccagctgctcccctgccacgcaggccacccgggctgcctgcccctgctgcttgggacgtgtacagcacagaatgagtatttatttaaataaaggagaaaagtgggctgcagccgg

SEQ ID NO: 31897 - DNA, 2919 bp, Homo Sapiens
tctgtgattgtggccaggcggggcaccctcggaggggagggttcggaagtggaatgcgaccccccagcctctttcccctaggggctgtaatctgatccctggggactccccccctagcctcccgccctcgccctcactgctgactcctcttccagatcctggggcagagtccagggcagctcaaggctcctccacacacacacccgctgaaccctgagcaccctgagctgctgagatggggcgggccggggctgccgccgtgatcccgggcctggccctgctctgggcagtggggctggggagtgccgcccccagccccccacgccttcggctctccttccaagagctccaggcctggcatggtctccagactttcagcctggagcgaacctgctgctaccaggccttgctggtggatgaggagcgtggacgcctgtttgtgggtgccgagaaccatgtggcctccctcaacctggacaacatcagcaagcgggccaagaagctggcctggccggcccctgtggaatggcgagaggagtgcaactgggcagggaaggacattggtactgagtgcatgaacttcgtgaagttgctgcatgcctacaaccgcacccatttgctggcctgtggcacgggagccttccacccaacctgtgcctttgtggaagtgggccaccgggcagaggagcccgtcctccggctggacccaggaaggatagaggatggcaaggggaagagtccttatgaccccaggcatcgggctgcctccgtgctggtgggggaggagctatactcaggggtggcagcagacctcatgggacgagactttaccatctttcgcagcctagggcaacgtccaagtctccgaacagagccacacgactcccgctggctcaatgagcccaagtttgtcaaggtattttggatcccggagagcgagaacccagacgacgacaaaatctacttcttctttcgtgagacggcggtagaggcggcgccggcactgggacgcctgtccgtgtcccgcgttggccagatctgccggaacgacgtgggcggccagcgcagcctggtcaacaagtggacgacgttcctgaaggcgcggctggtgtgctcggtgcccggcgtcgagggcgacacccacttcgatcagctccaggatgtgtttctgttgtcctcgcgggaccaccggaccccgctgctctatgccgtcttctccacgtccagcagcatcttccagggctctgcggtgtgcgtgtacagcatgaacgacgtgcgccgggccttcttgggaccctttgcacacaaggaggggcccatgcaccagtgggtgtcataccagggtcgcgtcccctacccgcggccaggcatgtgccccagcaagacctttggcaccttcagttccaccaaggacttcccagacgatgtcatccagtttgcgcggaaccaccccctcatgtacaactctgtcctgcccactggggggcgccctcttttcctacaagttggagccaattacaccttcactcaaattgccgcggaccgggttgcagccgctgacggacactatgacgtcctcttcattggcacagacgttggcacggtgctgaaggtgatctcggtccccaagggcagtaggcccagcgcagaggggctgctcctggaggagctgcacgtgtttgaggactcggccgctgtcaccagcatgcaaatttcttccaagaggcaccagctgtacgtagcctcgcggagcgcggtggcccagatcgcgttgcaccgctgcgctgcccacggccgcgtctgcaccgaatgctgtctggcgcgtgacccctactgcgcctgggacggggtcgcgtgcacgcgcttccagcccagtgccaagaggcggttccggcggcaagacgtaaggaatggcgaccccagcacgttgtgctccggagactcgtctcgtcccgcgctgctggaacacaaggtgttcggcgtggagggcagcagcgcctttctggagtgtgagccccgctcgctgcaggcgcgcgtggagtggactttccagcgcgcaggggtgacagcccacacccaggtgctggcagaggagcgcaccgagcgcaccgcccggggactactgctgcgcaggctgcggcgccgggactcgggcgtgtacttgtgcgccgccgtcgagcagggctttacgcaaccgctgcgtcgcctgtcgctgcacgtgttgagtgctacgcaggccgaacgactggcgcgggccgaggaggctgcgcccgccgcgccgccgggccccaaactctggtaccgggactttctgcagctggtggagccgggcggaggtggcagcgcgaactccctgcgcatgtgccgcccgcagcctgcgctgcagtcactgcccctggagtcgcggagaaagggccgtaaccggaggacccacgcccctgagcctcgcgctgagcgggggccgcgcagcgcaacgcactggtgaccagactgtccccacgccgggaaccaagcaggagacgacaggcgagagaggagccagacagaccctgaaaagaaggacgggttggggccgggcacattgggggtcaccggccgatggagacaccaaccgacaggccctggctgagggcagctgcgcgggcttatttattaacaggataacccttgaatgtagcagccccgggagggcggcacaggtcgggcgcaggattcagccggagggaagggacggggaagccgagctccagagcaacgaccagggccgaggaggtgcctggagtgcccaccctgggagacagaccccacctccttgggtagtgagcagtgagcagaaagctgtgaacaggctgggctgctggaggtggggcgaggcaggccgactgtactaaagtaacgcaataaacgcattatcagcca

SEQ ID NO: 31898 - DNA, 2636 bp, Homo Sapiens
ctctaaagcgcaaggcgagagctgcaaagatgtaaaagtcaagagaagactctaaaaatagcaaagatgcttttgagccagaatgccttcatcttcagatcacttaatttggttctcatggtgtatatcagcctcgtgtttggtatttcatatgattcgcctgattacacagatgaatcttgcactttcaagatatcattgcgaaatttccggtccatcttatcatgggaattaaaaaaccactccattgtaccaactcactatacattgctgtatacaatcatgagtaaaccagaagatttgaaggtggttaagaactgtgcaaataccacaagatcattttgtgacctcacagatgagtggagaagcacacacgaggcctatgtcaccgtcctagaaggattcagcgggaacacaacgttgttcagttgctcacacaatttctggctggccatagacatgtcttttgaaccaccagagtttgagattgttggttttaccaaccacattaatgtggtggtgaaatttccatctattgttgaggaagaattacagtttgatttatctctcgtcattgaagaacagtcagagggaattgttaagaagcataaacccgaaataaaaggaaacatgagtggaaatttcacctatatcattgacaagttaattccaaacacgaactactgtgtatctgtttatttagagcacagtgatgagcaagcagtaataaagtctcccttaaaatgcaccctccttccacctggccaggaatcagaatcagcagaatctgccaaaataggaggaataattactgtgtttttgatagcattggtcttgacaagcaccatagtgacactgaaatggattggttatatatgcttaagaaatagcctccccaaagtcttgaattttcataactttttagcctggccatttcctaacctgccaccgttggaagccatggatatggtggaggtcatttacatcaacagaaagaagaaagtgtgggattataattatgatgatgaaagtgatagcgatactgaggcagcgcccaggacaagtggcggtggctataccatgcatggactgactgtcaggcctctgggtcaggcctctgccacctctacagaatcccagttgatagacccggagtccgaggaggagcctgacctgcctgaggttgatgtggagctccccacgatgccaaaggacagccctcagcagttggaactcttgagtgggccctgtgagaggagaaagagtccactccaggacccttttcccgaagaggactacagctccacggaggggtctgggggcagaattaccttcaatgtggacttaaactctgtgtttttgagagttcttgatgacgaggacagtgacgacttagaagcccctctgatgctatcgtctcatctggaagagatggttgacccagaggatcctgataatgtgcaatcaaaccatttgctggccagcggggaagggacacagccaacctttcccagcccctcttcagagggcctgtggtccgaagatgctccatctgatcaaagtgacacttctgagtcagatgttgaccttggggatggttatataatgagatgactccaaaactattgaatgaacttggacagacaagcacctacagggttctttgtctctgcatcctaacttgctgccttatcgtctgcaagtgttctccaagggaaggaggaggaaactgtggtgttcctttcttccaggtgacatcacctatgcacattcccagtatggggaccatagtatcattcagtgcattgtttacatattcaaagtggtgcactttgaaggaagcacatgtgcacctttcctttacactaatgcacttaggatgtttctgcatcatgtctaccagggagcagggttccccacagtttcagaggtggtccaggaccctatgatatttctcttctttcgttcttttttttttttttttttgagacagagtctcgttctgtcacccaagctggagcgcaatggtgtgatcttggctcgctgcaacatccgcctcccgggttcgggtgattctcctgcctcagcctccctcgcaagtagctgggattacaggcgcctgccaccatgcctagcaaatttttgtatttttagtagagacaggattttgccatgttggccaggctggtctcgaactcctgacctcaagtgatctgccctcctcagcctcgtaaagtgctgggattacaggggtgagccgctgtgcctggctggccctgtgatatttctgtgaaataaattgggccagggtgggagcagggaaagaaaaggaaaatagtagcaagagctgcaaagcaggcaggaagggaggaggagagccaggtgagcagtggagagaaggggggccctgcacaaggaaacagggaagagccatcgaagtttcagtcggtgagccttgggcacctcacccatgtcacatcctgtctcctgcaattggaattccaccttgtccagccctccccagttaaagtggggaagacagactttaggatcacgtgtgtgactaatacagaaaggaaacatggcgtcggggagagggataaaacctgaatgccatattttaagttaaaaaaaaa

SEQ ID NO: 31899 - DNA, 3204 bp, Homo Sapiens
cctttactcatctatctatctatctatctattatctatctatcatctatctatctatgcaaacttaagaaaatagtgtgttaaaagaaaagctagagggcaagtgctaaatgtggcatgactagagggcttgtcacaggagagcagagactgccatccctgatgactggcacagggtttcaacatgaggtctcagtgctggtcaatgaataaatgtagaggcgtgattttagatctctctttgataacccatgattttacagaagaaaagatcttaggcttgaaggtgtgatgtttgatgatccaggtgccatttagtgaggaaaagttaaacccgcagtgtctgatgttgttagctttggacatgtgtgaacgattgacatggatatcctcccttctaatccacatgctttgggggaggatctaggaagcacttatggaagaatatgccattgcagctcaagtgtggaagctgagcacctgcgacctgtgtgagatcgccaggaacagcgtgctgcagagcggcctctcgcatcaggtatggagtgtgacggtgctgcctgtgtccctcctgggaaggctgcctgctgtgtgccaggagccttccaggcactggggatctgtgatgaacatagcaggcagggctctgagacactcaggcacagggagagaagacgcggcagcctcctgtgttttcatggctgcttcctcacccttctcagacctctacgcctccttggagaggccttccctgagccgcccattctaaaatagccacacacttgctattattctctatccccttaatcagtttttctccataccatttattcctgctgatgtttagttatgtgtttttctgtctttccctctagcatgtaagctctgtgagggcagaggtttgttccagaattatatcccggccgatagtcctggcacatagcaggctctcaatattcttgatagatgcacagtatctagactgaataaaaatctagactatgggactcagacatctgtcatttttaaaaagcctgatgaggagctggcactgagacccatgttctgatgtacgttaggtcccccgacacctccctgggtgatgtcactggttgggaagaggttgcattaggggctgtgctcgtcggatgatgatgcagcagagttaaaggcttaagattcttttcatgcgcagtgtggtgccttggattggccctccccaggaacattgtccttgtcagctctcaggagggacttcttaattagagtcttacctccttccccttgcctttcccatccccagcagctgctgcagaccttatctttcctctctgatcaaggaaagcacagccaggaatgaagggctgtctgaggatgactgaggttgtcagggtgacatccttgaggacacagaggccagcaggaattttaagagttctgtggggataagatgtcctgaccaaagatctgcttcagggggactagtctgacttgctgtgactgatgtcaaagctgcccacatggctatagaaagtgaatcaaaagtatatagtttcatttgtatttctcttggtccacaggaaaagcaaaagtttctgggacaaaattattataaagaaggacctgaaggaaatgatattcgaaagacaaatgtggctcagatccggatggcattccgatatgagaccttatgcaatgagctcagcttcctgtctgatgctatgaaatcagaagagatcaccgccttgaccaactaggtccagcatttgacatgcattttaactttttggttcaatttcaagtctgctgtggctaatagtggtcaagattccgaactaggactttcctctgtgaagaggatgcctctgaagaaattttaaactggtgattttggttgcactgctcactttaagagttaacatgctcacttgttagtatttctgagtaacaagatggtgacttctccttggggatctgggagctgagcacttgtctatacttgttcctaattttccaagtatttctcttgaaactgccagtgcctgaactgttggggccaggattttccctggtcagatgccaagtaacatgtggttttctgccatacttttctccattggcccaggtaggctaattggtagttgttcatttcagcctctggatggctggctgccttaaacacaatcaatttcaaagctccatttcataaaggggctactttgaaggagttaagatggaagacttccttcttgacaaattgtgtttttagtgaatttcttaaaccgttttatttagccctccttccctctttctagttggaagccaaatgtactcatgaaaacagccactcctattctgagtcttggtttcttcacctagaaagtgagggtttggactagatgagtggctttcagggtgttctgtgaatctcctcatgaatactttagggtgggggagggaagggagtgagtgatgctcaggggctgtcaaagtgactgcgttcatcagttttacactggggctgctacataatattttcatttgaacgaagaacttcaaaaagcacaggactagatgatctctgttccttttggctctaatatgctacaactgtaggccaattatcactttaccaattaagagttaggccagataagtgaaatttaacttaagggcacacagctaataagtaataggcctaaactggatttccttattccaaatcctgtcttttccccactattccattagaccccacaaatgttagttgtgtgtgtgtgtgtgtgtgtttttaatcactgtaaccgggtgcatttttttaaggcaaaatttctcccttatctactgtgatgacttcagaagatacaatggtcccaggggccaagtagaaagcatttttaaagattaatctgaattaagctttatcagtgtactctttatctgtgttactagtgcctggtatgtagtaggtgctcaataaatgcatattgaataactaagtgaatttcttttggcaactttttaaggacatgtgctcttagtacttaagaggctgctcaaggaccttcctatctatttctgtggtcaaattcagactacaggaggtctttttgaatcattatagttagaagaagaatccagtttctgcctgtgaacttatttgactttagattgtctcatcttgtgactttataatgcctgtccc

SEQ ID NO: 31900 - DNA, 2036 bp, Homo Sapiens
tttcctctttctctaagagtctctctctccctttccctctctctccccccaatctgtctttctagcatgttgccctttttcaaccacatttgtgtttcaggtgtagagaggagagagagtgaacagggagcggggcttttgtctgttggtctccctggactgaagagagggagaatagaagcccaagactaagattctcaaaatggtttattacccagaactctttgtctgggtcagtcaagaaccatttccaaacaaggacatggagggaaggcttcctaagggaagacttcctgtcccaaaggaagtgaaccgcaagaagaacgatgagacaaacgctgcctccctgactccactgggcagcagtgaactccgctccccaagaatcagttacctccactttttttaatcgtaacacctccatttgtattacatatggtgtatgggtattgatgaggtcatggtatcatatatgggatttttttctgtgtaaatcatcaagtataagaagaaactatgggactctgagccttgctttagagaatttacagtggacaaataggtgtcatcaaaccagtttttaatcattctgactcaagtgaaaacgctcagaatttcacactgtgaatccacgtttacaacccttacaggtgggccttcaggcctggttcgctacaacaatgtcttccacaactcaaactcccaccgcgctcacacaaccggtccactcctgccttttcactcacacagctcccgactgcttcttgcagaggctgagagtccccccccccacctttttttttcatttagatgtaacaaacctagtagtttatgttcatcaattgtctgtatatctctatattttatccatgtactcttttgatgtatagaagtagtttgaaactcattgtttccttgtggtaagtgaccgagatgctgccacaggacctgagacactgatgaatggtgctattttggactttcaacatgctccttggcgaggtagctctgatggagttattttttatttccatgttctaagaaggtgttggtactctgtttccctgaatgttgttctctagactggattgacttgttttccttgtgtcttcagtgtggctttcttcctcagtgttgtaggttgagcgaatgctaccagagtgtgagagaccattgtctcgttggctggcgctcacggacatgcagtcacggtagcgggagcaatcacaaaactgtaatttacttaccaaatctcttcctttccgtagcctcgcctgcctgacttagagaaagaaaagcaataattttacaggcattttgaggtgtctctttgggttctttctgtttgaaaggatatttgtcgaaaaaaagagcaaaaccgttttaaataaactccccctggaaaaaaacccaaaacactggcatctgagtaggaatatgaaaatgacaccttttccaaatattaaattggaaaacaaggtctacaaaatcatgatacttttttaaaaggcagagcattcttttttcggcaattttgataagcaaggtgtagatttacatttttgtccttgctcccaacgaaatggataaacaaaaataaattaccatctactcatggaatgttgttgtgttagccagtctgaaagcccaccttaatttttatataactgtctttagctcttcttttgacagggcaggccttgttctgaactgtttcgcttctgactgttaaacaccgatgacgcatgcactgcacttcttcgttttcttcttgctcccccattggcctgagtttcttgtgcattactcctctccctccttcgttagaataggtatatcagctgtgtaaatagagcaagaaaacagtattctgcatctgtggcatttatgtagagttgcagttgtgtactgctgaaaatgcaggcttttgtaacagtgtgatctttactgatgcactcatgacaagtacccaatgtattttagctattttagtagtatttgttcaataaatacgcaagctgtaaggtaactgtctg

SEQ ID NO: 31901 - DNA, 2037 bp, Homo Sapiens
ggacagtcgggcggggagctcggcggcggcgggcgcgggaagatggcggcagcggcggcggcggctgcagaacagcaaagttccaatggtcctgtaaagaagtccatgcgtgagaaggctgttgagagaaggagtgtcaataaagagcacaacagtaactttaaagctggatacattccgattgatgaagatcgtctccacaaaacagggttgagaggaagaaagggcaatttagccatctgtgtgattatcctcttgtttatcctggctgtcatcaatttaataataacacttgttatttgggccgtgattcgcattggaccaaatggctgtgatagtatggagtttcatgaaagtggcctgcttcgatttaagcaagtatctgacatgggagtgatccaccctctttataaaagcacagtaggaggaaggcgaaatgaaaatttggtcatcactggcaacaaccagcctattgtttttcagcaagggacaacaaagctcagtgtagaaaacaacaaaacttctattacaagtgacatcggcatgcagttttttgacccgaggactcaaaatatcttattcagcacagactatgaaactcatgagtttcatttgccaagtggagtgaaaagtttgaatgttcaaaaggcatctactgaaaggattaccagcaatgctaccagtgatttaaatataaaagttgatgggcgtgctattgtgcgtggaaatgaaggtgtattcattatgggcaaaaccattgaatttcacatgggtggtaatatggagttaaaggcggaaaacagtatcatcctaaatggatctgtgatggtcagcaccacccgcctacccagttcctccagtggagaccagttgggtagtggtgactgggtacgctacaagctctgcatgtgtgctgatgggacgctcttcaaggtgcaagtaaccagccagaacatgggctgccaaatctcagacaacccctgtggaaacactcattaaaagaaccccagaggtcaccaacatgtttatatcttgacttgacttttttatgcatgcaaatcattgtttttacagagtttgtgataactcataattattttaatggcagagcactgctgtatctgttttatggtctacatagttaaaatcttctcagagagcctaaattctaatacattttattaatttatactaatcttcatatttactgttctctaaaataattatgagaagcaaataaaatccaaagtcatgtttaaagacgtgtttttaaaattccactatcccttttctaaaggttaaaggtctgaagcagctgtttagattcactgtaagtaaactttggtaactctaatggggatagacccacttaagatatttaaaaaggtatggcatcagcgtttcatgctctgccttttagcttctaaaaggaaagatgcagatttctagtgcattaagcctgagccatattctcacatgcaagtgaagtcattaaagaactttacatatgtgagatagaaacaatggttccttagttttgcactgggaagaaaatattttgtaaaagaatgtttatttgaaataatgataactatcaattgttcacaatgtggtggaaattaaaacaccatctcagctttaacttttaaataataatgataactatctttattgagcatcttctacatcctaggcattgtcctaggcattgcatgtttatatccccaattctcaccacaaccctgcaagtaggtggtattatccaagttttacccattaagaaactgaagatcagagaagttaagaaacttgctcaacatcatatagtaagtagcagagttgggattggaattcctttttttttttttttaactagagtaagcatatctgttttgtttgattctcatcttcttaggtaagtttaaattaacctttgttcatctttctagagttttaaataattaaaaagtcagtgcagagagtgaaaacaacatggcatttggaatcaagtacatccaggtttgagtcatgcctgaa

SEQ ID NO: 31902 - DNA, 1778 bp, Homo Sapiens
tgtctcattccttgaaatagaccagcctctcagtgtagatgaagaggggctggtcttactggagcagaagctttcccgagccaagacccagatcaacagccaactgcggcccatgatgtcagagctggaagagagggcacgtcagcagaggggccacctccatttgctggagacaagcatagatgggattctggctgatgtgaagaacttggagaacattagggacaacctgcccccaggctgctacaatacccaggctcttgagcaacagtgaagctgccataaatatttctcaactgaggttcttgggatacagatctcagggctcgggagccatgtcatgtgagtgggtgggatggggacatttgaacatgtttaatgggtatgctcaggtcaactgacctgaccccattcctgatcccatggccaggtggttgtcttattgcaccatactccttgcttcctgatgctgggcaatgaggcagatagcactgggtgtgagaatgatcaaggatctggaccccaaagaatagactggatggaaagacaaactgcacaggcagatgtttgcctcataatagtcgtaagtggagtcctggaatttggacaagtgctgttgggatatagtcaacttattctttgagtaatgtgactaaaggaaaaaactttgactttgcccaggcatgaaattcttcctaatgtcagaacagagtgcaacccagtcacactgtggccagtaaaatactattgcctcatattgtcctctgcaagcttcttgctgatcagagttcctcctacttacaacccagggtgtgaacatgttctccattttcaagctggaagaagtgagcagtgttggagtgaggacctgtaaggcaggcccattcagagctatggtgcttgctggtgcctgccaccttcaagttctggacctgggcatgacatcctttcttttaatgatgccatggcaacttagagattgcatttttattaaagcatttcctaccagcaaagcaaatgttgggaaagtatttactttttcggtttcaaagtgatagaaaagtgtggcttgggcattgaaagaggtaaaattctctagatttattagtcctaattcaatcctacttttcgaacaccaaaaatgatgcgcatcaatgtattttatcttattttctcaatctcctctctctttcctccacccataataagagaatgttcctactcacacttcagctgggtcacatccatccctccattcatccttccatccatctttccatccattacctccatccatccttccaacatatatttattgagtacctactgtgtgccaggggctggtgggacagtggtgacatagtctctgccctcatagagttgattgtctagtgaggaagacaagcatttttaaaaaataaatttaaacttacaaactttgtttgtcacaagtggtgtttattgcaataaccgcttggtttgcaacctctttgctcaacagaacatatgttgcaagaccctcccatgggggcacttgagttttggcaaggctgacagagctctgggttgtgcacatttctttgcattccagctgtcactctgtgcctttctacaactgattgcaacagactgttgagttatgataacaccagtgggaattgctggaggaaccagaggcacttccaccttggctgggaagactatggtgctgccttgcttctgtatttccttggattttcctgaaagtgtttttaaataaagaacaattgttagatgcc

SEQ ID NO: 31903 - DNA, 670 bp, Homo Sapiens
ggcacgagctcatctgacgactgacagctgatggcaccgccagcctctgtcccttggccaggactgtcacacggctgactctcagcaggggcagtagaatgaaagagggcatgtctaataacagcaccactagcatctcccaagccaggaaagctgtggagcagctaaagatggaagcctgtatggacagggtcaaggtctcccaggcagccgcggacctcctggcctactgtgaagctcacgtgcgggaagatcctctcatcattccagtgcctgcatcagaaaacccctttcgcgagaagaagttcttttgtaccattctctaactccgtgtgtgatgaaaacgcctccttttctgaccttcaaagtcccctgtagagaccatgcatgctctaagccttagggagtgagaccaacacccatccctgcccagccaacagtggccggggcttgtcttatgtttccatctgttttcttcgtggcattcaatttcatttttttccttttcattttcatgttattttcattattggcaaagaaaatcaaaatgtttatagccaaataacaaatgtgccatgtaaaagtaagtctggacttaagagtttaaaatttttaaacatcagtttccaagtttatatcatattaatacatttcagtggataatttattt

SEQ ID NO: 31904 - DNA, 2142 bp, Homo Sapiens
gcatttaaaggtgctggctgcgcccgccggagataagtacgccggcttcgcgcgctccccagcggcccgcgggaggcgacggacggcgggacggacggacggacggcagcttaccggggccgagggccaaacccgcggaacgcgcgggctccgacgggcaagcggcggacgggggctccggcgagcctcggggcccgggcgccctctccactccggggcgcacggcctcaccccgcacaccccctgcacccgcccggcatgcagcggggcccaggactgaggggcggaggcgtctgctctccgggtcccgctcggcccctgcccggcgctcccggcggtgctcccggcgtccggcgggcttcccggcggcggcgcggcgcggggacttttcgcctctcgctggcctctaccgagcgcgtctatgagcgcagcgttcccgccgtcgctgatgatgatgcagcgcccgctggggagtagcaccgccttcagcatagactcgctgatcggcagcccgccgcagcccagccccggccatttcgtctacaccggctaccccatgttcatgccctaccggccggtagtgctgccgccgccgccgccgccgccgcccgcgctgccccaggccgcgctgcagccagcctgccgcccgcacaccctcaccaccagatccccagcctgcccacaggcttctgctccagcctggcgcagggcatggcgctcacctctacgctcatggccacgctccccggcggcttctccgcgtcgccccagcaccaggaggcggcagcggcccgcaagttcgcgccgcagccgctgcccggcggcggtaacttcgacaaggcggaggcgctgcaggctgacgcggaggacggcaaaggcttcctggccaaagagggctcgctgctcgccttctccgcggccgagacggtgcaggcttcgctcgtcggggctgtccgagggcaagggaaagacgagtcaaaggtggaagacgacccgaagcaaggaggagagcttctcgctggagagcgatgtggactacagctcggatgacaatctgactggccaggcagctcacaaggaggaagacccgggccacgcgctggaggagaccccgccgagcagcggcgccgcgggcagcaccacgtctacgggcaagaaccggcggcggcggactgccttcaccagcgagcagctgctggagctagagaaggagttccactgcaaaaagtacctctccttgaccgagcgctcgcagatcgcccacgccctcaaactcagcgaggtgcaggtgaaaatctggttccagaaccgacgggccaagtggaaacgggtgaaggcaggcaatgccaattccaagacaggggagccctcccggaaccctaagatcgtcgtccccatccctgtccacgtcagcaggttcgctatcagaagtcagcatcagcagctagaacaggcccggccctgagggtccagaagggccagggcctggcacccacctggagaagcccccgcacccgagggaacccatggtggactccactgtgtttgaagcaacaaagtcacagcccagctgtggccatcccaagcaaattgagaatatattcactaaatgggcttaaaagactgcttttgaaggggcttacagccacaccagaagacacgctaaatatttattatactatcctactttgtacataaatatctctatagactggatctcagctgcagtattttgaaagttataggacttaattacccagtaatttctccactcattccagaagaaaacaaaacctctgctgtaatctgcgcggttagcagccacctttccatacttttccaaaggtaaacgtgaaacccaagaacaagcactggggtttaaactgattttggtttgcgttctggctttttgagttgactgaaaagcagacattgttaggcagcctggaaattcgctttgctttgctttgcttttgcctggctttggtttcccctggggttgcctatcctatctgagccatgtgaagcacgtctccgttgtgttaatttatttcaatgtagcttattttcttataagttatgacatttaaacaatttcagtcttgtgaataataaaaaggagagagggggggaaaaagacca

SEQ ID NO: 31905 - DNA, 3599 bp, Homo Sapiens
aaaatgaagttaagccgccagttcaccgtgttcggcagtgcgatcttctgtgtggtgattttctcgctctacctgatgctggaccggggtcacttagactaccccaggaacccgcgccgcgagggctccttccctcagggccagctctcaatgttgcaagaaaaaatagaccatttggagcgtttgctagctgagaataatgagatcatctcaaatattagagactcagtcatcaatttgagtgagtctgtggaggatggtccgaaaagttcacaaagcaatttcagccaaggtgctggctcacatcttctgccctcacaattatccctctcagttgacactgcagactgtctgtttgcttcacaaagtggaagtcacaattcagatgtgcagatgttggatgtttacagtctaatttcttttgacaatccagatggtggagtttggaagcaaggatttgacattacttatgaatctaatgaatgggacactgaaccccttcaagtctttgtggtgcctcattcccataacgacccaggttggttgaagactttcaatgactactttagagacaagactcagtatatttttaataacatggtcctaaagctgaaagaagactcacggaggaagtttatttggtctgagatctcttacctttcaaagtggtgggatattatagatattcagaagaaggatgctgttaaaagtttaatagaaaatggtcagcttgaaattgtgacaggtggctgggttatgcctgatgaagctactccacattattttgccttaattgatcaactaattgaaggacatcagtggctggaaaataatataggagtgaaacctcggtccggctgggctattgatccctttggacactcaccaacaatggcttatcttctaaaccgtgctggactttctcacatgcttatccagagagttcattatgcagttaaaaaacactttgcactgcataaaacattggagtttttttggagacagaattgggatctgggatctgtcacagatattttatgccacatgatgcccttctacagctatgacatccctcacacttgtggacctgatcctaaaatatgctgccagtttgattttaaacgtcttcctggaggcagatttggttgtccctggggagtccccccagaaacaatacatcctggaaatgtccaaagcagggctcggatgctactagatcagtaccgaaagaagtcaaagctttttcgaaccaaagttctcctggctccactaggagatgatttccgctactgtgaatacacggaatgggatttacagtttaagaattatcagcagctttttgattatatgaattctcagtccaagtttaaagttaagatacagtttggaactttatcagatttttttgatgcgctggataaagcagatgaaactcagagagacaagggccaatcgatgttccctgttttaagtggagattttttcacttatgccgatcgagatgatcattactggagtggctattttacatccagacccttttacaaacgaatggacagaatcatggaatctcatttaagggctgctgaaattctttactatttcgccctgagacaagctcacaaatacaagataaataaatttctctcatcatcactttacacggcactgacagaagccagaaggaatttgggactgtttcaacatcatgatgctatcacaggaactgcaaaagactgggtggttgtggattatggtaccagactttttcattcgttaatggttttggagaagataattggaaattctgcatttcttcttattgggaaggacaaactcacatacgactcttactctcctgataccttcctggagatggatttgaaacaaaaatcacaagattctctgccacaaaaaaatataataaggctgagtgcggagccaaggtaccttgtggtctataatcctttagaacaagaccgaatctcgttggtctcagtctatgtgagttccccgacagtgcaagtgttctctgcttcaggaaaacctgtggaagttcaagtcagcgcagtttgggatacagcaaatactatttcagaaacagcctatgagatctcttttcgagcacatataccgccattgggactgaaagtgtataagattttggaatcagcaagttcaaattcacatttagctgattatgtcttgtataagaataaagtagaagatagcggaattttcaccataaagaatatgataaatactgaagaaggtataacactagagaactcctttgttttacttcggtttgatcaaactggacttatgaagcaaatgatgactaaagaagatggtaaacaccatgaagtaaatgtgcaattttcatggtatggaaccacaattaaaagagacaaaagtggtgcctacctcttcttacctgatggtaatgccaagccttatgtttacacaacaccgccctttgtcagagtgacacatggaaggatttattcggaagtgacttgcttttttgaccatgttactcatagagtccgactataccacatacagggaatagaaggacagtctgtggaagtttccaatattgtggacatccgaaaagtatataaccgtgagattgcaatgaaaatttcttctgatataaaaagccaaaatagattttatactgacctaaatgggtaccagattcaacctagaatgacactgagcaaattgcctcttcaagcaaatgtctatcccatgaccacaatggcctatatccaggatgccaaacatcgtttgacactgctctctgctcagtcattaggggtttcgagtttgaatagtggtcagattgaagttatcatggatcgaagactcatgcaagatgataatcgtggccttgagcaaggtatccaggataacaagattacagctaatctatttcgaatactactagaaaaaagaagtgctgttaatacggaagaagaaaagaagtcggtcagttatccttctctccttagccacataacttcttctctcatgaatcatccagtcattccaatggcaaataagttctcctcacctacccttgagctgcaaggtgaattctctccattacagtcatctttgccttgtgacattcatctggttaatttgagaacaatacagtcaaaggtgggcaatgggcactccaatgaggcagccttgatcctccacagaaaagggtttgattgtcggttctctagcaaaggcacagggctgttttgttctactactcagggaaagatattggtacagaaacttttaaacaagtttattgtcgaaagtctcacaccttcatcactatccttgatgcattcacctcccggcactcagaatataagtgagatcaacttgagtccaatggaaatcagcacattccgaatccagttgaggtgaacctgactttcacatttggattgagaatcattggcttttatacctttcttggtttgacgtgcaataaagaagcacattattttagcttctggctactgtgagaacatgaattctgtgattctgtgggttttttctttttttcttttaccagtacagtaaga

SEQ ID NO: 31906 - DNA, 2510 bp, Homo Sapiens
gaattcctgacctcaagtgatccgcccgcctcgtcctcccaaggtgctggtgggattacaggcgtgagccactgaacctggccccagcccagatttgtatctttctctgttacacctcagggctgactcacgtggggatggacataagacactcggagttcctcccctgtctccactgtcctccctttgttggccctctccctgtgtctcacgtttctttttcttctgcctgccccgttcctctgccagggtctccgtctctccaccgggggcttcatccttccagggaggagaagagggactccagaatggctgaggagaagaagctgaagcttagcaacactgtgctgccctcggagtccatgaaggtggtggctgaatccatgggcatcgcccagattcaggaggagacctgccagctgctaacggatgaggtcagctaccgcatcaaagagatcgcacaggatgccttgaagttcatgcacatggggaagcggcagaagctcaccaccagtgacattgactacgccttgaagctaaagaatgtcgagccactctatggcttccacgcccaggagttcattcctttccgcttcgcctctggtgggggccgggagctttacttctatgaggagaaggaggttgatctgagcgacatcatcaatacccctctgccccgggtgcccctggacgtctgcctcaaagctcattggctgagcatcgagggctgccagccagctatccccgagaacccgcccccagctcccaaagagcaacagaaggctgaagccacagaacccctgaagtcagccaagccaggccaggaggaagacggacccctgaagggcaaaggtcaaggggccaccacagccgacggcaaagggaaagagaagaaggcgccgcccttgctggagggggcccccttgcgactgaagccccggagcatccacgagttgtctgtggagcagcagctctactacaaggagatcaccgaggcctgcgtgggctcctgcgaggccaagagggcggaagccctgcaaagcattgccacggaccctggactgtatcagatgctgccacggttcagtacctttatctcggagggggtccgtgtgaacgtggttcagaacaacctggccctactcatctacctgatgcgtatggtgaaagcgctgatggacaaccccacgctctatctagaaaaatacgtccatgagctgattccagctgtgatgacctgcatcgtgagcagacagttgtgcctgcgaccagatgtggacaatcactgggcactccgagactttgctgcccgcctggtggcccagatctgcaagcattttagcacaaccactaacaacatccagtcccggatcaccaagaccttcaccaagagctgggtggacgagaagacgccctggacgactcgttatggctccatcgcaggcttggctgagctgggacacgatgttatcaagactctgattctgccccggctgcagcaggaaggggagcggatccgcagtgtgctggacggccctgtgctgagcaacattgaccggattggagcagaccatgtgcagagcctcctgctgaaacactgtgctcctgttctggcaaagctgcgcccaccgcctgacaatcaggacgcctatcgggcagaattcgggtcccttgggcccctcctctgctcccaggtggtcaaggctcgggcccaggctgctctgcaggctcagcaggtcaacaggaccactctgaccatcacgcagccccggcccacgctgaccctctcgcaggccccacagcctggccctcgcacccctggcttgctgaaggttcctggctccatcgcacttcctgtccagacactggtgtctgcacgagcggctgccccaccacagccttcccctcctccaaccaagtttattgtaatgtcatcgtcctccagcgccccatccacccagcaggtcctgtccctcagcacctcggcccccggctcaggttccaccaccacttcgcccgtcaccaccaccgtccccagcgtgcagcccatcgtcaagttggtctccaccgccaccaccgcaccccccagcactgctccctctggtcctgggagtgtccagaagtacatcgtggtctcacttcccccaacaggggagggcaaaggaggccccacctcccatccttctccagttcctcccccggcatcgtccccgtccccactcagcggcagtgccctttgtggggggaagcaggaggctggggacagtccccctccagctccagggactccaaaagccaatggctcccagcccaactccggctcccctcagcctgctccgtgatgctccacctgccagcccccggattcccacacatgcagacatgtacacacgtgcacgtacacacatgcatgctcgctaagcggaaggaagttgtagattgcttccttcatgtcactttctttttagatattgtacagccagtttctcagaataaaagtttggtttgta

SEQ ID NO: 31907 - DNA, 2620 bp, Homo Sapiens
ggcgggccttgggaaccgtctcctggttgtggggtgggggggaaagatggcggagctgatgctgctcagcgagattgctgacccgacgcgtttcttcaccgacaacctgcttagcccggaggactgggacagcaccttgtattctggcctagatgaagtggccgaggagcagacgcagctcttccgttgcccggagcaggatgtcccgtttgacggcagctccctggacgtggggatggatgtcagcccctctgagcccccatgggaactcctgccgatcttcccagatcttcaggtgaagtctgagccatcttccccctgctcttcctcctccctcagctccgagtcatcgcgtctctccacagagccatccagcgaggctcttggggtaggggaggtgctccatgtgaagacagagtccttggcacccccactgtgtctcctgggagatgacccaacatcctcatttgaaaccgtccagatcaacgttatccccacctctgatgattcctcagatgtccagaccaagatagaacctgtctctccatgttcttccgtcaactctgaggcctccctgctctcagccgactcctccagccaggcttttataggagaggaggtcctggaagtgaagacagagtccctgtccccttcaggatgcctcctgtgggatgtcccagccccctcacttggagctgtccagatcagcatgggcccatcccttgatggctcctcaggcaaagccctgcccacccggaagccgccactgcagcccaaacctgtagtgctaaccactgtcccaatgccatccagagctgtgcctcccagcaccacagtccttctgcagtccctcgtccagccacccccagtgtccccagttgtcctcatccagggtgctattcgagtccagcctgaagggccggctccctctctaccacggcctgagaggaagagcatcgttcccgctcctatgcctggaaactcctgcccgcctgaagtggatgcaaagctgctgaagcggcagcagcgaatgatcaagaaccgggagtcagcctgccagtcccggagaaagaagaaagagtatctgcagggactggaggctcggctgcaagcagtactggctgacaaccagcagctccgccgagagaatgctgccctccggcggcggctggaggccctgctggctgaaaacagcgagctcaagttagggtctggaaacaggaaggtggtctgcatcatggtcttccttctcttcattgccttcaactttggacctgtcagcatcagtgagcctccttcagctcccatctctcctcggatgaacaagggggagcctcaaccccggagacacttgctggggttctcagagcaagagccagttcagggagttgaacctctccaggggtcctcccagggccctaaggagccccagcccagccccacagaccagcccagtttcagcaacctgacagccttccctgggggcgccaaggagctactactaagagacctagaccagctcttcctctcctctgattgccggcacttcaaccgcactgagtccctgaggcttgctgacgagttgagtggctgggtccagcgccaccagagaggccggaggaagatccctcagagggcccaggagagacagaagtctcagccacggaagaagtcacctccagttaaggcagtccccatccaaccccctggacccccagaaagggattctgtgggccagctgcaactatatcgccacccagaccgttcgcagccagcattcttggatgcaattgaccgacgggaagacacattttatgttgtctctttccgaaggggccacctgctgctcccagccatcagccacaacaagacctcccggcccaagatgtccctggtgatgcctgccatggcccccaatgagaccctgtcaggccgtggggccccgggggactatgaggagatgatgcagatcgagtgtgaggtcatggacaccagggtgattcacatcaagacctccacagtgcccccctcgctccgaaaacagccatccccaaccccaggcaatgccacaggtggccccttgccagtctctgcagccagccaggcccaccaggcctcccaccagcccctctacctcaatcatccctgacctctgccattcacactgacttagaacggggggagggggtaccaggtggccaggtgggactgtttcaaatttccctgatccccaggcttggggcaattggtaaaggaaagagcaggtgtgggggttaagcacttatttgaggtgggggtgttcacctctcttctcatccctttatcagaatatagggctcctctcattcctgtgaacccccagtcctggcttctttgtttgaggggattgtgtgaggttcagttgtggggtgggtggtgagctgctgcatattttttattgtgtttctctagtgttatggcagtggaggtgggaatttagtccccaggtgggacaagggaagttttttcattttggagctagttactgggagtaagggagggtggggtgggggggagttcaggtttatgtgtgtgcatttcttttttattattactaaataaacaacttggagggagttga

SEQ ID NO: 31908 - DNA, 1696 bp, Homo Sapiens
gctgtagctggtgagaggaagtcctagaggctatggacactctgctgctgggatcaccgagatgagcagcagctgctcagggctgagcagggtcctggtggccgtggctacagccctggtgtctgcctcctccccctgcccccaggcctggggccccccaggggtccagtatgggcagccagggaggtccgtgaagctgtgttgtcctggagtgactgccggggacccagtgtcctggtttcgggatggggagccaaagctgctccagggacctgactctgggctagggcatgaactggtcctggcccaggcagacagcactgatgagggcacctacatctgccagaccctggatggtgcacttgggggcacagtgaccctgcagctgggctaccctccagcccgccctgttgtctcctgccaagcagccgactatgagaacttctcttgcacttggagtcccagccagatcagcggtttacccacccgctacctcacctcctacaggaagaagacagtcctaggagctgatagccagaggaggagtccatccacagggccctggccatgcccacaggatcccctaggggctgcccgctgtgttgtccacggggctgagttctggagccagtaccggattaatgtgactgaggtgaacccactgggtgccagcacacgcctgctggatgtgagcttgcagagcatcttgcgccctgacccaccccagggcctgcgggtagagtcagtaccaggttacccccgacgcctgcgagccagctggacataccctgcctcctggccgtgccagccccacttcctgctcaagttccgtttgcagtaccgtccggcgcagcatccagcctggtccacggtggagccagctggactggaggaggtgatcacagatgctgtggctgggctgccccatgctgtacgagtcagtgcccgggactttctagatgctggcacctggagcacctggagcccggaggcctggggaactccgagcactgggaccataccaaaggagataccagcatggggccagctacacacgcagccagaggtggagcctcaggtggacagccctgctcctccaaggccctccctccaaccacaccctcggctacttgatcacagggactctgtggagcaggtagctgtgctggcgtctttgggaatcctttctttcctgggactggtggctggggccctggcactggggctctggctgaggctgagacggggtgggaaggatggatccccaaagcctgggttcttggcctcagtgattccagtggacaggcgtccaggagctccaaacctgtagaggacccaggagggcttcggcagattccacctataattctgtcttgctggtgtggatagaaaccaggcaggacagtagatccctatggttggatctcagctggaagttctgtttggagcccatttctgtgagaccctgtatttcaaatttgcagctgaaaggtgcttgtacctctgatttcaccccagagttggagttctgctcaaggaacgtgtgtaatgtgtacatctgtgtccatgtgtgaccatgtgtctgtgaaggccagggaacatgtattcctctgcatgcatgtatgtaggtgcctgggagtgtgtgtggtccttgctctggccctttcccttgcagggttgtgcaggtgtgaataaa

SEQ ID NO: 31909 - DNA, 3071 bp, Homo Sapiens
aaaagcaactgaggtcttaactttcagacgctgaattctcatctaattgaaattactgggcataatgctatatatagccaatgaagagattttgagctctcactcagtgccttcaagacatgtcgttttgtagtcagagaaaacagagatcaatgcattttcaaactgacagagggaacggatgctctttagtagcacatgcccaggatcgtgtgtgtggggcttgcgctgtgctgagaagctgaataccggtccatatgctccttatttactgcaatgttctttgcatgttactgtgcactccggactaacgtgaagaagtatcgatatcaagatgaggacgctccacatgatcattccttacctcgactaacccacgaagtaagaggcccagaactcgtgcatgtatcagaaaagaacctctctcaaatagaaaatgtccatggatatgtcctgcagtctcatatttctcctctgaaggccagtcctgctcctataattgtcaacacagatactttggacacaattccttatgtcaatgggacagaaattgaatatgaatttgaagaaattacactggagagggggaattctggcctgggattcagtattgctggggggacagataatccccacattggagatgaccctggcatatttattacgaagattataccaggaggtgctgcagcagaggatggcagactcagggtcaatgattgtatcttgcgggtgaatgaggttgatgtgtcagaggtttcccacagtaaagcggtggaagccctgaaggaagcagggtctatcgctcggctgtatgtgcgtagaagacgacctattttggagaccgttgtggaaatcaaactgttcaaaggccctaaaggtttaggcttcagtattgcaggaggtgtggggaaccaacacattcctggagacaacagcatttatgtaactaaaattatagatggaggagctgcacaaaaagatggaaggttgcaagtaggagatagactactaatggtaaacaactacagtttagaagaagtaacacacgaagaggcagtagcaatattaaagaacacatcagaggtagtttatttaaaagttggcaaccccactaccatttatatgactgatccttatggtccacctgatattactcactcttattctccaccaatggaaaaccatctactctctggcaacaatggcactttagaatataaaacctccctgccacccatctctccagggaggtactcaccaattccaaagcacatgcttgttgacgacgactacaccaggcctccggaacctgtttacagcactgtgaacaaactatgtgataagcctgcttctcccaggcactattcccctgttgagtgtgacaaaagcttcctcctctcagctccctattcccactaccacctaggcctgctacctgactctgagatgaccagtcattcccaacatagcaccgcaactcgtcagccttcaatgactctccaacgggccgtctccctggaaggagagcctcgcaaggtagtcctgcacaaaggctccactggcctgggcttcaacattgtcggtggggaagatggagaaggtatttttgtgtccttcattctggctggtggaccagcagacctaagtggggagctccagagaggagaccagatcctatcggtgaatggcattgacctccgtggtgcatcccacgagcaggcagctgctgcactaaagggggctggacagacagtgacgattatagcacaatatcaacctgaagattacgctcgatttgaggccaaaatccatgacctacgagagcagatgatgaaccacagcatgagctccgggtccggatccctgcgaaccaatcagaaacgctccctctacgtcagagccatgttcgactacgacaagagcaaggacagtgggctgccaagtcaaggacttagttttaaatatggagatattctccacgttatcaatgcctctgatgatgagtggtggcaagccaggagagtcatgctggagggagacagtgaggagatgggggtcatccccagcaaaaggagggtggaaagaaaggaacgtgcccgattgaagacagtgaagtttaatgccaaacctggagtgattgattcgaaagggtcattcaatgacaagcgtaaaaagagcttcatcttttcacgaaaattcccattctacaagaacaaggagcagagtgagcaggaaaccagtgatcctgaacgtggacaagaagacctcattctttcctatgagcctgttacaaggcaggaaataaactacacccggccggtgattatcctggggcccatgaaggatcggatcaatgacgacttgatatctgaattccctgataaatttggctcctgtgtgcctcatactacgaggccaaagcgagactacgaggtggatggcagagactatcactttgtcatttccagagaacaaatggagaaagatatccaagagcacaagtttatagaagccggccagtacaatgacaatttatatggaaccagtgtgcagtctgtgagatttgtagcagaaagaggcaaacactgtatacttgatgtatcaggaaatgctatcaagcggttacaagttgcccagctctatcccattgccatcttcataaaacccaggtctctggaatctcttatggagatgaataagcgtctaacagaggaacaagccaagaaaacctatgatcgagcaattaagctagaacaagaatttggagaatattttacagctattgtccaaggagatactttagaagatatatataaccaatgcaagcttgttattgaagagcaatctgggcctttcatctggattccctcaaaggaaaagttataaattagctactgcgcctctgacaacgacagaagagcatttagaagaacaaaatatatataacatactacttggaggcttttatgtttttgttgcatttatgtttttgcagtcaatgtgaattcttacgaatgtacaacacaaactgtatgaagccatgaaggaaacagaggggccaaagggtg

SEQ ID NO: 31910 - DNA, 4190 bp, Homo Sapiens
gaattccctttcgccggcgccgagttcctggcgccgctcgcccggcccggcttccgaggggagaggacgggctggcggggctggggacccgcgtctcggcccccggagcggggaccacggagacagaccccggcccggcgaccgagctgggcccgtgagccactcggcctcaggtcgctcctgtggttggtccagcccagaatgcagccttgagcctggcttaggccaccacctactccagctctctccaccccctattttactgcagctcagggggtaggctctaggctccaaagtacctgggtattgtcccttcatcaagaaagccccacagctctggagggctctgataatcccgttgtcagctctctgaaaagacagcatggctattaccctacagcccagtgacctgatctttgagttcgcaagcaacgggatggatgatgatatccaccagctggaagacccctctgtgttcccagctgtgatcgtggagcaggtaccctaccctgatttactgcatctgtactcgggactggagttggacgacgttcacaatggcatcataacagacgggaccttgtgcatgacccaggatcagatcctggaaggcagttttttgctgacagatgacaatgaggccacctcgcacaccatgtcaaccgcggaagtcttactcaatatggagtctcccagcgatatcctggatgagaagcagatcttcagtacctccgaaatgcttccagactcggaccctgcaccagctgtcactctgcccaactacctgtttcctgcctctgagcccgatgccctgaacagggcgggtgacactagtgaccaggaggggcattctctggaggagaaggcctccagagaggaaagtgccaagaagactgggaaatcaaagaagagaatccggaagaccaagggcaaccgaagtacctcacctgtcactgaccccagcatccccattaggaagaaatcaaaggatggcaaaggcagcaccatctatctgtgggagttcctcctggctcttctgcaagacagaaacacctgtcccaagtacatcaagtggacccagcgagagaaaggcatcttcaaactggtggactccaaagctgtgtccaagctgtgggggaagcagaaaaacaagcctgacatgaactatgagacaatggggcgggcactaagatactactaccaaagaggcatactggccaaagtggaagggcagaggctggtgtaccagtttaaggagatgcccaaggacctggtggtcattgaagatgaggatgagagcagcgaagccacagcagccccacctcaggcctccacggcctctgtggcctctgccagtaccacccggcgaaccagctccagggtctcatccagatctgccccccagggcaagggcagctcttcttgggagaagccaaaaattcagcatgtcggtctccagccatctgcgagtctggaattgggaccgtcgctagacgaggagatccccactacctccaccatgctcgtctctccagcagagggccaggtcaagctcaccaaagctgtgagtgcatcttcagtgcccagcaacatccacctaggagtggcccccgtggggtcgggctcggccctgaccctgcagacgatcccactgaccacggtgctgaccaatgggcctcctgccagtactactgctcccactcagctcgttctccagagtgttccagcggcctctactttcaaggacaccttcactttgcaggcctctttccccctgaacgccagtttccaagacagccaggtggcagccccaggggctccactgattctcagtggcctcccccaacttctggctggggccaaccgtccgaccaacccggcgccacccacggtcacaggggctggaccagcagggcccagctctcagccccctgggactgtcattgctgccttcatcaggacttctggcactacagcagcccctagggtcaaggaggggccactgaggtcctcctcctatgttcagggtatggtgacgggggcccccatggaggggctgctggttcctgaagagaccctgagggagctcctgagagatcaggctcatcttcagccacttccaacccaggtggtttccaggggttcccacaatccgagccttctgggcaaccagactttgtctcctcccagccgccccactgttgggctgaccccagtggctgaacttgagctctcctcaggctcagggtccctgctgatggctgagcctagtgtgaccacatctgggagccttctgacaagatcccccaccccagcccctttctccccattcaaccctacttccctcattaagatggagccccatgacatataagcaaaggggtcagggcaagtgtgacccaccaggcaaaattgagcagcattttcatagggaccgacttcagtagcacacctgcccctgcatttcagtgggatgtcaatacacttgaccccaagtcccccggccctgcctggtgtcactgtggccaaacagtgcccagcttaagcatccctggcatcagactatggccttcaagagcactagggcatatgcttttggcagcataacgggctgacttggtgatggagggaaaaagccttgagccaggcagaagtttgtggccagggtttgtgcagcagctttgtgagaagagcccttctacctggctctatctcactggctgcattccctacacagggaatttactaccctatatgtgaatatcccctgtatgtacttgtgtgtacttgttggtctgtatcttagtttctttggggaggacagggctgtagctgtgaggtcttgtctccaagggtgtgtgtatgtctccgtggatcagccacagggatagggattttgtttttaagggaaagcattctctaattccctttgttcatgccgagattcagttgctctgagactatggggtacaagtttgatcctccgaatctggagatgttgtagagctggaacgagtgcagagtaggaacgctttgatgcgcatgcacattggggaagatgcgctcctcagggacacaaaggccgagtggggtaaaaccacgaagggagggaagggaagtcagctctgggagcagccctcactggctggaccaaggtactcttcctggagtttgccgtgttagcaaccacagtcaccttgcagtcaggctggaatcttgggccaccccacagtgctttgctgtaggatttagacggggatgaagtgccctccagcctcagagctagccacaaagcccccagagctgaattcattgagtatttgtgcctagggcttgggctgtttgtgtgataccggccccccgacagacaataggctgtgatgacaccccagtctacttccccgatcctgggctccctcttgattagtaggtgacattttccactgtcaggcatcactggggctagtccggcagcgacctagatggggtccacccccattcctgctcaagcatgggcacctaccacatggtttctgctgctcagcctgactgcaactcacctcgaaggcggaccagcctgcctctgtgatgactgcagaagacctccttgggtgtaccaatgcccctcatctcccactttcacacctaaccctgactccttcaccaagaagacgggagtcggcagccaggagttcccgtggcacctctctctcttcgtggctccctgcttcccccttccctctttccgaggaagggtcaacctattctctctcaaaaccaacccctaggccaattgcctggatctcctcccctctcccttctttaaacgagcttgcctccctcctgccaagtttgagggcaaggctaagaaatgtcagccacggaaacaactctaatatctggtgactttgggtaatgtgaatcagtgcctgaggacctttgctgtgtccttggtacagaaccatccacttgacctaactacctcccctggccgcgctctcgctcttctcttctttgttaagccaacaactatcaccctctcctactcttctttctccctgccccctggagggcactgtgtttggttgtgcaaatgtatttactatgcgtgtttccagcagttggcattaaagtgcctttttctaataaaatcagtttattatgaccaaaaaaaaaaaaaaaaggaattc

SEQ ID NO: 31911 - DNA, 3255 bp, Homo Sapiens; identical to SEQ ID NO: 29700

SEQ ID NO: 31912 - DNA, 2106 bp, Homo Sapiens
gagcctccacgatctcgcccggcgattgtgggcaggggcgcctccggatcgatcttctgaaattcaagttttcaagatgaagtttttattgacaactgcctttttaattttaatttccttgtgggtggaagaagcctattctaaggaaaagtcttcaaagaaagggaaggggaaaaagaagcagtatctatgcccatctcagcagtcagcagaggaccttgcccgagtacctgccaactccactagcaatatcttgaacaggttattggtcagttatgatcccaggataagaccaaacttcaaaggcattcctgttgatgtagtagtcaacatttttattaacagttttggatccattcaagaaacaacaatggactatagagttaacatcttcctgagacaaaaatggaatgaccccaggctgaagctccccagtgattttaggggttcagatgcactgacagtggatccaacaatgtacaagtgtttatggaaacctgatttattttttgcaaatgaaaaaagtgccaattttcatgatgtgacccaggaaaacatcctcctctttatttttcgtgatggagatgtccttgtcagcatgaggttatctattactctttcatgccctttggacttgacattgtttcccatggatacacaacgttgcaagatgcaactggagagctttggttacacaactgatgatttacgatttatctggcagtcaggagatcctgtgcaattagaaaaaattgccttgcctcaatttgatatcaaaaaggaagatattgaatatggtaactgtacaaaatactataaaggcacgggctactacacatgcgtggaagtcatcttcaccctgaggaggcaggtcggcttttacatgatgggggtctacgccccaaccctgctcattgttgttctctcctggctttccttctggatcaacccggacgcgagtgctgccagagtgcccctgggtatcttctcagtcctcagcttggcctctgagtgcacaacccttgccgctgagcttcccaaagtttcctatgtgaaggctcttgatgtttggcttattgcttgccttctctttgggtttgcttccctggtggagtatgcagttgtccaggtgatgctgaacaaccccaaaagggttgaagctgaaaaagccagaattgctaaggctgagcaagcagatggaaaaggtggaaatgtggctaaaaagaatactgtgaatggaacagggactcctgttcatattagcactttgcaggttggtgagaccagatgcaaaaaagtttgtacttctaagtctgatctgagatctaatgacttcagcattgttggaagcttaccaagagattttgaactatccaattatgactgctatggaaaacccattgaagttaacaacggacttgggaaatctcaggctaagaacaacaagaagcctccccctgcgaaacctgttattccaacagcagcaaagcgaattgatctttatgcaagagcattgtttcctttctgcttcttgttcttcaatgttatatattggtctatatatttatgataaatcttttccatttgtacaaaataaaattccatttcattgtgacctactcctttcataaatgccaatctgtgagaacttttgaattttcatagcaacattgcattttggatgccatttgattgtaataaaactgtggcaccttaattttgaatggcagcatgatcatgtaatatctgtgctctaataacgatgtatatatgtatagtgaacatattgcttagtaacaaatgaaggacaagcatactacataatataatccatacaattctcttcagttagtgtaaactgcaaatactacagataattctgataataaaatgatatgcacgctgaatcctgctatggtaccattctaatgtatgtagtatttcaaatttccttccttgtaactttcaaagaaagccatcttattcttgtaaaattttagatggtattatcacagatttaaaaaggttgtattacatattgtttaaactttgtaagtagaaatatatctgttataattatacaggctctgtggagaaataaagttc

SEQ ID NO: 31913 - DNA, 2608 bp, Homo Sapiens
agctcgccggcctttggtctccaggacttgtcccagcagcccctcgaactgagaattacaccatcggacccctggctctgaggccttcagacttggactgtgtcacactgccaggcttccagggctccaacttgcagacggcctgttgtgggacagtctctgtaatcgcgaaagcaaccatggaagacctgggggaaaacaccatggttttatccaccctgagatctttgaacaacttcatctctcagcgtgtggagggaggctctggactggatatttctacctcggccccaggttctctgcagatgcagtaccagcagagcatgcagctggaggaaagagcagagcagatccgttcgaagtcccacctcatccaggtggagcgggagaaaatgcagatggagctgagtcacaagagggctcgagtggagctggagagagcagccagcaccagtgccaggaactacgagcgtgaggtcgaccgcaaccaggagctcctgacgcgcatccggcagcttcaggagcgggaggccggggcggaggagaagatgcaggagcagctggagcgcaacaggcagtgtcagcagaacttggatgctgccagcaagaggctgcgtgagaaagaggacagtctggcccaggctggcgagaccatcaacgcactgaaggggaggatctcggaactgcagtggagcgtgatggaccaggagatgcgggtgaagcgcctggagtcggagaagcaggacgtgcaggagcagctggacctgcaacacaaaaaatgccaggaagccaatcagaaaatccaggaactccaggccagccaagaagcaagagcagaccacgagcagcagattaaggatctggagcagaagctgtccctgcaagagcaggatgcagcgattgtgaagaacatgaagtctgagctggtacggctccctaggctggaacgggagctggagcagctgcgggaggagagcgcactgcgggagatgagagagaccaacgggctgctccaggaagagctggaagggctgcagaggaagctggggcgccaggagaagatgcaggagacgctggttggcttggagctggagaacgagaggctgctggccaagctgcaaagctgggagagactggaccagaccatgggcctgagcatcaggactccagaagacctttccagattcgtggttgagctgcagcagagggagcttgccttgaaggacaagaacagcgccgtcaccagcagcgcccgggggctggagaaggccaggcagcagctgcaggaggagctccggcaggtcagcggccagctgttggaggagaggaagaagcgcgagacccacgaggcgctggcccggaggctccagaaacgggtcctgctgctcaccaaggagcgggacggtatgcgggccatcctggggtcctacgacagcgagctgaccccggccgagtactcaccccagctgacgcggcgcatgcgggaggctgaggatatggtgcagaaggtgcacagccacagcgccgagatggaggctcagctgtcgcaggccctggaggagctgggaggccagaaacaaagagcagacatgctggagatggagctgaagatgctgaagtctcagtccagctctgccgaacagagcttcctgttctccagggaggaggcggacacgctcaggttgaaggtcgaggagctggaaggcgagcggagtcggctggaggaggaaaagaggatgctggaggcacagctggagcggcgagctctgcagggtgactatgaccagagcaggaccaaagtgctgcacatgagcctgaaccccaccagtgtggccaggcagcgcctgcgcgaggaccacagccagctgcaggcggagtgcgagcgactgcgcgggctcctgcgcgccatggagagaggaggcaccgtcccagccgaccttgaggctgccgccgcgagtctgccatcgtccaaggaggtggcagagctgaagaagcaggtggagagtgccgagctgaagaaccagcggctcaaggaggttttccagaccaagatccaggagttccgcaaggcctgctacacgctcaccggctaccagatcgacatcaccacggagaaccagtaccggctgacctcgctgtacgccgagcacccaggcgactgctcatcttcaaggccaccagcccctcgggttccaagatgcagctactggagacagagttctcacacaccgtgggcgagctcatcgaggtgcacctgcggcgccaggacagcatccctgccttcctcagctcgctcaccctcgagctcttcagccgccagaccgtggcgtagcctgcaggctcgggggcatagccggagccactctgcttggcctgacctgcaggtcccctgccccgccagccacaggctgggtgcacgtcctgcctctccagccccacagggcagcagcatgactgacagacacgctgggacctacgtcgggcttcctgctggggcggccagcaccctctccacgtgcagaccccatgcgtcccggagcctggtgtgtgggcgtcggccaccagcctgggttcctcaccttgtgaaataaaatcttctcccctaaaa

SEQ ID NO: 31914 - DNA, 2719 bp, Homo Sapiens
cggggcccaggccccgccgctgcggaagaggtttctagagagtggagcctgcttcctgggccctaggcccctcccacaatgcttgtcgccggtcttcttctctgggcttccctactgaccggggcctggccatccttccccacccaggaccacctcccggccacgccccgggtccggctctcattcaaagagctgaaggccacaggcaccgcccacttcttcaacttcctgctcaacacaaccgactaccgaatcttgctcaaggacgaggaccacgaccgcatgtacgtgggcagcaaggactacgtgctgtccctggacctgcacgacatcaaccgcgagcccctcattatacactgggcagcctccccacagcgcatcgaggaatgcgtgctctcaggcaaggatgtcaacggcgagtgtgggaacttcgtcaggctcatccagccctggaaccgaacacacctgtatgtgtgcgggacaggtgcctacaaccccatgtgcacctatgtgaaccgcggacgccgcgcccaggccacaccatggacccagactcaggcggtcagaggccgcggcagcagagccacggatggtgccctccgcccgatgcccacagccccacgccaggattacatcttctacctggagcctgagcgactcgagtcagggaagggcaagtgtccgtacgatcccaagctggacacagcatcggccctcatcaatgaggagctctatgctggtgtgtacatcgattttatgggcactgatgcagccatcttccgcacacttggaaagcagacagccatgcgcacggatcagtacaactcccggtggctgaacgacccgtcgttcatccatgctgagctcattcctgacagtgcggagcgcaatgatgataagctttacttcttcttccgtgagcggtcggcagaggcgccgcagagccccgcggtgtacgcccgcatcgggcgcatttgcctgaacgatgacggtggtcactgttgcctggtcaacaagtggagcacattcctgaaggcgcggctcgtctgctctgtcccgggcgaggatggcattgagactcactttgatgagctccaggacgtgtttgtccagcagacccaggacgtgaggaaccctgtcatttacgctgtctttacctcctctggctccgtgttccgaggctctgccgtgtgtgtctactccatggctgatattcgcatggtcttcaacgggccctttgcccacaaagaggggcccaactaccagtggatgcccttctcagggaagatgccctacccacggccgggcacgtgccctggtggaaccttcacgccatctatgaagtccaccaaggattatcctgatgaggtgatcaacttcatgcgcagccacccactcatgtaccaggccgtgtaccctctgcagcggcggcccctggtagtccgcacaggtgctccctaccgccttaccactattgccgtggaccaggtggatgcaggcgacgggcgctatgaggtgcttttcctgggcacagaccgcgggacagtgcagaaggtcattgtgctgcccaaggatgaccaggagatggaggagctcatgctggaggaggtggaggtcttcaaggatccagcacccgtcaagaccatgaccatctcttctaagaggcaacaactctacgtggcgtcagccgtgggtgtcacacacctgagcctgcaccgctgccaggcgtatggggctgcctgtgctgactgctgccttgcccgggacccttactgtgcctgggatggccaggcctgctcccgctatacagcatcctccaagaggcggagccgccggcaggacgtccggcacggaaaccccatcaggcagtgccgtgggttcaactccaatgccaacaagaatgccgtggagtctgtgcagtatggcgtggccggcagcgcagccttccttgagtgccagccccgctcgccccaagccactgttaagtggctgttccagcgagatcctggtgaccggcgccgagagattcgtgcagaggaccgcttcctgcgcacagagcagggcttgttgctccgtgcactgcagctcagcgatcgtggcctctactcctgcacagccactgagaacaactttaagcacgtcgtcacacgagtgcagctgcatgtactgggccgggacgccgtccatgctgccctcttcccaccactgtccatgagcgccccgccacccccaggcgcaggccccccaacgcctccttaccaggagttagcccagctgctggcccagccagaagtgggcctcatccaccagtactgccagggttactggcgccatgtgccccccagccccagggaggctccaggggcaccccggtctcctgagccccaggaccagaaaaagccccggaaccgccggcaccaccctccggacacatgaggccagctgcctgtgcctgccatgggccaggctaggccttggtcccttttaatataaaagatatatatatatatatatatatatattaaaatatcggggtggggggtgattggaagggagggaggtggccttcccaatgcgcgttattcggggttattgaagaataatattgcaagtgacagccagaagtagactttctgtcctcacaccgaagaacccgagtgagcaggagggagggagagacgcgaagagaccttttttcctttttggagaccttgtccgc

SEQ ID NO: 31915 - DNA, 3906 bp, Homo Sapiens; identical to SEQ ID NO: 29882

SEQ ID NO: 31916 - DNA, 1585 bp, Homo Sapiens
gcctggtcccgcctctcctgccccttgtgctcagcgctacctgctgcccggacacatccagagctggccgacgggtgcgcgggcgggcggcggcaccatgcagggaagctgccaggggccgtgggcagcgccgctttctgccgcccacctggcgctgtgagactggcgctgccaccatgttccccagccctgctctcacgcccacgcccttctcagtcaaagacatcctaaacctggaacagcagcagcgcagcctggctgccgccggagagctctctgcccgcctggaggcgaccctggcgccctcctcctgcatgctggccgccttcaagccagaggcctacgctgggcccgaggcggctgcgccgggcctcccagagctgcgcgcagagctgggccgcgcgccttcaccggccaagtgtgcgtctgcctttcccgccgcccccgccttctatccacgtgcctacagcgaccccgacccagccaaggaccctagagccgaaaagaaagagctgtgcgcgctgcagaaggcggtggagctggagaagacagaggcggacaacgcggagcggccccgggcgcgacggcggaggaagccgcgcgtgctcttctcgcaggcgcaggtctatgagctggagcggcgcttcaagcagcagcggtacctgtcggcccccgaacgcgaccagctggccagcgtgctgaaactcacgtccacgcaggtcaagatctggttccagaaccggcgctacaagtgcaagcggcagcggcaggaccagactctggagctggtggggctgcccccgccgccgccgccgcctgcccgcaggatcgcggtgccagtgctggtgcgcgatggcaagccatgcctaggggactcggcgccctacgcgcctgcctacggcgtgggcctcaatccctacggttataacgcctaccccgcctatccgggttacggcggcgcggcctgcagccctggctacagctgcactgccgcttaccccgccgggccttccccagcgcagccggccactgccgccgccaacaacaacttcgtgaacttcggcgtcggggacttgaatgcggttcagagccccgggattccgcagagcaactcgggagtgtccacgctgcatggtatccgagcctggtagggaagggacccgcgtggcgcgaccctgaccgatcccacctcaacagctccctgactctcgtggggagaaggggctcccaacatgaccctgagtcccctggattttgcattcactcctgcggagacctaggaactttttctgtcccacgcgcgtttgttcttgcgcacgggagagtttgtggcggcgattatgcagcgtgcaatgagtgatcctgcagcctggtgtcttagctgtccccccaggagtgccctccgagagtccatgggcacccccggttggaactgggactgagctcgggcacgcagggcctgagatctggccgcccattccgcgagccagggccgggcgcccgggcctttgctatctcgccgtcgcccgcccacgcacccacccgtatttatgtttttacctattgctgtaagaaatgacgatcc

SEQ ID NO: 31917 - DNA, 12783 bp, Homo Sapiens
atttccgggtccgggccgagcgggcgcacgcgcgggagcgggactcggcggcatggcgggctccggagccggtgtgcgttgctccctgctgcggctgcaggagaccttgtccgctgcggaccgctgcggtgctgccctggccggtcatcaactgatccgcggcctggggcaggaatgcgtcctgagcagcagccccgcggtgctggcattacagacatctttagttttttccagagatttcggtttgcttgtatttgtccggaagtcactcaacagtattgaatttcgtgaatgtagagaagaaatcctaaagtttttatgtattttcttagaaaaaatgggccagaagatcgcaccttactctgttgaaattaagaacacttgtaccagtgtttatacaaaagatagagctgctaaatgtaaaattccagccctggaccttcttattaagttacttcagacttttagaagttctagactcatggatgaatttaaaattggagaattatttagtaaattctatggagaacttgcattgaaaaaaaaaataccagatacagttttagaaaaagtatatgagctcctaggattattgggtgaagttcatcctagtgagatgataaataatgcagaaaacctgttccgcgcttttctgggtgaacttaagacccagatgacatcagcagtaagagagcccaaactacctgttctggcaggatgtctgaaggggttgtcctcacttctgtgcaacttcactaagtccatggaagaagatccccagacttcaagggagatttttaattttgtactaaaggcaattcgtcctcagattgatctgaagagatatgctgtgccctcagctggcttgcgcctatttgccctgcatgcatctcagtttagcacctgccttctggacaactacgtgtctctatttgaagtcttgttaaagtggtgtgcccacacaaatgtagaattgaaaaaagctgcactttcagccctggaatcctttctgaaacaggtttctaatatggtggcgaaaaatgcagaaatgcataaaaataaactgcagtactttatggagcagttttatggaatcatcagaaatgtggattcgaacaacaaggagttatctattgctatccgtggatatggactttttgcaggaccgtgcaaggttataaacgcaaaagatgttgacttcatgtacgttgagctcattcagcgctgcaagcagatgttcctcacccagacagacactggtgactaccgtgtttatcagatgccaagcttcctccagtctgttgcaagcgtcttgctgtaccttgacacagttcctgaggtgtatactccagttctggagcacctcgtggtgatgcagatagacagtttcccacagtacagtccaaaaatgcagctggtgtgttgcagagccatagtgaaggtgttcctagctttggcagcaaaagggccagttctcaggaattgcattagtactgtggtgcatcagggtttaatcagaatatgttctaaaccagtggtccttccaaagggccctgagtctgaatctgaagaccaccgtgcttcaggggaagtcagaactggcaaatggaaggtgcccacatacaaagactacgtggatctcttcagacatctcctgagctctgaccagatgatggattctattttagcagatgaagcatttttctctgtgaattcctccagtgaaagtctgaatcatttactttatgatgaatttgtaaaatccgttttgaagattgttgagaaattggatcttacacttgaaatacagactgttggggaacaagagaatggagatgaggcgcctggtgtttggatgatcccaacttcagatccagcggctaacttgcatccagctaaacctaaagatttttcggctttcattaacctggtggaattttgcagagagattctccctgagaaacaagcagaattttttgaaccatgggtgtactcattttcatatgaattaattttgcaatctacaaggttgcccctcatcagtggtttctacaaattgctttctattacagtaagaaatgccaagaaaataaaatatttcgagggagttagtccaaagagtctgaaacactctcctgaagacccagaaaagtattcttgctttgctttatttgtgaaatttggcaaagaggtggcagttaaaatgaagcagtacaaagatgaacttttggcctcttgtttgacctttcttctgtccttgccacacaacatcattgaactcgatgttagagcctacgttcctgcactgcagatggctttcaaactgggcctgagctatacccccttggcagaagtaggcctgaatgctctagaagaatggtcaatttatattgacagacatgtaatgcagccttattacaaagacattctcccctgcctggatggatacctgaagacttcagccttgtcagatgagaccaagaataactgggaagtgtcagctctttctcgggctgcccagaaaggatttaataaagtggtgttaaagcatctgaagaagacaaagaacctttcatcaaacgaagcaatatccttagaagaaataagaattagagtagtacaaatgcttggatctctaggaggacaaataaacaaaaatcttctgacagtcacgtcctcagatgagatgatgaagagctatgtggcctgggacagagagaagcggctgagctttgcagtgccctttagagagatgaaacctgtcattttcctggatgtgttcctgcctcgagtcacagaattagcgctcacagccagtgacagacaaactaaagttgcagcctgtgaacttttacatagcatggttatgtttatgttgggcaaagccacgcagatgccagaagggggacagggagccccacccatgtaccagctctataagcggacgtttcctgtgctgcttcgacttgcgtgtgatgttgatcaggtgacaaggcaactgtatgagccactagttatgcagctgattcactggttcactaacaacaagaaatttgaaagtcaggatactgtttccttactagaagctatattggatggaattgtggaccctgttgacagtactttaagagatttttgtggtcggtgtattcgagaattccttaaatggtccattaagcaaataacaccacagcagcaggagaagagtccagtaaacaccaaatcgcttttcaagcgactttatagccttgcgcttcaccccaatgctttcaagaggctgggagcatcacttgcctttaataatatctacagggaattcagggaagaagagtctctggtggaacagtttgtgtttgaagccttggtgatatacatggagagtctggccttagcacatgcagatgagaagtccttaggtacaattcaacagtgttgtgatgccattgatcacctatgccgcatcattgaaaagaagcatgtttctttaaataaagcaaagaaacgacgtttgccgcgaggatttccaccttccgcatcattgtgtttattggatctggtcaagtggcttttagctcattgtgggaggccccagacagaatgtcgacacaaatccattgaactcttttataaattcgttcctttattgccaggcaacagatcccctaatttgtggctgaaagatgttctcaaggaagaaggtgtctcttttctcatcaacacctttgaggggggtggctgtggccagccctcgggcatcctggcccagcccaccctcttgtaccttcgggggccattcagcctgcaggccacgctatgctggctggacctgctcctggccgcgttggagtgctacaacacgttcattggcgagagaactgtaggagcgctccaggtcctaggtactgaagcccagtcttcacttttgaaagcagtggctttcttcttagaaagcattgccatgcatgacattatagcagcagaaaagtgctttggcactggggcagcaggtaacagaacaagcccacaagagggagaaaggtacaactacagcaaatgcaccgttgtggtccggattatggagtttaccacgactctgctaaacacctccccggaaggatggaagctcctgaagaaggacttgtgtaatacacacctgatgagagtcctggtgcagacgctgtgtgagcccgcaagcataggtttcaacatcggagacgtccaggttatggctcatcttcctgatgtttgtgtgaatctgatgaaagctctaaagatgtccccatacaaagatatcctagagacccatctgagagagaaaataacagcacagagcattgaggagctttgtgccgtcaacttgtatggccctgacgcgcaagtggacaggagcaggctggctgctgttgtgtctgcctgtaaacagcttcacagagctgggcttctgcataatatattaccgtctcagtccacagatttgcatcattctgttggcacagaacttctttccctggtttataaaggcattgcccctggagatgagagacagtgtctgccttctctagacctcagttgtaagcagctggccagcggacttctggagttagcctttgcttttggaggactgtgtgagcgccttgtgagtcttctcctgaacccagcggtgctgtccacggcgtccttgggcagctcacagggcagcgtcatccacttctcccatggggagtatttctatagcttgttctcagaaacgatcaacacggaattattgaaaaatctggatcttgctgtattggagctcatgcagtcttcagtggataataccaaaatggtgagtgccgttttgaacggcatgttagaccagagcttcagggagcgagcaaaccagaaacaccaaggactgaaacttgcgactacaattctgcaacactggaagaagtgtgattcatggtgggccaaagattcccctctcgaaactaaaatggcagtgctggccttactggcaaaaattttacagattgattcatctgtatcttttaatacaagtcatggttcattccctgaagtctttacaacatatattagtctacttgctgacacaaagctggatctacatttaaagggccaagctgtcactcttcttccattcttcaccagcctcactggaggcagtctggaggaacttagacgtgttctggagcagctcatcgttgctcacttccccatgcagtccagggaatttcctccaggaactccgcggttcaataattatgtggactgcatgaaaaagtttctagatgcattggaattatctcaaagccctatgttgttggaattgatgacagaagttctttgtcgggaacagcagcatgtcatggaagaattatttcaatccagtttcaggaggattgccagaaggggttcatgtgtcacacaagtaggccttctggaaagcgtgtatgaaatgttcaggaaggatgacccccgcctaagtttcacacgccagtcctttgtggaccgctccctcctcactctgctgtggcactgtagcctggatgctttgagagaattcttcagcacaattgtggtggatgccattgatgtgttgaagtccaggtttacaaagctaaatgaatctacctttgatactcaaatcaccaagaagatgggctactataagattctagacgtgatgtattctcgccttcccaaagatgatgttcatgctaaggaatcaaaaattaatcaagttttccatggctcgtgtattacagaaggaaatgaacttacaaagacattgattaaattgtgctacgatgcatttacagagaacatggcaggagagaatcagctgctggagaggagaagactttaccattgtgcagcatacaactgcgccatatctgtcatctgctgtgtcttcaatgagttaaaattttaccaaggttttctgtttagtgaaaaaccagaaaagaacttgcttatttttgaaaatctgatcgacctgaagcgccgctataattttcctgtagaagttgaggttcctatggaaagaaagaaaaagtacattgaaattaggaaagaagccagagaagcagcaaatggggattcagatggtccttcctatatgtcttccctgtcatatttggcagacagtaccctgagtgaggaaatgagtcaatttgatttctcaaccggagttcagagctattcatacagctcccaagaccctagacctgccactggtcgttttcggagacgggagcagcgggaccccacggtgcatgatgatgtgctggagctggagatggacgagctcaatcggcatgagtgcatggcgcccctgacggccctggtcaagcacatgcacagaagcctgggcccgcctcaaggagaagaggattcagtgccaagagatcttccttcttggatgaaattcctccatggcaaactgggaaatccaatagtaccattaaatatccgtctcttcttagccaagcttgttattaatacagaagaggtctttcgcccttacgcgaagcactggcttagccccttgctgcagctggctgcttctgaaaacaatggaggagaaggaattcactacatggtggttgagatagtggccactattctttcatggacaggcttggccactccaacaggggtccctaaagatgaagtgttagcaaatcgattgcttaatttcctaatgaaacatgtctttcatccaaaaagagctgtgtttagacacaaccttgaaattataaagacccttgtcgagtgctggaaggattgtttatccatcccttataggttaatatttgaaaagttttccggtaaagatcctaattctaaagacaactcagtagggattcaattgctaggcatcgtgatggccaatgacctgcctccctatgacccacagtgtggcatccagagtagcgaatacttccaggctttggtgaataatatgtcctttgtaagatataaagaagtgtatgccgctgcagcagaagttctaggacttatacttcgatatgttatggagagaaaaaacatactggaggagtctctgtgtgaactggttgcgaaacaattgaagcaacatcagaatactatggaggacaagtttattgtgtgcttgaacaaagtgaccaagagcttccctcctcttgcagacaggttcatgaatgctgtgttctttctgctgccaaaatttcatggagtgttgaaaacactctgtctggaggtggtactttgtcgtgtggagggaatgacagagctgtacttccagttaaagagcaaggacttcgttcaagtcatgagacatagagatgatgaaagacaaaaagtatgtttggacataatttataagatgatgccaaagttaaaaccagtagaactccgagaacttctgaaccccgttgtggaattcgtttcccatccttctacaacatgtagggaacaaatgtataatattctcatgtggattcatgataattacagagatccagaaagtgagacagataatgactcccaggaaatatttaagttggcaaaagatgtgctgattcaaggattgatcgatgagaaccctggacttcaattaattattcgaaatttctggagccatgaaactaggttaccttcaaataccttggaccggttgctggcactaaattccttatattctcctaagatagaagtgcactttttaagtttagcaacaaattttctgctcgaaatgaccagcatgagcccagattatccaaaccccatgttcgagcatcctctgtcagaatgcgaatttcaggaatataccattgattctgattggcgtttccgaagtactgttctcactccgatgtttgtggagacccaggcctcccagggcactctccagacccgtacccaggaagggtccctctcagctcgctggccagtggcagggcagataagggccacccagcagcagcatgacttcacactgacacagactgcagatggaagaagctcatttgattggctgaccgggagcagcactgacccgctggtcgaccacaccagtccctcatctgactccttgctgtttgcccacaagaggagtgaaaggttacagagagcacccttgaagtcagtggggcctgattttgggaaaaaaaggctgggccttccaggggacgaggtggataacaaagtgaaaggtgcggccggccggacggacctactacgactgcgcagacggtttatgagggaccaggagaagctcagtttgatgtatgccagaaaaggcgttgctgagcaaaaacgagagaaggaaatcaagagtgagttaaaaatgaagcaggatgcccaggtcgttctgtacagaagctaccggcacggagaccttcctgacattcagatcaagcacagcagcctcatcaccccgttacaggccgtggcccagagggacccaataattgcaaaacagctctttagcagcttgttttctggaattttgaaagagatggataaatttaagacactgtctgaaaaaaacaacatcactcaaaagttgcttcaagacttcaatcgttttcttaataccaccttctctttctttccaccctttgtctcttgtattcaggacattagctgtcagcacgcagccctgctgagcctcgacccagcggctgttagcgctggttgcctggccagcctacagcagcccgtgggcatccgcctgctagaggaggctctgctccgcctgctgcctgctgagctgcctgccaagcgagtccgtgggaaggcccgcctccctcctgatgtcctcagatgggtggagcttgctaagctgtatagatcaattggagaatacgacgtcctccgtgggatttttaccagtgagataggaacaaagcaaatcactcagagtgcattattagcagaagccagaagtgattattctgaagctgctaagcagtatgatgaggctctcaataaacaagactgggtagatggtgagcccacagaagccgagaaggatttttgggaacttgcatcccttgactgttacaaccaccttgctgagtggaaatcacttgaatactgttctacagccagtatagacagtgagaaccccccagacctaaataaaatctggagtgaaccattttatcaggaaacatatctaccttacatgatccgcagcaagctgaagctgctgctccagggagaggctgaccagtccctgctgacatttattgacaaagctatgcacggggagctccagaaggcgattctagagcttcattacagtcaagagctgagtctgctttacctcctgcaagatgatgttgacagagccaaatattacattcaaaatggcattcagagttttatgcagaattattctagtattgatgtcctcttacaccaaagtagactcaccaaattgcagtctgtacaggctttaacagaaattcaggagttcatcagctttataagcaaacaaggcaatttatcatctcaagttccccttaagagacttctgaacacctggacaaacagatatccagatgctaaaatggacccaatgaacatctgggatgacatcatcacaaatcgatgtttctttctcagcaaaatagaggagaagcttacccctcttccagaagataatagtatgaatgtggatcaagatggagaccccagtgacaggatggaagtgcaagagcaggaagaagatatcagctccctgatcaggagttgcaagttttccatgaaaatgaagatgatagacagtgcccggaagcagaacaatttctcacttgctatgaaactactgaaggagctgcataaagagtcaaaaaccagagacgattggctggtgagctgggtgcagagctactgccgcctgagccactgccggagccggtcccagggctgctctgagcaggtgctcactgtgctgaaaacagtctctttgttggatgagaacaacgtgtcaagctacttaagcaaaaatattctggctttccgtgaccagaacattctcttgggtacaacttacaggatcatagcgaatgctctcagcagtgagccagcctgccttgctgaaatcgaggaggacaaggctagaagaatcttagagctttctggatccagttcagaggattcagagaaggtgatcgcgggtctgtaccagagagcattccagcacctctctgaggctgtgcaggcggctgaggaggaggcccagcctccctcctggagctgtgggcctgcagctggggtgattgatgcttacatgacgctggcagatttctgtgaccaacagctgcgcaaggaggaagagaatgcatcagttattgattctgcagaactgcaggcgtatccagcacttgtggtggagaaaatgttgaaagctttaaaattaaattccaatgaagccagattgaagtttcctagattacttcagattatagaacggtatccagaggagactttgagcctcatgacaaaagagatctcttccgttccctgctggcagttcatcagctggatcagccacatggtggccttactggacaaagaccaagccgttgctgttcagcactctgtggaagaaatcactgataactacccgcaggctattgtttatcccttcatcataagcagcgaaagctattccttcaaggatacttctactggtcataagaataaggagtttgtggcaaggattaaaagtaagttggatcaaggaggagtgattcaagattttattaatgccttagatcagctctctaatcctgaactgctctttaaggattggagcaatgatgtaagagctgaactagcaaaaacccctgtaaataaaaaaaacattgaaaaaatgtatgaaagaatgtatgcagccttgggtgacccaaaggctccaggcctgggggcctttagaaggaagtttattcagacttttggaaaagaatttgataaacattttgggaaaggaggttctaaactactgagaatgaagctcagtgacttcaacgacattaccaacatgctacttttaaaaatgaacaaagactcaaagccccctgggaatctgaaagaatgttcaccctggatgagcgacttcaaagtggagttcctgagaaatgagctggagattcccggtcagtatgacggtaggggaaagccattgccagagtaccacgtgcgaatcgccgggtttgatgagcgggtgacagtcatggcgtctctgcgaaggcccaagcgcatcatcatccgtggccatgacgagagggaacaccctttcctggtgaagggtggcgaggacctgcggcaggaccagcgcgtggagcagctcttccaggtcatgaatgggatcctggcccaagactccgcctgcagccagagggccctgcagctgaggacctatagcgttgtgcccatgacctccagtgatcccagggcaccgccgtgtgaatataaagattggctgacaaaaatgtcaggaaaacatgatgttggagcttacatgctaatgtataagggcgctaatcgtactgaaacagtcacgtcttttagaaaacgagaaagtaaagtgcctgctgatctcttaaagcgggccttcgtgaggatgagtacaagccctgaggctttcctggcgctccgctcccacttcgccagctctcacgctctgatatgcatcagccactggatcctcgggattggagacagacatctgaacaactttatggtggccatggagactggcggcgtgatcgggatcgactttgggcatgcgtttggatccgctacacagtttctgccagtccctgagttgatgccttttcggctaactcgccagtttatcaatctgatgttaccaatgaaagaaacgggccttatgtacagcatcatggtacacgcactccgggccttccgctcagaccctggcctgctcaccaacaccatggatgtgtttgtcaaggagccctcctttgattggaaaaattttgaacagaaaatgctgaaaaaaggagggtcatggattcaagaaataaatgttgctgaaaaaaattggtacccccgacagaaaatatgttacgctaagagaaagttagcaggtgccaatccagcagtcattacttgtgatgagctactcctgggtcatgagaaggcccctgccttcagagactatgtggctgtggcacgaggaagcaaagatcacaacattcgtgcccaagaaccagagagtgggctttcagaagagactcaagtgaagtgcctgatggaccaggcaacagaccccaacatccttggcagaacctgggaaggatgggagccctggatgtgaggtctgtgggagtctgcagatagaaagcattacattgtttaaagaatctactatacttggttggcagcattccatgagctgattttcctgaaacactaaagagaaatgtcttttgtgctacagtttcgtagcatgagtttaaatcaagattatgatgagtaaatgtgtatgggttaaatcaaagataaggttatagtaacatcaaagattaggtgaggtttatagaaagatagatatccaggcttaccaaagtattaagtcaagaatataatatgtgatcagctttcaaagcatttacaagtgctgcaagttagtgaaacagctgtctccgtaaatggaggaaatgtggggaagccttggaatgcccttctggttctggcacattggaaagcacactcagaaggcttcatcaccaagattttgggagagtaaagcta

SEQ ID NO: 31918 - DNA, 940 bp, Homo Sapiens
cgggagacattcgaggcggacagaaacggggcttggcgccccccggtgcacgtgtgctagcccaggcaggagggagcgcctcggcggaggagtcaaggaagagggggagggagaaacgcgccagaacctcggcccgggcgccctcgtcggccgcggaggagctgcagcctccaacaggaaggtgtgatccctgccatgctatctgctctgctcagcgactgaaggtgcccgcatcccagctctgccaggaagcaaaggttgtcacatcttcccaagccaggccagccaggagcgctgcatgcaaattctgccgtgggctaaggcacgctaaccagagccggcggcatggacttcgtcatgaagcaggcccttggaggggccacaaaggacatggggaagatgctggggggagaggaggagaaggaccccgacgcgcagaaaaaggaggaggagcggcaggaggcgctgcggcagcaggaggaggagcgtaaggccaagcacgcgcgcatggaggcggagcgggagaaggtccggcagcagatccgagataagtatgggctgaagaagaaggaggagaaggaagcagaggagaaagcagccctggagcagccctgcgaggggagcctgacccggcccaagaaggccatccctgcgggctgcggggacgaggaggaggaggaagaggagagcatcctggacacggtgctcaaatacctgcccgggccgctgcaggacatgttcaagaagtaaccaggcctcctgccccagcctactccacctgttactacttctttttggttctttcttttctttttattaggttaagtctcaattctgaaggggaaaacctcagttggcctctgcccctcttccctggccaggggcttctccccctcagctctccctcacacctcccttcatcccagggtatccggaattc

SEQ ID NO: 31919 - DNA, 3102 bp, Homo Sapiens
gcggccgcggatccgcggccgcggagaagctgctgccggtgtcatggcggagctgagtgaggaggcgctgctgtcagtattaccgacgatccgggtccctaaggctggagaccgggtccacaaagacgagtgcgccttctccttcgacacgccggagtctgaggggggcctctacatctgtatgaacacgtttctgggctttgggaaacagtatgtggagagacatttcaataagaccggccagcgagtctacttgcacctccggcggacccggcgcccgaaagaggaggaccctgctacaggcactggagacccaccccggaagaagcccacgcggctggctattggtgttgaaggcggatttgaccttagcgaggagaagtttgaattagacgaggatgtgaagattgtcattttgccagattacctggagattgcccgggatggactggggggactgcctgacattgtcagagatcgggtgaccagtgcagtggaggccctactgtcggccgactcagcctcccgcaagcaggaggtgcaggcatgggatggggaagtacggcaggtgtctaagcatgccttcagcctcaagcagttggacaaccctgctcgaatccctccctgtggctggaagtgctccaagtgtgacatgagagagaacctgtggctcaacctgactgatggctccatcctctgtgggcgacgctacttcgatggcagtgggggcaacaaccacgctgtggagcactaccgagagacaggctacccgttagctgtcaagctgggcaccatcacccctgatggagctgacgtgtactcatatgatgaggatgacatggtcctggaccccagcctggctgagcacctgtcccacttcggcatcgacatgctgaagatgcagaagacagacaagacgatgactgagttggagatagacatgaaccagcggattggtgaatgggagctgatccaggagtcaggtgtgccactcaagcccctgtttgggcctggctacacaggcatccggaacctgggtaacagctgctacctcaactctgtggtccaggtgctcttcagcatccctgacttccagaggaagtatgtggataagctggagaagatcttccagaatgccccgacagaccctacccaggatttcagcacccaggtggccaagctgggccatggccttctctccggggagtattccaagccagtaccggagtcgggcgatggggagcgggtgccagaacagaaggaagttcaagatggcattgcccctcggatgttcaaggccctcatcggcaagggccaccctgaattctccaccaaccggcagcaggatgcccaggagttcttccttcaccttatcaacatggtggagaggaattgccggagctctgaaaatcctaatgaagtgttccgcttcttggtggaggaaaggatcaagtgcctggccacagagaaggtgaagtacacccagcgagttgactacatcatgcagctgcctgtgcccatggatgcagcccttaacaaagaggagcttctggagtacgaggagaagaagcggcaagccgaagaggagaagatggcactgccagaactggttcgggcccaggtgcccttcagctcttgcctggaggcctacggggcccctgagcaggtcgatgacttctggagcacggccctgcaggccaagtcagtagctgtcaagaccacacgatttgcctcattccctgactacctggtcatccagatcaagaagttcaccttcggcttagactgggtgcccaagaaactggatgtgtccatcgagatgccagaggagctcgacatctcccagttgaggggcacagggctgcagcccggagaggaggagctgccagacattgccccacccctggtcactccggatgagcccaaagcgcccatgctggatgaatcagtcatcatccagctggtggagatgggattccctatggacgcctgccgcaaagctgtctactacacggacaacagcggggctgaggccgccatgaactgggtcatgtcacacatggatgatccagattttgcaaaccccctcatcctgcctggctctagtgggccgggctccacaagcgcagcagccgacccccctcctgaggactgtgtgaccaccattgtctccatgggcttctcccgggaccaggccttgaaagcgctgcgggccacgaacaatagtttagaacgggctgtggactggatcttcagtcacattgacgacctggatgctgaagctgccatggacatctcagagggccgctcagctgccgactccatctctgagtctgtgccagtgggacctaaagtccgggatggtcctggaaagtatcagctctttgccttcattagtcacatgggcacctctaccatgtgtggtcactacgtctgccacatcaagaaagaaggcagatgggtgatctacaatgaccagaaagtgtgtgcctccgagaagccgcccaaggacctgggctacatctacttctaccagagagtggccagctaagagcctgcctcaccccttaccaatgagggcaggggaagaccacctggcatgagggagaggggctgagggatggacttcagcccctctgctctgtaccctttttccttttgtccccggcagcagggaagaagctggaggccgtgggagaatggctgggcagagcagaggggcagcgatagactctggggatggagcaggacggggacgggaggggccggccacctgtctgtaaggagactttgttgcttcccctccccccggaatccacagtgctctgcttctctgtgtcgccccgcccagccccctggtgtggagggaggggtctcgtttgtgcgcgtgggtgtagctttgtgcatcctctcccagtggagcgatcacctgtgcctcccctccccctttgtttgcccctgtgtggttggtcaaggagggatgtgagggaaatagggaccccccgacttgccctcctgcctcagtctttcccccaccctgtctcttccttgtccttctctggaaatgccaaaatacacgatgtgaataaaagtacaacggct

SEQ ID NO: 31920 - DNA, 1592 bp, Homo Sapiens
ggcacgagtcgaagagctcctggacgcagaggccctgcccttgccagacggcgcagacatgtcagaacaaagtaaggatctgagcgaccctaactttgcagccgaggcccccaactccgaggtgcacagcagccctggggtttcggagggggttcctccgtccgcgaccctggcagagccgcagagccctcctctaggcccgacggccgctccgcaggccgcgccgcctccccaggccccgaacgacgagggcgacccgaaggccctgcagcaggctgcggaggagggccgcgcccaccaggccccgagcgcggcccagccgggcccggcaccgccagccccggcgcagctggtgcagaaggcgcacgagctcatgtggtacgtgctggtcaaggaccagaagaagatgatcatctggtttccagacatggtgaaagatgtcatcggcagctacaagaagtggtgcaggagcatcctccggcgcaccagcctcatcctcgcccgggtgttcgggctgcacctgaggctaaccagcctgcacaccatggagtttgcgctggtcaaagcgctggagcccgaggagctggacagggtggcgctgagcaaccgcatgcccatgacaggcctcctgctcatgatcctgagcctcatctacgtgaagggccgcggcgccagagagagcgccgtctggaacgtgctgcgcatcctggggctgcggccctggaagaagcactccaccttcggggacgtgcggaagctcatcactgaggagttcgtccaaatgaattacctgaagtaccagcgcgtcccatacgtggagccgcccgaatacgagttcttttggggctcccgggccagccgcgaaatcaccaagatgcaaatcatggagttcctggccagggtctttaagaaagacccccaggcctggccctcccgatacagagaagctctggaggaggccagagctctgcgggaggctaatcccactgcccactaccctcgcagcagtgtctctgaggactagcaaagtctggaggcagatgaatggtttctgaccctcaccagggctgtggaagggtgggggtgggtcattatagtattcaggatttacagtgcagtattcacgtgtaacttttaagttttcagtacagtgcttttatacctttaatgcaatgttgtattcatttgggtactattgtgtagtatttaggatgtatgcatgtttgtttatatgtaagcttggttggtgctttcgcttttgtgctacctttcttggatttttgtaccagagatgtgctaaactgatgaaatacattgagaaagtttccatcttattcttttatatgggactgatgatgtgtgttggggtagactgctcctgcagagtttggaagaagtcaccagcaaagccggcctaaccaagaaaagtcaaggcccttcatgaccttgctgggcacagaaaacaccctcgtggagtacactaatttgaactggactggtctcagtgtgagcacttggcacactttactaaacacatatacaaccccaccgtgagtcaactttaaagtaaacattaaagattcttgtgatac

SEQ ID NO: 31921 - DNA, 2148 bp, Homo Sapiens
ttatgggaggctgaggggagggccgttggccggggcctgcggtacgccgcttcagtgagggacgccactgcggccacccggcttgctgccttcctgggcgccactcccccaggcgacccgacgcgacgcgccagtagcgcagcaccgattcctctcgggctcttgggcgctgctctgagcagcgtcaccctttacaccagaaagctggcgggcactatggggaaaaaacaaaacaagaagaaagtagaggaggtgctagaagaggaggaagaggaatatgtggtggaaaaagttctcgaccgtcgagtggtaaagggcaaagtggagtacctcctaaagtggaagggattctcagatgaggacaacacatgggagccagaagagaacctggattgccccgacctcattgctgagtttctgcagtcacagaaaacagcacatgagacagataaatcagagggaggcaagcgcaaagctgattctgattctgaagataagggagaggagagcaaaccaaagaagaagaaagaagagtcagaaaagccacgaggctttgctcgaggtttggagccggagcggattattggagctacagactccagtggagagctcatgttcctgatgaaatggaaaaactctgatgaggctgacctggtccctgccaaggaagccaatgtcaagtgcccacaggttgtcatatccttctatgaggaaaggctgacgtggcattcctacccctcggaggatgatgacaaaaaagatgacaagaactaacgctcctgagtaccagcccctgtcacatctgactgtgggtttcaagtgggaagggaaggagttctacttgtcttgacaccatagaggtggcttgagaagatgtcctttgaagagccagtatagtttctgttccctgcagcagcccaagtgctttaaagccgtttcaagctgtatagtttgcacacccatcccagtggaggggaaaggggataagtgtttcaaggcaaccttttctgcactttgctgcgaaaagcaaagggccttctatgaaggacaacccttgcagaattgggtgtgtgggagagcaaaaaaatactgtagatcttcaaagagcatctccacaacccacagccttcttcccaatagtgttaactctgcatttttacagcgtagcatgtgtgtagtttttggctattactggtgtattatttgggggagggagggatggggaggggagaaagggagatgggtagcatcattttgattaacatttggggcctgataggggaaatggtgaagcaatggaaaagaacagacaactaatgatttgcttctatgtccagaatattttacctttaaaaaaatgtcattggcaccataaataaggactgtgagagactgtttaaaagctgtgaaagtctgaaacctataagccaaggtgttccctgcctaaacttattgctgttcccacaaaggactaagcctgttcataagttaccaaagttgccattttggagatggaaattgacgaggagggaaggtcttttattggagagtatacaggacaagcagatcattctgccttagaggtgctaattcccgaaattagaagaccctttcttttccagtaatgaagttataaatatcagcttgttcatccaagccactggctgaggtgttaggaagaggaagagggtggtagaggaggtaagacagtagggaaagacaagggcccatgctcttagtggggaaaactcttggacccgtttactttgagctttgaacactgaaaccattgttggcagggttcagtcactgacagcacaagtttcactgaattgatccaagagtttagtgatttcaaaagccttggtctcaggagaagattaaactttcatattgggcagtggttcactttaaaacacacacatacacacacaaaacaattttttaagaaatcctaataagtaacatacccaaaatgctctgtcttgagtcatgagaaccatcagttcttgatattgtctagacttgcatctagagctacgttgtaaaattcttttaggcatgtgttagatttctgtgtaaactttgtttaaatgtaaacttcatactacattgtcagtttttgtcttaataaaactatagatttat

SEQ ID NO: 31922 - DNA, 2725 bp, Homo Sapiens
agtaagcactctcccttgtcgtggaggtgggcaaatctttatcagccactgccttctgctgccaggaagccagctagagtggtctttaaagaaaactgggcatctcctgctacttaaaatcaaaaactacctaaaataaagattatagagccagaggaagagatagccatggaggacagccccactatggttagagtggacagccccactatggttaggggtgaaaaccaggtttcgccatgtcaagggagaaggtgcttccccaaagctcttggctatgtcaccggtgacatgaaagaacttgccaaccagcttaaagacaaacccgtggtgctccagttcattgactggattctccggggcatatcccaagtggtgttcgtcaacaaccccgtcagtggaatcctgattctggtaggacttcttgttcagaacccctggtgggctctcactggctggctgggaacagtggtctccactctgatggccctcttgctcagccaggacaggtcattaatagcatctgggctctatggctacaatgccaccctggtgggagtactcatggctgtcttttcggacaagggagactatttctggtggctgttactccctgtatgtgctatgtccatgacttgcccaattttctcaagtgcattgaattccatgctcagcaaatgggacctccccgtcttcaccctccctttcaacatggcgttgtcaatgtacctttcagccacaggacattacaatccgttctttccagccaaactggtcatacctataactacagctccaaatatctcctggtctgacctcagtgccctggagttgttgaaatctataccagtgggagttggtcagatctatggctgtgataatccatggacagggggcattttcctgggagccatcctactctcctccccactcatgtgcctgcatgctgccataggatcattgctgggcatagcagcgggactcagtctttcagccccatttgagaacatctactttggactctggggtttcaacagctctctggcctgcattgcaatgggaggaatgttcatggcgctcacctggcaaacccacctcctggctcttggctgtgccctgttcacggcctatcttggagtcggcatggcaaactttatggctgaggttggattgccagcttgtacctggcccttctgtttggccacgctattgttcctcatcatgaccacaaaaaattccaacatctacaagatgcccctcagtaaagttacttatcctgaagaaaaccgcatcttctacctgcaagccaagaaaagaatggtggaaagccctttgtgagaacaagccccatttgcagccatggtcacgagtcatttctgcctgactgctccagctaacttccagggtctcagcaaactgctgtttttcacgagtatcaactttcatactgacgcgtctgtaatctgttcttatgctcattttgtattttcctttcaactccaggaatatccttgagcatatgagagtcacatccaggtgatgtgctctggtatggaatttgaaaccccaatggggccttggcactaagactggaatgtatataaagtcaaagtgctccaacagaaggaggaagtgaaaacaaactattagtatttattgatattcttggtgtttagctggctcgatgatgttaacagtattaaaaattaaacccccataaacccaacctaagcctatggaatccacagtcacaaaatcgaagttaacccagaatctgtgataagcagcttggctttttttttaaatcaatgcaagtacaccattatagccagaatctgtatcacagaggtgcaagctgacagcagagctcagtccccacttcctgcaaacaatggcctgcaccctatcccttgtgtgtgtgacattctctcatgggacaatgttggggtttttcagactgacaggactgcaagagggagaaaggaattttgtcaatcaaaattattctgtattgcaacttttctcagagattgcaaaggattttttaggtagagattatttttccttatgaaaaatgatctgttttaaatgagataaaataggagaagttcctggcttaacctgttcttacatattaaagaaaagttacttactgtatttatgaaatactcagcttaggcatttttactttaacccctaaattgattttgtaaatgccacaaatgcatagaattgttaccaacctccaaagggctctttaaaatcatatttttttattcatttgaggatgtcttataaagactgaaggcaaaggtcagaatgcttacgggtgttatttttataagttgttgaattccttaatttagaaaagctcattattttttgcacactcacaatattctctctcagaaatcaatggcatttgaaccaccaaaaagaaataaagggctgagtgtggtgctcacgcctgtaatcccagcactttggggagcccaggcgggcagattgcttgaacccaggagttcaagaccagcctgggcagcatggtgaaaccctgtatctacaaaaaatacaaaaattagccaggcatggtggtgggtgcctgtagttccagctacttgggaggctgaggtgggaaaatgacttgagcccaggaggaggaggctgcagtgagctaagattgcaccactgcactccaacctgggtgacaagagtgaaactgaat

SEQ ID NO: 31923 - DNA, 3272 bp, Homo Sapiens
tcttttccttttcctctttgactgagcaccgaggggcagttggcagcttcacctcagagctgcaggaaggaacggggcagtgaaaatcgaatcgggtgtgatcctaggccaagctcatggcccagcagggccagcaggggcagatggcaagtggagacagcaatctcaacttcaggatggtcgcagagatccagaacgtagagggtcagaacctgcaggagcaggtttgccctgagcccattttcaggttcttcagagaaaacaaggtggagattgcaagtgcaataacaaggccatttcctttccttatgggcctccgagaccgctccttcatctccgagcagatgtatgaacattttcaagaagcttttagaaacctggtcccagtgacaagagtgatgtattgtgtactcagtgaactggagaagacatttggctggtcacatctggaagcattgttcagcaggattaacctgatggcctatcctgatttaaacgagatttacagaagcttccagaatgtatgctatgaacactcacctctccaaatgaataatgtaaacgatttagaagatagacccagattactaccatatggtaaacaagagaacagcaatgcctgtcatgaaatggatgatatagcagtgcctcaggaagccttgagctcctcggcaaggtgtgagccaggtttctcttcagagtcttgtgagcagttagctctcccaaaggctggtggaggagatgctgaagatgcacccagcctactaccaggtgggggagtgtcctgtaaacttgctatacaaatagatgaaggagaatcagaagaaatgcccaagttactgccttatgatacagaagttctagaaagcaacgggatgatagatgcggcaaggacatacagcacagcaccaggggagaaacagggagaggaggaaggcaggaacagtcccagaaaaagaaaccaagacaaggagaagtaccaagagagtccagagggaagagacaaagagacctttgatctaaaaactccccaagtcactaatgaaggagaaccagagaaggggctctgtctactaccaggtgaaggagaagagggcagtgatgactgttcagaaatgtgtgatggagaagagccccaggaagcctctagctccctagcaagatgtgggtcagtttcttgtttctctacagagacctttgatctaaagactccccaagtcactaatgaaggagaaccagagaaggagctcagtctactaccaggtgaaggagaagagggcagtgatgactgttcggaaatgtgtgatggagaagagcgccaggaagcctctagctccctagcaagacgtgggtcagtgtctagtgaactagaaaatcacccaatgaatgaagaaggagaatcagaagagcttgcttctagcctgctatatgataatgtaccaggagcggagcaatcagcatatgaaaatgagaagtgttcctgtgtcatgtgtttctcagaagaggtgccaggaagcccagaagcaaggacggaaagtgatcaagcgtgtggcacaatggatactgtggatattgcaaacaactccactttgggaaaacccaagaggaaaagaagaaaaaagagggggcatggctggagcagaatgagaatgagaaggcagaaaaacagccaacaaaatgataatagcaaagccgacggccaggtggtctccagtgaaaagaaggcgaacgtgaatctgaaagacctttccaagattagggggagaaagagaggcaaacctggaacccgcttcactcagagtgacagagctgcacagaaaagagtccgatcaagagcttcaagaaagcacaaagatgaaactgtggattttaaggctcctttgcttccagtgacctgtggtggggtgaagggaattttacataagaagaaattgcagcaaggaatcttggtgaagtgtatacagactgaggatggaaaatggttcacccccacggaatttgaaatcaaaggaggccatgcaagatcaaagaactggaggctgagtgtgcgctgtggcgggtggcccctacgatggctgatggagaatggatttctgcctgatcctccaagaatacgttacaggaaaaaaaagagaatactgaagtctcaaaacaatagctcagttgacccttgtatgagaaacctggatgagtgtgaggtgtgccgggacggaggggagctgttctgttgcgacacttgttcaagagtcttccatgaggactgtcacatcccgcctgtggaagctgagaggaccccgtggaattgcatcttctgcaggatgaaggagtctccgggaagccaacagtgttgtcaggaatctgaggtcctggagaggcagatgtgtcctgaggaacagttgaaatgtgagttcctcctcttgaaagtctattgctgttctgagagctccttttttgccaagattccatactattattatattagagaggcgtgtcaaggcctgaaggagcccatgtggttggataaaatcaagaaaaggctgaatgagcacggttacccccaagtggaggggtttgtacaagacatgcgcctcatcttccagaaccacagggcctcttacaagtacaagggttttggccaaatgggatttagactggaggctgagtttgagaagaatttcaaggaagtgtttgctattcagggaaacaaatgggaacaattgactggattagtggatgctgaaagcattcagcaaatggcaccctaaaatatgccgctggtttgccactgacttcaaaatgaggtcacttgggcacagcacatgcagggaggggcttttctctgagcctccttcatctgcccaaagacaaatcctcaaaaggaaattcaatcatcatgaatcacaaccccaagtatctcatcagccagggaagagtaagtgggatcacagggaaggatgttggcagcgacaccatcccatacaggctcttacctcttctcctgagggctgctccagacaacatttattacccagaagaccttttgtctgaaaaccagccaagctttattcaggacacacttcttgccttcactttcccacttccgtggccacctccatgcagaagccctaagcccacattctttcgatagctcacggtggtgcatgagtgtccatcatctgactcttctcggagtctcatattttgtgggactcctgtgcaaacatatgttattaaaatttttttcctcctgttaaaaaaaaaaaaaaaaaaaa

SEQ ID NO: 31924 - DNA, 2203 bp, Homo Sapiens
ctgaggcccacgcagggcctagggtgggaagatggcaggtgggggcggcgacctgagcaccaggaggctgaatgaatgtatttcaccagtagcaaatgagatgaaccatcttcctgcacacagccacgatttgcaaaggatgttcacggaagaccagggtgtagatgacaggctgctctatgacattgtattcaagcacttcaaaagaaataaggtggagatttcaaatgcaataaaaaagacatttccattcctcgagggcctccgtgatcgtgatctcatcacaaataaaatgtttgaagattctcaagattcttgtagaaacctggtccctgtacagagagtggtgtacaatgttcttagtgaactggagaagacatttaacctgccagttctggaagcactgttcagcgatgtcaacatgcaggaataccccgatttaattcacatttataaaggctttgaaaatgtaatccatgacaaattgcctctccaagaaagtgaagaagaagagagggaggagaggtctggcctccaactaagtcttgaacaaggaactggtgaaaactcttttcgaagcctgacttggccaccttcgggttccccatctcatgctggtacaaccccacctgaaaatggactctcagagcacccctgtgaaacagaacagataaatgcaaagagaaaagatacaaccagtgacaaagatgattcgctaggaagccaacaaacaaatgaacaatgtgctcaaaaggctgagccaacagagtcctgcgaacaaattgctgtccaagtgaataatggggatgctggaagggagatgccctgcccgttgccctgtgatgaagaaagcccagaggcagagctacacaaccatggaatccaaattaattcctgttctgtgcgactggtggatataaaaaaggaaaagccattttctaattcaaaagttgagtgccaagcccaagcaagaactcatcataaccaggcatctgacataatagtcatcagcagtgaggactctgaaggatccactgacgttgatgagcccttagaagtcttcatctcagcaccgagaagtgagcctgtgatcaataatgacaaccctttagaatcaaatgatgaaaaggagggccaagaagccacttgctcacgaccccagattgtaccagagcccatggatttcagaaaattatctacattcagagaaagttttaagaaaagagtgataggacaagaccacgacttttcagaatccagtgaggaggaggcgcccgcagaagcctcaagcggggcactgagaagcaagcatggtgagaaggctcctatgacttctagaagtacatctacttggagaatacccagcaggaagagacgtttcagcagtagtgacttttcagacctgagtaatggagaagagcttcaggaaacctgcagctcatccctaagaagagggtcaggatcacagccacaagaacctgaaaataagaagtgctcctgtgtcatgtgttttccaaaaggtgtgccaagaagccaagaagcaaggactgaaagtagtcaagcatctgacatgatggataccatggatgttgaaaacaattctactttggaaaaacacagtgggaaaagaagaaaaaagagaaggcatagatctaaagtaaatggtctccaaagagggagaaagaaagacagacctagaaaacatttaactctgaataacaaagtccaaaagaaaagatggcaacaaagaggaagaaaagccaacactagacctttgaaaagaagaagaaaaagaggtccaagaattcccaaagatgaaaatattaattttaaacaatctgaacttcctgtgacctgtggtgaggtgaagggcactctatataaggagcgattcaaacaaggaacctcaaagaagtgtatacagagtgaggataaaaagtggttcactcccagggaatttgaaattgaaggagaccgcggagcatccaagaactggaagctaagtatacgctgcggtggatataccctgaaagtcctgatggagaacaaatttctgccagaaccaccaagcacaagaaaaaaggtgacgatcaagtgatcttctgccaatgtctcgtctactatgttgttgattttctatctctgtggccttacagtctttaaattgacccatcatcataaaatttgattttataataaaaaa

SEQ ID NO: 31925 - DNA, 4463 bp, Homo Sapiens; identical to SEQ ID NO: 29900

SEQ ID NO: 31926 - DNA, 4064 bp, Homo Sapiens
ctgcggccgcctggtttcttgccttaaggagcccattgcctttcccgctgaagtctagatgttgacatgtaataaagcgggcagcaggatggtggtggatgcggccaactccaatgggcctttccagcccgtggtccttctccatattcgagatgttcctcctgctgatcaagagaagctttttatccagaagttacgtcagtgttgcgtcctctttgactttgtttctgatccactaagtgacctaaagtggaaggaagtaaaacgagctgctttaagtgaaatggtagaatatatcacccataatcggaatgtgatcacagagcctatttacccagaagtagtccatatgtttgcagttaacatgtttcgaacattaccaccttcctccaatcctacgggagcggaatttgacccggaggaagatgaaccaacgttagaagcagcctggcctcatctacagcttgtttatgaatttttcttaagatttttagagtctccagatttccaacctaatatagcgaagaaatatattgatcagaagtttgtattgcagcttttagagctctttgacagtgaagatcctcgggagagagattttcttaaaaccacccttcacagaatctatgggaaattcctaggcttgagagcttacatcagaaaacagataaataatatattttataggtttatttatgaaacagagcatcataatggcatagcagagttactggaaatattgggaagtataattaatggatttgccttaccactaaaagaagagcacaagattttcttattgaaggtgttactacctttgcacaaagtgaaatctctgagtgtctaccatccccagctggcatactgtgtagtgcagtttttagaaaaggacagcaccctcacggaaccagtggtgatggcacttctcaaatactggccaaagactcacagtccaaaagaagtaatgttcttaaacgaattagaagagattttagatgtcattgaaccatcagaatttgtgaagatcatggaacccctcttccggcagttggccaaatgtgtctccagcccacacttccaggtggcagagcgagctctctattactggaataatgaatacatcatgagtttaatcagtgacaacgcagcgaagattctgcccatcatgtttccttccttgtaccgcaactcaaagacccattggaacaagacaatacatggcttgatatacaacgccctgaagctcttcatggagatgaaccaaaagctatttgatgactgtacacaacagttcaaagcagagaaactaaaagagaagctaaaaatgaaagaacgggaagaagcatgggttaaaatagaaaatctagccaaagccaatccccagtacacagtgtatagtcaagccagcaccatgagcattccggttgcaatggagacagatgggcctttatttgaagatgtgcagatgctgagaaagacagtgaaggacgaggctcatcaggcacagaaagatccgaagaaggaccgtcctcttgcactccgcaagtccgagctgcctcaggacccccacaccaagaaagccttggaagctcactgcagggccgatgagctggcctcccaggacggccgctagcctccggggcgccgcgtcggggccgggcccgccagttcttttccggattctgtagaaaatacatacttcctgtgccataccaatcagttacactcaaagctttcttggaccccgttccgtaggcaataacgtgcgtccgcctcagcgcgagattaggagttcaaacaatggtgacttcccagagcccgctggcagagccgcgggttgacgacggtgtcctcgcagtgtcgccgccaccccagcgtagtccaagtcagactatttcacaaagtcagagcgataggaaagcaccctgcccttcatcttcatgttctcccaaatggaacttaggatcttttaacataggtggttctgtgataacatcagtgttttccaaatcaaaggaacgctttaaaaaataggacctattttttaagactttacagcctttgaaatggtttccacgtgattgttacgccagcagttcttttgtttgtttttcaatctcagtgaaatggctctttgctttcgagttctcacgcaacgtactgggcaaatgacaatcctcagccgctggtattttctaaggggtctcttcactttgatgagtgacatgaacaccgtgtctccttctcttgtgtgtacctaaagccatatttccaagtctgtggtactccaggattccaggagtaagcctgtagaagagatttattttaaaagagattgctctgaaatttatcttaaaagagcttgctctgtctaccttgacagaaattggagttttaaaattatgtgttaatatttttatttgcagatttcgtttccgtcaacttaaacattgttgcccttcaacaaggctcttgaattaataaaattatagtctctaagaattccacattttatggaaagttagagcaaaatcattttgagttaagccagttcttagcctaatgcaaactgcagcgcctttaagcataaagtaacacaacagcattgcacggggccggcactgccgctgccttcactgaaggctgcagtgctgttctgagagcttggaggaggcaccagcgaggatgacgtttagtggagctctttctgttgaaaagagctcacgttatcaacaccttgtaaggaaaatacagtgtctgagttttcatcggtcttcacatgctgctatatattccacagagttccttgcatgtactgagcttttgttttagatggaatagcacaaggagaaaaatctttaaacttagtgctttgtctattctttatttctctcagggtggccagtattttgacttatttatcctgcttgaaagctacttgagatgtgtactgctattctaaacacgtgatctagtttctttcatctctggcataagattatataacttaatgttaagtgtcttgaggcataaaagacaaaatgtggcttattttaggatctgttttttcatcgaggtctcgggtatcctttcaaagatagtgagaagcagacactgctccttgtgcagctctggtacctcctgcccactgctgtcacttcaagccactggcaatgcttctgtcctcgtgtcttggaggaaaatcacctggggggaggggacttcttgtggtaagagcaagtgcaggtatgaaatgcgaagattgccccagctaaaagtggacaagtccgctttgtgagatgaatacttcctgagaaacttgacaagtatctctccattttaccattatgaaaactatcattaaaaaaaacagtttagatgccttctccttttgagggaaaaagggtgctttttattgtataaagcagcgtcttatgtattttgatataccattgtttgaacttccgtctttagctgatagattctcaaatatccttgattttggatgttcagtatgtttgtgagagaggtttctgggaagactctctttttgccctcgggaaaaagcaaaatatcaatgtttgggtgactgtgtaaagctcagtgtgtaagaacatctttttgtctaggttttctttctgctctttattgaagacaaacactcaccaaaaagaaaaataaaagttttcagagaaactaattttctttggcaagagtattacttaatattttggcctcctaaagtttccctagttagtactcggactcctgtgctaattgtcagcttacatatcattgtatagagactgtttattctgtaccaaactgatttcaaaagtactacattgaaaataaaccggtgactgtttttcttcataaagttctgcgtttggcatcttcactctttccaaaatgtatctgtacatcagaaatgtcactattccaagtgtctttttagtgtggcctttagtatggcttccttttaatattgtacatacattgtatctttgttttatggtaataagtaataaaaatgtagacttcaaaaaaaaaagcggccgcag

SEQ ID NO: 31927 - DNA, 4858 bp, Homo Sapiens
agactccggcccctgtcggccgccaagcccctccgcccctcacagcgcccaggtccgcggccgggccttgattttttggcggggaccgtcatggcgtcgcagccaaattcgtctgcgaagaagaaagaggagaaggggaagaacatccaggtggtggtgagatgcagaccatttaatttggcagagcggaaagctagcgcccattcaatagtagaatgtgatcctgtacgaaaagaagttagtgtacgaactggaggattggctgacaagagctcaaggaaaacatacacttttgatatggtgtttggagcatctactaaacagattgatgtttaccgaagtgttgtttgtccaattctggatgaagttattatgggctataattgcactatctttgcgtatggccaaactggcactggaaaaacttttacaatggaaggtgaaaggtcacctaatgaagagtatacctgggaagaggatcccttggctggtataattccacgtacccttcatcaaatttttgagaaacttactgataatggtactgaattttcagtcaaagtgtctctgttggagatctataatgaagagctttttgatcttcttaatccatcatctgatgtttctgagagactacagatgtttgatgatccccgtaacaagagaggagtgataattaaaggtttagaagaaattacagtacacaacaaggatgaagtctatcaaattttagaaaagggggcagcaaaaaggacaactgcagctactctgatgaatgcatactctagtcgttcccactcagttttctctgttacaatacatatgaaagaaactacgattgatggagaagagcttgttaaaatcggaaagttgaacttggttgatcttgcaggaagtgaaaacattggccgttctggagctgttgataagagagctcgggaagctggaaatataaatcaatccctgttgactttgggaagggtcattactgcccttgtagaaagaacacctcatgttccttatcgagaatctaaactaactagaatcctccaggattctcttggagggcgtacaagaacatctataattgcaacaatttctcctgcatctctcaatcttgaggaaactctgagtacattggaatatgctcatagagcaaagaacatattgaataagcctgaagtgaatcagaaactcaccaaaaaagctcttattaaggagtatacggaggagatagaacgtttaaaacgagatcttgctgcagcccgtgagaaaaatggagtgtatatttctgaagaaaattttagagtcatgagtggaaaattaactgttcaagaagagcagattgtagaattgattgaaaaaattggtgctgttgaggaggagctgaatagggttacagagttgtttatggataataaaaatgaacttgaccagtgtaaatctgacctgcaaaataaaacacaagaacttgaaaccactcaaaaacatttgcaagaaactaaattacaacttgttaaagaagaatatatcacatcagctttggaaagtactgaggagaaacttcatgatgctgccagcaagctgcttaacacagttgaagaaactacaaaagatgtatctggtctccattccaaactggatcgtaagaaggcagttgaccaacacaatgcagaagctcaggatatttttggcaaaaacctgaatagtctgtttaataatatggaagaattaattaaggatggcagctcaaagcaaaaggccatgctagaagtacataagaccttatttggtaatctgctgtcttccagtgtctctgcattagataccattactacagtagcacttggatctctcacatctattccagaaaatgtgtctactcatgtttctcagatttttaatatgatactaaaagaacaatcattagcagcagaaagtaaaactgtactacaggaattgattaatgtactcaagactgatcttctaagttcactggaaatgattttatccccaactgtggtgtctatactgaaaatcaatagtcaactaaagcatattttcaagacttcattgacagtggccgataagatagaagatcaaaaaaaggaactagatggctttctcagtatactgtgtaacaatctacatgaactacaagaaaataccatttgttccttggttgagtcacaaaagcaatgtggaaacctaactgaagacctgaagacaataaagcagacccattcccaggaactttgcaagttaatgaatctttggacagagagattctgtgctttggaggaaaagtgtgaaaatatacagaaaccacttagtagtgtccaggaaaatatacagcagaaatctaaggatatagtcaacaaaatgacttttcacagtcaaaaattttgtgctgattctgatggcttctcacaggaactcagaaattttaaccaagaaggtacaaaattggttgaagaatctgtgaaacactctgataaactcaatggcaacctggaaaaaatatctcaagagactgaacagagatgtgaatctctgaacacaagaacagtttatttttctgaacagtgggtatcttccttaaatgaaagggaacaggaacttcacaacttattggaggttgtaagccaatgttgtgaggcttcaagttcagacatcactgagaaatcagatggacgtaaggcagctcatgagaaacagcataacatttttcttgatcagatgactattgatgaagataaattgatagcacaaaatctagaacttaatgaaaccataaaaattggtttgactaagcttaattgctttctggaacaggatctgaaactggatatcccaacaggtacgacaccacagaggaaaagttatttatacccatcaacactggtaagaactgaaccacgtgaacatctccttgatcagctgaaaaggaaacagcctgagctgttaatgatgctaaactgttcagaaaacaacaaagaagagacaattccggatgtggatgtagaagaggcagttctggggcagtatactgaagaacctctaagtcaagagccatctgtagatgctggtgtggattgttcatcaattggcggggttccatttttccagcataaaaaatcacatggaaaagacaaagaaaacagaggcattaacacactggagaggtctaaagtggaagaaactacagagcacttggttacaaagagcagattacctctgcgagcccagatcaacctttaattcacttgggggttggcaattttatttttaaagaaaacttaaaaataaaacctgaaaccccagaacttgagccttgtgtatagattttaaaagaatatatatatcagccgggcgcggtggctcatgcctgtaatcccagcactttgggaggctgaggcgggtggattgcttgagcccaggagtttgagaccagcctggccaacgtggcaaaacctcgtctctgttaaaaattagccgggcgtggtggcacactcctgtaatcccagctactggggaggctgaggcacgagaatcacttgaacccaggaagcggggttgcagtgagccaaaggtacaccactacactccagcctgggcaacagagcaagactcggtctcaaaaacaaaatttaaaaaagatataaggcagtactgtaaattcagttgaattttgatatctacccatttttctgtcatccctatagttcactttgtattaaattgggtttcatttgggatttgcaatgtaaatacgtatttctagttttcatataaagtagttcttttataacaaatgaaaagtatttttcttgtatattattaagtaatgaatatataagaactgtactcttctcagcttgagcttaacataggtaaatatcaccaacatctgtccttagaaaggaccatctcatgttttttttcttgctatgacttgtgtattttcttgcatcctccctagacttccctatttcgctttctcctcggctcactttctccctttttatttttcaccaaaccatttgtagagctacaaaacctatcctttcttattttcagtagtcagaattttatctagaaatcttttaacacctttttagtggttatttctaaaatcactgtcaacaataaatctaaccctagttgtatccctcctttaagtatttaaaacttgttgccccaaatgtgaaagcatttaattcctttaagaggcctaactcattcaccctgacagagttcacaaaaagcccactttagagtatacattgctattatgggagaccacccagacatctgactaatggctctgtgccacactccaagacctgtgccttttagagaagctcacaatgatttaaggactgtttgaaacttccaattatgtctataatttatattcttttgtttacatgatgaaactttttgttgttgcttgtttgtatataatacaatgtgtacatgtatctttttctcgattcaaatcttaacccttaggactctggtatttttgatctggcaaccatatttctggaagttgagatgtttcagcttgaagaaccaaaacagaaggaatatgtacaaagaataaattttctgctcacgatgagtttagtgtgtaaagtttagagacatctgactttgatagctaaattaaaccaaaccctattgaagaattgaatatatgctacttcaagaaactaaattgatctcgtagaattatcttaataaaataatggctataatttctctgcaaaatcagatgtcagcataagcgatggataatacctaataaactgccctcagtaaatccatggttaataaatgtggtttctacatt

SEQ ID NO: 31928 - DNA, 3552 bp, Homo Sapiens
ctgactggtgctccctctctttcatcttgggctgtctgcatgtgtctcattcccccactctctcctgtgcctcccctctactctaataatcaggtccaggtttctctgtactgggagaagacctgtggctggagcaggcagggatgcaccctatctgttccccattcctccaggtgggagggagaaggagtaacccactttattggccacagatgcaggggagaaaggagaaagcatgctgggagctggaaagagccctaagatcacctggtttctagagagtggagcctgcttcctgcctaggcccctcccacaatgcttgtcgccggtcttcttctctgggcttccctactgactggggcctggccatccttccctacccaggaccacctcccggccacgccccgggtacggctctcattcaaagagctgaaggccacaggcaccgcccacttcttcaacttcctgctcaacacaaccgactaccgaatcttgctcaaggacgaggaccacgaccgcatgtacgtgggcagcaaggactacgtgctgtccctggacctgcacgacatcaaccgcgagcccctcattatacactgggcagcctccccacagcgcatcgaggaatgcgtgctctcaggcaaggatgtcaacggcgagtgtgggaacttcgtcaggctcatccagccctggaaccgaacacacctgtatgtgtgcgggacaggtgcctacaaccccatgtgcacctatgtgaaccgcggacgccgcgcccaggattacatcttctacctggagcctgagcgactcgagtcagggaagggcaagtgtccgtacgatcccaagctggacacagcatcggccctcatcaatgaggagctctatgctggtgtgtacatcgattttatgggcactgatgcagccatcttccgcacacttggaaagcagacagccatgcgcacggatcagtacaactcccggtggctgaacgacccgtcgttcatccatgctgagctcattcctgacagtgcggagaatgatgataagctttacttcttcttccgtgagcggtcggcagaggcgccgcagagccccgcggtgtacgcccgcatcgggcgcatttgcctgaacgatgacggtggtcactgttgcctggtcaacaagtggagcacattcctgaaggcgcggctcgtctgctctgtcccgggcgaggatggcattgagactcactttgatgagctccaggacgtgtttgtccagcagacccaggacgtgaggaaccctgtcatttacgctgtctttacctcctctggctccgtgttccgaggctctgccgtgtgtgtctactccatggctgatattcgcatggtcttcaacgggccctttgcccacaaagaggggcccaactaccagtggatgcccttctcagggaagatgccctacccacggccgggcacgtgccctggtggaaccttcacgccatctatgaagtccaccaaggattatcctgatgaggtgatcaacttcatgcgcagccacccactcatgtaccaggccgtgtaccctctgcagcggcggcccctggtagtccgcacaggtgctccctaccgccttaccactattgccgtggaccaggtggattcagccgacgggcgctatgaggtgcttttcctgggcacagaccgcgggacagtgcagaaggtcattgtgctgcccaaggatgaccaggagatggaggagctcatgctggaggaggtggaggtcttcaaggatccagcacccgtcaagaccatgaccatctcttctaagaggcaacaactctacgtggcgtcagccgtgggtgtcacacacctgagcctgcaccgctgccaggcgtatggggctgcctgtgctgactgctgccttgcccgggacccttactgtgcctgggatggccaggcctgctcccgctatacagcatcctccaagaggcggagccgccggcaggacgtccggcacggaaaccccatcaggcagtgccgtgggttcaactccaatgccaacaagaatgccgtggagtctgtgcagtatggcgtggccggcagcgcagccttccttgagtgccagccccgctcgccccaagccactgttaagtggctgttccagcgagatcctggtgaccggcgccgagagattcgtgcagaggaccgcttcctgcgcacagagcagggcttgttgctccgtgcactgcagctcagcgatcgtggcctctactcctgcacagccactgagaacaactttaagcacgtcgtcacacgagtgcagctgcatgtactgggccgggacgccgtccatgctgccctcttcccaccactgtccatgagcgccccgccacccccaggcgcaggccccccaacgcctccttaccaggagttagcccagctgctggcccagccagaagtgggcctcatccaccagtactgccagggttactggcgccatgtgccccccagccccagggaggctccaggggcaccccggtctcctgagccccaggaccagaaaaagccccggaaccgccggcaccaccctccggacacatgaggccagctgcctgttctgccatgggcagcctagcccttgtcccttttaatataaaagacatatatatatatatatatatatatatataaaaatatctatattctatacacaccctgcccctgcaaagacagtatttattggtgggttgaatatagcctgcctcagtggcagcatcctccaaaacttagacccatgctggtcagagacggcagaaaacagagcctgcctaaccaggccagccagttagtggggccaggccaggaccacacagtccccagactcagctggagtctacctgctggacaggccttgcgccaagatctacaggacaaagggagggagcaagccctactcggatggggcacggaccgtccacctttctgatgtgtgttgtcagcctgtgctgtggcatagacatggatgcgaggaccactttggagactggggtggcctcaagagcacacagagaagggaagaaggggccatcacaggatgccacccctgccttgggttgggggcactctgccacgaccagccccttcctgggtatttattctctatttattggggataggagaagaggcatcctgcctgggtgggacagccccttgggccccttctcccctccccgcctggccagggagggccaccccactctacctccttagctttccctgtgccactttgactcagaggctgggagcatagcagaggccaggcccaggcagagctgacgggaggccccagctctgaggggagggggtccgtggtagagcctggggcaggtagaggctccccagggctcccttatgtccaccacttcaggggatgggtgtggatgtaattagctctggggggcagttgggtagatgggtgggggctcctggtggccttctgctgcccaggccacagccgcctttgggttccatcttgctaataaacactggctttggaactaaaaaaaaaaaaaaaaaa

SEQ ID NO: 31929 - DNA, 3609 bp, Homo Sapiens
ggcacgaggagccctgagagtccgccgccaacgcgcaggtgctagcggccccttcgccctgcagcccctttgcttttactctgtccaaagttaacatgtcactgaaaaacgagccacgggtaaatacctctgcactgcagaaaattgctgctgacatgagtaatatcatagaaaatctggacacgcgggaactccactttgagggagaggaggtagactacgacgtgtctcccagcgatcccaagatacaagaagtgtatatccctttctctgctatttataacactcaaggatttaaggagcctaatatacagacgtatctctccggctgtccaataaaagcacaagttctggaagtggaacgcttcacatctacaacaagggtaccaagtattaatctttacactattgaattaacacatggggaatttaaatggcaagttaagaggaaattcaagcattttcaagaatttcacagagagctgctcaagtacaaagcctttatccgcatccccattcccactagaagacacacgtttaggaggcaaaacgtcagagaggagcctcgagagatgcccagtttgccccgttcatctgaaaacatgataagagaagaacaattccttggtagaagaaaacaactggaagattacttgacaaagatactaaaaatgcccatgtatagaaactatcatgccacaacagagtttcttgatataagccagctgtctttcatccatgatttgggaccaaagggcatagaaggtatgataatgaaaagatctggaggacacagaataccaggcttgaattgctgtggtcagggaagagcctgctacagatggtcaaaaagatggttaatagtgaaagattcctttttattgtatatgaaaccagacagcggtgccattgccttcgtcctgctggtagacaaagaattcaaaattaaggtggggaagaaggagacagaaacgaaatatggaatccgaattgataatctttcaaggacacttattttaaaatgcaacagctatagacatgctcggtggtggggaggggctatagaagaattcatccagaaacatggcaccaactttctcaaagatcatcgatttgggtcatatgctgctatccaagagaatgctttagctaaatggtatgttaatgccaaaggatattttgaagatgtggcaaatgcaatggaagaggcaaatgaagagatttttatcacagactggtggctgagtccagaaatcttcctgaaacgcccagtggttgagggaaatcgttggaggttggactgcattcttaaacgaaaagcacaacaaggagtgaggatcttcataatgctctacaaagaggtggaactcgctcttggcatcaatagtgaatacaccaagaggactttgatgcgtctacatcccaacataaaggtgatgagacacccggatcatgtgtcatccaccgtctatttgtgggctcaccatgagaagcttgtcatcattgaccaatcggtggcctttgtgggagggattgacctggcctatggaaggtgggacgacaatgagcacagactcacagacgtgggcagtgtgaagcgggtcacttcaggaccgtctctgggttccctcccacctgccgcaatggagtctatggaatccttaagactcaaagataaaaatgagcctgttcaaaacctacccatccagaagagtattgatgatgtggattcaaaactgaaaggaataggaaagccaagaaagttctccaaatttagtctctacaagcagctccacaggcaccacctgcacgacgcagatagcatcagcagcattgacagcacctccagttattttaatcactatagaagtcatcacaatttaatccatggtttaaaaccccacttcaaactctttcacccgtccagtgagtctgagcaaggactcactagacctcatgctgataccgggtccatccgtagtttacagacaggtgtgggagagctgcatggggaaaccagattctggcatggaaaggactactgcaatttcgtcttcaaagactgggttcaacttgataaaccttttgctgatttcattgacaggtactccacgccccggatgccctggcatgacattgcctctgcagtccacgggaaggcggctcgtgatgtggcacgtcacttcatccagcgctggaacttcacaaaaattatgaaatcaaaatatcggtccctttcttatccttttctgcttccaaagtctcaaacaacagcccatgagttgagatatcaagtgcctgggtctgtccatgctaacgtacagttgctccgctctgctgctgattggtctgctggtataaagtaccatgaagagtccatccacgccgcttacgtccatgtgatagagaacagcaggcactatatctatatcgaaaaccagtttttcataagctgtgctgatgacaaagttgtgttcaacaagataggcgatgccattgcccagaggatcctgaaagctcacagggaaaaccagaaataccgggtatatgtcgtgataccacttctgccagggttcgaaggagacatttcaaccggcggaggaaatgctctacaggcaatcatgcacttcaactacagaaccatgtgcagaggagaaaattccatccttggacagttaaaagcagagcttggtaatcagtggataaattacatatcattctgtggtcttagaacacatgcagagctcgaaggaaacctagtaactgagcttatctatgtccacagcaagttgttaattgctgatgataacactgttattattggctctgccaacataaatgaccgcagcatgctgggaaagcgtgacagtgaaatggctgtcattgtgcaagatacagagactgttccttcagtaatggatggaaaagagtaccaagctggccggtttgcccgaggacttcggctacagtgctttagggttgtccttggctatcttgatgacccaagtgaggacattcaggatccagtgagtgacaaattcttcaaggaggtgtgggtttcaacagcagctcgaaatgctacaatttatgacaaggttttccggtgccttcccaatgatgaagtacacaatttaattcagctgagagactttataaacaagcccgtattagctaaggaagatcccattcgagctgaggaggaactgaagaagatccgtggatttttggtgcaattccccttttatttcttgtctgaagaaagcctactgccttctgttgggaccaaagaggccatagtgcccatggaggtttggacttaagagatattcattggcagctcaaagacttccaccctggagaccacactgcacacagtgacttcctggggatgtcatagccaaagccaggcctgacgcattctcgtatccaacccaaggaccttttggaatgactggggagggctgcagtcacattgatgtaaggactgtaaacatcagcaagactttataattccttctgcctaacttgtaaaaagggggctgcattcttgttggtagcatgtactctgttgagtaaaacacatattcaaattccgctcgtgccgaattc

SEQ ID NO: 31930 - DNA, 3181 bp, Homo Sapiens
ctttgatttagtaacataaggtatagatgcatgaaaacataaacagtaaggccaggcacagtggctcacgcctgtaatcccaacactttgggaggccgaggccgggggatcacgaggtcaggagatggagaccatcctggctaacacggtgaccccccatctctactaaaagtacaaaatattagccgggcgtggtggtgggcgcctgtagtcccaggtactggggaggctgaggcagaagcatggcgtgaaccgggaggcggagcttgcagtgagccgagattgcaccactgcactccagcctgggtgacagagcaagacttcgtctaaaaaaaaaacaaaaaaaaacaaaaaaaccataaacaatataggagtgtcataggattataaatagatggcatggataataaaatctacaagtttagagaaaattcgtaattataggtgagaagtattaatgaaaggacaaagcttgttcttaaaggatcagaataggccaagatgaaaaaaggcatccatgggaaaagaactgttcatttctataattttaacaaaatagataatctatgttgaataaaatccataaatactatttccaaatttgattaaggtatttactttgaaaacctgaaacaggaacatatttacagtgttaagtgatttgataattttgtagttctgccctaaaaatcaatatccttaattaacccttcatcagtttcttaagtcatctgtcatcctgaaagcaagttaattattctaaatgttaaataattttggtagtgtctaatctataaaacatacatacactaccagtttttttctacctttaacaaattcgttcccataaaagacaattttatcactaacaaaggataactggcaggcaggtaaaggcagcttcttaggcagccagcgagttggcaggtgggttgggactcgcttgtcaactcattaattttaagcagtcagtttgggggtactgcaggataatcaggagggccgtggggagtcaagaggtgacccgggatgccggtggtggggaaagaaaagaggagcctctggaagcttggaggcaaaattgcgcttgggttcctgttccttgcatccctcctggcttgagtgcgggagaacactttttaaagactcaccttggaaagaaggcctccgtcccaggggagaaggagaggcgtctgcagggggcagagaccgcagctacctgccgggtgcgccccccacccaggagcgctcgcttcgccccctttcctcccccgcccccacctccttattggtgctagtttgcagcgcccagctcctgcgccttcgcttcgcgtttgaatctggctcgccccttcgtattatgtctgcactccgaaggaaatttggggacgattatcaggtagtgaccacatcgtccagcggctcgggcttgcagccccaggggccaggccaggaccctcagcagcagcttgtgcccaagaagaagcggcagcggttcgtggacaagaacggccggtgcaatgtacagcacggcaacctgggcagcgagacaagccgctacctctcggacctcttcaccacgctggtggacctcaagtggcgctggaacctcttcatcttcattctcacctacaccgtggcctggcttttcatggcgtccatgtggtgggtgatcgcctacactcggggcgacctgaacaaagcccacgtcggtaactacacgccttgcgtggccaatgtctataacttcccttctgccttcctcttcttcatcgagacggaggccaccatcggctatggctaccgatacatcacagacaagtgccccgagggcatcatcctcttcctcttccagtccatcctgggctccatcgtggacgccttcctcatcggctgcatgttcatcaagatgtcccagcccaagaagcgcgccgagaccctcatgttcagcgagcacgcggtgatctccatgagggacggaaaactcacgcttatgttccgggtgggcaacctgcgcaacagccacatggtctccgcgcagattcgctgcaagctgctcaaatctcggcagacacctgagggtgagttccttccccttgaccaacttgaactggatgtaggttttagtacaggggcagatcaactttttcttgtgtcccccctcacaatttgccacgtgatcgatgccaaaagccccttttatgacctatcccagcgaagcatgcaaactgaacagttcgagattgtcgtcatcctagaaggcattgtggaaacaactgggatgacttgtcaagctcgaacatcatatactgaagatgaagttctttggggtcatcgtttttttcctgtaatttccttagaagagggattctttaaagttgattattcccagttccatgcaacatttgaagtccccaccccaccttacagtgtgaaagagcaggaggaaatgcttctcatgtcgtcccccttaatagcaccagccataactaacagcaaagaaagacataattctgtggaatgcttagatggactagatgatattactacaaaactaccatctaagctgcagaaaattactggaagagaagactttcccaaaaaactcttgaggatgagttctacaacttcagaaaaagcctacagcttgggagacttgcccatgaaacttcaacgaataagttcagttccgggcaactcagaagaaaaactggtatctaaaaccaccaagatgttatctgatcccatgagccagtctgtggctgatttgccaccaaagcttcaaaagatggctggaggagcagctaggatggaagggaaccttccagccaaattaagaaaaatgaactctgatcgcttcacataacaaagcactcccttaggcattatttaatgtttgatttagtaatagtccaatatttggcgatgaggtaattctccctaaggaatctgaaagtatattttcctcccagttctacaagcatatttgagaacccttcctttcccaagtattgcgaatgtgcagaaagcaacagttacggagggaggacatcataaggaagttattaacgggcatgtattatcacatcaagcatgcaataatgtgcaaattttgcatttagttttatggcatgatttatatatggcatatttatattgtatattctggaaaaaaaaaaaa

SEQ ID NO: 31931 - DNA, 2025 bp, Homo Sapiens
ggcagcggtggcaggggctgcaggagcaagtgaccaggagcaggactggggacaggcctgatcgcccctgcacgaaccagacccttcgccgccctcacgatgactacctctccgatcctgcagctgctgctgcggctctcactgtgcgggctgctgctccagagggcggagacaggctctaaggggcagacggcgggggagctgtaccagcgctgggaacggtaccgcagggagtgccaggagaccttggcagccgcggaaccgccttcaggcctcgcctgtaacgggtccttcgatatgtacgtctgctgggactatgctgcacccaatgccactgcccgtgcgtcctgcccctggtacctgccctggcaccaccatgtggctgcaggtttcgtcctccgccagtgtggcagtgatggccaatggggactttggagagaccatacacaatgtgagaacccagagaagaatgaggcctttctggaccaaaggctcatcttggagcggttgcaggtcatgtacactgtcggctactccctgtctctcgccacactgctgctagccctgctcatcttgagtttgttcaggcggctacattgcactagaaactatatccacatcaacctgttcacgtctttcatgctgcgagctgcggccattctcagccgagaccgtctgctacctcgacctggcccctaccttggggaccaggcccttgcgctgtggaaccaggccctcgctgcctgccgcacggcccagatcgtgacccagtactgcgtgggtgccaactacacgtggctgctggtggagggcgtctacctgcacagtctcctggtgctcgtgggaggctccgaggagggccacttccgctactacctgctcctcggctggggggcccccgcgcttttcgtcattccctgggtgatcgtcaggtacctgtacgagaacacgcagtgctgggagcgcaacgaagtcaaggccatttggtggattatacggacccccatcctcatgaccatcttgattaatttcctcatttttatccgcattcttggcattctcctgtccaagctgaggacacggcaaatgcgctgccgggattaccggctgaggctggctcgctccacgctgacgctggtgcccctgctgggtgtccacgaggtggtgtttgctcccgtgacagaggaacaggcccggggcgccctgcgcttcgccaagctcggctttgagatcttcctcagctccttccagggcttcctggtcagcgtcctctactgcttcatcaacaaggaggtgcagtcggagatccgccgtggctggcaccactgccgcctgcgccgcagcctgggcgaggagcaacgccagctcccggagcgcgccttccgggccctgccctccggctccggcccgggcgaggtccccaccagccgcggcttgtcctcggggaccctcccagggcctgggaatgaggccagccgggagttggaaagttactgctagggggcgggatccccgtgtctgttcagttagcatggatttattgagtgccaactgcgtgccaggcccagtacggaggacgctggggaaatggtgaaggaaacagaaaaaaggtccctgcccttctggagatgacaactgagtggggaaaacagaccgtgaacacaaaacatcaagttccacacacgctatggaatggttatgaagggaagcgagaagggggcctagggtggtctgggaggcgtctccaaggaggtgacacttaagccatccccgaaagaggtgaaagagatcactttggggagagctggagaacaggattctaggcggaagcgatagcataggcaaaggcccttgggcaggaaggcgctcagccttggctggagtagaattaagtcagagccaacaggttggggagagacagagaagtgggcaggggcacccaagttgggatttcatttcaggtgcattggagattcttaggagtgtctcttgggggtaatattttattttttaaaaaatgaggat

SEQ ID NO: 31932 - DNA, 4437 bp, Homo Sapiens
gcgcggcggccgtggttgcggcgcgggaagtttggatcctggttccgtccgctaggagtctgcgtgcgaggattatggctgctgttcctcaaaataatctacaggagcaactagaacgtcactcagccagaacacttaataataaattaagtctttcaaaaccaaaattttcaggtttcacttttaaaaagaaaacatcttcagataacaatgtatctgtaactaatgtgtcagtagcaaaaacacctgtattaagaaataaagatgttaatgttaccgaagacttttccttcagtgaacctctacccaacaccacaaatcagcaaagggtcaaggacttctttaaaaatgctccagcaggacaggaaacacagagaggtggatcaaaatcattattgccagatttcttgcagactccgaaggaagttgtatgcactacccaaaacacaccaactgtaaagaaatcccgggatactgctctcaagaaattagaatttagttcttcaccagattctttaagtaccatcaatgattgggatgatatggatgactttgatacttctgagacttcaaaatcatttgttacaccaccccaaagtcactttgtaagagtaagcactgctcagaaatcaaaaaagggtaagagaaacttttttaaagcacagctttatacaacaaacacagtaaagactgatttgcctccaccctcctctgaaagcgagcaaatagatttgactgaggaacagaaggatgactcagaatggttaagcagcgatgtgatttgcatcgatgatggccccattgctgaagtgcatataaatgaagatgctcaggaaagtgactctctgaaaactcatttggaagatgaaagagataatagcgaaaagaagaagaatttggaagaagctgaattacattcaactgagaaagttccatgtattgaatttgatgatgatgattatgatacggattttgttccaccttctccagaagaaattatttctgcttcttcttcctcttcaaaatgccttagtacgttaaaggaccttgacacatctgacagaaaagaggatgttcttagcacatcaaaagatcttttgtcaaaacctgagaaaatgagtatgcaggagctgaatccagaaaccagcacagactgtgacgctagacagataagtttacagcagcagcttattcatgtgatggagcacatctgtaaattaattgatactattcctgatgataaactgaaacttttggattgtgggaacgaactgcttcagcagcggaacataagaaggaaacttctaacggaagtagattttaataaaagtgatgccagtcttcttggctcattgtggagatacaggcctgattcacttgatggccctatggagggtgattcctgccctacagggaattctatgaaggagttaaatttttcacaccttccctcaaattctgtttctcctggggactgtttactgactaccaccctaggaaagacaggattctctgccaccaggaagaatctttttgaaaggcctttattcaatacccatttacagaagtcctttgtaagtagcaactgggctgaaacaccaagactaggaaaaaaaaatgaaagctcttatttcccaggaaatgttctcacaagcactgctgtgaaagatcagaataaacatactgcttcaataaatgacttagaaagagaaacccaaccttcctatgatattgataattttgacatagatgactttgatgatgatgatgactgggaagacataatgcataatttagcagccagcaaatcttccacagctgcctatcaacccatcaaggaaggtcggccaattaaatcagtatcagaaagactttcctcagccaagacagactgtcttccagtgtcatctactgctcaaaatataaacttctcagagtcaattcagaattatactgacaagtcagcacaaaatttagcatccagaaatctgaaacatgagcgtttccaaagtcttagttttcctcatacaaaggaaatgatgaagatttttcataaaaaatttggcctgcataattttagaactaatcagctagaggcgatcaatgctgcactgcttggtgaagactgttttatcctgatgccgactggaggtggtaagagtttgtgttaccagctccctgcctgtgtttctcctggggtcactgttgtcatttctcccttgagatcacttatcgtagatcaagtccaaaagctgacttccttggatattccagctacatatctgacaggtgataagactgactcagaagctacaaatatttacctccagttatcaaaaaaagacccaatcataaaacttctatatgtcactccagaaaagatctgtgcaagtaacagactcatttctactctggagaatctctatgagaggaagctcttggcacgttttgttattgatgaagcacattgtgtcagtcagtggggacatgattttcgtcaagattacaaaagaatgaatatgcttcgccagaagtttccttctgttccggtgatggctcttacggccacagctaatcccagggtacagaaggacatcctgactcagctgaagattctcagacctcaggtgtttagcatgagctttaacagacataatctgaaatactatgtattaccgaaaaagcctaaaaaggtggcatttgattgcctagaatggatcagaaagcaccacccatatgattcagggataatttactgcctctccaggcgagaatgtgacaccatggctgacacgttacagagagatgggctcgctgctcttgcttaccatgctggcctcagtgattctgccagagatgaagtgcagcagaagtggattaatcaggatggctgtcaggttatctgtgctacaattgcatttggaatggggattgacaaaccggacgtgcgatttgtgattcatgcatctctccctaaatctgtggagggttactaccaagaatctggcagagctggaagagatggggaaatatctcactgcctgcttttctatacctatcatgatgtgaccagactgaaaagacttataatgatggaaaaagatggaaaccatcatacaagagaaactcacttcaataatttgtatagcatggtacattactgtgaaaatataacggaatgcaggagaatacagcttttggcctactttggtgaaaatggatttaatcctgatttttgtaagaaacacccagatgtttcttgtgataattgctgtaaaacaaaggattataaaacaagagatgtgactgacgatgtgaaaagtattgtaagatttgttcaagaacatagttcatcacaaggaatgagaaatataaaacatgtaggtccttctggaagatttactatgaatatgctggtcgacattttcttggggagtaagagtgcaaaaatccagtcaggtatatttggaaaaggatctgcttattcacgacacaatgccgaaagactttttaaaaagctgatacttgacaagattttggatgaagacttatatatcaatgccaatgaccaggcgatcgcttatgtgatgctcggaaataaagcccaaactgtactaaatggcaatttaaaggtagactttatggaaacagaaaattccagcagtgtgaaaaaacaaaaagcgttagtagcaaaagtgtctcagagggaagagatggttaaaaaatgtcttggagaacttacagaagtctgcaaatctctggggaaagtttttggtgtccattacttcaatatttttaataccgtcactctcaagaagcttgcagaatctttatcttctgatcctgaggttttgcttcaaattgatggtgttactgaagacaaactggaaaaatatggtgcggaagtgatttcagtattacagaaatactctgaatggacatcgccagctgaagacagttccccagggataagcctgtccagcagcagaggccccggaagaagtgccgctgaggagcttgacgaggaaatacccgtatcttcccactactttgcaagtaaaaccagaaatgaaaggaagaggaaaaagatgccagcctcccaaaggtctaagaggagaaaaactgcttccagtggttccaaggcaaagggggggtctgccacatgtagaaagatatcttccaaaacgaaatcctccagcatcattggatccagttcagcctcacatacttctcaagcgacatcaggagccaatagcaaattggggattatggctccaccgaagcctataaatagaccgtttcttaagccttcatatgcattctcataacaaccgaatctcaatgtacatagaccctctttcttgtttgtcagcatctgaccatctgtgactataaagctgttattcttgttataccaaaaaaaaaaaaaaaaaaaaa

SEQ ID NO: 31933 - DNA, 1256 bp, Homo Sapiens
ggcacgagggagagcagcgcacgcgggtgcaccgcggccgcgccccgggagggctgttcgggccagcgcccgccggctgctccgcgctgacagcgccgggctggggcggggcggggggctttgcaggccgccagtgtcgacatgctgctggaggaggttcgcgccggcgaccggctgagtggggcggcggcccggggcgacgtgcaggaggtgcgccgccttctgcaccgcgagctggtgcatcccgacgccctcaaccgcttcggcaagacggcgctgcaggtcatgatgtttggcagcaccgccatcgccctggagctgctgaagcaaggtgccagccccaatgtccaggacacctccggtaccagtccagtccatgacgcagcccgcactggattcctggacaccctgaaggtcctagtggagcacggggctgatgtcaacgtgcctgatggcaccggggcacttccaatccatctggcagttcaagagggtcacactgctgtggtcagctttctggcagctgaatctgatctccatcgcagggacgccaggggtctcacacccttggagctggcactgcagagaggggctcaggacctcgtggacatcctgcagggccacatggtggccccgctgtgatctggggtcaccctctccagcaagagaaccccgtggggttatgtatcagaagagaggggaagaaacactttctcttcttgtttctcctgcccactgctgcagtaggggaggagcacagtttgtggcttataggtgttggttttgggggtgtgagtgtttgggggacgtttctcatttgtttttctcactccttttggtgtgttggacagagaagggctcctgcaggccacagccacctaaacggttcagtttcttctgcgcctcaggctgctggggcctcagacgagacccaagggcagagcatttaagagtgaagtcatgacctccagggagcctagaagctggtggcccttgcccggcctgtgctcagagacctgaagtgtgcacgttgcttcaggcatggggggtggggggagcgtcccaaatcaataagaaggtagaatgagttatgagttattcatattctgttggaagcttgttttccagtctcttgtacagcgttttaaaagaaatggattctatttattatgctttattggaaaaaatgttgtaataatttaatgtttttacccattaaattaagacttgtgcatgatccaaaaaaaaaaaaaaaa

SEQ ID NO: 31934 - DNA, 2110 bp, Homo Sapiens
agggcgagcgcggcggcccgggggctcggaggcgaagatggcgtccggcaggcgcgccccgcgcaccgggctgctggagctgcgcgccggggcgggctcgggggccggcggcgagcgatggcagcgggtgctgctgagtctggcggaggacgtgctgaccgtgagccccgccgacggcgaccctggtcccgagcccggcgctccgcgggagcaggagcccgcgcagctcaacggcgccgcggagccgggcgccgggcccccgcagctgccagaggcgctactgctccagcggcgccgcgtgacggtgcgcaaggccgacgccggtgggctgggcatcagcatcaaaggcggccgggagaacaagatgcctattctcatttccaagatcttcaagggattggcagctgaccagacagaggccctttttgtgggggatgccatcctgtctgtgaatggggaagacttgtcctctgctacccatgatgaggcggtgcaggtcctcaagaagacaggcaaggaggtggtgctggaggtcaagtatatgaaggacgtctcaccgtatttcaagaactctactggtgggacctcggtcggctgggactcacctcctgcctcaccccttcagcggcagccttcctcccctggccccacaccccggaacttcagcgaggccaaacacatgtccttgaagatggcatatgtctcgaagaggtgcacccccaatgacccggagcccaggtatctggagatctgctcggcagatggtcaagacaccctcttcctgagggccaaggatgaggctagtgcgaggtcgtgggcgactgccatccaagcccaggtcaatactctgacgccgcgggtcaaggatgagctgcaggcactgttggcagccaccagcacagctgggagccaggacatcaagcagattggctggctaactgagcagctgcccagtgggggcacagcccccaccctggccctgctaactgaaaaggaactgctcctctacttgtctctccccgagacccgcgaggccctgagccggccagcccgtactgccccactcatcgccaccagactggtgcactcaggcccctccaagggctcagtgccctacgatgcagagctctcttttgccctgcgcacgggcacgcgtcacggtgtggacactcacctgttcagcgtggagtcaccgcaggagctggctgcctggacccgccagcttgtggatggctgtcaccgggccgccgagggtgtgcaggaggtgtctacagcctgcacgtggaatgggcgtccctgcagcctgtctgtgcacatcgacaagggcttcacactgtgggcggctgagccaggtgcagcccgagctgtgctcctgcgacagcccttcgagaagctgcagatgtcttcagatgacggtgccagtctccttttcctggattttggaggtgctgaaggcgagatccagctggacctgcactcgtgtcccaaaaccatagtcttcatcatccactccttcctgtcggccaaagtcacccgcctcgggctgttggcctagaagtcgccggatgcactagccctgaagaggggtgtccatgacatggcctgagctgggcctccaccgactgcctgctcacccctgggctgagggaagggagaggagaggaacaagggcctccgaaaccccaaccctgagggagactggattggtcttggggcccaggacccagacgcaggacagagtggactctgcctgtgatggggtggccttcctgctgcccccctccaccagtgccttttgcagagagatattttgtgtacacagaagccattccgagtctgggacctgcccctgtgcggatcctgaccccagccaacagctgagctgccgggcctcctcgaggcccctaagccacccccagaggtcccatctgaagctggagtaccctggggtcagcagcaagagaaagaagaggagattttctgtttgtttttcccctcagccctgccaccgtggggagtctggtttttctcttcatcctgtctctctcctccttactcttggataaataaacagcctgtgagcacacaggcagcccggcccagtaaaaaa

SEQ ID NO: 31935 - DNA, 2686 bp, Homo Sapiens
atcgagccatttaacatggcggaggatgtttcctcagcggccccgagcccgcggcggtgtgcggatggtagggatgccgaccctactgaggagcagatggcagaaacagagagaaacgacgaggagcagttcgaatgccaggaactgctcgagtgccaggtgcaggtgggggcccccgaggaggaggaggaggaggaggaggacgcgggcctggtggccgaggccgaggccgtggctgccggctggatgctcgatttcctctgcctctctctttgccgagctttccgcgacggccgctccgaggacttccgcaggacccgcaacagcgcagaggctattattcatggactatccagtctaacagcttgccagttgagaacgatatacatatgtcagtttttgacaagaattgcagcaggaaaaacccttgatgcacagtttgaaaatgatgaacgaattacacccttggaatcagccctgatgatttggggttcaattgaaaaggaacatgacaaacttcatgaagaaatacagaatttaattaaaattcaggctatagctgtttgtatggaaaatggcaactttaaagaagcagaagaagtctttgaaagaatatttggtgatccaaattctcatatgcctttcaaaagcaaattgcttatgataatctctcagaaagatacatttcattccttttttcaacacttcagctacaaccacatgatggagaaaattaagagttatgtgaattatgtgctaagtgaaaaatcatcaacctttctaatgaaggcagcggcaaaagtagtagaaagcaaaaggacaagaacaataacttctcaagataaacctagtggtaatgatgttgaaatggaaactgaagctaatttggatacaagaaaaagtgttagtgacaaacagtctgcggtaactgaatcctcagagggtacagtatccttattgaggtctcacaagaatcttttcttatctaagttgcaacatggaacccagcaacaagaccttaataagaaagaaagaagagtaggaactcctcaaagtacaaaaaagaaaaaagaaagcagaagagccactgaaagcagaatacctgtttcaaagagtcagccggtaactcctgaaaaacatcgagctagaaaaagacaggcatggctttgggaagaagacaagaatttgagatctggcgtgaggaaatatggagagggaaactggtctaaaatactgttgcattataaattcaacaaccggacaagtgtcatgttaaaagacagatggaggaccatgaagaaactaaaactgatttcctcagacagcgaagactgattgtgtttgtaaaagcttgatgaaaggacagttaagtattttgatcactgcattttgtttgaaacttgtgtcattgatgtaatttaaaacttttgtttaaagcattacagtatttttctgtgaccatcaattaatgagggtttgtgctaccagagttaaagcatatgctatcattgtattctttaagaaccttattttgataaaatgtaaatttgttgaaccctgccacatttagtatccccacccccaaatcctgttccaatgaaaaaattaaaacctgatacgaaaaaaaaaaaattccagttaacctattttgtgtctgtaggctgacctcaaccctgtaacgtaacccattaaaatgaatttctttttttttaagacagagtttctctctgttgcccaggctggagtgcagtggcgcaatttcagctcactgaacctctgcctcccaggtcaagtgattctcctgcctcagcctctgagtagctgggattacaggcacacaccaccagccagctaatttttgtatttttagtagaggcggggtttcaccatgctggtcaggatgttctccaactcctgacttcatgatccacccacctcggcctcccaaagtgctgagattacagacgtgagccactgcgtcctgcctaaaatgaattttctagatgattgaataacagtagtagtcctttgatagaagataatgacttggtttatggccttaatatactacttaattacttaagatgtttattaatagaatgataaatgtacagagtaacctataagcatgacatacttttgctttcagtagtttcatgtaaagaaaaaaacttgaaaatagtaatacctgagtacccatgggaataatagacactggggaggtagggtggggagcgggacgaagagctgaaaaacttacctactggggactgtgctcactacctgggtgacaggatcatacgtaccccaaacctcaacatcacacagtatactcagctaacaaacctgcccatgtgtttcctgaatctaaaataaaaatcgaaataatttttttaaaaaagaaaaagacaatagtattacccatgggacaaaatttgtactattagcaagaatcattttgtgtctcatttagaaacaatttgacttttgttccagtgtttaaactttgacaaaaatggttttgaatagatctttataacctgatgcctaaatacaagattctctgataccttcatttaatatatcaatattggcctaaaacgtattctgtaaagcttaaattggtattaactatgatcatcttgatgtctatgatagataataaacaaggtcatacataccttaa

SEQ ID NO: 31936 - DNA, 1318 bp, Homo Sapiens
cgggaaggattgaatacgagacgctgtctgcttgctgccttaagacagctagctgaattgctgattaacttttaaaatacccagcttggtttatttttcttagaatctgttgctaagactggggacgctgttttcttttacaaagggaaatctaagttaatttcaaggcattcgaaatggggaaagactattattgcattttgggaattgagaaaggagcttcagatgaagatattaaaaaggcttaccgaaaacaagccctcaaatttcatccggacaagaacaaatctcctcaggcagaggaaaaatttaaagaggtcgcagaagcttatgaagtattgagtgatcctaaaaagagagaaatatatgatcagtttggggaggaagggttgaaaggaggagcaggaggtactgatggacaaggaggtaccttccggtacacctttcatggcgatcctcatgctacatttgctgcatttttcggagggtccaacccctttgaaattttctttggaagacgaatgggtggtggtagagattctgaagaaatggaaatagatggtgatccttttagtgcctttggtttcagcatgaatggatatccaagagacaggaattctgtggggccatcccgcctcaaacaagatcctccagttattcatgaacttagagtatcacttgaagagatatatagtggttgtaccaaacggatgaagatttctcgaaaaaggctaaacgctgatggaaggagttacagatctgaggacaaaattcttaccattgagattaaaaaagggtggaaagaaggcaccaaaattacttttccaagagaaggagatgaaacaccaaatagtattccagcagacattgtttttatcattaaagacaaagatcatccaaaatttaaaagggatggatcaaatataatttatactgctaaaattagtttacgagaggcattgtgtggctgctcaattaatgtaccaacactggatggaagaaacatacctatgtcagtaaatgatattgtgaaacccggaatgaggagaagaattattggatatgggctgccatttccaaaaaatcctgaccaacgtggtgaccttctaatagaatttgaggtgtccttcccagatactatatcttcttcatccaaagaagtacttaggaaacatcttcctgcctcatagaatgaagaactttgttacacatattttgataaggcactgaaaatataaaaggactggtagtttactgatgtagatgtgaattctgtataaagatgtgtaaattgttttgagggttcattaaattgcat

SEQ ID NO: 31937 - DNA, 6069 bp, Homo Sapiens
atgagtgtgaaagaggcaggcagctcgggccgccgggagcaggcggcctaccacctgcacatctacccccagctgtccaccaccgagagccaggcctcgtgccgcgtgactgccaccaaggacagcaccacctcggacgtcatcaaggacgccattgccagcctgcggctggacggcaccaaatgttatgtgctggtggaggtcaaagagtcgggaggcgaggaatgggtgctggacgccaacgactcgcctgtgcaccgggtgctgctatggccccggcgggcacaggacgagcaccctcaggaggatggctactacttcctgctgcaggagcgcaacgcagatggaaccatcaagtacgtgcatatgcagctggtggcgcaggccacagccacccggcgcctagtggagcgtggcctcctgccacggcagcaggcggactttgatgacctgtgtaaccttcctgagctaaccgagggcaacctcctgaagaacctcaagcaccgcttcctgcaacaaaagatctacacgtacgcggggagcatcctggtggccatcaacccctttaagttcctgcccatctacaaccccaagtacgtgaagatgtatgagaaccagcagctgggcaagctggagccacacgtcttcgcgctggccgacgtggcctactacaccatgctcaggaagcgcgtgaaccagtgcatcgtgtatccgggtgagagcggctccggcaagacccagagcaccaacttcctcatccactgcctcaccgccctcagccagaagggctacgccagcggcgtcgagaggaccatcctgggtgcctgtcctgtgctggaagcttttggaaatgccaagacagcccacaacaacaactccagccggtttgggaaattcatccaagtcagctacctagagagtggcatcgtgagaggagctgtcgtcgagaaatatctgcttgaaaagtctcgcctggtgtctcaggagaaggatgagaggaactaccatgtgttttattatttgttacttggggtcagcgaggaagagcgccaagaatttcagctcaagcagcctgaagattatttctacctcaaccagcataacttgaagattgaagatggggaggacctgaagcatgactttgagaggctcaagcaggccatggagatggtgggcttcctccccgccaccaagaagcagatttttgccgtcctctcggccatcctgtacctgggcaacgtcacttataagaagagagctacaggccgagaggaagggttggaggtcgggccacccgaggtgctggacaccctgtcgcagcttctgaaggtgaagcgagaaatcttggtggaggttctgaccaaaagaaaaacggtgaccgtcaacgacaagcttatccttccctacagcctcagcgaggccatcactgcccgcgactccatggccaagtctctgtacagcgccctgttcgactggattgtgctgcggatcaaccacgcactcctcaacaagaaggacgtggaagaggcagtctcgtgcctgtccattggggtcctggacatcttcgggtttgaagacttcgagaggaacagctttgagcagttctgcatcaactacgccaatgagcagctgcagtattacttcaaccagcacatcttcaagctggagcaggaggaatatcagggcgaggggatcacgtggcacaacatcggctacacagacaatgtcggctgcatccatctcatcagcaagaaacccacgggcctcttctacctgctggacgaggagagcaacttcccccacgccacgagccagaccctgctggccaagttcaaacagcaacatgaggacaataagtacttcctgggcaccccggtcatggagccagctttcatcatccagcacttcgcagggaaggtgaaatatcagatcaaggacttccgggagaagaacatggactacatgcggccagacatcgtggccctgctgcggggcagtgacagctcctacgtgcgggagctcatcggcatggaccccgtggccgtgttccgctgggccgtgctccgggctgctatccgggccatggcagtgcttcgggaggccggacgcctgcgggccgagagggccgaaaaggctgcaggtatgagcagccctggtgcccaaagtcacccagaagagctgccaagaggagccagcaccccttcggaaaaactttaccgcgatttgcataaccaaatgatcaagagcatcaaaggattgccctggcagggcgaggacccccgtagccttctccagtccctcagtcggctccagaaaccccgcgccttcatcctgaaaagtaaaggtatcaaacaaaagcagatcattccaaagaacctactggactccaagtccctgaaactcatcatcagcatgactctgcacgaccgcaccaccaagtccctactgcacctgcacaagaagaaaaagccaccaagcatcagcgcccagttccagacatcccttaacaagctcttggaggcactggggaaggcggagcccttctttatccgctgcatccgttccaatgctgaaaagaaagagctgtgctttgacgacgagctggtcctgcagcagctgcgctacaccggcatgctggagaccgtgcgcatccggaggtcagggtacagcgccaagtacacgttccaggatttcaccgagcagttccaggtgctcctgcccaaggatgcccagccctgcagggaggtcatctccaccctcctggagaaaatgaagatagacaagaggaactaccagatcgggaagaccaaggtcttcctgaaggagacggagcggcaagccctgcaggagacgctgcaccgggaggtggtgcggaaaatcctgctgctgcagagctggttccggatggtgctggagcgtcggcacttcctgcagatgaagcgggccgccgtcaccatccaggcctgctggcggtcctaccgggtccggagggcgctggagaggacgcaggctgccgtgtacctccaggccgcatggaggggctactggcagcggaagctctaccggcaccagaaacagagcatcatccgcctgcagagcctgtgtcgggggcacctgcagcgcaagagcttcagccagatgatctcggagaagcagaaggcagaagagaaggagagggaagccctggaagccgcaagagcaggcgctgaggagggcggacagggtcaggcggctggagggcagcaggtagctgagcaggggccggagccagcggaggatggcgggcacctggcatcggagcctgaggtgcagccaagtgacaggtcccccctagagcactcctcacctgagaaggaggccccaagcccagagaagactctcccaccccagaaaaccgtggcggctgaaagtcacgagaaagtccccagcagccgggagaagcgtgagtcgcgtcggcaaagagggctggagcacgtcaagttccagaacaaacacatccagtcctgcaaggaggagagtgccctcagagaaccttccagaagggtcacccaggagcaaggggtgagtctcctggaagacaaaaaggagagcagagaagatgaaacccttctagtcgtagagacggaggctgagaacacatctcaaaagcagcccacagagcaaccccaggccatggcagttggcaaggtctctgaagaaactgagaagacgctgcccagtgggagccccaggcctggccagttggagcggccgaccagcctggccctggacagcagggtcagcccaccggcccccggcagcgcccccgagacccccgaggacaagagcaaaccatgtggcagcccaagggttcaggaaaagcccgacagccccggaggctccacgcagatccagcggtacctggacgccgagcggctggccagcgccgtggaactgtggcggggcaagaagctggtggccgccgccagccctagtgccatgctcagccagtccctggacctcagcgacagacaccgggccacaggggccgccctcacgcccacagaggagaggcgcacctccttctccacgagcgacgtctccaagctcctcccgtccctggccaaggctcagcctgcagcagaaaccacggacggagagcgaagtgcgaaaaagccagctgtccagaagaagaagccaggcgacgcatcctccctcccagacgcagggctgtccccgggctctcaggtcgactctaaatccacgtttaagaggctttttctgcataaaaccaaggataaaaaatacagcctggagggagcagaggagctggagaatgcagtgtccgggcacgtggtgctggaagccaccaccatgaagaagggcctggaagccccctccggacagcagcatcgccacgctgcaggtgagaagcgcaccaaggaaccaggaggcaaagggaagaagaaccgaaatgtcaagattgggaagatcacagtgtcagagaagtggcgggaatcggtgttccgccagatcaccaacgccaatgagctcaagtacctggacgagttcctgctcaacaagataaatgacctccgttcccagaagacgcccattgagagcttgtttatcgaagccaccgagaagttcaggagcaacatcaaaacgatgtactctgtcccgaacgggaagatccacgtgggctacaaggatctgatggagaactaccagatcgttgtcagcaacctggccactgagcgtggccagaaggacaccaacctggtcctcaacctcttccagtcactgctagatgagttcacccgtggctacaccaagaacgacttcgagccagtgaagcagagcaaagctcagaagaagaagcggaagcaggagcgtgctgtccaggagcacaacgggcacgtgttcgccagctaccaggttagcatcccgcagtcgtgcgagcagtgcctctcctatatctggctcatggacaaggccctgctctgcagcgtgtgcaagatgacctgccacaagaagtgcgtgcacaagattcagagccactgctcctacacctacgggaggaagggcgagccaggcgctgagcctggccacttcggcgtgtgcgtagacagcctgaccagcgacaaggcctcggtgcccatcgtgctggagaagctcctggaacacgtggagatgcacggcctgtacaccgagggcctctaccgcaagtcgggtgctgccaaccgcactcgggagctccggcaggcgctgcagacagaccccgcagcagtcaagctggagaacttccccatccacgccatcacaggggtgctgaagcagtggctgcgggagctgcccgagcccctcatgaccttcgcacagtacggcgacttcctccgagccgtcgagctgccggagaagcaggagcagctggctgccatctatgccgtcctggagcaccttccagaagccaaccacaactccctggagagactcatcttccaccttgtcaaggtggccctgctcgaggatgtcaaccgcatgtcacctggggcgctggccattatcttcgcaccctgcctcctgcgctgccctgacaactcggacccgctgaccagcatgaaggacgtcctcaagatcaccacgtgcgtggagatgctgatcaaggagcagatgaggaaatacaaagtgaagatggaggagatcagccaactggaggctgcagagagtatcgccttccgcaggctttcgctcctgcgacaaaatgctaacaagagccccaagacccgagagcctgctggaggagcgggccggctcttgacgacctccagggtctccccgagccccagcacgcgaaacctggccctcggaagctggcggagcgcggccctcaggactcgggggacagggcggccagcccggccgggccgcgcaagagccctcaggaggcggccgccgcgcccggcacgagagagccctgcccagccgcccaggagccggccccgagtgaggacagaaaccccttccccgttaagctccggtccacctccctctcgctcaaatacagggatggcgcctctcaggaggtga

SEQ ID NO: 31938 - DNA, 4425 bp, Homo Sapiens
tcgggtcggacccacgcgcagcggccggagatgcagcggggcgccgcgctgtgcctgcgactgtggctctgcctgggactcctggacggcctggtgagtggctactccatgacccccccgaccttgaacatcacggaggagtcacacgtcatcgacaccggtgacagcctgtccatctcctgcaggggacagcaccccctcgagtgggcttggccaggagctcaggaggcgccagccaccggagacaaggacagcgaggacacgggggtggtgcgagactgcgagggcacagacgccaggccctactgcaaggtgttgctgctgcacgaggtacatgccaacgacacaggcagctacgtctgctactacaagtacatcaaggcacgcatcgagggcaccacggccgccagctcctacgtgttcgtgagagactttgagcagccattcatcaacaagcctgacacgctcttggtcaacaggaaggacgccatgtgggtgccctgtctggtgtccatccccggcctcaatgtcacgctgcgctcgcaaagctcggtgctgtggccagacgggcaggaggtggtgtgggatgaccggcggggcatgctcgtgtccacgccactgctgcacgatgccctgtacctgcagtgcgagaccacctggggagaccaggacttcctttccaaccccttcctggtgcacatcacaggcaacgagctctatgacatccagctgttgcccaggaagtcgctggagctgctggtaggggagaagctggtcctgaactgcaccgtgtgggctgagtttaactcaggtgtcacctttgactgggactacccagggaagcaggcagagcggggtaagtgggtgcccgagcgacgctcccagcagacccacacagaactctccagcatcctgaccatccacaacgtcagccagcacgacctgggctcgtatgtgtgcaaggccaacaacggcatccagcgatttcgggagagcaccgaggtcattgtgcatgaaaatcccttcatcagcgtcgagtggctcaaaggacccatcctggaggccacggcaggagacgagctggtgaagctgcccgtgaagctggcagcgtaccccccgcccgagttccagtggtacaaggatggaaaggcactgtccgggcgccacagtccacatgccctggtgctcaaggaggtgacagaggccagcacaggcacctacaccctcgccctgtggaactccgctgctggcctgaggcgcaacatcagcctggagctggtggtgaatgtgcccccccagatacatgagaaggaggcctcctcccccagcatctactcgcgtcacagccgccaggccctcacctgcacggcctacggggtgcccctgcctctcagcatccagtggcactggcggccctggacaccctgcaagatgtttgcccagcgtagtctccggcggcggcagcagcaagacctcatgccacagtgccgtgactggagggcggtgaccacgcaggatgccgtgaaccccatcgagagcctggacacctggaccgagtttgtggagggaaagaataagactgtgagcaagctggtgatccagaatgccaacgtgtctgccatgtacaagtgtgtggtctccaacaaggtgggccaggatgagcggctcatctacttctatgtgaccaccatccccgacggcttcaccatcgaatccaagccatccgaggagctactagagggccagccggtgctcctgagctgccaagccgacagctacaagtacgagcatctgcgctggtaccgcctcaacctgtccacgctgcacgatgcgcacgggaacccgcttctgctcgactgcaagaacgtgcatctgttcgccacccctctggccgccagcctggaggaggtggcacctggggcgcgccacgccacgctcagcctgagtatcccccgcgtcgcgcccgagcacgagggccactatgtgtgcgaagtgcaagaccggcgcagccatgacaagcactgccacaagaagtacctgtcggtgcaggccctggaagcccctcggctcacgcagaacttgaccgacctcctggtgaacgtgagcgactcgctggagatgcagtgcttggtggccggagcgcacgcgcccagcatcgtgtggtacaaagacgagaggctgctggaggaaaagtctggagtcgacttggcggactccaaccagaagctgagcatccagcgcgtgcgcgaggaggatgcgggacgctatctgtgcagcgtgtgcaacgccaagggctgcgtcaactcctccgccagcgtggccgtggaaggctccgaggataagggcagcatggagatcgtgatccttgtcggtaccggcgtcatcgctgtcttcttctgggtcctcctcctcctcatcttctgtaacatgaggaggccggcccacgcagacatcaagacgggctacctgtccatcatcatggaccccggggaggtgcctctggaggagcaatgcgaatacctgtcctacgatgccagccagtgggaattcccccgagagcggctgcacctggggagagtgctcggctacggcgccttcgggaaggtggtggaagcctccgctttcggcatccacaagggcagcagctgtgacaccgtggccgtgaaaatgctgaaagagggcgccacggccagcgagcaccgcgcgctgatgtcggagctcaagatcctcattcacatcggcaaccacctcaacgtggtcaacctcctcggggcgtgcaccaagccgcagggccccctcatggtgatcgtggagttctgcaagtacggcaacctctccaacttcctgcgcgccaagcgggacgccttcagcccctgcgcggagaagtctcccgagcagcgcggacgcttccgcgccatggtggagctcgccaggctggatcggaggcggccggggagcagcgacagggtcctcttcgcgcggttctcgaagaccgagggcggagcgaggcgggcttctccagaccaagaagctgaggacctgtggctgagcccgctgaccatggaagatcttgtctgctacagcttccaggtggccagagggatggagttcctggcttcccgaaagtgcatccacagagacctggctgctcggaacattctgctgtcggaaagcgacgtggtgaagatctgtgactttggccttgcccgggacatctacaaagaccctgactacgtccgcaagggcagtgcccggctgcccctgaagtggatggcccctgaaagcatcttcgacaaggtgtacaccacgcagagtgacgtgtggtcctttggggtgcttctctgggagatcttctctctgggggcctccccgtaccctggggtgcagatcaatgaggagttctgccagcggctgagagacggcacaaggatgagggccccggagctggccactcccgccatacgccgcatcatgctgaactgctggtccggagaccccaaggcgagacctgcattctcggagctggtggagatcctgggggacctgctccagggcaggggcctgcaagaggaagaggaggtctgcatggccccgcgcagctctcagagctcagaagagggcagcttctcgcaggtgtccaccatggccctacacatcgcccaggctgacgctgaggacagcccgccaagcctgcagcgccacagcctggccgccaggtattacaactgggtgtcctttcccgggtgcctggccagaggggctgagacccgtggttcctccaggatgaagacatttgaggaattccccatgaccccaacgacctacaaaggctctgtggacaaccagacagacagtgggatggtgctggcctcggaggagtttgagcagatagagagcaggcatagacaagaaagcggcttcaggtagctgaagcagagagagagaaggcagcatacgtcagcattttcttctctgcacttataagaaagatcaaagactttaagactttcgctatttcttctgctatctactacaaacttcaaagaggaaccaggaggccaagaggagcatgaaagtggacaaggagtgtgaccactgaagcaccacagggaggggttaggcctccggatgactgcgggcaggcctggataatatccagcctcccacaagaagctggtggagcagagtgttccctgactcctccaaggaaagggagacgccctttcatggtctgctgagtaacaggtgccttcccagacactggcgttactgcttgaccaaagagccctcaagcggcccttatgccagcgtgacagagggctcacctcttgccttctaggtcacttctcacaatgtcccttcagcacctgaccctgtgcccgccagttattccttggtaatatgagtaatacatcaaagagtagt

SEQ ID NO: 31939 - DNA, 6568 bp, Homo Sapiens
  misc_feature (6131)..(6131): n is a, c, g, or t
  misc_feature (6197)..(6197): n is a, c, g, or t
  misc_feature (6245)..(6245): n is a, c, g, or t
gaaggcgagcacccagacgggggcccgccggggtcgcggccagcgccggggaaatgccgcgccggggagcagcatgcgccggcctgagcccttccctttgcactcggctgttttttacgtttaaccagaaaggaagggagaggagggaaagatccatgtggctgccctcttccgatcacaaatattgtcgggaaggctactggccggaaagcgccgctgtggctgagagcgaagtttcagagactcttatttaaactgggttgttacattcaaaaaaactgcggcaagttcttggttgtgggcctcctcatatttggggccttcgcggtgggattaaaagcagcgaacctcgagaccaacgtggaggagctgtgggtggaagttggaggacgagtaagtcgtgaattaaattatactcgccagaagattggagaagaggctatgtttaatcctcaactcatgatacagacccctaaagaagaaggtgctaatgtcctgaccacagaagcgctcctacaacacctggactcggcactccaggccagccgtgtccatgtatacatgtacaacaggcagtggaaattggaacatttgtgttacaaatcaggagagcttatcacagaaacaggttacatggatcagataatagaatatctttacccttgtttgattattacacctttggactgcttctgggaaggggcgaaattacagtctgggacagcatacctcctaggtaaacctcctttgcggtggacaaacttcgaccctttggaattcctggaagagttaaagaaaataaactatcaagtggacagctgggaggaaatgctgaataaggctgaggttggtcatggttacatggaccgcccctgcctcaatccggccgatccagactgccccgccacagcccccaacaaaaattcaaccaaacctcttgatatggcccttgttttgaatggtggatgtcatggcttatccagaaagtatatgcactggcaggaggagttgattgtgggtggcacagtcaagaacagcactggaaaactcgtcagcgcccatgccctgcagaccatgttccagttaatgactcccaagcaaatgtacgagcacttcaaggggtacgagtatgtctcacacatcaactggaacgaggacaaagcggcagccatcctggaggcctggcagaggacatatgtggaggtggttcatcagagtgtcgcacagaactccactcaaaaggtgctttccttcaccaccacgaccctggacgacatcctgaaatccttctctgacgtcagtgtcatccgcgtggccagcggctacttactcatgctcgcctatgcctgtctaaccatgctgcgctgggactgctccaagtcccagggtgccgtggggctggctggcgtcctgctggttgcactgtcagtggctgcaggactgggcctgtgctcattgatcggaatttcctttaacgctgcaacaactcaggttttgccatttctcgctcttggtgttggtgtggatgatgtttttcttctggcccacgccttcagtgaaacaggacagaataaaagaatcccttttgaggacaggaccggggagtgcctgaagcgcacaggagccagcgtggccctcacgtccatcagcaatgtcacagccttcttcatggccgcgttaatcccaattcccgctctgcgggcgttctccctccaggcagcggtagtagtggtgttcaattttgccatggttctgctcatttttcctgcaattctcagcatggatttatatcgacgcgaggacaggagactggatattttctgctgttttacaagcccctgcgtcagcagagtgattcaggttgaacctcaggcctacaccgacacacacgacaatacccgctacagccccccacctccctacagcagccacagctttgcccatgaaacgcagattaccatgcagtccactgtccagctccgcacggagtacgacccccacacgcacgtgtactacaccaccgctgagccgcgctccgagatctctgtgcagcccgtcaccgtgacacaggacaccctcagctgccagagcccagagagcaccagctccacaagggacctgctctcccagttctccgactccagcctccactgcctcgagcccccctgtacgaagtggacactctcatcttttgctgagaagcactatgctcctttcctcttgaaaccaaaagccaaggtagtggtgatcttcctttttctgggcttgctgggggtcagcctttatggcaccacccgagtgagagacgggctggaccttacggacattgtacctcgggaaaccagagaatatgactttattgctgcacaattcaaatacttttctttctacaacatgtatatagtcacccagaaagcagactacccgaatatccagcacttactttacgacctacacaggagtttcagtaacgtgaagtatgtcatgttggaagaaaacaaacagcttcccaaaatgtggctgcactacttcagagactggcttcagggacttcaggatgcatttgacagtgactgggaaaccgggaaaatcatgccaaacaattacaagaatggatcagacgatggagtccttgcctacaaactcctggtgcaaaccggcagccgcgataagcccatcgacatcagccagttgactaaacagcgtctggtggatgcagatggcatcattaatcccagcgctttctacatctacctgacggcttgggtcagcaacgaccccgtcgcgtatgctgcctcccaggccaacatccggccacaccgaccagaatgggtccacgacaaagccgactacatgcctgaaacaaggctgagaatcccggcagcagagcccatcgagtatgcccagttccctttctacctcaacggcttgcgggacacctcagactttgtggaggcaattgaaaaagtaaggaccatctgcagcaactatacgagcctggggctgtccagttaccccaacggctaccccttcctcttctgggagcagtacatcggcctccgccactggctgctgctgttcatcagcgtggtgttggcctgcacattcctcgtgtgcgctgtcttccttctgaacccctggacggccgggatcattgtgatggtcctggcgctgatgacggtcgagctgttcggcatgatgggcctcatcggaatcaagctcagtgccgtgcccgtggtcatcctgatcgcttctgttggcataggagtggagttcaccgttcacgttgctttggcctttctgacggccatcagcgacaagaaccgcagggctgtgcttgccctggagcacatgtttgcacccgtcctggatggcgccgtgtccactctgctgggagtgctgatgctggcgggatctgacttcgacttcattgtcaggtatttctttgctgtgctggcaatcctcaccatcctcggcgttctcaatgggctggttttgcttcccgtgctttggtctttctttggaccatatcctgaggtgtctccagccaacggcttgaaccgcctgcccacaccctcccctgagccaccccccagcgtggtccgcttcgccatgccgcccggccacacgcacagcgggtctgattcctccgactcggagtatagttcccagacgacagtgtcaggcctcagcgaggagcttcggcactacgaggcccagcagggcgcgggaggccctgcccaccaagtgatcgtggaagccacagaaaaccccgtcttcgcccactccactgtggtccatcccgaatccaggcatcacccaccctcgaacccgaaacagcagccccacctggactcagggtccctgcctcccggacggcaaggccagcagccccgcagggacccccccagaaaaggcttgtggccacccctctacagaccgcgcagagacgcttttgaaatttctactgaagggcattctggccctagcaatagggcccgctggggccctcgcggggcccgttctcacaaccctcggaacccaacgtccactgccatgggcagctccgtgcccggctactgccagcccatcaccactgtgacggcttctgcctccgtgactgtcgccgtgcacccgccgcctgtccctgggcctgggcggaacccccgagggggactctgcccaggctaccctgagactgaccacggcctgtttgaggacccccacgtgcctttccacgtccggtgtgagaggagggattcgaaggtggaagtcattgagctgcaggacgtggaatgcgaggagaggccccggggaagcagctccaactgagggtgattaaaatctgaagcaaagaggccaaagattggaaaccccccacccccacctctttccagaactgcttgaagagaactggttggagttatggaaaagatgccctgtgccaggacagcagttcattgttactgtaaccgattgtattattttgttaaatatttctataaatatttaagagatgtacacatgtgtaatataggaaggaaggatgtaaagtggtatgatctgggccttctccactcctgccccagagtgtggaggccacagtggggcctctccgtatttgtgcattgggctccgtgccacaaccaagcttcattagtcttaaatttcagcatatgttgctgctgcttaaatattgtataatttacttgtataattctatgcaaatattgcttatgtaataggattattttgtaaaggtttctgtttaaaatattttaaatttgcatatcacaaccctgtggtagtatgaaatgttactgttaactttcaaacacgctatgcgtgataatttttttgtttaatgagcagatatgaagaaagcacgttaatcctggtggcttctctaggtgtcgttgtgtgcggtcctcttgtttggctgtgcgtgtgaacacgtgtgtgagttcaccatgtactgtactgtgatttttttttttgtcttgttttgtttctctacactgtctgtaacctgtagtaggctctgacctattcaggctggaaagcgtcaggatatcttttcttcgtgctggtgagggctggccctaaacatccacctaatcctttcaaatcagcccggcaaaagctaaactctcctcgtgtctacgggcatctgttatgatcattggctgccatccaggaccccaatttgtgcttcagggggataatctccttctctcggatcattgtgatggatgctggaacctcagggtatggagctcacatcagttcatcatggtgggtgttagagaattcggtgacatgcctagtgctgagccttggctgggccatgagagtctgtataataaaaaaagcatgcagcatggtgcccctcttttgaccaacacacacaagacccctcccccaacacccccaaattcaagagtggatgtggccctgtcacaggtagaaaaacctatttagttaattctttcttggcccacagtctcccagaaatgatgttttgagtccctatagtttaaagtccctctcttaaatggagcagctggtttgaggtttctaaatctgtttgcattttctttaaaattaagtggtgagcatgcattgtggtgtagaggcaggcattatgtaggataagagctccggggggattcttcatgcaccagtgtttagggtacgtgcttcctaagtaaatccaaacattgtctccatcctccccgtcattagtgctctttcaatgtgatgtgggaaagcaggaggatggacacaccccactgaaagatgtaggcaggggcaggtctctcaaccaggcatatttttaaaagttgcttctgtactggttctcttcttttgctctgaggtgtgggctccctcatctcgtaaccagagaccagcacatgtcagggaagcacccagtgtcggctccccatcccaatccacaccagcaccttgttacagacaagaagtcagaggaaagggcggggtccctgcagggctgaagcctaagctactgtgaggtgctcacaagtggcagctcctgtaatcccttttaaattacgtgggaatcttaacagaaagtaatgggcccccagaaatacccacagcataggacntcagaccctgaactcaccacaaaattttaagatgctgattgggagccgcttgtggctgctggatgngtgtgtgtgtgtgtgtgtgtgcgtgcgtgcgtgtgtgtgtgtgtctgntggggaccctggccacccccctgctgctgtcttggtgcctgtcacccacatggtctgccatcctaacacccagctctgctcagaaaacgtcctgcgtggaggagggatgatgcagaattctgaagtcgacttccctctggctcctggcgtgccctcgctcccttcctgagcccagctcgtgttgcgccggaggctgcgcggcccctgatttctgcatggtgtagaactttctccaatagtcacattggcaaagggagaactggggtgggcggggggtggggctggcagggaattagcatttctctctctcttttaatagttaa

SEQ ID NO: 31940 - DNA, 4065 bp, Homo Sapiens
atgtcgactggggacagttttgagactcgatttgaaaaaatggacaacctgctgcgggatcccaaatcggaagtgaattcggattgtttgctggatggattggatgctttggtatatgatttggattttcctgccttaagaaaaaacaaaaatattgacaactttttaagcagatataaagacacaataaataaaatcagagatttacgaatgaaagctgaagattatgaagtagtgaaggtgattggtagaggtgcatttggagaagttcaattggtaaggcataaatccaccaggaaggtatatgctatgaagcttctcagcaaatttgaaatgataaagagatctgattctgcttttttctgggaagaaagggacatcatggcttttgccaacagtccttgggttgttcagcttttttatgcattccaagatgatcgttatctctacatggtgatggaatacatgcctggtggagatcttgtaaacttaatgagcaactatgatgtgcctgaaaaatgggcacgattctatactgcagaagtagttcttgcattggatgcaatccattccatgggttttattcacagagatgtgaagcctgataacatgctgctggataaatctggacatttgaagttagcagattttggtacttgtatgaagatgaataaggaaggcatggtacgatgtgatacagcggttggaacacctgattatatttcccctgaagtattaaaatcccaaggtggtgatggttattatggaagagaatgtgactggtggtcggttggggtatttttatacgaaatgcttgtaggtgatacacctttttatgcagattctttggttggaacttacagtaaaattatgaaccataaaaattcacttacctttcctgatgataatgacatatcaaaagaagcaaaaaaccttatttgtgccttccttactgacagggaagtgaggttagggcgaaatggtgtagaagaaatcaaacgacatctcttcttcaaaaatgaccagtgggcttgggaaacgctccgagacactgtagcaccagttgtacccgatttaagtagtgacattgatactagtaattttgatgacttggaagaagataaaggagaggaagaaacattccctattcctaaagctttcgttggcaatcaactaccttttgtaggatttacatattatagcaatcgtagatacttatcttcagcaaatcctaatgataacagaactagctccaatgcagataaaagcttgcaggaaagtttgcaaaaaacaatctataagctggaagaacagctgcataatgaaatgcagttaaaagatgaaatggagcagaagtgcagaacctcaaacataaaactagacaagataatgaaagaattggatgaagagggaaatcaaagaagaaatctagaatctacagtgtctcagattgagaaggagaaaatgttgctacagcatagaattaatgagtaccaaagaaaagctgaacaggaaaatgagaagagaagaaatgtagaaaatgaagtttctacattaaaggatcagttggaagacttaaagaaagtcagtcagaattcacagcttgctaatgagaagctgtcccagttacaaaagcagctagaagaagccaatgacttacttaggacagaatcggacacagctgtaagattgaggaagagtcacacagagatgagcaagtcaattagtcagttagagtccctgaacagagagttgcaagagagaaatcgaattttagagaattctaagtcacaaacagacaaagattattaccagctgcaagctatattagaagctgaacgaagagacagaggtcatgattctgagatgattggagaccttcaagctcgaattacatctttacaagaggaggtgaagcatctcaaacataatctcgaaaaagtggaaggagaaagaaaagaggctcaagacatgcttaatcactcagaaaaggaaaagaataatttagagatagatttaaactacaaacttaaatcattacaacaacggttagaacaagaggtaaatgaacacaaagtaaccaaagctcgtttaactgacaaacatcaatctattgaagaggcaaagtctgtggcaatgtgtgagatggaaaaaaagctgaaagaagaaagagaagctcgagagaaggctgaaaatcgggttgttcagattgagaaacagtgttccatgctagacgttgatctgaagcaatctcagcagaaactagaacatttgactggaaataaagaaaggatggaggatgaagttaagaatctaaccctgcaactggagcaggaatcaaataagcggctgttgttacaaaatgaattgaagactcaagcatttgaggcagacaatttaaaaggtttagaaaagcagatgaaacaggaaataaatactttattggaagcaaagagattattagaatttgagttagctcagcttacgaaacagtatagaggaaatgaaggacagatgcgggagctacaagatcagcttgaagctgagcaatatttctcgacactttataaaacccaggtaaaggaacttaaagaagaaattgaagaaaaaaacagagaaaatttaaagaaaatacaggaactacaaaatgaaaaagaaactcttgctactcagttggatctagcagaaacaaaagctgagtctgagcagttggcgcgaggccttctggaagaacagtattttgaattgacgcaagaaagcaagaaagctgcttcaagaaatagacaagagattacagataaagatcacactgttagtcggcttgaagaagcaaacagcatgctaaccaaagatattgaaatattaagaagagagaatgaagagctaacagagaaaatgaagaaggcagaggaagaatataaactggagaaggaggaggagatcagtaatcttaaggctgcctttgaaaagaatatcaacactgaacgaacccttaaaacacaggctgttaacaaattggcagaaataatgaatcgaaaagattttaaaattgatagaaagaaagctaatacacaagatttgagaaagaaagaaaaggaaaatcgaaagctgcaactggaactcaaccaagaaagagagaaattcaaccagatggtagtgaaacatcagaaggaactgaatgacatgcaagcgcaattggtagaagaatgtgcacataggaatgagcttcagatgcagttggccagcaaagagagtgatattgagcaattgcgtgctaaacttttggacctctcggattctacaagtgttgctagttttcctagtgctgatgaaactgatggtaacctcccagagtcaagaattgaaggttggctttcagtaccaaatagaggaaatatcaaacgatatggctggaagaaacagtatgttgtggtaagcagcaaaaaaattttgttctataatgacgaacaagataaggagcaatccaatccatctatggtattggacatagataaactgtttcacgttagacctgtaacccaaggagatgtgtatagagctgaaactgaagaaattcctaaaatattccagatactatatgcaaatgaaggtgaatgtagaaaagatgtagagatggaaccagtacaacaagctgaaaaaactaatttccaaaatcacaaaggccatgagtttattcctacactctaccactttcctgccaattgtgatgcctgtgccaaacctctctggcatgtttttaagccaccccctgccctagagtgtcgaagatgccatgttaagtgccacagagatcacttagataagaaagaggacttaatttgtccatgtaaagtaagttatgatgtaacatcagcaagagatatgctgctgttagcatgttctcaggatgaacaaaaaaaatgggtaactcatttagtaaagaaaatccctaagaatccaccatctggttttgttcgtgcttcccctcgaacgctttctacaagatccactgcaaatcagtctttccggaaagtggtcaaaaatacatctggaaaaactagttaa

SEQ ID NO: 31941 - DNA, 3172 bp, Homo Sapiens
ccgctgaattctcgaagttttcttttctccttccaccttcttttcatttctagtgagacacacgctttggtcctggctttcggcccgtagttgtagaaggagccctgctggtgcaggttagaggtgccgcatcccccggagctctcgaagtggaggcggtaggaaacggagggcttgcggctagccggaggaagctttggagccggaagccatggcacactaccccacaaggctgaagaccagaaaaacttattcatgggttggcaggcccttgttggatcgaaaactgcactaccaaacctatagagaaatgtgtgtgaaaacagaaggttgttccaccgagattcacatccagattggacagtttgtgttgattgaaggggatgatgatgaaaacccgtatgttgctaaattgcttgagttgttcgaagatgactctgatcctcctcctaagaaacgtgctcgagtacagtggtttgtccgattctgtgaagtccctgcctgtaaacggcatttgttgggccggaagcctggtgcacaggaaatattctggtatgattacccggcctgtgacagcaacattaatgcggagaccatcattggccttgttcgggtgatacctttagccccaaaggatgtggtaccgacgaatctgaaaaatgagaagacactctttgtgaaactatcctggaatgagaagaaattcaggccactttcctcagaactatttgcggagttgaataaaccacaagagagtgcagccaagtgccagaaacccgtgagagccaagagtaagagtgcagagagcccttcttggaccccagcagaacatgtggccaaaaggattgaatcaaggcactccgcctccaaatctcgccaaactcctacccatcctcttaccccaagagccagaaagaggctggagcttggcaacttaggtaaccctcagatgtcccagcagacttcatgtgcctccttggattctccaggaagaataaaacggaaagtggccttctcggagatcacctcaccttctaagagatctcagcctgataaacttcaaaccttgtctccagctctgaaagccccagagaaaaccagagagactggactctcttatactgaggatgacaagaaggcttcacctgaacatcgcataatcctgagaacccgaattgcagcttcgaaaaccatagacattagagaggagagaacacttacccctatcagtgggggacagagatcttcagtggtgccatccgtgattctgaaaccagaaaacatcaaaaagagggatgcaaaagaagcaaaagcccagaatgaagcgacctctactccccatcgtatccgcagaaagagttctgtcttgactatgaatcggattaggcagcagcttcggtttctaggtaatagtaaaagtgaccaagaagagaaagagattctgccagcagcagagatttcagactctagcagtgacgaagaagaggcttccacaccgccccttccaaggagagcacccagaactgtgtccaggaacctgcgatcttccttgaagtcatccttacataccctcacgaaggtgccaaagaagagtctcaagcctagaacgccacgttgtgccgctcctcagatccgtagtcgaagcctggctgcccaggagccagccagtgtgctggaggaagcccgactgaggctgcatgtttctgctgtacctgagtctcttccctgtcgggaacaggaattccaagacatctacaattttgtggaaagcaaactccttgaccataccggagggtgcatgtacatctccggtgtccctgggacagggaagactgccactgttcatgaagtgatacgctgcctgcagcaggcagcccaagccaatgatgttcctccctttcaatacattgaggtcaatggcatgaagctgacggagccccaccaagtctatgtgcaaatcttgcagaagctaacaggccaaaaagcaacagccaaccatgcggcagaactgctggcaaagcaattctgcacccgagggtcacctcaggaaaccaccgtcctgcttgtggatgagctcgaccttctgtggactcacaaacaagacataatgtacaatctctttgactggcccactcataaggaggcccggcttgtggtcctggcaattgccaacacaatggacctgccagagcgaatcatgatgaaccgggtgtccagccgactgggtcttaccaggatgtgcttccagccctatacatatagccagctgcagcagatcctaaggtcccggctcaagcatctaaaggcctttgaagatgatgccatccagctggtagccaggaaggtagcagcactgtctggagatgcacgacggtgcctggacatctgcaggcgtgccacagagatctgtgagttctcccagcagaagcctgactcccctggcctggtcaccatagcccactcaatggaagctgtggatgagatgttttcatcatcatacatcacggccatcaaaaattcctctgttctggaacagagcttcctgagagccatcctcgcagagttccgtcgatcaggactggaggaagccacgtttcaacagatatatagtcaacatgtggcactgtgcagaatggagggactgccgtaccccaccatgtcagagaccatggccgtgtgttctcacctgggctcctgtcgcctcctgcttgtggagcccagcaggaacgatctgctccttcgggtgcggctcaacgtcagccaggatgatgtgctgtatgcgctgaaagacgagtaaaggggcttcacaagttaaaagactggggtcttgctgggttttgttttttgagacagggtcttgctctgtcgcccaggctggagtgcagtggcacgatcatggctcactgcagccttgacttctcaggcttaggtgaccccccaacctcatcctcccaggtggctgaaactacaggcacatgccaccatgcccagctgattttttgtagagacagggcttcaccatgttgccaagctagtctacaaagcatctgattttggaagtacatggaattgttgtaacaaagtatattgaatggaaatggctctcatgtattttggaattttccattaaataatttgctttttcctgaaaaaaaaaaaaaaaaaaaaaaaa

SEQ ID NO: 31942 - DNA, 2458 bp, Homo Sapiens
atggaggcggtggcggtggccgcggcggtgggggtccttctcctggccggggccgggggcgcggcaggcgacgaggcccgggaggcggcggccgtgcgggcgctcgtggcccggctgctggggccaggccccgcggccgacttctccgtgtcggtggagcgcgctctggctgccaagccgggcttggacacctacagcctgggcggcggcggcgcggcgcgcgtgcgggtgcgcggctccacgggcgtggcggccgccgcggggctgcaccgctacctgcgcgacttctgtggctgccacgtggcctggtccggctctcagctgcgcctgccgcggccactgccagccgtgccgggggagctgaccgaggccacgcccaacaggtaccgctattaccagaatgtgtgcacgcaaagctactccttcgtgtggtgggactgggcccgctgggagcgagagatagactggatggcgctgaatggcatcaacctggcactggcctggagcggccaggaggccatctggcagcgggtgtacctggccttgggcctgacccaggcagagatcaatgagttctttactggtcctgccttcctggcctgggggcgaatgggcaacctgcacacctgggatggccccctgcccccctcctggcacatcaagcagctttacctgcagcaccgggtcctggaccagatgcgctccttcggcatgaccccagtgctgcctgcattcgcggggcatgttcccgaggctgtcaccagggtgttccctcaggtcaatgtcacgaagatgggcagttggggccactttaactgttcctactcctgctccttccttctggctccggaagaccccatattccccatcatcgggagcctcttcctgcgagagctgatcaaagagtttggcacagaccacatctatggggccgacactttcaatgagatgcagccaccttcctcagagccctcctaccttgccgcagccaccactgccgtctatgaggccatgactgcagtggatactgaggctgtgtggctgctccaaggctggctcttccagcaccagccgcagttctgggggcccgcccagatcagggctgtgctgggagctgtgccccgtggccgcctcctggttctggacctgtttgctgagagccagcctgtgtatacccgcactgcctccttccagggccagcccttcatctggtgcatgctgcacaactttgggggaaaccatggtctttttggagccctagaggctgtgaacggaggcccagaagctgcccgcctcttccccaactccaccatggtaggcacgggcatggcccccgagggcatcagccagaacgaagtggtctattccctcatggctgagctgggctggcgaaaggacccagtgccagatttggcagcctgggtgaccagctttgccgcccggcggtatggggtctcccacccggacgcaggggcagcgtggaggctactgctccggagtgtgtacaactgctccggggaggcctgcaggggccacaatcgtagcccgctggtcaggcggccgtccctacagatgaataccagcatctggtacaaccgatctgatgtgtttgaggcctggcggctgctgctcacatctgctccctccctggccaccagccccgccttccgctacgacctgctggacctcactcggcaggcagtgcaggagctggtcagcttgtactatgaggaggcaagaagcgcctacctgagcaaggagctggcctccctgttgagggctggaggcgtcctggcctatgagctgctgccggcactggacgaggtgctggctagtgacagccgcttcttgctgggcagctggctagagcaggcccgagcagcggcagtcagtgaggccgaggccgatttctacgagcagaacagccgctaccagctgaccttgtgggggccagaaggcaacatcctggactatgccaacaagcagctggcggggttggtggccaactactacacccctcgctggcggcttttcctggaggcgctggttgacagtgtggcccagggcatccctttccaacagcaccagtttgacaaaaatgtcttccaactggagcaggccttcgttctcagcaagcagaggtaccccagccagccgcgaggagacactgtggacctggccaagaagatcttcctcaaatattaccccggctgggtggccggctcttggtgatagattcgccaccactgggccttgttttccgctaattccagggcagattccagggcccagagctggacagacatcacaggataacccaggcctgggaggaggccccacggcctgctggtggggtctgacctggggggattggagggaaatgacctgccctccaccaccacccaaagtgtgggattaaagtactgttttctttccacttaaaaaaaaaaaaaaaaaa

SEQ ID NO: 31943 - DNA, 3522 bp, Homo Sapiens
gccatttgaagcagaatccaaaccatgaattgtagagaattacccttgaccctttgggtgcttatatctgtaagcactgcagaatcttgtacttcacgtccccacattactgtggttgaaggggaacctttctatctgaaacattgctcgtgttcacttgcacatgagattgaaacaaccaccaaaagctggtacaaaagcagtggatcacaggaacatgtggagctgaacccaaggagttcctcgagaattgctttgcatgattgtgttttggagttttggccagttgagttgaatgacacaggatcttactttttccaaatgaaaaattatactcagaaatggaaattaaatgtcatcagaagaaataaacacagctgtttcactgaaagacaagtaactagtaaaattgtggaagttaaaaaattttttcagataacctgtgaaaacagttactatcaaacactggtcaacagcacatcattgtataagaactgtaaaaagctactactggagaacaataaaaacccaacgataaagaagaacgccgagtttgaagatcaggggtattactcctgcgtgcatttccttcatcataatggaaaactatttaatatcaccaaaaccttcaatataacaatagtggaagatcgcagtaatatagttccggttcttcttggaccaaagcttaaccatgttgcagtggaattaggaaaaaacgtaaggctcaactgctctgctttgctgaatgaagaggatgtaatttattggatgttcggggaagaaaatggatcggatcctaatatacatgaagagaaagaaatgagaattatgactccagaaggcaaatggcatgcttcaaaagtattgagaattgaaaatattggtgaaagcaatctaaatgttttatataattgcactgtggccagcacgggaggcacagacaccaaaagcttcatcttggtgagaaaagcagacatggctgatatcccaggccacgtcttcacaagaggaatgatcatagctgttttgatcttggtggcagtagtgtgcctagtgactgtgtgtgtcatttatagagttgacttggttctattttatagacatttaacgagaagagatgaaacattaacagatggaaaaacatatgatgcttttgtgtcttacctaaaagaatgccgacctgaaaatggagaggagcacacctttgctgtggagattttgcccagggtgttggagaaacattttgggtataagttatgcatatttgaaagggatgtagtgcctggaggagctgttgttgatgaaatccactcactgatagagaaaagccgaagactaatcattgtcctaagtaaaagttatatgtctaatgaggtcaggtatgaacttgaaagtggactccatgaagcattggtggaaagaaaaattaaaataatcttaattgaatttacacctgttactgacttcacattcttgccccaatcactaaagcttttgaaatctcacagagttctgaagtggaaggccgataaatctctttcttataactcaaggttctggaagaaccttctttacttaatgcctgcaaaaacagtcaagccaggtagagacgaaccggaagtcttgcctgttctttccgagtcttaatcttcagaaacagtgaacgccaaaaagaactcaagatattctggggactgagcatatgaacctgttcataacaaaggctgtgactcgaaataattaactttgtcaaaatcctgctcacaatttgaagatgaaacttgtcattaggttggcgggaatgagactaaagattgcgctgtgggctgtggtcacgtgctcccagaagacctggaattcaaaagaaatggagctattctttttctccctctttcataactggatgcagctgctcatactcaatcccatattcagcaagtgtgaagctggacgtgatgcaaaataaccgatgccctacaaaaagggcgcatctttaagagttttaatgccagtgcttaattcgaatgaggggattttaagtgtctgaagaggcattttctagggaccagtgggtgactgagtaactgaaatgctgctttcactccctaacaccatggatctggttgtgcataggatgtgggaggaggggctggcagggccgccttcagaggctgcagggcctcagcctcaggatgcatttaatgtatcctggccacagttgcagccaacggttcttgaaagctcggtaaggccctgcaacgcagagcctgcttatgtggatctatttatgggaacttcttaaaaggaccccagaatagctctttatctttcacaagagacacaaattctaattgagttaattatctgggcctttcactttggatgctctgaaacatttgttgattttgtgtgaatgtttatatcaaaatgtttgccaggttgtattagccattgaatagcaaaaaactgatagttacttgcttgttttttaaaaattacatattaaaaatgcccttggcataaggcagcatggtgtggcagttaagagatgggctgtgcagcccatcctgagctccagtcctgagtttgctacttacttctgtggcctctggaaccttatccaacctcttggtgcttcagtttcctcatctgtgaaattagaatttataataattgcacctacctcccaggggtaactaaatgaataaatataataaagtacttacagtggttcctgacacagactcagcactccgtcagtgttgccatgactatttttattatcattattaatgattacttagatcaattatttagcagtggactaatggaagctacagagcagggaagggaagcagatctagggaggaaggcagttttgatttgaggaggtttgcacatgtagagaagcatactggagaagcatatccagagggcgaaagatatctctccattgtgcatctgcctcttttgacgttggaagacacatgtcttactccccaaagggagcccagcactgggagccttcttgatgatctcaaaaataatagctattcaagaaaatcaccaagtgactgtgaaaccgtcagttcggaaggctggttagaacatgtgggagcaacatgaatgttctacaaaagtttaaagcagagattgtttcaaatgggtgtagtagatattactgaaaaccaaaaaagagtgagattgtcagtgtaagaatgtgatttaatgtttgtagtgcttacaattttgtgtaccaactggatgactaaaaagagtaaaataacttaattaatagctcatattttatgtgtgaaaacatgttagtgaacatatataatcaaaatagatttcattgctattgcatagtctctaatacatagaatgattttgcttttctcttttattatacttgctttaaaatacttgaaatatattttgcattaaatgcatttcaagttaaatgtcttaaatgtatacattagatgtgtgttttaaaatgcataaaacacgttgaaa

SEQ ID NO: 31944 - DNA, 10987 bp, Homo Sapiens; identical to SEQ ID NO: 29053

SEQ ID NO: 31945 - DNA, 2467 bp, Homo Sapiens
acctctggtggtggctggctactcggatacgaattcggcacgagggcaggcgtcggctagtgtcgggagtcgcgcccgccgcccctcagctgcccggcccggagcccgagacgcgcgcaccatgagcggtggtgaagtggtctgctccggatggctccgcaagtcccccccggagaaaaagttgaagcgttatgcatggaagaggagatggttcgtgttacgcagtggccgtttaactggagatccagatgttttggaatattacaaaaatgatcatgccaagaagcctattcgtattattgatttaaatttatgtcaacaagtagatgctggattgacatttaacaaaaaagagtttgaaaacagctacatttttgatatcaacactattgaccggattttctacttggtagcagacagcgaggaggagatgaataagtgggttcgttgtatttgtgacatctgtgggtttaatccaacagaagaagatcctgtgaagccacctggcagctctttacaagcaccagctgatttacctttagctataaatacagcaccaccatccacccaggcagattcatcctctgctactctacctcctccatatcagctaatcaatgttccaccacacctggaaactcttggcattcaggaggatcctcaagactacctgttgctcatcaactgtcaaagcaagaagcccgaacccaccagaacgcatgctgattctggaaaatccacctcttctgaaacagactccaatgataacgtcccttctcataaaaatcctgcttcctcccagagcaaacatggaatgaatggcttttttcagcagcaaatgatatacgactctccaccttcacgtgccccatctgcttcagttgactccagcctttataacctgcccaggagttattcccatgatgttttaccaaaggtgtctccatcaagtactgaagcagatggagaactctatgtttttaataccccatctgggacatcgagtgtagagactcaaatgaggcatgtatctattagttatgacattcctccaacacctggtaatacttatcagattccacgaacatttccagaaggaaccttgggacagacatcaaagctagacactattccagatattcctccacctcggccaccgaaaccacatccagctcatgaccgatctcctgtggaaacgtgtagtatcccacgcaccgcctcagacactgacagtagttactgtatccctacagcagggatgtcgccttcacgtagtaataccatttccactgtggatttaaacaaattgcgaaaagatgctagttctcaagactgctatgatattccacgagcatttccaagtgatagatctagttcacttgaaggcttccataaccactttaaagtcaaaaatgtgttgacagtgggaagtgtttcaagtgaagaactggatgaaaattacgtcccaatgaatcccaattcaccaccacgacaacattccagcagttttacagaaccaattcaggaagcaaattatgtgccaatgactccaggaacatttgatttttcctcatttggaatgcaagttcctcctcctgctcatatgggcttcaggtccagcccaaaaacccctcccagaaggccagttcctgttgcagactgtgaaccaccccccgtggataggaacctcaagccagacagaaaagtcaagccagcgcctttagaaataaaacctttgccagaatgggaagaattacaagccccagttagatctcccatcactaggagttttgctcgagactcttccaggtttcccatgtccccccgaccagattcagtgcatagcacaacttcaagcagtgactcacacgacagtgaagagaattatgttcccatgaacccaaacctgtccagtgaagacccaaatctctttggcagtaacagtcttgatggaggaagcagccctatgatcaagcccaaaggagacaaacaggtggaatacttagatctcgacttagattctgggaaatccacaccaccacgtaagcaaaagagcagtggctcaggcagcagtgtagcagatgagagagtggattatgttgttgttgaccaacagaagaccttggctctaaagagtacccgggaagcctggacagatgggagacagtccacagaatcagaaacgccagcgaagagtgtgaaatgaaaatattgccttgccatttctgaacaaaagaaaactgaattgtaaagataaatcccttttgaagaatgacttgacacttccactctaggtagatcctcaaatgagtagagttgaagtcaaaggacctttctgacataatcaagcaatttagacttaagtggtgctttgtggtatctgaacaattcataacatgtaaataatgtgggaaaatagtattgtttagctcccagagaaacatttgttccacagttaacacactcg

SEQ ID NO: 31946 - DNA, 2795 bp, Homo Sapiens
gtcgagagggagtccccggggacacctcggcacgcagcggagatgcctctttttgccaccaatcccttcgatcaggatgttgagaaagcaaccagcgagatgaatactgctgaggactggggcctcattttggatatctgtgataaagttggtcagtctcgcactggacctaaggattgtcttcggtctattatgagaagagtgaaccacaaagatcctcacgttgctatgcaggctttgactcttctaggagcatgtgtatcaaactgtggcaaaatttttcatttagaagtatgttcaagagattttgctagtgaagtaagcaacgtattaaataagggtcatcctaaagtatgtgaaaaattaaaggctcttatggttgaatggacagatgaatttaagaatgatccacagcttagtctaatatcagcaatgattaagaaccttaaggaacaaggagttacgttcccagctattggctctcaggctgcagaacaagcaaaagcaagcccagctcttgtagccaaggatcctggtactgtggctaacaaaaaagaagaagaagatttagcaaaagccattgagttgtctctcaaggaacaaaggcagcagtcaaccaccctttccactttgtatccaagcacatccagtctcttaactaaccaccaacatgaaggccgaaaagttcgtgctatatatgactttgaagctgctgaagacaatgaacttacttttaaagctggagaaattattacagttcttgatgacagtgatcctaactggtggaaaggtgaaacccatcaaggcatagggttatttccttctaattttgtgactgcagatctcactgctgaaccagaaatgattaaaacagagaagaagacggtacaatttagtgatgatgttcaggtagagacaatagaaccagagccggaaccagcctttattgatgaagataaaatggaccagttgctacagatgctgcaaagtacagaccccagtgatgatcagccagacctaccagagctgcttcatcttgaagcaatgtgtcaccagatgggacctctcattgatgaaaagctggaagatattgatagaaaacattcagaactctcagaacttaatgtgaaagtgatggaggccctttccttatataccaagttaatgaacgaagatccgatgtattccatgtatgcaaagttacagaatcagccatattatatgcagtcatctggtgtttctggttctcaggtgtatgcagggcctcctccaagtggtgcctacctggttgcagggaacgcgcagatgagccacctccagagctacagtcttcccccggagcagctgtcttctctcagccaggcagtggtcccaccatccgcaaacccagcccttcctagtcagcagactcaggccgcttacccaaatacaatggtcagttccgttcaaggaaacacatatcccagccaggcgccagtatatagtcctcctcctgccgctactgctgctgctgcaactgccgatgtcactctgtaccagaatgcaggacctaatatgccccaggtgccaaactataacttaacatcatcaactctgcctcagcccggaggcagccaacagccacctcagccacagcaaccatattctcagaaggctctgctataggacccggtgttcctcttggtggcagatacctgctaaatgccactgacaatgttatgagattcattactatcttaagatgtgtttatcctcagcttataggaatctctccaggtcaacaggttcaaatattcaagaaggtagaactctcctcaatttacactgactttttagaggttcttccccccccgcccctgcagaggaatgaaactacttacaacatttaattcctttcataatatgaaagaattgatacaaggctatttgtctcgtaaacctggtctgcagaaagtcaaacttacaaaaactgttgtgacaaatgttatgtacatatattgatatgtaactgcattagtggccattttgaatcacagtggtgatcgtgtgaatatatttaacactgtgttaaattaatttacgttgctattttattttaatcataaacaactaccatgtttcttaatgttttgtgtaaatttaaggtaattatactatccttttaaacttcaagaaaacaaaattgttagcgtatttacatgaaggcgcattatgttgtcgtgtgtttcagtttcacattaaactgaaccttttactaattgtgagctaaagagatatatatatatatgtgtgtgtatatatatatatctacatgtctttctgtagcctctgcatactactggctgtcatcacaccagcgtacagtagctaaatttttggtgcaattattagcaaatgataatgttcccttttgaacttttacattttggcatgacatttcagagtattgtgggaccatgagacaaaattaagtacgatcacattctttatttctcattttaaagaaatgatgttggtttaccttttcctagttgaagatagtaattaggtttctaagctgtatactgtgtttattggtggcagtgacacccaaagatagaggcaatggatagaaatttttaaactggaaagaaaacctgaattacactacattttcgaagtctcttgtaattatttgggatatcaacaaaatttgattcgtctgtctaatcccttgctagtattttaaatatgtctttaacacattgtatcctttaattcttcattaaaatggaaataagtagatgtttcaaagt

SEQ ID NO: 31947 - DNA, 2279 bp, Homo Sapiens
ggcacgagcgaagatggcgtcgcccggctgcctgtggctcttggctgtggctctcctgccatggacctgcgcttctcgggcgctgcagcatctggacccgccggcgccgctgccgttggtgatctggcatgggatgggagacagctgttgcaatcccttaagcatgggtgctattaaaaaaatggtggagaagaaaatacctggaatttacgtcttatctttagagattgggaagaccctgatggaggacgtggagaacagcttcttcttgaatgtcaattcccaagtaacaacagtgtgtcaggcacttgctaaggatcctaaattgcagcaaggctacaatgctatgggattctcccagggaggccaatttctgagggcagtggctcagagatgcccttcacctcccatgatcaatctgatctcggttgggggacaacatcaaggtgtttttggactccctcgatgcccaggagagagctctcacatctgtgacttcatccgaaaaacactgaatgctggggcgtactccaaagttgttcaggaacgcctcgtgcaagccgaatactggcatgaccccataaaggaggatgtgtatcgcaaccacagcatcttcttggcagatataaatcaggagcggggtatcaatgagtcctacaagaaaaacctgatggccctgaagaagtttgtgatggtgaaattcctcaatgattccattgtggaccctgtagattcggagtggtttggattttacagaagtggccaagccaaggaaaccattcccttacaggagacctccctgtacacacaggaccgcctggggctaaaggaaatggacaatgcaggacagctagtgtttctggctacagaaggggaccatcttcagttgtctgaagaatggttttatgcccacatcataccattccttggatgaaacccgtatagttcacaatagagctcagggagcccctaactcttccaaaccacatgggagacagtttccttcatgcccaagcctgagctcagatccagcttgcaactaatccttctatcatctaacatgcactacttggaaagatctaagatctgaatcttatcctttgccatcttctgttaccatatggtgttgaatgcaagtttaattaccatggagattgttttacaaacttttgatgtggtcaagttcagttttagaaaagggagtctgttccagatcagggccagaactgtgcccaggcccaaaggagacaactaactaaagtagtgagatagattctaagggcaaacatttttccaagtcttgccatatttcaagcaaagaggtgcccaggcctgaggtactcacataaatgctttgttttgctggtgatttaaccagtgcttggaaaaatcttgcttggctatttctgcatcatttcttaaggctgccttcctctctgagtacgttgccctctgtgctatcaatcatcttatcatcaattattagacaaatcccactggcctacagtcttgcttctgcagcacccactttgtctcctcaggtagtgatgaattagttgctgtcacaaaaggagggaagtagcacccaaattaaattgcttaagagaggaaatgtacatcttgtataacttagggagcgaagaaaatgtaggcgcgaaagtgaaaagtgaggcagctagttcttcctattccattctcgaccaacctgccctttcttaatatgactagtggtcttgatgctagagtcaacttactctgttgctggctttagcagagaataggaggaaccatatgaaaaagatcaggctttctgacttccatccccaaaacacatttaccagcatactccaaactgtttctgatgtgttccatgagaaaaggattgtttgctcaaaaagcttggaaaatactacacactccctttctccttctggagatcaacccacattagagtgtctaaggactcctgagaattcctgttacagtaaacaaaactaacgtaatctaccatttcctacactatttgagcatggaaatcatagtccccactctatgaaaacttaacgctttttggaagacatttctgtagcatgtcagtttggagaaatgatgagctacgccttgatgaaagaaccgtgttggtgctgctaagtttagccattatggtttttcctttctctctcttaagccttattcttcaactaaaagatgaggattaagagcaagaagttgggggggatgtgaaaataattttatgaggttgtctaaaatctcgtgcc

SEQ ID NO: 31948 - DNA, 1496 bp, Homo Sapiens
gcacgaggcctgcactttgtcaagtttgccatcgacagtgaccagctccatcagctctgggagaaggaccagctcaacatggccaagaacacctggcccattctgaagggctttcaggaggggcccctcaacttcgctcccaccttcaagtttgatgtgggtaccaacaaatacgataccagtgccaagaaacggaagccagcttggacagaccgtatcctatggaaggtcaaggctccaggtgggggtcccagcccctcaggacggaagagccaccgactccaggtgacgcagcacagctaccgcagccacatggaatacacagtcagcgaccacaagcctgtggctgcccagttcctcctgcagtttgccttcagggacgacatgccactggtgcggctggaggtggcagatgagtgggtgcggcccgagcaggcggtggtgaggtaccgcatggaaacagtgttcgcccgcagctcctgggactggatcggcttataccgggtgggtttccgccattgcaaggactatgtggcttatgtctgggccaaacatgaagatgtggatgggaatacctaccaggtaacattcagtgaggaatcactgcccaagggccatggagacttcatcctgggctactatagtcacaaccacagcatcctcatcggcatcactgaacccttccagatctcgctgccttcctcggagttggccagcagcagcacagacagctcaggcaccagctcagagggagaggatgacagcacactggagctccttgcacccaagtcccgcagccccagtcctggcaagtccaagcgacaccgcagccgcagcccgggactggccaggttccctgggcttgccctacggccctcatcccgtgaacgccgtggtgccagccgtagcccctcaccccagagccgccgcctgtcccgagtggctcctgacaggagcagtaatggcagcagccggggcagtagtgaagaggggccctctgggttgcctggcccctgggccttcccaccagctgtgcctcgaagcctgggcctgttgcccgccttgcgcctagagactgtagaccctggtggtggtggctcctggggacctgatcgggaggccctggcgcccaacagcctgtctcctagtccccagggccatcgggggctggaggaagggggcctggggccctgagggtggggtaggcagatgggccaaggtgaccaccattctgcctcaatcttttgcaagcccacctgcctctctcctgctgctcctccagctgtatctgcacctgcctctctgtcctggccaggggtggacaactggggtcccccaaaactcagtcctggcacctcaactgtgacaatcagcaaagccccacccaggcccccatctgggatgatgggagagctctggcagatgtcccaatcctggaggtcatccattaggaattaaattctccagcctcaaaaaaaaaaaaaaaaaaaaaaaaa

SEQ ID NO: 31949 - DNA, 1235 bp, Homo Sapiens
attcctgagtctgtgactggtgctggagttttgagtccacagataaaatgtgtctccttcgtctctactagagaggaaaaagaactggaattggaagaacagggagactgaagggtagcaagagaggctggagaagagagtgaaaagaccgcttacctgatttgaaattgatggtggcgtgggaatgaagaatgtgatatacatctttggagtctgttctgcagcccctctttcctggagtaaatgaactggaccaaatctcaaaaatccacgatgtcatcggcacacccgctcagaagatcctcaccaagttcaaacagtcgagagctatgaattttgattttccttttaaaaagggatcaggaatacctctactaacaaccaatttgtccccacaatgcctctccctcctgcacgcaatggtggcctatgatcccgatgagagaatcgccgcccaccaggccctgcagcacccctacttccaagaacagagaaacagtccctaaagcaagaggaggaccgtcccaagagacgaggaccggcctatgtcatggaactgcccaaactaaagctttcgggagtggtcagactgtcgtcttactccagccccacgctgcagtccgtgcttggatctggaacaaatggaagagtgccggtgctgagacccttgaagtgcatccctgcgagcaagaagacagatccgcagaaggaccttaagcctgccccgcagcagtgtcgcctgcccaccatagtgcggaaaggcggaagataactgagcagcaccgtcgtctcgacttcggaggcaacaccaagcccgaccgggccaggcctgggtgatctgctgctgagacgccacggagggctggggatgcgcctgcgtccgtttcgcgctggccggggctctgggtgctgccctgcgccctgccgcacccgcggcccgcgcagctgcctaggatgttctgggctaatatacttgtaaaaccaccgcattctagggttttctttcattttcgttaagaatttggggcaggaaatactttgtaactttgtatatgaatcaaaacaaacgagcaggcatttctgtgatgtgttgggcgtggttggaaggtgggttctgcgtgtcccttcccagcgctgctggtcagtcgtggagcgccatcatgtcttaccagtgacgctgctgacacccctgacttttattaaagaataagctgtcgttacagtattgcaaaaaa

SEQ ID NO: 31950 - DNA, 2044 bp, Homo Sapiens
ccggtcggatgccggaccgggggcaccgctgaggcggtgggtccccgacctgcgagacaggtttggaagcccccgctgcgcccagtccgtgcggaccgcgaggccgcgggcgggtggaggcgcgtctccggcacgatgaaggatttgggggcagagcacttggcaggtcatgaaggggtccaacttctcgggttgttgaacgtctacctggaacaagaagagagattccaacctcgagaaaaagggctgagtttgattgaggctaccccggagaatgataacactttgtgtccaggattgagaaatgccaaagttgaagatttaaggagtttagccaacttttttggatcttgcactgaaacttttgtcctggctgtcaatattttggacaggttcttggctcttatgaaggtgaaacctaaacatttgtcttgcattggagtctgttcttttttgctggctgctagaatagttgaagaagactgcaatattccatccactcatgatgtgatccggattagtcagtgtaaatgtactgcttctgacataaaacggatggaaaaaataatttcagaaaaattgcactatgaattggaagctactactgccttaaactttttgcacttataccatactattatactttgtcatacttcagaaaggaaagaaatactgagccttgataaactagaagctcagctgaaagcttgcaactgccgactcatcttttcaaaagcaaaaccatctgtattagccttgtgccttctcaatttggaagtggaaactttgaaatctgttgaattactggaaattctcttgctagttaaaaaacattccaagattaatgacactgagttcttctactggagagagttggtttctaaatgcctagccgagtattcttctcctgaatgttgcaaaccagatcttaagaagttggtttggatcgtttcaaggcgcacagcccagaacctccacaacagctactatagtgttcctgagctgccaacgatacctgaggggggttgttttgatgaaagtgaaagtgaggactcttgtgaagatatgagttgtggagaggagagtctcagcagctctcctcccagtgatcaagagtgcaccttctttttcaacttcaaagtggcacaaacactgtgctttccatcttagaaatctgattgttctgtcagaatttatatttacagggtttcaaagcaataaatgggggaataggtagtttcctggtttagcccccatctagtcaggaattaatatactggaatacctaccttctatttgttattcagatcagatctggcctattttcatatttatcctaagccatcaaatggggtagtgcctcttaaaccattaacagtactttagacattggcactttatttttctcgtagatctttagctactttggggaggagggaaggtgctgataccttcaatttgttacttttcaagatttttaaaaataactagtgtagcttatcttaaacattttataaaaccttcagatgtctttaagcagattggaagtatgcaagtgcttccttagcagggacagtggataatccttaatggtttatcatagatttcaccctccccccttctcagaagagtgagtatgctcttaaatgtcaaacacatttttgttgttttgttttttaaatgatcagtgtctatttgatgtgatgcagatcttataaatttgggaattataatattgacatttctgtgatttttatatatgtaatgtcttaattgagatttgtgttaaggcagaaataattaggctagggctcttagttttcattcctattgccccaagtattgtcaaactatggtattattttaatgttactttaaaaatccataatctgctagttttgcatgtacttatatgaaaacagtgcagtaagttgaaaactcagtatctatggaattgataaatgttgatctggtgtagtatattttatccgcattttcttatattaaaaaatgttctgcatgattacattttatttgcctttgt

SEQ ID NO: 31951 - DNA, 2782 bp, Homo Sapiens
ggagccgtcaccccgggcggggacccagcgcaggcaactccgcgcggcgcccggccgagggagggagcgagcgggcgggcgggcaagccagacagctgggccggagcagccgccggcgcccgaggggccgagcgagattgtaaaccatggctgtgtggatacaagctcagcagctccaaggagaagcccttcatcagatgcaagcgttatatggccagcattttcccattgaggtgcggcattatttatcccagtggattgaaagccaagcatgggactcagtagatcttgataatccacaggagaacattaaggccacccagctcctggagggcctggtgcaggagctgcagaagaaggcagagcaccaggtgggggaagatgggtttttactgaagatcaagctggggcactatgccacacagctccagaacacgtatgaccgctgccccatggagctggtccgctgcatccgccatatattgtacaatgaacagaggttggtccgagaagccaacaatggtagctctccagctggaagccttgctgatgccatgtcccagaaacacctccagatcaaccagacgtttgaggagctgcgactggtcacgcaggacacagagaatgagttaaaaaagctgcagcagactcaggagtacttcatcatccagtaccaggagagcctgaggatccaagctcagtttggcccgctggcccagctgagcccccaggagcgtctgagccgggagacggccctccagcagaagcaggtgtctctggaggcctggttgcagcgtgaggcacagacactgcagcagtaccgcgtggagctgcccgagaagcaccagaagaccctgcagctgctgcggaagcagcagaccatcatcctggatgacgagctgatccagtggaagcggcggcagcagctggccgggaacggcgggccccccgagggcagcctggacgtgctacagtcctggtgtgagaagttggcggagatcatctggcagaaccggcagcagatccgcagggctgagcacctctgccagcagctgcccatccccggcccagtggaggagatgctggccgaggtcaacgccaccatcacggacattatctcagccctggtgaccagcacgttcatcattgagaagcagcctcctcaggtcctgaagacccagaccaagtttgcagccactgtgcgcctgctggtgggcgggaagctgaacgtgcacatgaaccccccccaggtgaaggccaccatcatcagtgagcagcaggccaagtctctgctcaagaacgagaacacccgcaatgattacagtggcgagatcttgaacaactgctgcgtcatggagtaccaccaagccacaggcacccttagtgcccacttcaggaatatgtccctgaaacgaattaagaggtcagaccgtcgtggggcagagtcggtgacagaagaaaaatttacaatcctgtttgaatcccagttcagtgttggtggaaatgagctggtttttcaagtcaagaccctgtccctgccagtggtggtgatcgttcatggcagccaggacaacaatgcgacggccactgttctctgggacaatgcttttgcagagcctggcagggtgccatttgccgtgcctgacaaagtgctgtggccacagctgtgtgaggcgctcaacatgaaattcaaggccgaagtgcagagcaaccggggcctgaccaaggagaacctcgtgttcctggcgcagaaactgttcaacaacagcagcagccacctggaggactacagtggcctgtctgtgtcctggtcccagttcaacagggagaatttaccaggacggaattacactttctggcaatggtttgacggtgtgatggaagtgttaaaaaaacatctcaagcctcattggaatgatggggccattttggggtttgtaaacaagcaacaggcccatgacctactgattaacaagccagatgggaccttcctcctgagattcagtgactcagaaattggcggcatcaccattgcttggaagtttgattctcaggaaagaatgttttggaatctgatgccttttaccaccagagacttctccatcaggtccctagccgaccgcttgggagacttgaattaccttatctacgtgtttcctgatcggccaaaagatgaagtatactccaaatactacacaccagttccctgcgagtctgctactgctaaagctgttgatggatacgtgaagccacagatcaagcaagtggtccctgagtttgtgaacgcatctgcagatgccgggggcggcagcgccacgtacatggaccaggccccctccccagctgtgtgtccccaggctcactataacatgtacccacagaaccctgactcagtccttgacaccgatggggacttcgatctggaggacacaatggacgtagcgcggcgtgtggaggagctcctgggccggccaatggacagtcagtggatcccgcacgcacaatcgtgaccccgcgacctctccatcttcagcttcttcatcttcaccagaggaatcactcttgtggatgttttaattccatgaatcgcttctcttttgaaacaatactcataatgtgaagtgttaatactagttgtgaccttagtgtttctgtgcatggtggcaccagcgaagggagtgcgagtatgtgtttgtgtgtgtgtgtgtgtgtgtgtgtgtgtgcgttggtgcacgttatggtgtttctccctctcactgtctgagagtttagttgtagcaga

SEQ ID NO: 31952 - DNA, 7869 bp, Homo Sapiens; identical to SEQ ID NO: 29763

SEQ ID NO: 31953 - DNA, 3181 bp, Homo Sapiens
gggactgggaacggtgggagccgccgtgtgtggagaagctgctgccggtgtcatggcggagctgagtgaggaggcgctgctgtcagtattaccgacgatccgggtccctaaggctggagaccgggtccacaaagacgagtgcgccttctccttcgacacgccggagtctgaggggggcctctacatctgtatgaacacgtttctgggctttgggaaacagtatgtggagagacatttcaataagaccggccagcgagtctacttgcacctccggcggacccggcgcccgaaagaggaggaccctgctacaggcactggagacccaccccggaagaagcccacgcggctggctattggtgttgaaggcggatttgaccttagcgaggagaagtttgaattagacgaggatgtgaagattgtcattttgccagattacctggagattgcccgggatggactggggggactgcctgacattgtcagagatcgggtgaccagtgcagtggaggccctactgtcggccgactcagcctcccgcaagcaggaggtgcaggcatgggatggggaagtacggcaggtgtctaagcatgccttcagcctcaagcagttggacaaccctgctcgaatccctccctgtggctggaagtgctccaagtgtgacatgagagagaacctgtggctcaacctgactgatggctccatcctctgtgggcgacgctacttcgatggcagtgggggcaacaaccacgctgtggagcactaccgagagacaggctacccgttagctgtcaagctgggcaccatcacccctgatggagctgacgtgtactcatatgatgaggatgacatggtcctggaccccagcctggctgagcacctgtcccacttcggcatcgacatgctgaagatgcagaagacagacaagacgatgactgagttggagatagacatgaaccagcggattggtgaatgggagctgatccaggagtcaggtgtgccactcaagcccctgtttgggcctggctacacaggcatccggaacctgggtaacagctgctacctcaactctgtggtccaggtgctcttcagcatccctgacttccagaggaagtatgtggataagctggagaagatcttccagaatgccccgacggaccctacccaggatttcagcacccaggtggccaagctgggccatggccttctctccggggagtattccaagccagtaccggagtcgggcgatggggagcgggtgccagaacagaaggaagttcaagatggcattgcccctcggatgttcaaggccctcatcggcaagggccaccctgaattctccaccaaccggcagcaggatgcccaggagttcttccttcaccttatcaacatggtggagaggaattgccggagctctgaaaatcctaatgaagtgttccgcttcttggtggaggaaaagatcaagtgcctggccacagagaaggtgaagtacacccagcgagttgactacatcatgcagctgcctgtgcccatggatgcagcccttaacaaagaggagcttctggagtacgaggagaagaagcggcaagccgaagaggagaagatggcactgccagaactggttcgggcccaggtgcccttcagctcttgcctggaggcctacggggcccctgagcaggtcgatgacttctggagcacggccctgcaggccaagtcagtagctgtcaagaccacacgatttgcctcattccctgactacctggtcatccagatcaagaagttcaccttcggcttagactgggtgcccaagaaactggatgtgtccatcgagatgccagaggagctcgacatctcccagttgaggggcacagggctgcagcccggagaggaggagctgccagacattgccccacccctggtcactccggatgagcccaaaggtagccttggtttctatggcaacgaagacgaagactccttctgctcccctcacttctcctctccgacatcgcccatgctggatgaatcagtcatcatccagctggtggagatgggattccctatggacgcctgccgcaaagctgtctactacacgggcaacagcggggctgaggccgccatgaactgggtcatgtcacacatggatgatccagattttgcaaaccccctcatcctgcctggctctagtgggccgggctccacaagcgcagcagccgacccccctcctgaggactgtgtgaccaccattgtctccatgggcttctcccgggaccaggccttgaaagcgctgcgggccacgaacaatagtttagaacgggctgtggactggatcttcagtcacattgacgacctggatgctgaagctgccatggacatctcagagggccgctcagctgccgactccatctctgagtctgtgccagtgggacctaaagtccgggatggtcctggaaagtatcagctctttgccttcattagtcacatgggcacctctaccatgtgtggtcactacgtctgccacatcaagaaagaaggcagatgggtgatctacaatgaccagaaagtgtgtgcctccgagaagccgcccaaggacctgggctacatctacttctaccagagagtggccagctaagagcctgcctcaccccttaccaatgagggcaggggaagaccacctggcatgagggagaggggctgagggatggacttcagcccctctgctctgtaccctttttccttttgtccccggcagcagggaagaagctggaggccgtgggagaatggctgggcagagcagaggggcagcgatagactctggggatggagcaggacggggacgggaggggccggccacctgtctgtaaggagactttgttgcttcccctgcccccggaatccacagtgctctgcttctctgtgtcgccccgcccagccccctggtgtggagggaggggtctcgtttgtgcgcgtgggtgtagctttgtgcatcctctcccagtggagcgatcacctgtgcctcccctccccctttgtttgcccctgtgtggttggtcaaggagggatgtgagggaaatagggaccccccgacttgccctcctgcctcagtctttcccccaccctgtctcttccttgtccttctctggaaaatgccaaaatacacgatgtgaataaaagtacaacggct

SEQ ID NO: 31954 - DNA, 1406 bp, Homo Sapiens
aaagagatatagtccctgcttccgtgatggggaaccgaggcagagagtcctgcaggagtctgagctgaggctgttttacctctaggcctgagcatggtattttaacagggagcatcttgtcacctgtgactaggccagacctcttggggatctggagagtccggggatctgtgcttattctgttccctccctccccctgcagtcatcccagggcgggggacacaggacgctcctgtatggccatgccatcctgctccggcatgcacacagccgcatggtgagtgcaacctcggtgggcgtgggcaggggccagggcatgtggggcctgctagaaggaggctgacctccctctacaaccctagtatctgagctgcctcaccacctcccgctccatgactgacaagctggccttcgatgtgggactgcaggaggacgcaacaggtgcagcagctggaggggctgggggtgtgaaggggccccgcagcagggattcagggggtagaaggtctgcagaacgccaaggcaagcatgagactaccctggggacatgaaggggggcttcgtagcagagagagtctgcggtacagtccagacagggagacagacacacgttggggaccactaggcagagagtctgaagtcaggaacggggaactgttaggcagagagttggtggcagtgataggagagttgtgggccaaggcccgggaggcctggtggagggagagccctggggaagagcattctgggaagccatcatctgacagccacccccattccatccccacccataggagaggcttgctggtggaccatgcacccagcctccaagcagaggtctgaaggagaaaaggtccgcgttggggatgacatcatccttgtcagtgtctcctccgagcgctacctggtgagccattgcggttcctcctgctcccaggtctgggggcgcatgggatggtccccatcttctcaccatgggtttgcctggctgatctcccacccccaaggtcctgactcccaatttcccatttcctgacccctgacatccaattttctgatttctgacctcccattgcccgacttgatcatttcctgatctgtgatctctgatgactctgtctcccatctgccggtttccgggtatccacccttgatttctggcctctgacgctgggactctcgcccacccctgcaatcgtctctgactgccgcatcctggtggcccccagcacctgtcgaccgccagtggggagctccaggttgacgcttccttcatgcagacactgtggaacatgaaccccatctgctcccgctgcgaagagggtgagggccccagacctccccctaaatggagatccccccaaaacagacccttaatgttgcccttcaggcataccaaatggagc

SEQ ID NO: 31955 - DNA, 5926 bp, Homo Sapiens
ccggctgcctctgctgcagttcagagcaacttcaggagcttcccagccgagagcttcaggacgcctttcctgtcccactggcccagttgccacaacaaacaacagagaagacggtgaccatgggggatgtgaagctggttgcctcgtcacacatttccaaaacctccctcagtgtggatccctcaagagttgactccatgcccctgacagaggcccctgctttcattttgccccctcggaacctctgcatcaaagaaggagccaccgccaagttcgaagggcgggtccggggttacccagagccccaggtgacatggcacagaaacgggcaacccatcaccagcgggggccgcttcctgctggattgcggcatccgggggactttcagccttgtgattcatgctgtccatgaggaggacaggggaaagtatacctgtgaagccaccaatggcagtggtgctcgccaggtgacagtggagttgacagtagaaggaagttttgcgaagcagcttggtcagcctgttgtttccaaaaccttaggggatagattttcagcttcagcagtggagacccgtcctagcatctggggggagtgcccaccaaagtttgctaccaagctgggccgagttgtggtcaaagaaggacagatgggacgattctcctgcaagatcactggccggccccaaccgcaggtcacctggctcaagggaaatgttccactgcagccgagtgcccgtgtgtctgtgtctgagaagaacggcatgcaggttctggaaatccatggagtcaaccaagatgacgtgggagtgtacacgtgcctggtggtgaacgggtcggggaaggcctcgatgtcagctgaactttccatccaaggtttggacagtgccaataggtcatttgtgagagaaacaaaagccaccaattcagatgtcaggaaagaggtgaccaatgtaatctcaaaggagtcgaagctggacagtctggaggctgcagccaaaagcaagaactgctccagcccccagagaggtggctccccaccctgggctgcaaacagccagcctcagcccccaagggagtccaagctggagtcatgcaaggactcgcccagaacggccccgcagaccccggtccttcagaagacttccagctccatcaccctgcaggccgcaagagttcagccggaaccaagagcaccaggcctgggggtcctatcaccttctggagaagagaggaagaggccagctcctccccgtccagccaccttccccaccaggcagcctggcctggggagccaagatgttgtgagcaaggctgctaacaggagaatccccatggagggccagagggattcagcattccccaaatttgagagcaagccccaaagccaggaggtcaaggaaaatcaaactgtcaagttcagatgtgaagtttccgggattccaaagcctgaagtggcctggttcctggaaggcacccccgtgaggagacaggaaggcagcattgaggtttatgaagatgctggctcccattacctctgcctgctgaaagcccggaccagggacagtgggacatacagctgcactgcttccaacgcccaaggccaggtgtcctgtagctggaccctccaagtggaaaggcttgccgtgatggaggtggccccctccttctccagtgtcctgaaggactgcgctgttattgagggccaggattttgtgctgcagtgctccgtacgggggaccccagtgccccggatcacttggctgctgaatgggcagcccatccagtacgctcgctccacctgcgaggccggcgtggctgagctccacatccaggatgccctgccggaggaccatggcacctacacctgcctagctgagaatgccttggggcaggtgtcctgcagcgcctgggtcaccgtccatgaaaagaagagtagcaggaagagtgagtaccttctgcctgtggctcccagcaagcccactgcacccatcttcctgcagggcctctctgatctcaaagtcatggatggaagccaggtcactatgactgtccaagtgtcagggaatccaccccctgaagtcatctggctgcacaatgggaatgagatccaagagtcagaggacttccactttgaacagagaggaactcagcacagcctttggatccaggaagtgttcccggaggacacgggcacgtacacctgcgaggcctggaacagcgctggagaggtccgcacccaggccgtgctcacggtacaagagcctcacgatggcacccagccctggttcatcagtaagcctcgctcagtgacagcctccctgggccagagtgtcctcatctcctgcgccatagctggtgacccctttcctaccgtgcactggctcagagatggcaaagccctctgcaaagacactggccacttcgaggtgcttcagaatgaggacgtgttcaccctggttctaaagaaggtgcagccctggcatgccggccagtatgagatcctgctcaagaaccgggttggcgaatgcagttgccaggtgtcactgatgctacagaacagctctgccagagcccttccacgggggagggagcctgccagctgcgaggacctctgtggtggaggagttggtgctgatggtggtggtagtgaccgctatgggtccctgaggcctggctggccagcaagagggcagggttggctagaggaggaagacggcgaggacgtgcgaggggtgctgaagaggcgcgtggagacgaggcagcacactgaggaggcgatccgccagcaggaggtggagcagctggacttccgagacctcctggggaagaaggtgagtacaaagaccctatcggaagacgacctgaaggagatcccggccgagcagatggatttccgtgccaacctgcagcggcaagtgaagccaaagactgtgtctgaggaagagaggaaggtgcacagcccccagcaggtcgattttcgctctgtcctggccaagaaggggacttccaagacccccgtgcctgagaaggtgccaccgccaaaacctgccaccccggattttcgctcagtgctgggtggcaagaagaaattaccagcagagaatggcagcagcagtgccgagaccctgaatgccaaggcagtggagagttccaagcccctgagcaatgcacagccttcagggcccttgaaacccgtgggcaacgccaagcctgctgagaccctgaagccaatgggcaacgccaagcctgccgagaccctgaagcccatgggcaatgccaagcctgatgagaacctgaaatccgctagcaaagaagaactcaagaaagacgttaagaatgatgtgaactgcaagagaggccatgcagggaccacagataatgaaaagagatcagagagccaggggacagccccagccttcaagcagaagctgcaagatgttcatgtggcagagggcaagaagctgctgctccagtgccaggtgtcttctgaccccccagccaccatcatctggacgctgaatggaaagaccctcaagaccaccaagttcatcatcctctcccaggaaggctcactctgctccgtctccatcgagaaggcactgcctgaggacagaggcttatacaagtgtgtagccaagaatgacgctggccaggcggagtgctcctgccaagtcaccgtggatgatgctccagccagtgagaacaccaaggccccagagatgaaatcccggaggcccaagagctctcttcctcccgtgctaggaactgagagtgatgcgactgtgaaaaagaaacctgcccccaagacacctccgaaggcagcaatgccccctcagatcatccagttccctgaggaccagaaggtacgcgcaggagagtcagtggagctgtttggcaaagtgacaggcactcagcccatcacctgtacctggatgaagttccgaaagcagatccaggaaagcgagcacatgaaggtggagaacagcgagaatggcagcaagctcaccatcctggccgcgcgccaggagcactgcggctgctacacactgctggtggagaacaagctgggcagcaggcaggcccaggtcaacctcactgtcgtggataagccagaccccccagctggcacaccttgtgcctctgacattcggagctcctcactgaccctgtcctggtatggctcctcatatgatgggggcagtgctgtacagtcctacagcatcgagatctgggactcagccaacaagacgtggaaggaactagccacatgccgcagcacctctttcaacgtccaggacctgctgcctgaccacgaatataagttccgtgtacgtgcaatcaacgtgtatggaaccagtgagccaagccaggagtctgaactcacaacggtaggagagaaacctgaagagccgaaggatgaagtggaggtgtcagatgatgatgagaaggagcccgaggttgattaccggacagtgacaatcaatactgaacaaaaagtatctgacttctacgacattgaggagagattaggatctgggaaatttggacaggtctttcgacttgtagaaaagaaaactcgaaaagtctgggcagggaagttcttcaaggcatattcagcaaaagagaaagagaatatccggcaggagattagcatcatgaactgcctccaccaccctaagctggtccagtgtgtggatgcctttgaagaaaaggccaacatcgtcatggtcctggagatcgtgtcaggaggggagctgtttgagcgcatcattgacgaggactttgagctgacggagcgtgagtgcatcaagtacatgcggcagatctcggagggagtggagtacatccacaagcagggcatcgtgcacctggacctcaagccggagaacatcatgtgtgtcaacaagacgggcaccaggatcaagctcatcgactttggtctggccaggaggctggagaatgcggggtctctgaaggtcctctttggcaccccagaatttgtggctcctgaagtgatcaactatgagcccatcggctacgccacagacatgtggagcatcggggtcatctgctacatcctagtcagtggcctttcccccttcatgggagacaacgataacgaaaccttggccaacgttacctcagccacctgggacttcgacgacgaggcattcgatgagatctccgacgatgccaaggatttcatcagcaatctgctgaagaaagatatgaaaaaccgcctggactgcacgcagtgccttcagcatccatggctaatgaaagataccaagaacatggaggccaagaaactctccaaggaccggatgaagaagtacatggcaagaaggaaatggcagaaaacgggcaatgctgtgagagccattggaagactgtcctctatggcaatgatctcagggctcagtggcaggaaatcctcaacagggtcaccaaccagcccgctcaatgcagaaaaactagaatctgaagaagatgtgtcccaagctttccttgaggctgttgctgaggaaaagcctcatgtaaaaccctatttctctaagaccattcgcgatttagaagttgtggagggaagtgctgctagatttgactgcaagattgaaggatacccagaccccgaggttgtctggttcaaagatgaccagtcaatcagggagtcccgccacttccagatagactacgatgaggacgggaactgctctttaattattagtgatgtttgcggggatgacgatgccaagtacacctgcaaggctgtcaacagtcttggagaagccacctgcacagcagagctcattgtggaaacgatggaggaaggtgaaggggaaggggaagaggaagaagagtgaaacaaagccagagaaaagcagtttctaagtcatattaaaaggactatttctctcaaaatcca

SEQ ID NO: 31956 - DNA, 3669 bp, Homo Sapiens
ccgaggaggcatgcaagcgagacattgagttgctgctgaaactcattgcaaacctcaacatgctcttgagggacgagaatgtgaacgtggtgaagaaggctatcctcaccatgacccagctctacaaggtggccctgcagtggatggtaaagtcacgggtaattagcgagctacaggaggcctgctgggacatggtatctgccatggcgggggacatcatcctgctattggactctgacaatgacggcatccgcacccacgccatcaagtttgtggagggcctcattgtcaccctgtcaccccgcatggctgactcagagataccccgacgccaggagcatgatatcagcctggaccgcatccctcgtgaccacccctacatccagtacaacgtgctatgggaagagggcaaggcagccttggagcagctgcttaagttcatggtgcaccctgccatctcctccatcaacctgaccacagcgctgggctcccttgccaatatcgcccgccagagacccatgttcatgtctgaggtgatccaggcctatgaaactctgcatgccaacctgcccccgacgctggccaaatcgcaggtgagcagtgtgcgtaagaatctgaagctgcacctgttgagtgtgctgaagcacccggcttccttggagttccaggcccagatcaccaccctgctggtggacctgggcacacctcaggccgagatcgcccgcaacatgccgagcagcaaggacacccgcaagcggccccgcgatgactcggactccacactcaagaagatgaagctggagcccaacctgggggaggacgatgaggacaaagacttggagccaggcccgtcggggacctcgaaggcctcagcgcagatctccggccagtcagacacggacatcacagctgagttcctgcagcctctgctgacgcctgataatgtggctaatctggtcctcatcagcatggtgtacctacccgaggccatgccagcctccttccaggccatctacacccccgtggagtcagcaggcacggaagcccagatcaagcacctggctcggctcatggccacacagatgacagctgccggactgggaccaggtgtagagcagaccaaacagtgcaaggaggagcccaaggaggagaaggtggtgaagacagagagcgtcctgatcaagcggcgcctgtcagcccagggccaagccatctcggtggtgggttccctgagctccatgtcccccctggaggaagaggcaccgcaggccaagaggaggccagagcccattatccctgtcactcagccccggctggcaggcgctggtgggcgcaagaaaattttccgtctcagcgacgtgctgaagccccttaccgatgcccaggtggaagccatgaagctgggcgctgtgaagcggatcctgcgggctgagaaggctgtggcctgcagcggggcagcccaggtccgcataaagatcctggccagcctggtgacacagttcaactcgggcctgaaggcggaggtcctgtccttcatcctggaggatgtgcgggcccgcctggacctggccttcgcctggctctaccaggagtacaacgcctacctggccgcaggtgcctcgggctccctggacaagtatgaggactgcctcatccgcctgttgtctggcctgcaggagaaaccagaccagaaggatgggatcttcaccaaggttgtgctggaggcgccactcatcacagagagtgccctggaggtggtccgcaagtactgcgaggatgagagtcgcacctatctgggcatgtccacacttcgagacctgatcttcaagcgcccgtcccgccagttccagtacctgcatgtcctcctcgacctcagctcccatgagaaggacaaggtgcgctcccaggccctgctgttcatcaaacgcatgtatgagaaggagcagctgcgggagtatgtggagaaatttgccctcaactacctgcagctcctggtgcaccccaacccaccgtctgtgctgtttggagctgacaaggacacagaggtggcagcaccctggacggaggagacagtgaagcagtgtctgtacctctacctggccctcctgcctcagaaccacaagctgatccacgaactggcggccgtgtacactgaagccatcgccgacatcaagcggacggtgctgagggtcattgagcagccgatccgaggaatgggcatgaactccccggagctgctcctgctggtggaaaattgtcccaagggagcagagacactggtcacgagatgtctgcacagcctcacagacaaagtcccaccctccccagagctggtgaagcgggtccgggatctctaccacaagcgactgccagacgtccgcttcctcatcccggtgctcaatgggctggagaagaaagaggtgatccaggccctgcctaaactcatcaaactcaaccccatcgtggtgaaggaagtcttcaaccgcctgctgggcacccagcatggtgagggaaactcagccttgtccccgctgaaccctggagagctcctgatcgcattacacaacattgactccgtgaagtgcgacatgaaatccatcatcaaagccaccaacctgtgctttgcggagcggaacgtgtacacgtcagaggtgctggccgtggtgatgcagcagctgatggagcagagccccctgcccatgctgctcatgaggaccgtcatccagtccctgaccatgtacccccgcctggggggcttcgtcatgaacatcctgtcccgcctcatcatgaagcaggtgtggaagtaccccaaggtgtgggagggcttcatcaagtgctgccagcgcacaaagccccagagcttccaggtcatcctgcagctgccgccccagcagctgggagccgtctttgacaagtgcccagagctccgggagcccctgctggcccatgtccgctccttcaccccccaccagcaagctcacatccctaactccatcatgaccatcttggaggccagcggcaagcaggagccagaggccaaggaggcgcctgcggggcccttggaggaggatgatctggagcccctgaccttggccccggccccagcaccccggccccctcaggacctcatcggcctgcgactggcccaggagaaggccttaaagcggcagctggaggaggaacagaagctgaagccgggaggagtgggagccccctcctcttcctccccctctccctctccgtcggcccggccaggcccgcccccgtctgaggaagccatggatttccgggaggaggggcctgagtgcgagaccccgggcatcttcatcagcatggatgacgactcggggctgaccgaggccgcgctgttggactctagtctcgagggccccctacccaaggagacggcagcgggcgggctgaccttgaaggaggagcggagcccccagaccctcgcacctgttggagaagatgctatgaagactcccagcccggctgccgaggacgccagggaacccgaggccaaggggaacagctgacggggctcgagggggaaagggggtgggacagggactcggggctgggggacggggcggggcttgacctgcgggtgctttgccttaaaaagaaataaaagatgtgaacttggaaaaaaaaaaaaaaaaaaag

SEQ ID NO: 31957 - DNA, 6858 bp, Homo Sapiens
atgtctctgaggagcggcgggcggcggcgcgcggacccaggcgcggatggcgaggccagcagggatgatggcgccacttcctcagtttcggcactcaagcgcctggaacggagtcagtggacggataagatggatttgcggtttggttttgagcggctgaaggagcctggtgagaagacaggctggctcattaacatgcatcctaccgagattttagatgaagataagcgcttaggcagtgcagtggattactactttattcaagatgacggaagcagatttaaggtggctttgccctataaaccgtatttctacattgcgaccagaaagggttgtgagcgagaagtttcatcttttctctccaagaagtttcagggcaaaattgcaaaagtggagactgtccccaaagaggatctggacttgccaaatcacttggtgggtttgaagcgaaattacatcaggctgtccttccacactgtggaggatcttgtcaaagtgaggaaggagatctcccctgccgtgaagaagaacagggagcaggatcacgccagcgacgcgtacacagctctgctttccagtgttctgcagaggggcggtgtcattactgatgaagaggaaacctctaagaagatagctgaccagttggacaacattgtggacatgcgcgagtacgatgttccctaccacatccgcctctccattgacctgaagatccacgtggctcattggtacaatgtcagataccgaggaaatgcttttccggtagaaatcacccgccgagatgaccttgttgaacgacctgaccctgtggttttggcatttgacattgagacgaccaaactgcccctcaagtttcctgatgctgagacagaccagattatgatgatttcctacatgatcgatggccagggctacctcatcaccaacagggagattgtttcagaagatattgaagattttgagttcacccccaagccagaatatgaaggccccttttgtgtcttcaatgaacccgatgaggctcatctgatccaaaggtggtttgaacacgtccaggagaccaaacccaccatcatggtcacctacaacggggacttttttgactggccatttgtggaggcccgggcagcagtccacggtctgagcatgcagcaggagataggcttccagaaggacagccagggggagtacaaggcgccccagtgcatccacatggactgcctcaggtgggtgaagagggacagttaccttcctgtgggcagtcataatctcaaggcggccgcaagcaagctaggctatgatcccgtggagctagacccggaggacatgtgccggatggccacggagcagccccagactctggccacgtattctgtgtcagatgctgtcgccacttactacctgtacatgaagtacgtccacccattcatctttgctctgtgcaccattattcccatggagcccgacgaggtgctgcggaagggctctggcactctgtgtgaggccttgctgatggtgcaggccttccacgccaacatcatcttccccaacaagcaagagcaggagttcaataagctgacggacgacggacacgtgctggactctgagacctacgtcgggggccacgtggaggccctcgagtctggggttttccgcagcgatatcccttgccggtttaggatgaatcctgccgcctttgacttcctgctgcagcgggttgagaagaccttgcgccacgcccttgaggaagaggagaaagtgcctgtggagcaagtcaccaactttgaagaggtgtgtgatgagattaagagcaagcttgcctccctgaaggacgttcccagccgcatcgagtgtccactcatctaccacctggacgtgggggccatgtaccccaacatcatcctgaccaaccgcctgcagccctctgccatggtggacgaagccacctgtgctgcctgtgacttcaataagcctggagcaaactgccagcggaagatggcctggcagtggaggggcgagttcatgccagccagtcgcagcgaataccatcggatccagcaccagctggagtcagagaagttcccccccttgttcccagaggggccagctcgggcctttcatgaactgtcccgcgaggaacaggcgaaatacgagaagagaaggctggcggattactgccggaaagcctacaagaagatccacatcaccaaggtggaagagcgtctcaccaccatctgccagcgggaaaactccttctacgtggacaccgtgcgtgccttccgggacaggcgttacgagttcaaagggctccacaaggtgtggaaaaagaagctctcggcggccgtggaggtgggcgacgcggctgaggtgaagcgctgcaagaacatggaggtgctgtatgactcgctgcagctggcccacaagtgcatcctgaactccttctatggctatgtcatgcgcaagggggctcgctggtactccatggagatggctggcatcgtctgcttcacaggggccaacatcatcacccaggcacgggagctgatcgagcagattgggaggcccttagagctggacacagatggtatatggtgcgtcctgcccaacagcttcccagaaaattttgtcttcaagacgaccaatgtgaagaagcccaaagtgaccatctcctacccaggcgccatgttgaacatcatggtcaaggaaggcttcaccaatgaccagtaccaggagctggctgagccgtcctcactcacctacgtcacccgctcagagaacagcatcttttttgaggttgatgggccctaccttgccatgattcttccagcctccaaggaagaaggcaagaaattgaagaagaggtatgctgtgttcaatgaagacggttctctggctgagctcaagggctttgaggtcaaacgccgcggggaactgcagctgattaagatcttccaatcctcggtgtttgaggccttcctcaagggcagcacgctggaagaggtgtatggctctgtagccaaggtggctgactactggctggacgtgctgtacagcaaggcagccaacatgcctgactctgagctattcgagctcatctctgagaaccgttccatgtctcggaaactggaagattacggggagcagaagtctacatccatcagcacagcaaagcgcctggccgagttcctgggagaccagatggtcaaggatgcagggctgagttgccgctacatcatctcccgcaagcccgagggctcccctgtcacggagagggccatcccacttgccattttccaagcagagcccacggtgaggaagcactttctccggaaatggctcaagagctcttcccttcaagactttgatattcgagcaattctggattgggactactacattgagcggctgggaagcgccatccagaagatcatcaccatccctgcggccctgcagcaggtaaagaacccagtgccacgtgtcaaacaccccgactggctgcacaaaaaactgctggagaagaatgatgtctacaagcagaagaagatcagtgagctcttcaccctggagggcaggagacaggtcacgatggccgaggcctcagaagacagtccgaggccaagtgctcctgacatggaggacttcggcctcgtaaagctgcctcacccagcagcccctgtcactgtgaagaggaagcgagttctttgggagagccaggaggagtcccaggacctcacgccgactgtgccctggcaggaaatcttggggcagcctcccgccctgggaaccagccaggaggaatggcttgtctggctccggttccacaagaagaagtggcagctgcaggcccggcagcgcctcgcccgcaggaagaggcagcgtctggagtcggcagatggtgtgctcaggcccggggccatccgggatggtcctgccacggggctggggagcttcttgcgaagaactgcccgcagcatcctggaccttccgtggcagattgtgcagatcagcgagaccagccaggccggcctgttcaggctgtgggcgctcgttggcagtgacttgcactgcatcaggctgagcatcccccgtgtgttctacgtgaaccagcgagtcgctaaagcggaggagggtgcttcgtatcgcaaggtaaatcgggtccttcctcgctccaacatggtctacaatctctatgagtattcagtgccagaggacatgtaccaggaacacatcaacgagatcaacgctgagctgtcagcgccagacatcgagggcgtatatgagactcaggttccgttactgttccgggccctggtgcacctgggctgtgtgtgtgtggtcaataaacagctggtgaggcacctttcaggctgggaagcagagacctttgctcttgagcacctggagatgcgctctctggcccagttcagctacctggaaccagggagtatccgccatatctacctgtaccaccacgcacaggcccacaaagcgctcttcgggatcttcatcccctcacagcgcagggcatccgtctttgtgctggacactgtgcgcagcaaccagatgcccagccttggcgccctgtactcagcagagcacggcctcctcctggagaaggtgggccctgagctcctgccaccccccaaacacaccttcgaagttcgggcagaaactgacctgaagaccatctgcagagccatccagcgattcctgctcgcctacaaggaggagcgccgggggcccacactcatcgctgttcagtccagctgggagctgaagaggctggccagtgaaattcctgtcttggaggaattcccactggtgcctatctgtgtggctgacaagatcaactatggggtcctggactggcagcgccatggagcccggcgcatgatccgtcactacctcaacctggacacctgcctgtcgcaggccttcgagatgagcaggtactttcacattcccattgggaacctaccagaggacatctccacattcggctccgacctcttctttgcccgccacctccagcgtcacaaccacctgctctggctgtcccctacagcccgccctgacctgggtggaaaggaggctgatgacaactgtcttgtcatggagttcgatgaccaagccactgttgagatcaacagttcaggctgttactccacagtgtgtgtggagctggaccttcagaacctggccgtcaacaccattctccagtctcaccatgtcaacgacatggagggggccgacagcatggggatcagcttcgacgtgatccagcaggcctccctggaggacatgatcacgggtggtcaggctgccagtgccccggccagctacgatgagacagccctgtgctctaacaccttcaggatcctgaagagcatggtcgtgggctgggtgaaggagatcacccagtaccacaacatctatgcagacaaccaggtgatgcacttctaccgctggcttcggtcgccatcctctctgcttcatgaccctgccctgcaccgcacactccacaacatgatgaagaagctcttcctgcagctcatcgctgagttcaagcgcctggggtcatcagtcatctacgccaacttcaaccgcatcatcctctgtacaaagaagcgccgtgtggaagatgccatcgcttacgtggagtacatcaccagcagcatccattcaaaggagaccttccattctctgacaatttctttctctcgatgctgggaatttcttctctggatggatccatctaactatggcggaatcaaaggaaaagtttcatctcgtattcactgtggactgcaagactcccagaaagcagggggagcagaggatgagcaggaaaatgaggacgatgaggaggaaagagatggggaggaggaggaagaggcggaggaatccaacgtggaggatttactggaaaacaactggaacattttgcagtttttgccacaggcagcctcctgccagaactacttcctcatgattgtttcagcgtacatcgtggccgtgtaccactgcatgaaggacgggctgaggcgcagtgctccagggagcacccccgtgaggaggaggggggccagccagctctcccaggaggccgagggggcggtcggagcccttcccggaatgatcaccttctctcaggattatgtcgcaaatgagctcactcagagcttcttcaccatcactcagaagattcagaagaaagtcacaggctctcggaactccactgagctctcggagatgtttcctgtcctccccggttcccacttgctgctcaataaccctgccctggagttcatcaaatacgtgtgcaaggtgctgtccctggacaccaacatcacaaaccaggtgaataagctgaaccgagacctgcttcgcctggtggatgtcggcgagttctccgaggaggcccagttccgagacccctgccgctcctacgtgcttcctgaggtcatctgccgcagctgtaacttctgccgcgacctggacctgtgtaaagactcttccttctcagaggatggggcggtcctgcctcagtggctctgctccaactgtcaggcgccctacgactcctctgccatcgagatgacgctggtggaagttctacagaagaagctgatggccttcaccctgcaggacctggtctgcctgaagtgccgcggggtgaaggagaccagcatgcctgtgtactgcagctgcgcgggagacttcgccctcaccatccacacccaggtcttcatggaacagatcggaatattccggaacattgcccagcactacggcatgtcgtacctcctggagaccctggagtggctgctgcagaagaacccacagctgggccattag

SEQ ID NO: 31958 - DNA, 2562 bp, Homo Sapiens
gcgtcgttctcctcctgcgcgaggcggccaaggcctgctggtccggagccgcgcctccacccgcgcgaggtatcgtccttggagaagatggaagcggagaggcggccggcgccgggctcgccctccgagggcctgtttgcggacgggcacctgatcttgtggacgctgtgctcggtcctgctgccggtgttcatcaccttctggtgtagcctccagcggtcgcgccggcagctgcaccgcagggacatcttccgcaagagcaagcacgggtggcgcgacacggacctgttcagccagcccacctactgctgcgtgtgcgcgcagcacattctgcagggcgccttctgcgactgctgcgggctccgcgtggacgagggctgcctcaggaaggccgacaagcgcttccagtgcaaggagattatgctcaagaatgacaccaaggtcctggacgccatgccccaccactggatccggggcaacgtgcccctgtgcagttactgtatggtttgcaagcagcagtgtggctgtcaacccaagctttgcgattacaggtgcatttggtgccagaaaacagtacatgatgagtgcatgaaaaatagtttaaagaatgaaaaatgtgattttggagaattcaaaaacctaatcattccaccaagttatttaacatccattaatcagatgcgtaaagacaaaaaaacagattatgaagtgctagcctctaagcttggaaagcagtggaccccattaataatcctggccaactctcgtagtggaactaatatgggagaaggactgttgggagaatttaggatcttgttgaatccagtccaggtttttgatgtaactaaaactcctcctatcaaagccctacaactctgtactcttctcccatattattcagctcgagtacttgtttgtggaggggatgggactgtagggtgggtcctggatgcagttgatgacatgaagattaagggacaagaaaagtacattccacaagttgcagttttgcctctgggaacaggcaacgatctatccaatacattgggttggggtacaggttatgctggagaaattccagttgcgcaggttttgcgaaatgtaatggaagcagatggaattaaactagatcgatggaaagttcaagtaacaaataaaggatactacaacttaagaaaacccaaggaattcacaatgaacaactatttttctgttggacctgatgctctcatggctctcaattttcatgctcatcgtgagaaggcaccatctctgttttctagcagaattcttaataaggcggtttacttattctatggaaccaaagattgtttagtgcaagaatgtaaagatttgaataaaaaagttgagctagaactggatggtgagcgagtagcactgcccagcttggaaggtattatagttctgaacatcggatactggggcggtggctgcagactatgggaagggatgggggacgagacttaccctctagccaggcatgacgatggtctgctggaagtcgttggagtatatgggtctttccactgtgctcagattcaagtaaaactggctaatccttttcgaataggacaggcacatacagtgaggctgattttgaagtgctccatgatgccaatgcaggtggatggggagccttgggcccaagggccctgcactgtcaccataactcacaagacacatgcaatgatgttatatttctctggagaacaaacagatgatgacatctctagtacttcggatcaagaagatataaaggcgactgaatagatggatgagggagtgaaaactttgcatagaatcctcacgcaagtagatacatgttcatccaaaagtattaatagaaattctctatcagctattcagtcttaatttcactagtagtataatgggtatacatttttgtaaatagcatccccaaaccagccagccttcagttatttacaaatgtttgtccttttttcagcaaaatacttcaaatgaatagtattaacttacaaaaagtcacgaaaaacttacatgagagtgaaaatttgttatgactgttttgagagtgggactcactctgaagtatgtgctgtctcatgtcttatttttgaaccatgcatatgatggacacacaatggatggacacattatatctccaacaaggtgtgggtggaaagatcaaattaacctgcttttttgaaaggaaatgattactgtcaaaccagcatggttaattgtgagcatcctctgcagcatgccccttaagattttctacaacccaaaccaagtgtatgtattgatttctaggaacccccaaaaggagaatagtaaaaaaagatcatacttaaaatttgtattacaatttttattttaggaacttattcagacacgtaaatgttgtttaattctgtaggtaaccatttgagctgcaattcaggatcttttttataacaccagtgtagccaaaagagaaacagataagtgaattggtaagaaataagattcagagcacttgggattgtaagttataggttctgagctgaactgtttatc

SEQ ID NO: 31959 - DNA, 8210 bp, Homo Sapiens
gcctccacacggctccgtcgggcgccgcgctcttccggcagcggtagctttggagacgccgggaacccgcgttggcgtggttgactagtgcctcgcagcctcagcatgggggaacatggcctggagctggcttccatgatccccgccctgcgggagctgggcagtgccacaccagaggaatataatacagttgtacagaagccaagacaaattctgtgtcaattcattgaccggatacttacagatgtaaatgttgttgctgtagaacttgtaaagaaaactgactctcagccaacctccgtgatgttgcttgatttcatccagcatatcatgaaatcctccccacttatgtttgtaaatgtgagtggaagccatgaggccaaaggcagttgtattgaattcagtaattggatcataacgagacttctgcggattgcagcaactccctcctgtcatttgttacacaagaaaatctgtgaagtcatctgttcattattatttctttttaaaagcaagagtcctgctatttttggggtactcacaaaagaattattacaactttttgaagacttggtttacctccatagaagaaatgtgatgggtcatgctgtggaatggccagtggtcatgagccgatttttaagtcaattagatgaacacatgggatatttacaatcagctcctttgcagttgatgagtatgcaaaatttagaatttattgaagtcactttattaatggttcttactcgtattattgcaattgtgttttttagaaggcaagaactcttactttggcagataggttgtgttctgctagagtatggtagtccaaaaattaaatccctagcaattagctttttaacagaactttttcagcttggaggactaccagcacaaccagctagcacttttttcagctcatttttggaattattaaaacaccttgtagaaatggatactgaccaattgaaactctatgaagagccattatcaaagctgataaagacactatttccctttgaagcagaagcttatagaaatattgaacctgtctatttaaatatgctgctggaaaaactctgtgtcatgtttgaagacggtgtgctcatgcggcttaagtctgatttgctaaaagcagctttgtgccatttactgcagtatttccttaaatttgtgccagctgggtatgaatctgctttacaagtcaggaaggtctatgtgagaaatatttgtaaagctcttttggatgtgcttggaattgaggtagatgcagagtacttgttgggcccactttatgcagctttgaaaatggaaagtatggaaatcattgaggagattcaatgccaaactcaacaggaaaacctcagcagtaatagtgatggaatatcacccaaaaggcgtcgtctcagctcgtctctaaacccttctaaaagagcaccaaaacagactgaggaaattaaacatgtggacatgaaccaaaagagcatattatggagtgcactgaaacagaaagctgaatcccttcagatttcccttgaatacagtggcctaaagaatcctgttattgagatgttagaaggaattgctgttgtcttacaactgactgctctgtgtactgttcattgttctcatcaaaacatgaactgccgtactttcaaggactgtcaacataaatccaagaagaaaccttctgtagtgataacttggatgtcattggatttttacacaaaagtgcttaagagctgtagaagtttgttagaatctgttcagaaactggacctggaggcaaccattgataaggtggtgaaaatttatgatgctttgatttatatgcaagtaaacagttcatttgaagatcatatcctggaagatttatgtggtatgctctcacttccatggatttattcccattctgatgatggctgtttaaagttgaccacatttgccgctaatcttctaacattaagctgtaggatttcagatagctattcaccacaggcacaatcacgatgtgtgtttcttctgactctgtttccaagaagaatattccttgagtggagaacagcagtttacaactgggccctgcagagctcccatgaagtaatccgggctagttgtgttagtggattttttatcttattgcagcagcagaattcttgtaacagagttcccaagattcttatagataaagtcaaagatgattctgacattgtcaagaaagaatttgcttctatacttggtcaacttgtctgtactcttcacggcatgttttatctgacaagttctttaacagaacctttctctgaacacggacatgtggacctcttctgtaggaacttgaaagccacttctcaacatgaatgttcatcttctcaactaaaagcttctgtctgcaagccattccttttcctactgaaaaaaaaaatacctagtccagtaaaacttgctttcatagataatctacatcatctttgtaagcatcttgattttagagaagatgaaacagatgtaaaagcagttcttggaactttattaaatttaatggaagatccagacaaagatgttagagtggcttttagtggaaatatcaagcacatattggaatccttggactctgaagatggatttataaaggagctttttgtcttaagaatgaaggaagcatatacacatgcccaaatatcaagaaataatgagctgaaggataccttgattcttacaacaggggatattggaagggccgcaaaaggagatttggtaccatttgcactcttacacttattgcattgtttgttatccaagtcagcatctgtctctggagcagcatacacagaaattagagctctggttgcagctaaaagtgttaaactgcaaagttttttcagccagtataagaaacccatctgtcagtttttggtagaatcccttcactctagtcagatgacagcacttccgaatactccatgccagaatgctgacgtgcgaaaacaagatgtggctcaccagagagaaatggctttaaatacgttgtctgaaattgccaacgttttcgactttcctgatcttaatcgttttcttactaggacattacaagttctactacctgatcttgctgccaaagcaagccctgcagcttctgctctcattcgaactttaggaaaacaattaaatgtcaatcgtagagagattttaataaacaacttcaaatatattttttctcatttggtctgttcttgttccaaagatgaattagaacgtgcccttcattatctgaagaatgaaacagaaattgaactggggagcctgttgagacaagatttccaaggattgcataatgaattattgctgcgtattggagaacactatcaacaggtttttaatggtttgtcaatacttgcctcatttgcatccagtgatgatccatatcagggcccgagagatatcatatcacctgaactgatggctgattatttacaacccaaattgttgggcattttggctttttttaacatgcagttactgagctctagtgttggcattgaagataagaaaatggccttgaacagtttgatgtctttgatgaagttaatgggacccaaacatgtcagttctgtgagggtgaagatgatgaccacactgagaactggccttcgattcaaggatgattttcctgaattgtgttgcagagcttgggactgctttgttcgctgcctggatcatgcttgtctgggctcccttctcagtcatgtaatagtagctttgttacctcttatacacatccagcctaaagaaactgcagctatcttccactacctcataattgaaaacagggatgctgtgcaagattttcttcatgaaatatattttttacctgatcatccagaattaaaaaagataaaagccgttctccaggaatacagaaaggagacctctgagagcactgatcttcagacaactcttcagctctctatgaaggccattcaacatgaaaatgtcgatgttcgtattcatgctcttacaagcttgaaggaaaccttgtataaaaatcaggaaaaactgataaagtatgcaacagacagtgaaacagtagaacctattatctcacagttggtgacagtgcttttgaaaggttgccaagatgcaaactctcaagctcggttgctctgtggggaatgtttaggggaattgggggcgatagatccaggtcgattagatttctcaacaactgaaactcaaggaaaagattttacatttgtgactggagtagaagattcaagctttgcctatggattattgatggagctaacaagagcttaccttgcgtacgctgataatagccgagctcaagattcagctgcctatgccattcaggagttgctttctatttatgactgtagagagatggagaccaacggcccaggtcaccaattgtggaggagatttcctgagcatgttcgggaaatactagaacctcatctaaataccagatacaagagttctcagaagtcaaccgattggtctggagtaaagaagccaatttacttaagtaaattgggtagtaactttgcagaatggtcagcatcttgggcaggttatcttattacaaaggttcgacatgatcttgccagtaaaattttcacctgctgtagcattatgatgaagcatgatttcaaagtgaccatctatcttcttccacatattctggtgtatgtcttactgggttgtaatcaagaagatcagcaggaggtttatgcagaaattatggcagttctaaagcatgacgatcagcataccataaatacccaagacattgcatctgatctgtgtcaactcagtacacagactgtgttctccatgcttgaccatctcacacagtgggcaaggcacaaatttcaggcactgaaagctgagaaatgtccacacagcaaatcaaacagaaataaggtagactcaatggtatctactgtggattatgaagactatcagagtgtaacccgttttctagacctcataccccaggatactctggcagtagcttcctttcgctccaaagcatacacacgagctgtaatgcactttgaatcatttattacagaaaagaagcaaaatattcaggaacatcttggatttttacagaaattgtatgctgctatgcatgaacctgatggagtggccggagtcagtgcaattagaaaggcagaaccatctctaaaagaacagatccttgaacatgaaagccttggcttgctgagggatgccactgcttgttatgacagggctattcagctagaaccagaccagatcattcattatcatggtgtagtaaagtccatgttaggtcttggtcagctgtctactgttatcactcaggtgaatggagtgcatgctaacaggtccgagtggacagatgaattaaacacgtacagagtggaagcagcttggaaattgtcacagtgggatttggtggaaaactatttggcagcagatggaaaatctacaacatggagtgtcagactgggacagctattattatcagccaaaaaaagagatatcacagctttttatgactcactgaaactagtgagagcagaacaaattgtacctctttcagctgcaagctttgaaagaggctcctaccaacgaggatatgaatatattgtgagattgcacatgttatgtgagttggagcatagcatcaaaccacttttccagcattctccaggtgacagttctcaagaagattctctaaactgggtagctcgactagaaatgacccagaattcctacagagccaaggagcctatcctggctctccggagggctttactaagcctcaacaaaagaccagattacaatgaaatggttggagaatgctggctgcagagtgccagggtagctagaaaggctggtcaccaccagacagcctacaatgctctccttaatgcaggggaatcacgactcgctgaactgtacgtggaaagggcaaagtggctctggtccaagggtgatgttcaccaggcactaattgttcttcaaaaaggtgttgaattatgttttcctgaaaatgaaaccccacctgagggtaagaacatgttaatccatggtcgagctatgctactagtgggccgatttatggaagaaacagctaactttgaaagcaatgcaattatgaaaaaatataaggatgtgaccgcgtgcctgccagaatgggaggatgggcatttttaccttgccaagtactatgacaaattgatgcccatggtcacagacaacaaaatggaaaagcaaggtgatctcatccggtatatagttcttcattttggcagatctctacaatatggaaatcagttcatatatcagtcaatgccacgaatgttaactctatggcttgattatggtacaaaggcatatgaatgggaaaaagctggccgctccgatcgtgtacaaatgaggaatgatttgggtaaaataaacaaggttatcacagagcatacaaactatttagctccatatcaatttttgactgctttttcacaattgatctctcgaatttgtcattctcacgatgaagtttttgttgtcttgatggaaataatagccaaagtatttctagcctatcctcaacaagcaatgtggatgatgacagctgtgtcaaagtcatcttatcccatgcgtgtgaacagatgcaaggaaatcctcaataaagctattcatatgaaaaaatccttagagaagtttgttggagatgcaactcgcctaacagataagcttctagaattgtgcaataaaccggttgatggaagtagttccacattaagcatgagcactcattttaaaatgcttaaaaagctggtagaagaagcaacatttagtgaaatcctcattcctctacaatcagtcatgatacctacacttccatcaattctgggtacccatgctaaccatgctagccatgaaccatttcctggacattgggcctatattgcagggtttgatgatatggtggaaattcttgcttctcttcagaaaccaaagaagatttctttaaaaggctcagatggaaagttctacatcatgatgtgtaagccaaaagatgacctgagaaaggattgtagactaatggaattcaattccttgattaataagtgcttaagaaaagatgcagagtctcgtagaagagaacttcatattcgaacatatgcagttattccactaaatgatgaatgtgggattattgaatgggtgaacaacactgctggtttgagacctattctgaccaaactatataaagaaaagggagtgtatatgacaggaaaagaacttcgccagtgtatgctaccaaagtcagcagctttatctgaaaaactcaaagtattccgagaatttctcctgcccaggcatcctcctatttttcatgagtggtttctgagaacattccctgatcctacatcatggtacagtagtagatcagcttactgccgttccactgcagtaatgtcaatggttggttatattctggggcttggagaccgtcatggtgaaaatattctctttgattctttgactggtgaatgcgtacatgtagatttcaattgtcttttcaataagggagaaacctttgaagttccagaaattgtgccatttcgcctgactcataatatggttaatggaatgggtcctatgggaacagagggtctttttcgaagagcatgtgaagttacaatgaggctgatgcgtgatcagcgagagcctttaatgagtgtcttaaagacttttctacatgatcctcttgtggaatggagtaaaccagtgaaagggcattccaaagcgccactgaatgaaactggagaagttgtcaatgaaaaggccaagacccatgttcttgacattgagcagcgactacaaggtgtaatcaagactcgaaatagagtgacaggactgccgttatctattgaaggacatgtgcattaccttatacaggaagctactgatgaaaacttactatgccagatgtatcttggttggactccatatatgtgaaatgaaattatgtaaaagaatatgttaataatctaaaagtaatgcatttggtatgaatctgtggttgtatctgttcaattctaaagtacaacataaatttacgttctcagcaactgttatttctctctgatcattaattatatgtaaaataatatacattcactcgtgcc

SEQ ID NO: 31960 - DNA, 5656 bp, Homo Sapiens; identical to SEQ ID NO: 29628
  misc_feature (4528)..(4528): n is a, c, g, or t

SEQ ID NO: 31961 - DNA, 2418 bp, Homo Sapiens
caggcatacctcgttttattgcgcttcgctttattgcgcttcgcagatattgcgttttttacaaattgaaggtttgtggcaaccctgcgtcgagcaagtctatcggcgccatttttccaacagcatgtgctcacttcgtgtctctgtgtcacattttggtaattctcgcaatatttcaaactttttcattattattatatctgttatggtgatctgtgatcagtgatctttgatgttactattgtaattgttttggggcgccacgaaccgcgcccatataagacggcgaacttaatcgataaatgttgtgtgtgttctgactgctccaccgaccggccgttcccccgtctctctccctctcctcgggcctccctattccctgagacacaacaatattgaaattaggccaattaataaccctacaatggcctctaagtgttcaagtgaaaggaagagtcgcacgtctctcactttaaatcaaaagctagaaatgattaagcttagtgaggaaggcatgtcgaaagccgagataggccgaaagctaggcctcttgcgccaaacagttagccaagttgtgaatgcaaaggaaaagttcttgaaggaaattaaaagtgctactccagtgaacacacgaatgataagaaagcgaaacagccttattgctgatatggagaaagttttagtggtctggatagaagatcaaaccagccacaacattcccttaagccaaagcctaatccagagcaaggccctaactctcttcaattctatgaaggctgagagaggtgaggaagctgcagaagaaaagttggaagctagcagaggttggttcatgaggtttaaggaaagaagccgtctccataacataaaagtgcaaggtgaagcagcaagtgctgatggagaagctgcagcaagttatccagaagatctagctaagataattgatgaaggtggctacactaaacaacagattttcaatgtagacgaaacagccttctattggaagaagatgccatctaggactttcatagctagagaggagaagtcaatgcctggcttcaaagcttcaaaggacaggctgactctcttgttaggggctaatgcagctggtgactttaagttgaagccaatgctcatttaccattccgaaaatcctagggcccttaagaattatgctaaatctactctgcctgtgctctataaatggaacaacaaagcctggatgacagcacatctgtttacagcatggtttactgaatattttaagcccactgttgagacctactgctcagaaaaaaagatttctttcaaaatattactgctcattgacaatgcacctggtcacccaagagctctgatggagatgtacaaggagattaatgttgttttcatgcctgctaacacaacatccattctgcagcccatggatcaaggagtaatttcgactttcaagtcttattatttaagaaatacatttcgtaaggctatagctgccatagatagtgattcctctgatggatctgggcaaagtaaattgaaaaccttctggaaaggattcaccattctagatgccattaagaacattcgtgattcatgggaggaggtcaaaatatcaacattaacaggagtttggaagaagttgattccaaccctcatggatgactttgaggggttcaagacttcagtggaggaagtaactgcagatgtggtggaaatagcaagagaactagaattagaagtggagcctgaagatgtgactgaattgctgcaatctcatgataaaacttgaacggatgaggagttgcttcttatggatgagcaaagaaagtggtttcttgagatggaatctactcctggtgaagatgctgtgaacattgttgaaatgacaacaaaggatttagaatattacataaacttagttgataaagcagcggcagggtttgagaggattgactccaattttgaaagaagttctactgtgggtaaaatgctatcaaacagcatcgcatgctacagagaaatctttcgtgaaaggaagagtcaatcgatgcggcaaacttcattgttgtcttattttaagaaattgccacagccaccccaaccttcagcaaccaccaccctgatcagtcagcagccatcaacatcgaggcaagaccctccaccagcaaaaagattacgactcgctgaaggctcagatgatcgttagcattttttagcaataaagtatttttaaattaaggtatgtacattgttttttagacataatgctattgcacacttaatagactacagtatagtgtaaacataacttttatatgcactgggaaaccaaaaaattcgtgtgactcgctttattgcgatatttgctttattgcggtggtctggaaccgaacccgcaatatctccgaggtatgcctg

SEQ ID NO: 31962 - DNA, 15164 bp, Homo Sapiens; identical to SEQ ID NO: 29446

SEQ ID NO: 31963 - DNA, 2331 bp, Homo Sapiens
  misc_feature (2131)..(2131): n is a, c, g, or t
  misc_feature (2307)..(2307): n is a, c, g, or t
cagtttcaagaggaaaagttaaataaattgcagaagttacttattcttttaagaggtctgcctggttytgggaaaacaacattgtctcggtaagtaaaggataccaactgaatacttggtaattcattatttaaaaattataaatgatatttgtcgccggctgcagtgactcatgcrtgtaatcccaacactttgggaggccagggtggaccagtcacttgagctcaggagtttgagaccagcctgggcaacatagtgagaccctgtctctaaaaaatgaaataaaaatgttagaactataatgatacttgtaatcactgacaagtgcttttatgtttctagtagaagaaaatctttaatttgctacacttgrgaatagcatctgacagtgtaactatttaaaaatcttttctgatagaagaaaggagaattggcatatgtttatatttagattctgctaagggctttaaaaatagataacaytacgtataattatggcagtgatgaaagcaaatgctacttgagaactgtcctggcctacccttttgagtcagctgttcaaggaaagttggactcagtgttagaaaatttgagtttttcaagttcagttggaggtgagaaaaagagaaaatttgggtattgactcagttatttccctttttcaccttgggcaagttttgctctctgttaatggaataaatgatacttactttttctggaattgggaatcaaatgagatgacccaaggaaaggaattttgaatgtgttgagcactgtgccatgttcataccattgattggcagaaggaacccttttttgatttcttaaaattcaggagtttgaagtgagtaatatctgaattggtgttagaactgttggyggtttattgtattacaagatatttcaaattcctttttttgtttacacttttaaactattgatgcacttgaatatgtttatgcagttgtgaaaaaatagygtaaagaaagcagtacaaattatcttgagtttatataagatgattcaagatttgtgccggacaaggagaaaaagaaaatttgttgatatctttgggtgaggatggagaggtccaagaaaccattttgcaaatgttttatattactaacaagacaatctaaacctaaataaacatctttttcagagaaaagacactagagaaagatttaatttgtgatamttcaagctagattatraactgtgatctttgtgaatgaattaattcattccagaattaaattttggtctttgtattttgattccttttactttagtgaggattttgtagagaagatgaaatttcacctctataataatagaagttaggagtgaggtctcacaaacatgggctgccttctagatttgggatataccatcagggacaataaataactgaaatttggaaactggataaargagtctgctagttaggaccacttgactaagagtgggtatagaagaaacctaaggaagaaaagttagatttgagacaacatattggagtatgttgaaattaaaggtgaataaagtagtggaaattcgatagaatttaaaggagacattgtagtgggagatggtagaggtgattagatataatatgtatatttatttgaaaaatagatatataagaatgaaagttgtatgtagtaccaacaagtaccattcgtattatgattcacaatttacagagtattttcatatataaaaatcttgtgcaatgggttgttttttcattttatagaaggagcagaggctaaaggaagttgaggttaagtgatttggaagtcacaaaaactagtaagagctcaaactagcaataaaattatagtatgtttttcccttgccttctctgtaatgcttaatggttgtgtagtcttatacgtgactcctgacttcaaggatcctggtctgtacctctttaggtcaacacgttttgagtgaactggtgttggttatttggaattagatataaagtcatatattctttggtgaggaatggcttcatataggagttcacaygcaaaacaagctttgccaaaataatagagtgaaaattggtagatcagagttgaggctgattggagggccaaactgaaagactggctgggcatgntggctcacacctgaaaacccagcactttgggagcccaaggcaggcagattgtttgagcccaggaattcaagaccagcctagataacctgggtatcccagctacttgggaggctgagctgccgaggctgcagtgacccatgatcgtgccatttctttctaacctgggtkacaggttnaaaccctttcccaaaaaaaaaaaa

SEQ ID NO: 31964 - DNA, 4968 bp, Homo Sapiens
atgatttgtcaaaaattctgtgtggttttgttacattgggaatttatttatgtgataactgcgtttaacttgtcatatccaattactccttggagatttaagttgtcttgcatgccaccaaattcaacctatgactacttccttttgcctgctggactctcaaagaatacttcaaattcgaatggacattatgagacagctgttgaacctaagtttaattcaagtggtactcacttttctaacttatccaaaacaactttccactgttgctttcggagtgagcaagatagaaactgctccttatgtgcagacaacattgaaggaaagacatttgtttcaacagtaaattctttagtttttcaacaaatagatgcaaactggaacatacagtgctggctaaaaggagacttaaaattattcatctgttatgtggagtcattatttaagaatctattcaggaattataactataaggtccatcttttatatgttctgcctgaagtgttagaagattcacctctggttccccaaaaaggcagttttcagatggttcactgcaattgcagtgttcatgaatgttgtgaatgtcttgtgcctgtgccaacagccaaactcaacgacactctccttatgtgtttgaaaatcacatctggtggagtaattttccagtcacctctaatgtcagttcagcccataaatatggtgaagcctgatccaccattaggtttgcatatggaaatcacagatgatggtaatttaaagatttcttggtccagcccaccattggtaccatttccacttcaatatcaagtgaaatattcagagaattctacaacagttatcagagaagctgacaagattgtctcagctacatccctgctagtagacagtatacttcctgggtcttcgtatgaggttcaggtgaggggcaagagactggatggcccaggaatctggagtgactggagtactcctcgtgtctttaccacacaagatgtcatatactttccacctaaaattctgacaagtgttgggtctaatgtttcttttcactgcatctataagaaggaaaacaagattgttccctcaaaagagattgtttggtggatgaatttagctgagaaaattcctcaaagccagtatgatgttgtgagtgatcatgttagcaaagttacttttttcaatctgaatgaaaccaaacctcgaggaaagtttacctatgatgcagtgtactgctgcaatgaacatgaatgccatcatcgctatgctgaattatatgtgattgatgtcaatatcaatatctcatgtgaaactgatgggtacttaactaaaatgacttgcagatggtcaaccagtacaatccagtcacttgcggaaagcactttgcaattgaggtatcataggagcagcctttactgttctgatattccatctattcatcccatatctgagcccaaagattgctatttgcagagtgatggtttttatgaatgcattttccagccaatcttcctattatctggctacacaatgtggattaggatcaatcactctctaggttcacttgactctccaccaacatgtgtccttcctgattctgtggtgaagccactgcctccatccagtgtgaaagcagaaattactataaacattggattattgaaaatatcttgggaaaagccagtctttccagagaataaccttcaattccagattcgctatggtttaagtggaaaagaagtacaatggaagatgtatgaggtttatgatgcaaaatcaaaatctgtcagtctcccagttccagacttgtgtgcagtctatgctgttcaggtgcgctgtaagaggctagatggactgggatattggagtaattggagcaatccagcctacacagttgtcatggatataaaagttcctatgagaggacctgaattttggagaataattaatggagatactatgaaaaaggagaaaaatgtcactttactttggaagcccctgatgaaaaatgactcattgtgcagtgttcagagatatgtgataaaccatcatacttcctgcaatggaacatggtcagaagatgtgggaaatcacacgaaattcactttcctgtggacagagcaagcacatactgttacggttctggccatcaattcaattggtgcttctgttgcaaattttaatttaaccttttcatggcctatgagcaaagtaaatatcgtgcagtcactcagtgcttatcctttaaacagcagttgtgtgattgtttcctggatactatcacccagtgattacaagctaatgtattttattattgagtggaaaaatcttaatgaagatggtgaaataaaatggcttagaatctcttcatctgttaagaagtattatatccatgatcattttatccccattgagaagtaccagttcagtctttacccaatatttatggaaggagtgggaaaaccaaagataattaatagtttcactcaagatgatattgaaaaacaccagagtgatgcaggtttatatgtaattgtgccagtaattatttcctcttccatcttattgcttggaacattattaatatcacaccaaagaatgaaaaagctattttgggaagatgttccgaaccccaagaattgttcctgggcacaaggacttaattttcagaagagaacggacattctttgaagtctaatcatgatcactacagatgaacccaatgtgccaacttcccaacagtctatagagtattagaagatttttacattttgaagaaggggagcaaatctaaaaaaaattcagttgaacttctgagagttaacatatggtggattatgttgatttagaacttaaaatagatgtgtaaatttgggttcaaaatgtagatttgagtccagtttggatgtgtgattaattttcaaatcatctaaagtttaaaagtagtattcatgatttctggcttttgatttgtcatattcctggtcataaaacattaagaaaattatggctgttgctgtcattacatatctattaaatgtcatcaaatatgtagtagacaatgctgtaattaggtgaactctaaaactgcaacatctgacaaatagctttaaaaatacaatgattataagtatggaatcagtgaaaatatttagtttgtatttttatgtccaaacttttccattttagattcctttatagacacgtcagcctaaaaatcagcctattcgggtgttcttttgaatatctcctggcatttttgtatctaactttgttcaatctgggaatttcagttttcaatatccttgaaaatggcttaagtgataacttccgtttcagttaaaaggaagcccgaagttgtgtttgtgctgcccacaggacagtgggagttacagttcatatcaggatgaccctacatacccaggtcagattgacgggaccagaagggaacatcgacttctaatccagctttcttgtttaattatgacctaaatctaatttacttccactgaaccatccaagacctctggcaggcagggaaatgggcagtgatgcaaaaaagggagactctttggagcttttatgaatagttcatggtgaggacagaacttttctactttcagacagactgcttgctagttttatgaattcagcacacgaattatgctgcgttgctcacattcaaaccaaaccaacgactatgtttaatgaactcagtattcaaatttattatatatgcgtatatatgtatatatggatcccttatatttagatttaactcgtagttttatttgaaagtagaaaagaactctacaaaaacgggaagaatgtgtctttcttcccttcttgacttctaataggtgtcattgaaatgtaaaatctaagtatgaaattatgaaaggacattctttaattactgcccactcaacacatatttaatatgtgcccagattattctaaaatcttaaaaaaagatgcatatagtgaaattttttaaatggatatacttttaataaagttttataactcactgacaaaacatatttcaatagtatatgagtatgagatttcttatcaattatgagtgaaatattctatctgaatgcattggaaggcatttacagtatttgctttcaacagttactgagtatgacattttagcatgaaatatatcaaacacatcatttgaaggacatatgtaatcttgactatggttatggtttttttgtatgtattccttgttttcatattgatagcatctaattcttttgacaatcttaatatgtaggttcatttaaattttaagacagttcagtgcatatatagtagaagccttaagaaaaaagaaaatgagcaagcaaatatttgaagaaatgtataaaaccatagatttctttcagaaaaaaaaaacaggcataggaacagttttctcttcatatattatgattatgaataataggaaagttgtattaattcagtatttgtcattatgcagtattttaatacctacataagtctattccattattatattttgcgcttggcatatttattcctttatgcttttaatcactaacatattttacttaagagtataaaactatgctaaataaattgtattgtatatggaatatgcttgccattatgaagaacagctgggtataccattatttcaagtaataaatctgaattctattagtttaaaaattgtaaaattcaagttaaatgacgtgtatgatatataagctgaacacattttctatagcccttaatttagttgtgttaatttttcaaggtgatgtatcaacagctttttttttttgcatttgttttttcaatgtgtttacattgtatgaattgagctttttgcccacagattcttgatttgtagttgtttggcaggatttttctttgtgatataatcacttctataaaaaatatgatgtacaaaaaaaaaaaaaaaaaaaa

SEQ ID NO: 31965 - DNA, 3062 bp, Homo Sapiens
gacaagagctcagacctgaggagagtgactagcttctctgtgtcccaggtggccaccttccactgtggaagctcatggactccattgggtcttcagggttgcggcagggggaagaaaccctgagttgctctgaggagggcttgcccgggccctcagacagctcagagctggtgcaggagtgcctgcagcagttcaaggtgacaagggcacagctacagcagatccaagccagcctcttgggttccatggagcaggcgctgaggggacaggccagccctgcccctgcggtccggatgctgcctacatacgtggggtccaccccacatggcactgagcaaggagacttcgtggtgctggagctgggggccacaggggcctcactgcgtgttttgtgggtgactctaactggcattgaggggcatagggtggagcccagaagccaggagtttgtgatcccccaagaggtgatgctgggtgctggccagcagctctttgactttgctgcccactgcctgtctgagttcctggatgcgcagcctgtgaacaaacagggtctgcagcttggcttcagcttctctttcccttgtcaccagacgggcttggacaggagcaccctcatttcctggaccaaaggttttaggtgcagtggtgtggaaggccaggatgtggtccagctgctgagagatgccattcggaggcagggggcctacaacatcgacgtggttgctgtggtgaacgacacagtgggcaccatgatgggctgtgagccgggggtcaggccgtgtgaggttgggctagttgtagacacgggcaccaacgcgtgttacatggaggaggcacggcatgtggcagtgctggacgaagaccggggccgcgtctgcgtcagcgtcgagtggggctccttaagcgatgatggggcgctgggaccagtgctgaccaccttcgaccataccctggaccatgagtccctgaatcctggtgctcagaggtttgagaagatgatcggaggcctgtacctgggtgagctggtgcggctggtgctggctcacttggcccggtgtggggtcctctttggtggctgcacctcccctgccctgctgagccaaggcagcatcctcctggaacacgtggctgagatggaggacccctctactggggcagcccgtgtccatgctatcctgcaggacttgggcctgagccctggggcttcggatgttgagcttgtgcagcacgtctgtgcggccgtgtgcacgcgggctgcccagctctgtgctgccgccctggccgctgttctctcctgcctccagcacagccgggagcaacaaacactccaggttgctgtggccaccggaggccgagtgtgtgagcggcaccccaggttctgcagcgtcctgcaggggacagtgatgctcctggccccggaatgcgatgtctccttaatcccctctgtggatggtggtggccggggagtggcgatggtgactgctgtggctgcccgtctggctgcccaccggcgcctgctggaggagaccctggccccattccggttgaaccatgatcaactggctgcggttcaggcacagatgcggaaggccatggccaaggggctccgaggggaggcctcctcccttcgcatgctgcccactttcgtccgggccacccctgacggcagcgagcgaggggatttcctggccctggacctcgggggcacgaacttccgtgtcctcctggtacgtgtgaccacaggcgtgcagatcaccagcgagatctactccattcccgagactgtggcccagggttctgggcagcagctctttgaccacatcgtggactgcatcgtggacttccagcagaagcagggcctgagcgggcagagcctcccactgggttttaccttctccttcccatgtaggcagcttggcctagaccagggcatcctcctgaactggaccaagggtttcaaggcatcagactgcgagggccaagatgtcgtgagtctgttgcgggaagccatcactcgcagacaggcagtggagctgaatgtggttgccattgtcaatgacacggtggggaccatgatgtcctgtggctatgaggacccccgttgcgagataggcctcattgtcggaaccggcaccaatgcctgctacatggaggagctccggaatgtggcgggcgtgcctggggactcaggccgcatgtgcatcaacatggagtggggcgcctttggggacgatggctctctggccatgctcagcacccgctttgatgcaagtgtggaccaggcgtccatcaaccccggcaagcagaggtttgaaaagatgatcagcggcatgtacctgggggagatcgtccgccacatccttttacatttaaccagccttggcgttctcttccggggccagcagatccagcgccttcagaccagggacatcttcaagaccaagttcctctctgagatcgaaagtgacagcctggccctgcggcaggtccgagccatcctagaggatctggggctacccctgacctcagatgacgccctgatggtgctagaggtgtgccaggctgtgtcccagagggctgcccagctctgtggggcgggtgtagctgccgtggtggagaagatccgggggaaccggggcctggaagagctggcagtgtctgtgggggtggatggaacgctctacaagctgcacccgcgcttctccagcctggtggcggccacagtgcgggagctggcccctcgctgtgtggtcacgttcctgcagtcagaggatgggtccggcaaaggtgcggccctggtcaccgctgttgcctgccgccttgcgcagttgactcgtgtctgaggaaacctccaggctgaggaggtctccgccgcagccttgctggagccgggtcggggtctgcctgtttcccagccaggcccagccacccaggactcctgggacatcccatgtgtgacccctctgcggccatttggccttgctccctggctttccctgagagaagtagcactcaggttagcaatatatatatataatttatttacaaaaaaaaaaaaa

SEQ ID NO: 31966 - DNA, 2153 bp, Homo Sapiens
agtacagctccggccgccgcgccgcctggctttcgtattcgttgttctcggcgggctgtggggcctccgcgccgcggccgttagtcatgtcggattctggaagttacggtcagtctgggggtgagcagcaaagttattctacctatggaaatccaggcagccaaggctatggacaagcatcacaaagctattctggctatgggcaaacgactgattcctcttatggacagaactacagcggttactccagttatggacaaagtcagtcaggttattcacagtcctatggtggttatgagaatcaaaagcagagctcatatagccagcaaccatataataaccagggacagcagcaaaacatggaatcatcaggaagccaaggtggaagagcaccttcctatgaccagccagactatggtcaacaagattcatatgaccagcagtcaggctatgatcaacatcaaggctcatatgatgagcagtcaaattatgatcagcagcatgattcctatagtcaaaaccagcagtcctatcattcacaaagggaaaactacagccaccacacacaagatgaccgtcgtgatgtgagtaggtatggagaagataatagaggatatggcgggtcacagggaggaggtagagggcgtgggggatatgacaaggatggaagaggtcctatgacaggatcaagtggtggtgaccgcggtggcttcaaaaattttggtggtcacagggattatggacccagaacagatgctgattcagaatctgataattcagataacaacacaatctttgtgcaaggacttggggagggtgtgtctacagatcaagttggggagttctttaaacaaataggaattatcaagacaaataagaagaccggaaaaccaatgataaatctttatacagacaaggacacaggaaagccaaagggggaggcaacagtgtcatttgatgaccctccttcagctaaggcagccattgactggtttgatggaaaagaattccatggcaacatcattaaagtgtcctttgccactagaagacctgaattcatgagaggaggtggaagtggaggtgggcggcgaggccgtggaggatatagaggtcgtggaggctttcaagggagaggtggagaccccaaaagtggggattgggtttgccctaatccgtcatgcggaaatatgaactttgctcgaaggaattcctgcaatcagtgcaatgagcctagaccagaggactctcgtccctcaggaggagatttccgggggagaggctacggtggagagaggggctacagaggtcgtgggggcagaggtggagaccgaggcggctatggtggagacagaagtgggggtggctatggtggggacagaagcagcggtggtggctacagcggagatagaagtgggggcggctatggtggagacagaagtgggggtggctatggtggggacagaggcggcggctatggtggggacagaggaggcggctatggaggagaccgaggaggtggctatggaggagatcgaggtggctatggaggagaccgaggtggaggctatggtggagaccgaggaggctatggaggagatcgaggaggttacggaggagatcgaggaggttatggaggagatcgaggaggctatggaggagacagaagccgggggggctatggaggagaccgtggtggtggcagtggctacggtggagaccgaagtggaggctatggaggagacaggagtggtggcggctatggaggagaccgaggtgggggctacggaggagaccgaggtggctatggaggcaaaatgggaggaagaaacgactacagaaatgatcagcgcaaccgaccatactgatgactgtttgaatgttcctttgtctctgacatgatccatagtgaaattgccagagttttgcctgctgctttcctcgtggcctcttcttgggtagtgaaattaagtgacatttggatttttatttgggtgggagggctgggacagtttttcttctagaaatgtctgttgagatttccccctttagtttccaaccttctccccaacccttggagctaaatgcgttgtaaaatattgccaaaatgaaaagtgttttgtaatactgcaataaaaggctgcttgtttttgtgg

SEQ ID NO: 31967 - DNA, 4860 bp, Homo Sapiens
gcactgggagacgtgcggttccgggtcgctgctcggctcgccggctgggcggtgggggttggtgacgcgggccggcgctcacgagaggcccgggaggcggggctttgctggcttcccagagagaggcaggacagaatgctttgacctccaagctgttttaaatctagtagataagccagatcctgtgttgccataagcccttggcccacatttaagtgggaatgcagctagcttggatgtctgaaactttgtaggcgcctctgtctgaatcctgaacacaggcaccaggactactgagagctcgtcatctgtgcaggatagccacacagcaaacatgtttgcaaaactgaagaagaaaattgcagaagagactgctgttgctcagaggccaggaggtgctactaggatcccacggtctgtgagcaaggaatcagttgcctcaatgggagctgactcaggagatgactttgcttccgatggaagcagctccagagaagatctttcatcccagcttctgagaaggaatgaacagatacggaagttagaggccagactttctgactatgctgaacaggtccgaaacttgcagaagataaaagagaagcttgaaattgcattagaaaaacaccaggattcttccatgcggaaatttcaagagcagaatgagacattccaagccaacagagccaaaatggcagaaggactggctttggcattagccagaaaggaccaggaatggtcagaaaagatggatcagcttgaaaaggagaaaaatattctgacagcccagttacaggaaatgaagaaccagagtatgaatcttttccaaaggagagatgaaatggatgaattagaggggttccagcagcaggaactaagtaaaataaagcacatgcttttaaaaaaagaagaaagtctagggaaaatggaacaagaattggaggcacgaaccagagaacttagtcgtacccaggaggagttgatgaactccaatcagatgtcatcagacttaagccagaagctagaagaattgcagagacactactcaacgctggaagagcagagagatcatgtgatagcttcaaaaacaggtgcagaaagtaagatcacagccctggaacaaaaggaacaagagctccaagcactcattcagcagctttccattgatttgcaaaaggtcactgctgaaactcaagagaaagaagacgttatcacacatttgcaagagaaggttgcatccttggagaagagactagaacagaacttatcaggagaagaacacgtgcaagaactcctgaaagagaaaacacttgctgagcagaatttggaggataccagacaacagctcttggcagccagaagcagccaggctaaggccattaacaccctggagactcgggtgagagaactggagcagaccttgcaggcctctgaggagcagctccaacagagcaagggcattgtggctgcccaggaaactcagatacaggagctcgctgccgccaaccaggagagcagccatgtgcagcagcaggcccttgctctggagcagcagttcttggagcgcacccaggcgctagaagcccagatagtggccctggagagaacgcgggcagctgaccagaccaccgcagagcaagggatgagacaactggagcaagaaaatgcagcccttaaagaatgcaggaatgaatatgaacgttctttacaaaatcaccaatttgaactaaagaagctgaaggaagaatggagccaaagagaaattgtgagcgtggccatggctcaagccctggaggaggtgcggaagcaaagggaagagttccagcaacaggcagctaacctgacagccataatagacgagaaggaacagaatctgcgggaaaaaaccgaagtgcttctccagaaagagcaggagattctccagctggagcgaggtcacaactctgccctgctgcagatacaccagctgcaggccgagctggaggccctgaggaccctcaaggcggaggaggctgcagtggtcgcggagcaggaggacctgctgaggctgcggggcccattgcaggccgaagcactctcagtcaatgagtcgcacgtgacctcgagggccatgcaggaccctgtgttccagcttccaactgcaggaagaacaccaaatggtgaggttggggccatggatctcacacagctacagaaggagaaacaggacttggagcagcaacttctggagaaaaataagaccataaagcagatgcagcagcggatgctggagctccggaagactctgcagaaggagctgaaaatcagacccgataatgagctcttcgaagtccgggagaaacctggacctgagatggcaaacatggcgccttccgtcacgaataacactgacctgacagatgcccgcgagatcaactttgagtaccttaaacatgtggttttaaaattcatgtcttgtcgcgaatccgaggcttttcatcttataaaagctgtgtcagtgttgctgaacttttcccaagaggaggagaacatgctcaaggaaactctggaatataagatgtcatggtttgggtccaaaccagctcccaagggcagcatccggccgtctatctcaaaccctcggataccatggtcctagaggggactacccaaggatggagctccgtgggttgacactttttctgtgaaaagaacactgacacaccagtctgggtgggtttttaatcactgtaactgcagtattttgtacaagtgtctaaacattgtttacaagactaaggcccacttccctgcaggctgacctgaacctcagggggtagctgatcctgtcattctggtcaccaaacaggagggtcctggcactacccagatttccacagtgctgctaatatcccagctccagccagcaccccatctgcacctgaatcctctaacttcacggtagcacttacagctgaagccatcagcatctggcaggcacacctgagtcaccatgtagcgctgctactggaggtagagacggccctttgagatggtgcccagcaggccaaacccacctgcctctgccaggaacagccaactccatgggaactctatgggagtggcttttaaaaattcagatgagttagaagctttttatcccttcctctcaagaaaatattctttcaccctgtctctcaaaccacctagaactttagaggatccatctttaagggccggtgtggatgaatgagaaaatgcacctttctgacagtatctccactttacttaagaaaactagcaaatatatgaaaagacccttagtaccaaatacactcaattgcctttttaatgaatgtacttgtcttggataggttgctggtaaaccattttaaactattttttatagctgaagttcttcactactataaacgtcttctgtactataaaatccatttaactggtgttcttaaaatcagagcgtccagaggaaattcttcctaaaactaggattcctgttcctttgtcttctcactcgcactctggcactgctccctctgaagtgcagtgggatctcgtgtgctttgtcttgattctgtgctgcgctgccgctgggcgatgcagaccacctgtcttctactgaaggacagtccgctgtctccagtgggggcagcagctgtcccccagcctcgatggagacattggggcagtctgccttgtctgtggagctgctctctctccctcatcccaccccaaatacttaaaatgacactacacccagacggcgcccagctggctgcagcacttgtagcatgcacatgactctggtagtaaccaacaaaaacttgttttatggattcctcgtttactgaggaaagggaacatgctggttctggaaaagccacaatattgaatctaaaaggaaaccgtttattgtttgatgaaagtttcactggttaaataaaaaactaaattaataactggagcctctaaatttattatccattatccagtgatggaaagttgtatttctcaatcatgcttagggccaaaataggtatataaaatgtgtcacagaaaaacacgcatttgcaacgttaacctaacgaaatttccatgaagaaccaagtcagggcagcatctccttagtcccagctcaggctctctgccttccagaggccgcttctccagtgactaacctcctcctctggctcctccttgcagacagttatcccttgtttagaacacgaatttccatttacctggtgggaacacgaaacaggagtctcttctgttctgcaagtttgatgggtaagaggtagccttttttcaaagtaggatttcctttttcaactgttccaggaaagaatctctaagactgggtagctcacagccagccaaaggcagctacatttccacagaagcccgtccgctgcctccgtggcttctccagccattgaactggtcccacacgcaccccaggccccactcctcggcagtttcaggtgtagctgtggggcccgttcctaggtctgtactcactttagggaggcttcactgactaggctttcctcctgcatgttgaatttccttcagctttaagaggaagagtggaataaatattctaagtgatttaatgcactttgacttgtataaaactttctgtgttagcgacggtatctatagccctttatacgagcgatggatcttgagctctccttccatgttgtaaatagggattgtattcttgaaaactgctgtagcaaattcatctgtggtgcaatacactttttgattaaagctcttcaatccagatgcaaaaaaaaaaaaaaaaaaaaaaaaaaaaaaaaaaaaaaaaaaaaaaaaaaaaaaaaaaaaaaa

SEQ ID NO: 31968 - DNA, 2575 bp, Homo Sapiens
atgggcaaaggagatcctaagaagccgagaggcaaaatgtcatcatatgcattttttgtgcaaacttgtcgggaggagcataagaagaagcacccagatgcttcagtcaacttctcagagttttctaagaagtgctcagagaggtggaaggtaagagggcttaaaacatgctaacaaggtaattaaaagacagtttccaattgaggatgcaaaaaaaagcctagttggcattctcgtagtgggacgctattacatagcaaaagacattggttttgaggataatttacttaaatgttacaacttaaacttacaaattaattattttgtagaccatgtctgctaaagagaaaggaaaatttgaagatatggcaaaagcggacaaggcccgttatgaaagagaaatgaaaacctatatccctcccaaaggggagacaaaaaagaagttcaaggatcccaatgcacccaagaggcctccgtgagtatcttgcctgtttttacttcccagacacgttttacagtagaatctgagagaaatttagcaagctactttgtcagtttagagtgtaaatgtacaatcaaagtttcttagctaatacttgttcatattggttatatttaaatagtataaaattcctgttgggtgggagtgttcccagagcatttgaattagacatttggtctcctttgcccagtgtatctccttttgatctttttatttcttgaaaaatactatccctttgaaatagtgtaattgtagaatgttcatctagggttctagctagtataaattaaatagttgtaaattaagctttggttgtgaaggatatttagtatattatagtatttgcaccctgtccaatgcatcacagaaattcacaggcagctttaaatagcaatgcagtgtacacctgatagtatttgtttttgtgatctgttaacttaaaatcctaaaattaattttttttttagttcggccttcttcctcttctgctctgagtatcgcccaaaaatcaaaggagaacatcctggcctgtccattggtgatgttgcgaagaaactgggagagatgtggaataacactgctgcagatgacaagcagccttatgaaaagaaggctgcgaagctgaaggaaaaatacgaaaaggtaagaagtgtgggtttgcttggtaaaatgatgacaagtacgccagatgtatgattgtacttagtttgaggtgtaataagtttttagggtaacagctacattaagtatggtgttgatataagtcctcatccttcaaagaatgcagaggaccaaataaattagggtttttttgactaaaatgtaatcagactcagacaaaggctgtgtacatttatgttggttttgttattccccagtatcttgaagttcatgaaaatgttggtagtcacttcaagtcaaaaatgagcattttcaaatggcttggcatacagtacaaaaacaggctagacaaagtaatataggctatatttttcttagtcatatcctgaaacatttatgttcttttcctttagatactcaaaaaaccacagcatcactaagttaaattacaagtctgctgctctgtccagtaaattaataagattaaggaaatctataactcttatagttcagtaaattgaaatattaaatacttaattttcagctttagtcattctgaaaagtgtttatttctagatgtttcttaacctaattgcatgtttattgacaaattaccttttttttttaagaccacatttcctactaaggattaaggtctgacagtgtaaacctgtagagtgcttttttgcattcagaaggtggcagtgtctaccctttaatcaaagtctctacattctggttttaatagagttaggatctggtagataattgcacctcaatgaggcataactttgcaaatattagactatgccatttcatgagttatagattgttataatgatcttgtatttttatgttcatttattgaagttctagttatttctggagttgctgtggatctacagatacgtgatattttggtataactagaatcttgatttctttcataaagttctgccatgttctatttctttccttaatctttttttcttccctactgttttatcctccctttgctttggaaggatattgctgcatatcgagctaaaggaaagcctgatgcagcaaaaaagggagttgtcaaggctgaaaaaagcaagaaaaagaaggaagaggaggaagatgaggaagatgaagaggatgaggaggaggaggaagatgaagaagatgaagatgaagaagaagatgatgatgatgaataagttggttctagcgcagttttttttttcttgtctataaagcatttaacccccctgtacacaactcactccttttaaagaaaaaaattgaaatgtaaggctgtgtaagatttgtttttaaactgtacagtgtctttttttgtatagttaacacactaccgaatgtgtctttagatagccctgtcctggtggtattttcaatagccactaaccttgcctggtacagtatgggggttgtaaattggcatggaaa

SEQ ID NO: 31969 - DNA, 5476 bp, Homo Sapiens
ggacggccatactatttttatcttgctttttcgttctgtcgcagtactgtttaatatgagtccagcgacggctctgtgactgttttcctctggtaaaatcgctcttgcgtcctcagcgtttatctcaggtgcggaaggtctcacaggtttggaaatagcgccggaaaaatcgatccgcggagtgagacggctcgtaccacactgcagggcccggaggtcaagatggtggctgtaaaactaggatccctgacgattgcttagcattaaggcccgacatggaaccggggtgtgacgagttcctgccgccaccggagtgcccggtttttgagcctagctgggctgaattccaagacccgcttggctacattgcgaaaataaggcccatagcagagaagtctggcatctgcaaaatccgcccacccgcggattggcagcctccttttgcagtagaagttgacaatttcagatttactcctcgcgtccaaaggctaaatgaactggaggcccaaactagagtgaaattgaactatttggatcagattgcaaaattctgggaaattcaaggctcctctttaaagattcccaatgtggagcggaagatcttggacctctacagccttagtaagattgtgattgaggaaggtggctatgaagccatctgcaaggatcgtcggtgggctcgagttgcccagcgtctccactacccaccaggcaaaaacattggctccctgctacgatcacattacgaacgcattatttacccctatgaaatgtttcagtctggagccaaccatgtgcaatgtaacacacacccgtttgacaatgaggtaaaagataaggaatacaagccccacagcatcccccttagacagtctgtgcagccttcaaagttcagcagctacagtcgacgggcaaaaaggctacagcctgatccagagcctacagaggaggacattgagaagcatccagagctaaagaagttacagatatatgggccaggtcccaaaatgatgggcttgggccttatggctaaggataaggataagactgtgcataagaaagtcacatgccccccaactgttacggtgaaggatgagcaaagtggaggtgggaacgtgtcatcaacattgctcaagcagcacttgagcctagagccctgcactaagacaaccatgcaacttcgaaagaatcacagcagtgcccagtttattgactcatatatttgccaagtatgctcccgtggggatgaagataataagcttcttttctgtgatggctgtgatgacaattaccacatcttctgcttgttaccaccccttcctgaaatccccagaggcatctggaggtgcccaaaatgtatcttggcggagtgtaaacagcctcctgaagcttttggatttgaacaggctacccaggagtacagtttgcagagttttggtgaaatggctgattccttcaagtccgactacttcaacatgcctgtacatatggtgcctacagaacttgtagagaaggaattctggaggctggtgagcagcattgaggaagacgtgacagttgaatatggagctgatattcattccaaagaatttggcagtggctttcctgtcagcaatagcaaacaaaacttatctcctgaggagaaggagtatgcgaccagtggttggaacctgaatgtgatgccagtgctagatcagtctgttctctgtcacatcaatgcagacatctcaggcatgaaggtgccctggctgtacgtgggcatggttttctcagcattttgttggcatattgaggatcactggagttactctattaactatctgcattggggtgagccgaagacctggtatggtgtaccctccctggcagcagagcatttggaggaggtgatgaagatgctgacacctgagctgtttgatagccagcctgatctcctacaccagcttgtcactctcatgaatcccaacactttgatgtcccatggtgtgccagttgtccgcacaaaccagtgtgcaggggagtttgtcatcacttttcctcgtgcttaccacagtggttttaaccaaggctacaattttgctgaagctgtcaacttttgtactgctgactggctacctgctggacgccagtgcattgaacactaccgccggctccggcgctattgtgtcttctcccacgaggagctcatctgcaagatggctgccttcccagagacgttggatctcaatctagcagtagctgtgcacaaggagatgttcattatggttcaggaggagcgacgtctacgaaaggcccttttggagaagggcgtcacggaggctgagcgagaggcttttgagctgctcccagatgatgaacgccagtgcatcaagtgcaagaccacgtgcttcttgtcagccctggcctgctacgactgcccagatggccttgtatgcctttcccacatcaatgacctctgcaagtgctctagtagccgacagtacctccggtatcggtacaccttggatgagctccccaccatgctgcataaactgaagattcgggctgagtcttttgacacctgggccaacaaagtgcgagtggccttggaggtggaggatggccgtaaacgcagctttgaagagctaagggcactggagtctgaggctcgtgagaggaggtttcctaatagtgagctgcttcagcgactgaagaactgcctgagtgaggtggaggcttgtattgctcaagtcctggggctggtcagtggtcaggtggccaggatggacactccacagctgactttgactgaactccgggtccttcttgagcagatgggcagcctgccctgcgccatgcatcagattggggatgtcaaggatgtcctggaacaggtggaggcctatcaagctgaggctcgtgaggctctggccacactgccctctagtccagggctattgcggtccctgttggagagggggcagcagctgggtgtagaggtgcctgaagcccatcagcttcagcagcaggtggagcaggcgcaatggctagatgaagtgaagcaggccctggccccttctgctcacaggggctctctggtcatcatgcaggggcttttggttatgggtgccaagatagcctccagcccttctgtggacaaggcccgggctgagctgcaagaactactgaccattgcagagcgctgggaagaaaaggctcatttctgcctggaggccaggcagaagcatccaccagccacattggaagccataattcgtgagacagaaaacatccctgttcacctgcctaacatccaggctctcaaagaagctctgactaaggcacaagcttggattgctgatgtggatgagatccaaaatggtgaccactacccctgtctagatgacttggagggcctggtggctgtgggccgggacctgcctgtggggctggaagagctgagacagctagagctgcaggtattgacagcacattcctggagagagaaggcctccaagacctttctcaagaagaattcttgctacacactgcttgaggtgctttgcccgtgtgcagacgctggctcagacagcaccaagcgtagccggtggatggagaaggcgctggggttgtaccagtgtgacacagagctgctggggctgtctgcacaggacctcagagacccaggctctgtgattgtggccttcaaggaaggggaacagaaggagaaggagggtatcctgcagctgcgtcgcaccaactcagccaagcccagtccactggcaccatccctcatggcctcttctccaacttctatctgtgtgtgtgggcaggtgccagctggggtgggacttctgcagtgtgacctgtgtcaggactggttccatgggcagtgtgtgtcagtgccccatctcctcacctctccaaagcccagtctcacttcatctccactgctagcctggtgggaatgggacacaaaattcctgtgtccactgtgtatgcgctcacgacggccacgcctagagacaatcctagccttgctggttgccctgcagaggctgcccgtgcggctgcctgagggtgaggcccttcagtgtctcacagagagggccattggctggcaagaccgtgccagaaaggctctggcctttgaagatgtgactgctctgttgcgacagctggctgagcttcgccaacagctacaggccaaacccagaccagaggaggcctcagtctacacttcagccactgcctgtgaccctatcagagaaggcagtggcaacaatatttctaaggtccaagggctgctggagaatggagacagtgtgaccagtcctgagaacatggctccaggaaagggctctgacctggagctactgtcctcgctgttgccgcagttgactggccctgtgttggagctgcctgaggcaatccgggctcccctggaggagctcatgatggaagggggcctgcttgaggtgaccctggatgagaaccacagcatctggcagctgctgcaggctggacagcctccagacctggacagaattcgcacacttctggagctggaaaaatttgaacatcaagggagtcggacaaggagccgggctctggagaggcgacggcggcggcagaaggtggatcagggtagaaacgttgagaatcttgttcaacaggagcttcagtcaaaaagggctcggagctcagggattatgtctcaggtgggccgagaagaagaacattatcaggagaaagcagaccgtgaaaatatgttcctgacaccttccacagaccacagccctttcttgaaaggaaaccaaaatagcttacaacacaaggattcaggctcttcagctgcttgtccttctttaatgcctttgctacaactctcctactctgatgagcaacagttgtgacagtggcaccaaaggtcatttgtggttgtttttgtttgtttgtttcttaaatcctactatctcctggcctggacctcagaaggagctttttgcctatctataatttttcactgccaatttttgatatcctctctcctagagttactgttaaaaggttggttcgtaaagtccacaccccgatgctcagaagtgtcttgccagcaacattcctgctagcatacaggagtgatttcctaaaccagtttcattctagtctgaatagggacaaacaaatcttgaggaagcccaagtgcgtacctttatttttgcccccaccaccctctttctgtacttcaatttttgtttgttttttgtttttttgtccctgtcataaaatattttggtgcttcaaaacttgtaccttcattgtacatccttttcttttctccccttgggtcttattataaaagaagacaatgtacgttgtaattaccaaaaagaatagggaaaaacaagaatttcatgactctacctgtggtctatctttaatttcatttcttttgttaaaaataaaacaatgagtatgtttgggaaaaaaaaaa

SEQ ID NO: 31970 - DNA, 5320 bp, Homo Sapiens
acctcgcactctcagtttcaccgctcgatcttgggacccaccgctgccctcagctccgagtccagggcgagtgcagagcagagcgggcggaggaccccgggcgcgggcgcggacggcacgcgggcatgaacctggagggcggcggccgaggcggagagttcggcatgagcgcggtgagctgcggcaacgggaagctccgccagtggctgatcgaccagatcgacagcggcaagtaccccgggctggtgtgggagaacgaggagaagagcatcttccgcatcccctggaagcacgcgggcaagcaggactacaaccgcgaggaggacgccgcgctcttcaaggcttgggcactgtttaaaggaaagttccgagaaggcatcgacaagccggaccctcccacctggaagacgcgcctgcggtgcgctttgaacaagagcaatgactttgaggaactggttgagcggagccagctggacatctcagacccgtacaaagtgtacaggattgttcctgagggagccaaaaaaggagccaagcagctcaccctggaggacccgcagatgtccatgagccacccctacaccatgacaacgccttacccttcgctcccagcccaggttcacaactacatgatgccacccctcgaccgaagctggagggactacgtcccggatcagccacacccggaaatcccgtaccaatgtcccatgacgtttggaccccgcggccaccactggcaaggcccagcttgtgaaaatggttgccaggtgacaggaaccttttatgcttgtgccccacctgagtcccaggctcccggagtccccacagagccaagcataaggtctgccgaagccttggcgttctcagactgccggctgcacatctgcctgtactaccgggaaatcctcgtgaaggagctgaccacgtccagccccgagggctgccggatctcccatggacatacgtatgacgccagcaacctggaccaggtcctgttcccctacccagaggacaatggccagaggaaaaacattgagaagctgctgagccacctggagaggggcgtggtcctctggatggcccccgacgggctctatgcgaaaagactgtgccagagcaggatctactgggacgggcccctggcgctgtgcaacgaccggcccaacaaactggagagagaccagacctgcaagctctttgacacacagcagttcttgtcagagctgcaagcgtttgctcaccacggccgctccctgccaagattccaggtgactctatgctttggagaggagtttccagaccctcagaggcaaagaaagctcatcacagctcacgtagaacctctgctagccagacaactatattattttgctcaacaaaacagtggacatttcctgaggggctacgatttaccagaacacatcagcaatccagaagattaccacagatctatccgccattcctctattcaagaatgaaaaatgtcaagatgagtggttttctttttccttttttttttttttttttgatacggggatacggggtcttgctctgtctcccaggctggagtgcagtgacacaatctcagctcactgtgacctccgcctcctgggttcaagagactctcctgcctcagcctccctggtagctgggattacaggtgtgagccactgcacccacccaagacaagtgattttcattgtaaatatttgactttagtgaaagcgtccaattgactgccctcttactgttttgaggaactcagaagtggagatttcagttcagcggttgaggagaattgcggcgagacaagcatggaaaatcagtgacatctgattggcagatgagcttatttcaaaaggaagggtggctttgcatttcttgtgttctatagactgccatcattgatgatcactgtgaaaattgaccaagtgatgtgtttacatttactgaaatgtgctctttaatttgttgtagattaggtcttgctggaagacagagaaaacttgcctttcagtattgacactgactagagtgatgactgcttgtaggtatgtctgtgccatttctcagggaagtaagatgtaaattgaagaagcctcacacgtaaaagaaatgtattaatgtatgtaggagctgcagttcttgtggaagacacttgctgagtgaaggaaatgaatctttgactgaagccgtgcctgtagccttggggaggcccatcccccacctgccagcggtttcctggtgtgggtccctctgccccaccctccttcccattggctttctctccttggcctttcctggaagccagttagtaaacttcctattttcttgagtcaaaaaacatgagcgctactcttggatgggacatttttgtctgtcctacaatctagtaatgtctaagtaatggttaagttttcttgtttctgcatctttttgaccctcattctttagagatgctaaaattcttcgcataaagaagaagaaattaaggaacataaatcttaatacttgaactgttgcccttctgtccaagtacttaactatctgttcccttcctctgtgccacgctcctctgtttgcttggctgtccagcgatcagccatggcgacactaaaggaggaggagccggggactcccaggctggagagcactgccaggacccaccactggaagcaggatggagctgactacggaactgcacactcagtgggctgtttctgcttatttcatctgttctatgcttcctcgtgccaattatagtttgacagggccttaaaattacttggctttttccaaatgcttctatttatagaatcccaaagacctccacttgcttaagtatacctatcacttacatttttgtggttttgagaaagtacagcagtagactggggcgtcacctccaggccgtttctcatactacaggatatttactattactcccaggatcagcagaagattgcgtagctctcaaatgtgtgttcctgcttttctaatggatattttaaattcattcaacaagcacctagtaagtgcctgctgtatccctacattacacagttcagcctttatcaagcttagtgagcagtgagcactgaaacattattttttaatgtttaaaaagtttctaatattaaagtcagaatattaatacaattaatattaatattaactacagaaaagacaaacagtagagaacagcaaaaaaataaaaaggatctccttttttcccagcccaaattctcctctctaaaagtgtccacaagaaggggtgtttattcttccaacacatttcacttttctgtaaatatacataaacttaaaaagaaaacctcatggagtcatcttgcacacactttcatgcagtgctctttgtagctaacagtgaagatttacctcgttctgctcagaggccttgctgtggagctccactgccatgtacccagtagggtttgacatttcattagccatgcaacatggatatgtattgggcagcagactgtgtttcgtgaactgcagtgatgtatacatcttatagatgcaaagtattttggggtatattatcctaagggaagataaagatgatattaagaactgctgtttcacggggcccttacctgtgaccctctttgctgaagaatatttaaccccacacagcacttcaaagaagctgtcttggaagtctgtctcaggagcaccctgtcttcttaattctccaagcggatgctccatttcaattgctttgtgacttcttcttctttgtttttttaaatattatgctgctttaacagtggagctgaattttctggaaaatgcttcttggctggggccactacctcctttcctatctttacatctatgtgtatgttgactttttaaaattctgagtgatccagggtatgacctagggaatgaactagctatgaaatactcagggttaggaatcctagcacttgtctcaggactctgaaaaggaacggcttcctcattccttgtcttgataaagtggaattggcaaactagaatttagtttgtactcagtggacagtgctgttgaagatttgaggacttgttaaagagcactgggtcatatggaaaaaatgtatgtgtctcccaggtgcatttcttggtttatgtcttgttcttgagattttgtatatttaggaaaacctcaagcagtaattaatatctcctggaacactatagagaaccaagtgaccgactcatttacaactgaaacctaggaagcccctgagtcctgagcgaaaacaggagagttagtcgccctacaggaaacccagctagactattgggtatgaactaaaaagagactgtgccatggtgagaaaaatgtaaaatcctacagtggaatgagcagcccttacagtgttgttaccaccaagggcaggtaggtattagtgtttgaaaaagctggtctttgagcgagggcataaatacagctagccccaggggtggaacaactgtgggagtcttgggtactcgcacctcttggctttgttgatgctccgccaggaaggccacttgtgtgtgcgtgtcagttacttttttagtaacaattcagatccagtgtaaacttccgttcattgctctccagtcacatgcccccacttccccacaggtgaaagtttttctgaaagtgttgggattggttaaggtctttatttgtattacgtatctccccaagtcctctgtggccagctgcatctgtctgaatggtgcgtgaaggctctcagaccttacacaccattttgtaagttatgttttacatgccccgtttttgagactgatctcgatgcaggtggatctccttgagatcctgatagcctgttacaggaatgaagtaaaggtcagttttttttgtattgattttcacagctttgaggaacatgcataagaaatgtagctgaagtagaggggacgtgagagaagggccaggccggcaggccaaccctcctccaatggaaattcccgtgttgcttcaaactgagacagatgggacttaacaggcaatggggtccacttccccctcttcagcatcccccgtaccccactttttgctgaaagaactgccagcaggtaggaccccagaggcccccaaatgaaagcttgaatttcccctactggctctgcgttttgctgagatctgtaggaaaggatgcttcacaaactgaggtagataatgctatgctgtcgttggtatacatcatgaatttttatgtaaattgctctgcaaagcaaattgatatgtttgataaatttatgtttttaggtaaataaaaacttttaaaaagttgtt

SEQ ID NO: 31971 - DNA, 319 bp, Homo Sapiens
  misc_feature (12)..(12): n is a, c, g, or t
  misc_feature (17)..(17): n is a, c, g, or t
  misc_feature (49)..(49): n is a, c, g, or t
  misc_feature (70)..(71): n is a, c, g, or t
  misc_feature (100)..(100): n is a, c, g, or t
  misc_feature (190)..(190): n is a, c, g, or t
gggatcatctgnttggngatgctgataaaggcagggactcagtgacggngaggccatggagacacactgnnggcatgagtgcagaggtgccaggtgaggnaaggttggagaggcacaccagcacacacaaggtcatgagtgccagggggtctggcagatgggacacagggagctgcagacaggtgactgnattccatcaccctgtgaccctagagcaggggcttctggtaagtggagagatggaagccagatttcgcaaaattagggatggaaaagtttgcctataatgggaagctataggtaagaccttcactggagg

SEQ ID NO: 31972 - DNA, 8056 bp, Homo Sapiens
ctgctctccctgagcccgctcccgagcgctgctttcccgccgcgggtgggcttcgcagcctcaggccagccgcggcccttggcccgctgcagccccggccctccaccttccccgtgcaggggcggcccggccagtgtcgctcatcccgggacgctcccttctcccacccaggactgccccgcggagctggcttggacacccaactttgccacctcgagggtcgtctctgctgggcgcgaacctgcccacccaccggttggccgcgcgctcggggaccgtgctcgtggcccccaagccggtgcccccattctggaactcagcgagtagggggcggctctggggaagtggcagggggcggctgcagctgctgcctccacttccctagccaggtgctgaagaggatcctcggagccgctctggcccccaggcgctggatgactggcaccagcgctcctcgcacctgtgttggtgtgtgagacttgggctggagtgcccacgtggctgtggagtcagtgtgattcatgattgaggaaacgcgtcctccatcctctctctccttggcactttccacacatgaggagaagaagagcttctgtttagaagacacgtgcccagagtcagaggccccttgcccaccatgaagggaacctgtgttatagcatggctgttctcaagcctggggctgtggagactcgcccacccagaggcccagggtacgactcagtgccagagaaccgagcatccagtcatctcctataaagaaattggcccctggttacgggagttcagagcgaagaatgctgcggatttctcgcagttaacatttgacccaggacagaaagaacttgttgtaggagcaagaaactacctcttcaggttacagcttgaggatctgtctcttatccaggctgtggaatgggagtgtgatgaagctaccaaaaaggcctgttacagcaaaggcaaatcaaaggaggaatgtcagaactacatccgggtgcttctggtgggtggcgaccggttattcacctgtgggaccaatgcattcacgcctgtctgcaccaaccgctcgttgagcaacctggctgagatccatgatcagatcagtggcatggcccgctgtccctacagtccccagcacaattccacagcgctcctcacagctggtggggagctctatgctgctacagccatggattttccaggacgtgatcctgccatttaccgaagcctaggcattttacctcctctccgcacggcgcagtacaactccaaatggctcaatgagccaaactttgtgtcatcttatgacatcggaaattttacctacttctttttccgagaaaatgcagtagagcatgactgtgggaaaacagtgttctccagagctgcccgggtgtgcaagaacgatattggtgggcgcttcctgctggaagacacctggaccacattcatgaaggctcgcctgaactgctcccgtcctggggaagtccccttttactacaacgaattgcagagtactttcttcctgcctgagctggatttgatctatggcatctttaccaccaatgtgaacagcattgcggcctcagctgtgtgcgtcttcaacctgagcgccatcgcgcaggccttctctgggcccttcaagtaccaagaaaactcgcgctcggcctggctaccgtatcccaacccaaacccccacttccagtgtggcaccgtggaccagggcctgtacgtgaacctgaccgagagaaatctgcaggatgctcagaagttcattctggtgcatgaggtggtacagccagtgaccacagtgccctccttcatggaggacaatagccgcttttcccacgtggcagtcgacgtggtgcagggcagagaagcgctcgtccacatcatctatttggccacagattacggaaccattaagaaagtgcgggtacccctgaatcagacctcaagcagctgtttgctggaagagattgagctcttccctgagaggcggagggagcccatcaggagcctgcagatcctgcacagccagagtgtcctgttcgtggggctgcgggagcacgtggtcaagatccccctgaagaggtgccagttctaccgcacacgcagcacctgcattggggcccaggacccttactgtggctgggatgtggtaatgaagaaatgcacaagcctggaggagagcctgagcatgacgcagtgggaacagagcatctctgcgtgtccgaccaggaatctcaccgtggatgggcactttggtgtgtggtctccgtggacgccttgcacgcacacagatggcagcgccgtgggatcctgcctctgtcgaacccgctcctgcgacagcccggccccgcagtgtggtggctggcagtgcgagggccctggcatggagatcgccaactgttccaggaacggaggctggactccctggacctcgtggtctccctgcagcactacctgtgggatcggcttccaggtgcggcagcgctcctgcagcaaccccactcccaggcacgggggccgggtgtgcgtgggacagaaccgcgaggaaagatactgcaatgaacatttgctatgtcccccacacatgttctggacaggctggggtccttgggaacggtgcacagcccaatgcgggggtggcattcaagctcgccgcaggatctgtgagaatgggcctgactgtgcaggctgcaatgtggagtaccagtcttgcaacaccaacccgtgtcctgagctgaagaagaccacgccctggacaccctggacacctgtcaacatctctgacaacggcgaccactatgagcaacgattccgatacacatgcaaagcccgcctggctgatccgaatttgctggaagtgggaagacagagaatcgaaatgcggtactgttctagcgacggcaccagtggctgctccacagatgggctttctggggatttcctgcgtgctgggagatactctgcccacacggtcaacggggcttggtcagcctggacgtcgtggtcacagtgcagccgtgactgcagcaggggcattcggaaccggaagcgtgtttgcaacaaccccgaacccaagtatgggggaatgccttgccttggcccatctctggaataccaggaatgcaacactttgccctgcccagtggatggcgtgtggtcttgctggtccccctggacaaaatgttcagcaacatgcggcggtggacactatatgaggacccgctcttgctccaatccagccccggcctatggaggggacatctgcctggggctgcacacagaagaggcactctgcaacacgcagccctgcccagagagctggtcggagtggtcggactggtctgagtgtgaagcctctggcgtccaagtccgcgcccgccagtgcatcctcctgttccccatgggcagccagtgctccgggaacaccacggagagccggccgtgtgtgtttgactctaatttcatcccagaagtatctgtggcaagatccagtagcgtagaagagaaaaggtgtggagagttcaacatgttccacatgatcgccgtggggctgagcagctccatcctcggctgcctcctcaccctgctcgtctatacttactgccagcggtaccagcagcaatcccacgatgcgactgtcatccaccccgtctcacctgccccccttaataccagcataaccaaccacatcaacaaactggacaagtacgactcggtggaggccatcaaggcatttaacaaaaacaacttgatcctagaggaaagaaacaaatacttcaacccacatctcactgggaagacctattctaatgcctactttacagatctcaataattatgatgagtactaacagctttcatgttttgggcttcttgtaaatccccagttcctcaaggcctgtgccccatgactgcccatgtttctgaggcttcagagtcgaagtttggatacatttcaagtgcatttcaagccaccagagtgtcccattggtgccaaaaatacacgtctttaaaagcaacaaaaattgaaataagacatcgtgaaaatcttgaccattgttgattgagccagggtggtgaagtttttaattggtgttcatcctatttttctgacaagtccattggtttgttttttgagcattattttataaatgtgccacccacattggaaggagtctttctttagaactttggagtgtaaatcttcatgatgttgtaaattcaagaaaataggcactttctctgaaagacctgctccttccacaagaagtgcataggtccataatatttcataaaatgaagaaaaagaatgtggccaaacaattattcaccatggattgcccaactttccaaatctggataaagctgtgggattcttggaagcagcttgagtgttttcatcttgcctgggaagcccaggaattccacctggtccacaccggcagaagttacagtagactgtgaggcaccccaccttgctcctgatgcagtttctgtgccattgctggtgctggtggaggcagcggagcagaggctcaggcacaatgaagcgtggatgtgttctgcaggttgctgcaaaactcaccttattctgacttttggatttcatggcattccaggaagctccttgccatgctgttggcctggaagtccacctgtctggtccatagtgacgtcctgaagagccagtctgtaaaataaccaaccacttacttagcgtttggatagactccatgccttctctctccctgcaaagaaaaatcttgaacatttatgatgtcaattagtgaaagtattgaaaatactaaattataactaaaagcaactttttatgttattgaaaatattgaaagaactgatattaatgataatcattttatttttcatctctctgatatacccaatgtgtggcaatcagcccctaccatgagcattaatgccatgtaaagctggctttctggagtctgccaggtccacacgaagtgctacccccagtttctgctgttacttgctgcctccaggccaggggagcaggagatgctcagctctggtgccttttcttttatttcagtgctgccttcccacccacccagtccattcaccctcacctctccctgcatggaggcaacagcatttccaagatgtaccttgggaagtcaggatagctggaagtaagggtttttggggatccctgtggtctcttcactgatcatcgataagcatttaagagtgtgctaacaccattcacagaggtccctggaaaaaaatatataattttctcacaaacaaccaatacataacctatggcagttggttgaataattattgaaaaaaagaacacgactgaaaaagttcatctgatgcctctgagcatgtgataaagtcctgggtagacatggaaacgtgttcttacaaatgaaccttcggatctatgaaagaaaatatagtagggggactaaggaacatagaattttattagcatatgtgattttacccttatctttgtttctaatttaaagaaacaatttcagaaagtgttagaagaattctatgtttaataatgaatattgttgagttcaaaatattctcatatacccagatttacagagatgacacagtattgaaatggcaggtgggctctgtaagttatttggggattaatgaaatccagggtcttggcaggggggactcaatgtggccctctcactcatccctcatatgtcaagagtccttcctgtcttatatgcacatgctccaaggtccatactcagtagggggaaatctagccggatggttccccaattgttcctcggctggattttcatcatcagaaatttccaactcatctcatcagttttcttgtaagaaaaaaacatttttcactttgtagcacaattttagttatttttgagtcttcttccctaatagtttgtaagcttaaagggacaattttaattttcccctggttaaagagggattctaatatttccaagaatgttttccactggaattgatgggaaatggtttctaaatggcatcgaagctggtctttaatgatcttttgcaatgacttgggaaaaacaccctccctcactacaggatcttcatgttgttaataatataaacaaacctttgaaattagcattgcaaaagaatcccatttttgtttcgtaccacactgttcaaaggaaaattgtttatctctcttcctttctctctctctcttatttgacagaatagcaagtgtttagataatttcagatatattcctaagtattttaccagctgtggaataagttgtgtttgtccatcactgtgtagctaccgttcacatgttctggctctgtactccacgcttatcgcgtgaaccctcacatgttggactttcacagtgtgatctctcacctgtcttggaaactccttcataaagccgctcttccttaggcctgggctgtttggaagtcctggtgaaactttgcggttcacattttaaattcctgaatgaccttttcattctctctttctttatctttgtttttgtccttcattccctccttttgttcttccttcctgcctttcacgtcacctacttatccgactatttcctccatttgcttcttttctatttgccatcacctgtgacccgagtggaacaaaaaccaacacatagttttaagctacacctttctgcacctgatgtaaaatgacattaatccactatttaacttctaaaattatttctgaatacagttgcagataggctggttttcatgaggaagctcgcttggctttagtcttacatttaaattctttgaaagtggctcccagtgctattcagggtcctttcttgaggccagactcatcaccatctactattgattttacagtgcactgacagtttacaggaaggagaagaacagaatttctgcacactacacaacatgtgggcttcctgtagctccagggacatgtagctttggtgaaactggggttttgtaacctctgaatgatatggacttagtgaattctaaggaactcagggggcacgtggtcaggctccaccgcacagaagagccacagtctccagactcatggcgttccctccagaactccccattcccctctgagcatatttctatgctgctgcttcttgtgacttacatgaggcatctcagcttcttcatgtttgtagggatggttccctaagcctgttcaagtaggctctcactagagttaccattcatatttgagaagaaaagaacatttattaaatgtatgtgtggggctgaggttctaaaggaattgaaaagagacgataaacattgaatgagggtgagggcatccctgctggggagaaacctctgtcccctaggaagagtccgttcatgtcatgtggtttgggatgaaccaggggtctgcccccatcgggtcacaggtgatgccaaatagaaaagaagcaaatggaggaaatagtcggataagtaggtgacgtgaaaggcaggacctggtcaccccagcaagtgctatggacagttcccggaaacggttgcccacttcacaggtccatgggtctgacccttggactctgccaggatcaactgcccagagtgccagagttttagccaaaggtgtacttacttccttatttatctccaaaaggatggaaactgtgggagtcaaagcctattttgctgagtgttcccactggatcctctgtagaattagcaggtcatgctgtcaaaatcatggacaaaggctgggtgcagtggctcatgcctataatcccagcactttgggaggccaaggtgggcggatcacctgagctcaggagtttaagaccagcctgggcaacatggggaaactccatctctacaaaatatacaaaatattagccagccatcgtggtgcgtgcctgtggtcccagtttcttgggaggctgaggcgggagtatcatttgagccaggaggttgaggttgcagtgagctgagatcacatcactgcactccatcctgggtgacagagagagaccctgtctcaaaaaaaaa

SEQ ID NO: 31973 - DNA, 10436 bp, Homo Sapiens
gctctgtgtcagccccgtcaccgccgggcggcccgcgcggagtctgagggagatggaagttgagcaagagcagcggcgcagaaaggtggaggccgggaggacgaagcttgctcacttccgacagagaaaaacaaaaggtgacagttcgcattcggagaaaaagacggcgaagaggaagggctcggctgtcgatgcgtctgtccaggaggagagtccggtaaccaaggaggacagcgcactctgtggaggaggggacatttgcaaaagcacatcatgtgacgacacccctgatggggcaggaggggcctttgcagctcagccggaggactgtgatggagagaagagagaggacttggaacagctgcagcagaagcaagtcaatgaccatcctccagagcagtgtgggatgttcacagtcagtgaccacccaccagaacagcatgggatgttcacagtcggtgaccacccaccagaacagcgtgggatgttcacagtcagtgaccacccaccagaacagcatgggatgttcacagtcagtgaccacccaccagaacagcgtgggatgttcacaatcagtgaccaccaaccggaacagcgtgggatgttcacagtcagtgaccacacaccagaacagcgtgggatcttcacaatcagtgaccacccagcagaacagcgtgggatgttcacaaaggagtgtgaacaagaatgtgaacttgccattactgacctggagagcggccgtgaagatgaggctggcctgcatcagagtcaggccgtgcatggccttgagctggaggcgctgcgcctgagtctgagcaacatgcacacggcgcagctggagctgacacaggccaacctccagaaggagaaggagacggcattgacggagctgcgggagatgctcaacagccggcgtgcccaggagctggccctgctacagagcaggcagcagcacgagctggagctcctcagggagcagcacgcacgggagaaggaggaggtggtgctcaggtgtggacaggaagcagctgagctgaaggagaagttacaatcagaaatggagaaaaacgcccagatagtaaagaccctgaaggaagattgggaatctgaaaaagatttatgtttagaaaatctacgcaaagaactgtctgcaaagcatcaatcagaaatggaggatttacaaaaccagtttcagaaagaattggcagaacagagagctgagttggagaagatttttcaagacaaaaaccaggctgaacgggcccttaggaacctggagagtcatcatcaagcagccattgagaagttacgtgaagacctgcagtccgagcacggccggtgtttagaagacttggagttcaagttcaaagagagcgagaaagaaaaacagctggagttagagaatcttcaagcatcatatgaagacctgaaggcacaatcacaagaagagatcaggcgcttgtggtcccagcttgattctgccaggaccagtagacaggaattgagtgagctacatgagcaactcctggcgcgcacctctcgtgtggaagatttagaacagctgaagcagcgagaaaaaacccagcatgagtccgaactggagcaactgaggatttattttgaaaagaagttaagggatgctgagaaaacttaccaagaagacctaaccctgttacagcagaggctgcagggggcgagggaagatgctcttctggactctgtggaagttgggttgtcctgtgtgggtttagaagagaaacctgagaaaggaagaaaagatcacgttgatgaactcgagcctgagcgacataaggagagcctgccacgcttccaggcggagttagaagaaagccacaggcaccagctggaagcgctggagtctcccctctgcatccagcacgaggggcatgtctcagacagatgctgcgtagagacttcagcattgggacacgagtggcgtctggaaccctctgaagggcacagccaagagcttccctgggtgcatctccagggtgtgcaggacggggacttggaggccgacacagagcgggcagccagagtcttgggtctggaaactgagcacaaggtgcaactttcgcttcttcagactgagctcaaagaagaaattgaactcctaaaaatagaaaatagaaatttgtttgagaagttgcagcatgaaactcgtctgaaggacgatttggagaaggtaaaacacaatctaattgaagaccaccagaaggaactaaataatgctaagcaaaagactgagctgatgaaacaggaattccaaagaaaagaaacggactggaaagttatgaaggaggagctacagcgggaagctgaggagaagttaacattgatgctacttgaactgagagaaaaggctgaatccgagaaacagaccatcataaacaagttggagcttcgagaagctgaaatgaggcagcttcaggaccaacaggcagcgcagatcctggatctggagaggtccttgacggagcagcaggcccgcctgcagcagctggaacaggacctcacttcagacgacgccctgcattgcagccagtgtgggcgggagccgcccacagcccaggacggggagcttgccgcgctccacgtgaaggaagactgcgccctgcagctgatgctggcccggagcaggtttttagaggaacgtaaagagatcgccgagaaattcagtgcggaacaagatgccttcctgcagctcctccaggagagacaccagcagcagctcctgtcagtgacggcggagctcgaggccagacaccaggccgcgttgggcgagctgacagcctccttagagagcaagcagggggctctgctggctgcacgtgtggccgaactgcagaccaaacacgctgccgacctcggcgctctggagaccagacatctgtccacccttgattctttggaatcctgttacctgtctgaatttcagaccatccgtgaggagcacaggcaggccctagagctcttacgagcagactttgaggaacaactgtggaaaaaggactctcttcaccaaacgattttgactcaagagttggagaaactgaagcggaaacacaaaggggagctacagtctgtgcgggaccacctgcgaaccgaagcgagcacagagctcgccggaaccgtggctcacgagctgcagggagtgcaccagggtgaatttggaagtgaaaagaaaactgctttgcatgaaaaagaggagacacttcggcttcagagtgcacaggcacagccttttcaccaagaggagaaagagtctttgtctctgcagcttcaaaagaagaatcaccaagtccagcagctgaaagaccaggttttatccttaagtcacgagatagaagagtgccgctccgagttggaggtgctgcagcagaggcgggagcgggagaaccgggaaggcgcaaacctcctctccatgctcaaggccgacgtcaacctgtcccacagcgaaagaggggccctccaggacgccctgcgcaggctgctgggtttgtttggagagacgctgagggcagccgtcaccctgaggagccggatcggggagcgcgtggggctctgcctggatgacgcgggcgcaggcctggccctgtcgacagctccggcgctggaggagacatggtctgatgtggccctcccggagttggacagaactttgtctgaatgtgcagagatgtcttccgtggctgaaattagcagccacatgcgtgaaagctttctcatgagcccagaaagtgtgcgggagtgtgagcagcccatccggagggtcttccagagcctcagcctggccgtggacggcctcatggagatggccctggactccagcaggcagctggaagaagcacgccaacttcattctcgttttgaaaaagaatttagttttaagaatgaggagacagcacaggttgtcaggaagcaccaggagctgctggagtgtttgacggaggagagcgcagcaaaggcagagctggcgctggagctgcacaagactcagggtacccttgagggattcaaggtggagacagcagatctgaaggaggtgctggccgggaaggaggattccgagcaccgtctggtgctggagctggagagcctgagacggcagctgcagcaggcggcccaggagcaggcggcgctgagggaggagtgcacccgtctgtggagtcggggggaggccacagccacggacgccgaggccagagaagctgctctccggaaggaagtggaggatctgaccaaagaacagtcggagaccaggaagcaggctgagaaggaccgctcagccctgctctcccagatgaagattttggagtctgagttagaagaacagctgtctcagcatcgcgggtgtgccaagcaggcggaggccgtcactgccctggaacagcaggtggcatctctggacaagcatttgcgcaaccagcggcaattcatggatgagcaggcagccgagcgggagcacgagcgcgaggagttccagcaggagattcagaggctggaggggcagctccgccaggcggccaagccgcagccctggggccctcgcgacagccagcaggcgccgctggatggagaggttgagttgttacaacacaagttgagagaaaagttggatgaatttaatgaattggctatacagaaagagtcggcagatagacaagtgttaatgcaggaagaagaaattaaacgtctggaggagatgaacatcaacatcaggaaaaaagtggcccagctccaggaagaagtggaaaaacagaaaaacatcgtgaaagggctggaacaggataaagaggtgttaaagaaacagcagatgagtagcttgcttctggcgtccacgttgcagtctacactagatgcaggcagatgtcccgagcctccttcgggcagccctcctgagggtccagaaatacagttagaggtgacacagagagcactcctgcggcgcgagagcgaggttttggacttaaaagaacagctagaaaagatgaaaggtgacttagaaagtaaaaatgaagaaatactacatctgaacttaaaattggacatgcagaacagccagactgctgtcagcctcagagaacttgaggaagagaacacgagcttgaaggtcatatataccagaagttctgagattgaagagctgaaagccactattgaaaatctgcaagagaatcagaaacgattacaaaaggagaaagcagaggaaattgaacaactccatgaagtcattgagaagctgcagcacgagctgtccctcatggggcctgtggtgcacgaagtcagcgacagtcaggctggcagtctgcagagcgagctgctctgctcccaggccgggggccctcgtgggcaggccctacagggcgagctcgaggctgcgctggaagccaaggaggccctgagccggctgctggctgaccaggagcgcaggcacagccaggccctggaggccctgcagcagcgcctccagggcgcagaggaggctgcggagctacagctggctgagctggagcgcaatgtagccctcagggaggctgaggtcgaagacatggcctcccggatccaggagttcgaagcggccctgaaagcaaaggaagcgacgattgccgagagaaatttagaaatcgacgctctgaaccagcggaaggcggcccactctgccgagctggaggccgtcctgttggccttggcccgcatccgccgcgccctggagcagcagcccctggcagccggggcggcgcctcccgagctgcagtggctccgagcgcagtgtgcccgcctcagccgccagctgcaggtgctgcaccagcggttcctgaggtgccaggtggagctggacaggcggcaggcccgcagagccacagctcacacacgggtgcccggggcccacccacagcctcgcatggatggtggcgccaaggcccaggtcaccggcgacgtggaggcctcccatgatgctgctttggagccggttgtccctgacccacagggtgatctgcagcctgtcctggtgacgttgaaggatgcacctctctgcaagcaagaaggcgtgatgtcagtgctcaccgtctgccagaggcagctgcagtcggagctgctcttggtgaaaaatgaaatgcgcctgagtctggaggacggcggcaagggtaaagaaaaagtactggaagattgtcagctgccgaaggtcgatctcgtagctcaggtgaaacagcttcaggaaaaactgaaccgtttgctgtattccatgaccttccagaatgtggatgctgccgacaccaaatctctgtggcccatggcctcagcacacctgttggagagcagctggagtgatgattcctgtgacggagaagagcctgacatatcaccccacatagacacatgtgatgccaatacagccacggggggtgtaactgatgttatcaaaaatcaggccatagacgcgtgtgatgccaatacaaccccagggggtgtaactgatgttatcaaaaattgggattccttgataccagatgaaatgccagattctcccattcaagaaaaatcagaatgtcaggacaggtctctttcttcaccgaccagcgtacttggtggctcccgccaccagagccacactgcagaggctgggccccggaagagcccggtcgggatgctggacctgtcttcctggagctcccctgaggtcctcaggaaggactggaccctggagccctggcccagcctccccgtgacaccccactcaggagccctgagcctgtgcagtgccgacacatccctgggggacagggcggacacctcgctgccacagacccaggggccggggctgctttgttccccaggcgtgtctgcagcagcgctggcactgcagtgggccgagtctccgccggctgacgaccaccatgtgcagaggacggctgtggagaaagatgtcgaagattttatcacaacatcctttgattctcaagaaacattaagttcacctcctcctggattagaaggaaaagctgatagaagtgagaaaagtgacggctcgggttttggagcaagactgagcccggggtcaggaggccctgaggctcaaactgctggtcctgtgacccctgcttccatctctggaaggtttcagccgctgccggaagccatgaaggagaaggaagtgcgtccgaagcacgtgaaggctttactgcagatggtgcgtgacgagagccaccagatcctggcgctgtcagaaggccttgcacccccaagcggcgagccacacccaccccggaaggaagacgagatacaggacatctcgctccatgggggaaagacgcaggaagtgcccaccgcgtgccccgattggagaggggaccttctgcaggttgtgcaagaggcctttgaaaaagagcaggagatgcagggggttgagctgcagccccgactcagtggctcagatctggggggtcacagctccctgctcgaaaggctggagaagatcatccgtgagcagggagacctgcaggaaaagtccctggagcatcttcgcttgccggaccggagcagcctgctgtccgagatccaggcgctgcgtgcccagctgcgcatgacgcacctgcagaaccaggagaagctgcagcacttgcgcacggcgctgacaagcacagaggcgcgcgggagccagcaggagcaccagctgcgcaggcaggttgaactgctggcttataaagtagagcaggagaagtgcattgctggtgacttgcagaagacgctgagtgaagagcaagagaaggcaaacagcgtgcagaagctcctggcggcggagcagactgtagtgcgagatttgaagtccgacctctgtgagagcaggcagaagagcgaacagctgtcccggtccctctgcgaggtgcagcaggaggtcctccagctgagatccatgctgagcagtaaggagaacgagctgaaggccgcgcttcaggagctggagagtgagcaggggaaggggcgtgccctgcagagccagctggaggaggagcagctgcggcacctgcagagggagagccagagtgccaaggccctggaggagctgcgggcgtctttggagacacagcgtgctcagagcagtcgactctgcgtggcactgaaacacgagcagacggccaaggacaacctgcagaaggagctgcgtatcgagcactcacgctgcgaggccttgctggctcaggagcggagccagctctctgagctccagaaggaccttgcggctgagaagagccgcaccctggagctgtcagaggccttgcggcacgagcggctcctgaccgagcagctgagccagaggacacaggaggcttgcgtgcaccaggacacacaggcccatcacgctctgctgcagaagctgaaggaggagaagtcccgggtggtggacttgcaagcgatgcttgaaaaggtgcagcagcaagccctgcattctcagcagcagcttgaggctgaggctcagaagcactgtgaggcgctcaggagagagaaggaggtaagtgccacactgaagtcgacggtggaagccctgcacacccaaaaacgagagctgagatgctctctggagagagagagggagaaaccagcgtggttgcaggcagaattagagcagtcacacccacggttgaaagagcaagaaggacgcaaggctgcgaggaggagcgcggaggccaggcagagcccagcggctgcggagcagtggaggaagtggcagagagacaaggagaagctgcgagaattagaactgcagcgtcagcgtgacttgcataagatcaagcagcttcagcagacagtgagagacctggagtcgaaggacgaggtgcctggcagccgcctccacctaggttctgcccgcagggctgccggctcggatgcggaccacctccgggaacagcagcgagagctggaggcgatgaggcagcggctgctctctgccgcccggcttctcaccagcttcaccagccaggccgtggacaggacagttaatgattggacgtcatccaatgagaaagcagtgatgtctttactgcacacgttggaggagctgaagtctgacttgagcaggcccacctcctcccagaaaaaaatggcagcagagctgcagttccagtttgtggacgtcctgctgaaagacaatgtttccctcacaaaagcgctcagcacggtgacccaggagaagctggagctgagcagagccgtgtctaagcttgagaagttgctgaagcaccatctgcagaagggctgcagcccaagcaggtcggaaaggtctgcttggaagccagacgaaacggctccacagagttccctgaggcgcccagaccccggccggcttccaccagctgccagcgaggaagcacacaccagcaatgtcaagatggaaaaattgtccctgcattacttgagagcagagagctttagaaaagctctgatttatcaaaagaagtatcttttgctgttgattggtggattccaggattctgaacaagaaacactctccatgattgcccatttgggggtatttccttccaaagcagaacggaaaatcacatctcgtcctttcaccaggttccgcacggccgtcagggtggtcattgcaatattaagattacgttttttggttaagaaatggcaagaagtagatcggaaaggagctctggcacaaggaaaagcccctcgcccagggccccgagcacgacagccgcagtctccacccagaaccagagagtcccccccaacccgggatgtaccctctggccacaccagggaccctgccagaggccgcagactggcagcagcagcctccccacacagtgggggaagagccactccatccccaaattcaagattagaaagatccctgactgcttctcaagatccaggacattccttgacagagtatattcaccatttagaagtgatccagcaaagattgggagggtactaccagattctacttcaaagaaatcctgccacccgatgattaaacagtgaataaaatgtcatggctctttcctgcgacaattctatttgaggaaaagatttgtttttcccttttcccaaggaagctcgtgggacagcatgggcactactcttcatgtgcggtgacaccagcccccagatgccttgaattaagtgtcctcacctttatgcatgactgcaaagccagctggagcattttctatggagcctccgtatgttttaggcccatgaccttcgtgaggtgacgggcactcactcccatgagccctggctgtgtgctgttgtgtgcctatcggcagatccatccttcctgcctccaaggaggatacacagagaatggcttcctgttgttttgtttattttcttaacgtgtacagatggaaacttcatttaaaaataaaaacaaaacaactcaaaaa

SEQ ID NO: 31974 - DNA, 1563 bp, Homo Sapiens
gctaggcctcgaggcctagccgagtgggagtggagtggagcggctgtggttgccgactctttcctcttccccacggtccagtcagcgggttaattaggccatcggccctcgagccgagacttgtctcttatttagttctggggagcgcctcgtcgacatgagtgatgtggaggaaaacaacttcgagggcagagagtctcgctctcagtcaaaatctccaacgggaactcctgctcgtgtaaaatcggagagcaggtcaggatctcgtagtccatcaagggtttccaaacactctgaatcccattctcgatcaagatcaaaatccaggtcgaggtcaaggagacattctcatagacgttacactcgatccagatcccactctcactctcataggagacgatctcgaagtagatcatatacaccagaataccggcggcgaaggagccgaagccattctccaatgtctaaccggagaagacatactggcagcagggcaaatccagatcccaacacttgccttggagtgtttggcctcagtttgtacacaacagagagggatcttcgtgaagtattttctcgatatggaccattgagtggtgtcaatgtggtttatgatcagcgaactgggcgatctcgaggatttgcttttgtgtattttgagagaatagatgactcaaaggaggctatggaaagggcaaatggaatggagctggatggtagaagaattcgggtggattattctataaccaagagagcgcacacaccaacaccaggcatctacatgggcagaccaactcatagtggtgggggtggtggaggaggcggcggcggtggaggtggaggtggtggcagacgtcgagattcttactatgatagaggatatgatcgtgggtatgacagatatgaagactatgattaccgatacagaagacgatcaccttctccttattatagtcgatatagatcacgatcaagatctcgttcctacagcccaagacgctattgataacggaatggttgcaattaaggacattttttttcctcttttttttttttttttttttaattctgagatttccccaagctgtggattcttcctactccttaagaaaaaaactttggtttatttagcatctacacttttgtcagttgtgttgctgttttccacccattttattatactcttaaaagatgtaattgttgtcattttgaacagttaaacatcttgagtataaaaagaaccccaatgttatgttatgctttgtaaatttttttttttgcttttacctagataaacttctagctaatcaaataaggaaagaaactgtctttttaaagcttcttttgtgttagatactgtattagagatctgcatttatcatgagttcctttttttttttttaactttatttttgggaaagtaacacatgaagtagttcagtcatgtcaggtttgtctggggtggaatggaacagtcaggtagttgaaagtttttttttagagatgaaaagcttgtgaactcctgtaaaacatgctgtatttgaaatacatctgttaaaactt

SEQ ID NO: 31975 - DNA, 3958 bp, Homo Sapiens
ggcagtgcgagcagccgaggccaccaagaggcaacgggcggcaggttgcagtggaggggcctccgctcccctcggtggtgtgtgggtcctgggggtgcctgccggcccagcgaggaggcccacgcccaccatggtcccctgctggaaccatggcaacatcacccgctccaaggcggaggagctgctttccaggacaggcaaggacgggagcttcctcgtgcgtgccagcgagtccatctcccgggcatacgcgctctgcgtgctgtatcggaattgcgtttacacttacagaattctgcccaatgaagatgataaattcactgttcaggcatccgaaggcgtctccatgaggttcttcaccaagctggaccagctcatcgagttttacaagaaggaaaacatggggctggtgacccatctgcaataccctgtgccgctggaggaagaggacacaggcgacgaccctgaggaggacacagtagaaagtgtcgtgtctccacccgagctgcccccaagaaacatcccgctgactgccagctcctgtgaggccaaggaggttcctttttcaaacgagaatccccgagcgaccgagaccagccggccgagcctctccgagacattgttccagcgactgcaaagcatggacaccagtgggcttccagaagagcatcttaaggccatccaagattatttaagcactcagctcgcccaggactctgaatttgtgaagacagggtccagcagtcttcctcacctgaagaaactgaccacactgctctgcaaggagctctatggagaagtcatccggaccctcccatccctggagtctctgcagaggttatttgaccagcagctctccccgggcctccgtccacgtcctcaggttcctggtgaggccaatcccatcaacatggtgtccaagctcagccaactgacaagcctgttgtcgtccattgaagacaaggtcaaggccttgctgcacgagggtcctgagtctccgcaccggccctcccttatccctccagtcacctttgaggtgaaggcagagtctctggggattcctcagaaaatgcagctcaaagtcgacgttgagtctgggaaactgatcattaagaagtccaaggatggttctgaggacaagttctacagccacaagaaaatcctgcagctgattaagtcacagaaatttctgaataagttggtgatcttggtggaaacagagaaggagaagatcctgcggaaggaatatgtttttgctgactccaaaaagagagaaggcttctgccagctcctgcagcagatgaagaacaagcactcagagcagccggagcccgacatgatcaccatcttcatcggcacctggaacatgggtaacgccccccctcccaagaagatcacgtcctggtttctctccaaggggcagggaaagacgcgggacgactctgcggactacatcccccatgacatttacgtgatcggcacccaagaggaccccctgagtgagaaggagtggctggagatcctcaaacactccctgcaagaaatcaccagtgtgacttttaaaacagtcgccatccacacgctctggaacatccgcatcgtggtgctggccaagcctgagcacgagaaccggatcagccacatctgtactgacaacgtgaagacaggcattgcaaacacactggggaacaagggagccgtgggggtgtcgttcatgttcaatggaacctccttagggttcgtcaacagccacttgacttcaggaagtgaaaagaaactcaggcgaaaccaaaactatatgaacattctccggttcctggccctgggcgacaagaagctgagtccctttaacatcactcaccgcttcacgcacctcttctggtttggggatcttaactaccgtgtggatctgcctacctgggaggcagaaaccatcatccagaaaatcaagcagcagcagtacgcagacctcctgtcccacgaccagctgctcacagagaggagggagcagaaggtcttcctacacttcgaggaggaagaaatcacgtttgccccaacctaccgttttgagagactgactcgggacaaatacgcctacaccaagcagaaagcgacagggatgaagtacaacttgccttcctggtgtgaccgagtcctctggaagtcttatcccctggtgcacgtggtgtgtcagtcttatggcagtaccagcgacatcatgacgagtgaccacagccctgtctttgccacatttgaggcaggagtcacttcccagtttgtctccaagaacggtcccgggactgttgacagccaaggacagattgagtttctcaggtgctatgccacattgaagaccaagtcccagaccaaattctacctggagttccactcgagctgcttggagagttttgtcaagagtcaggaaggagaaaatgaagaaggaagtgagggggagctggtggtgaagtttggtgagactcttccaaagctgaagcccattatctctgaccctgagtacctgctagaccagcacatcctcatcagcatcaagtcctctgacagcgacgaatcctatggcgagggctgcattgcccttcggttagaggccacagaaacgcagctgcccatctacacgcctctcacccaccatggggagttgacaggccacttccagggggagatcaagctgcagacctctcagggcaagacgagggagaagctctatgactttgtgaagacggagcgtgatgaatccagtgggccaaagaccctgaagagcctcaccagccacgaccccatgaagcagtgggaagtcactagcagggcccctccgtgcagtggctccagcatcactgaaatcatcaaccccaactacatgggagtggggccctttgggccaccaatgcccctgcacgtgaagcagaccttgtcccctgaccagcagcccacagcctggagctacgaccagccgcccaaggactccccgctggggccctgcaggggagaaagtcctccgacacctcccggccagccgcccatatcacccaagaagtttttaccctcaacagcaaaccggggtctccctcccaggacacaggagtcaaggcccagtgacctggggaagaacgcaggggacacgctgcctcaggaggacctgccgctgacgaagcccgagatgtttgagaaccccctgtatgggtccctgagttccttccctaagcctgctcccaggaaggaccaggaatcccccaaaatgccgcggaaggaacccccgccctgcccggaacccggcatcttgtcgcccagcatcgtgctcaccaaagcccaggaggctgatcgcggcgaggggcccggcaagcaggtgcccgcgccccggctgcgctccttcacgtgctcatcctctgccgagggcagggcggccggcggggacaagagccaagggaagcccaagaccccggtcagctcccaggccccggtgccggccaagaggcccatcaagccttccagatcggaaatcaaccagcagaccccgcccaccccgacgccgcggccgccgctgccagtcaagagcccggcggtgctgcacctccagcactccaagggccgcgactaccgcgacaacaccgagctcccgcatcacggcaagcaccggccggaggaggggccaccagggcctctaggcaggactgccatgcagtgaagccctcagtgagctgccactgagtcgggagcccagaggaacggcgtgaagcactggaccctctcccgggacctcctgctggctcctcctgcccagcttcctatgcaaggctttgtgttttcaggaaagggcctagcttctgtgtggccacagagttcactgcctgtgagacttagcaccaagtgctgaggctggaagaaaaacgcacaccagacgggcaacaacagtctgggtcccagctcgctcttggtacttggg

SEQ ID NO: 31976 - DNA, 3383 bp, Homo Sapiens
agaagagctgagacatccgttcccctacaagaaactctccccgggtggaacaagatggattatcaagtgtcaagtccaatctatgacatcaattattatacatcggagccctgccaaaaaatcaatgtgaagcaaatcgcagcccgcctcctgcctccgctctactcactggtgttcatctttggttttgtgggcaacatgctggtcatcctcatcctgataaactgcaaaaggctgaagagcatgactgacatctacctgctcaacctggccatctctgacctgtttttccttcttactgtccccttctgggctcactatgctgccgcccagtgggactttggaaatacaatgtgtcaactcttgacagggctctattttataggcttcttctctggaatcttcttcatcatcctcctgacaatcgataggtacctggctgtcgtccatgctgtgtttgctttaaaagccaggacggtcacctttggggtggtgacaagtgtgatcacttgggtggtggctgtgtttgcgtctctcccaggaatcatctttaccagatctcaaaaagaaggtcttcattacacctgcagctctcattttccatacagtcagtatcaattctggaagaatttccagacattaaagatagtcatcttggggctggtcctgccgctgcttgtcatggtcatctgctactcgggaatcctaaaaactctgcttcggtgtcgaaatgagaagaagaggcacagggctgtgaggcttatcttcaccatcatgattgtttattttctcttctgggctccctacaacattgtccttctcctgaacaccttccaggaattctttggcctgaataattgcagtagctctaacaggttggaccaagctatgcaggtgacagagactcttgggatgacgcactgctgcatcaaccccatcatctatgcctttgtcggggagaagttcagaaactacctcttagtcttcttccaaaagcacattgccaaacgcttctgcaaatgctgttctattttccagcaagaggctcccgagcgagcaagctcagtttacacccgatccactggggagcaggaaatatctgtgggcttgtgacacggactcaagtgggctggtgacccagtcagagttgtgcacatggcttagttttcatacacagcctgggctgggggtggggtgggagaggtcttttttaaaaggaagttactgttatagagggtctaagattcatccatttatttggcatctgtttaaagtagattagatcttttaagcccatcaattatagaaagccaaatcaaaatatgttgatgaaaaatagcaacctttttatctccccttcacatgcatcaagttattgacaaactctcccttcactccgaaagttccttatgtatatttaaaagaaagcctcagagaattgctgattcttgagtttagtgatctgaacagaaataccaaaattatttcagaaatgtacaactttttacctagtacaaggcaacatataggttgtaaatgtgtttaaaacaggtctttgtcttgctatggggagaaaagacatgaatatgattagtaaagaaatgacacttttcatgtgtgatttcccctccaaggtatggttaataagtttcactgacttagaaccaggcgagagacttgtggcctgggagagctggggaagcttcttaaatgagaaggaatttgagttggatcatctattgctggcaaagacagaagcctcactgcaagcactgcatgggcaagcttggctgtagaaggagacagagctggttgggaagacatggggaggaaggacaaggctagatcatgaagaaccttgacggcattgctccgtctaagtcatgagctgagcagggagatcctggttggtgttgcagaaggtttactctgtggccaaaggagggtcaggaaggatgagcatttagggcaaggagaccaccaacagccctcaggtcagggtgaggatggcctctgctaagctcaaggcgtgaggatgggaaggagggaggtattcgtaaggatgggaaggagggaggtattcgtgcagcatatgaggatgcagagtcagcagaactggggtggatttggtttggaagtgagggtcagagaggagtcagagagaatccctagtcttcaagcagattggagaaacccttgaaaagacatcaagcacagaaggaggaggaggaggtttaggtcaagaagaagatggattggtgtaaaaggatgggtctggtttgcagagcttgaacacagtctcacccagactccaggctgtctttcactgaatgcttctgacttcatagatttccttcccatcccagctgaaatactgaggggtctccaggaggagactagatttatgaatacacgaggtatgaggtctaggaacatacttcagctcacacatgagatctaggtgaggattgattacctagtagtcatttcatgggttgttgggaggattctatgaggcaaccacaggcagcatttagcacatactacacattcaataagcatcaaactcttagttactcattcagggatagcactgagcaaagcattgagcaaaggggtcccatataggtgagggaagcctgaaaaactaagatgctgcctgcccagtgcacacaagtgtaggtatcattttctgcatttaaccgtcaataggcaaaggggggaagggacatattcatttggaaataagctgccttgagccttaaaacccacaaaagtacaatttaccagcctccgtatttcagactgaatgggggtggggggggcgccttaggtacttattccagatgccttctccagacaaaccagaagcaacagaaaaaatcgtctctccctccctttgaaatgaatataccccttagtgtttgggtatattcatttcaaagggagagagagaggtttttttctgttctttctcatatgattgtgcacatacttgagactgttttgaatttgggggatggctaaaaccatcatagtacaggtaaggtgagggaatagtaagtggtgagaactactcagggaatgaaggtgtcagaataataagaggtgctactgactttctcagcctctgaatatgaacggtgagcattgtggctgtcagcaggaagcaacgaagggaaatgtctttccttttgctcttaagttgtggagagtgcaacagtagcataggaccctaccctctgggccaagtcaaagacattctgacatcttagtatttgcatattcttatgtatgtgaaagttacaaattgcttgaaagaaaatatgcatctaataaaaaacaccttctaaaataaaaaaaaaaaaaaaaaaaaaaaaaaa

SEQ ID NO: 31977 - DNA, 7368 bp, Homo Sapiens
cggcaggagagagagggagagacaagagacacacacagagagacggcgaggaagggaaagacccagagggacgcctagaacgagacttggagccagacagaggaagaggggacgtgtgtttgcagactggctgggcccgtgacccagcttcctgagtcctccgtgcaggtggcagctgtaccaggctggcaggtcactgagagtgggcagctgggccccagaactgtgcctggcccagtgggcagcaggagctcctgacttgggaccatggtgattcttcagcagggggaccatgtgtggatggacctgagatcggggcaggagttcgacgtgcccatcggggcggtggtgaagctctgcgactctgggcaggtccaggtggtggatgatgaagacaatgaacactggatctctccgcagaacgcaacgcacatcaagcctatgcaccccacgtcggtccacggcgtggaggacatgatccgcctgggggacctcaacgaggcgggcatcttgcgcaacctgcttatccgctaccgggaccacctcatctacacgtatacgggctccatcctggtggctgtgaacccctaccagctgctctccatctactcgccagagcacatccgccagtataccaacaagaagattggggagatgcccccccacatctttgccattgctgacaactgctacttcaacatgaaacgcaacagccgagaccagtgctgcatcatcagtggggaatctggggccgggaagacggagagcacaaagctgatcctgcagttcctggcagccatcagtgggcagcactcgtggattgagcagcaggtcttggaggccacccccattctggaagcatttgggaatgccaagaccatccgcaatgacaactcaagccgtttcggaaagtacatcgacatccacttcaacaagcggggcgccatcgagggcgcgaagattgagcagtacctgctggaaaagtcacgtgtctgtcgccaggccctggatgaaaggaactaccacgtgttctactgcatgctggagggtatgagtgaggatcagaagaagaagctgggcttgggccaggcctctgactacaactacttggccatgggtaactgcataacctgtgagggccgggtggacagccaggagtacgccaacatccgctccgccatgaaggtgctcatgttcactgacaccgagaactgggagatctcgaagctcctggctgccatcctgcacctgggcaacctgcagtatgaggcacgcacatttgaaaacctggatgcctgtgaggttctcttctccccatcgctggccacagctgcatccctgcttgaggtgaaccccccagacctgatgagctgcctgactagccgcaccctcatcacccgcggggagacggtgtccaccccactgagcagggaacaggcactggacgtgcgcgacgccttcgtaaaggggatctacgggcggctgttcgtgtggattgtggacaagatcaacgcagcaatttacaagcctccctcccaggatgtgaagaactctcgcaggtccatcggcctcctggacatctttgggtttgagaactttgctgtgaacagctttgagcagctctgcatcaacttcgccaatgagcacctgcagcagttctttgtgcggcacgtgttgaagctggagcaggaggaatatgacctggagagcattgactggctgcacatcgagttcactgacaaccaggatgccctggacatgattgccaacaagcccatgaacatcatctccctcatcgatgaggagagcaagttccccaagggcacagacaccaccatgttacacaagctgaactcccagcacaagctcaacgccaactacatcccccccaagaacaaccatgagacccagtttggcatcaaccattttgcaggcatcgtctactatgagacccaaggcttcctggagaagaaccgagacaccctgcatggggacattatccagctggtccactcctccaggaacaagttcatcaagcagatcttccaggccgatgtcgccatgggcgccgagaccaggaagcgctcgcccacacttagcagccagttcaagcggtcactggagctgctgatgcgcacgctgggtgcctgccagcccttctttgtgcgatgcatcaagcccaatgagttcaagaagcccatgctgttcgaccggcacctgtgcgtgcgccagctgcggtactcaggaatgatggagaccatccgaatccgccgagctggctaccccatccgctacagcttcgtagagtttgtggagcggtaccgtgtgctgctgccaggtgtgaagccggcctacaagcagggcgacctccgcgggacttgccagcgcatggctgaggctgtgctgggcacccacgatgactggcagataggcaaaaccaagatctttctgaaggaccaccatgacatgctgctggaagtggagcgggacaaagccatcaccgacagagtcatcctccttcagaaagtcatccggggattcaaagacaggtctaactttctgaagctgaagaacgctgccacactgatccagaggcactggcggggtcacaactgtaggaagaactacgggctgatgcgtctgggctccctgcggctgcaggccctgcaccgctcccggaagctgcaccagcagtaccgcctggcccgccagcgcatcatccagttccaggcccgctgccgcgcctatctggtgcgcaaggccttccgccaccgcctctgggctgtgctcaccgtgcaggcctatgcccggggcatgatcgcccgcaggctgcaccaacgcctcagggctgagtatctgtggcgcctcgaggctgagaaaatgcagctggcggaggaagagaagcttcggaaggagatgagcgccaagaaggccaaggaggaggccgagcgcaagcatcaggagcgcctggcccagctggctcgtgaggacgctgagcgggagctgaaggagaaggaggccgctcggcggaagaaggagctcctggagcagatggaaagggcccgccatgagcctgtcaatcactcagacatggtggacaagatgtttggcttcctggggacttcaggtggcctgccaggccaggagggccaggcacctagtggctttgaggacctggagcgagggcggagggagatggtggaggaggacctggatgcagccctgcccctgcctgacgaggatgaggaggacctctctgagtataaatttgccaagttcgcggccacctacttccaggggacaaccacgcactcctacacccggcggccactcaaacagccactgctctaccatgacgacgagggtgaccagctggcagccctggcggtctggatcaccatcctccgcttcatgggggacctccctgagcccaagtaccacacagccatgagtgatggcagtgagaagatccctgtgatgaccaagatttatgagaccctgggcaagaagacgtacaagagggagctgcaggccctgcagggcgagggcgaggcccagctccccgagggccagaagaagagcagtgtgaggcacaagctggtgcatttgactctgaaaaagaagtccaagctcacagaggaggtgaccaagaggctgcatgacggggagtccacagtgcagggcaacagcatgctggaggaccggcccacctccaacctggagaagctgcacttcatcatcggcaatggcatcctgcggccagcactccgggacgagatctactgccagatcagcaagcagctgacccacaacccctccaagagcagctatgcccggggctggattctcgtgtctctctgcgtgggctgtttcgccccctccgagaagtttgtcaagtacctgcggaacttcatccacgggggcccgcccggctacgccccgtactgtgaggagcgcctgagaaggacctttgtcagtgggacacggacacagccgcccagctggctggagctgcaggccaccaagtccaagaagccaatcatgttgcccgtgacattcatggatgggaccaccaagaccctgctgacggactcggcaaccacggccaaggagctctgcaacgcgctggccgacaagatctctctcaaggaccggttcgggttctccctctacattgccctgtttgacaaggtgtcctccctgggcagcggcagtgaccacgtcatggacgccatctcccagtgcgagcagtacgccaaggagcagggcgcccaggagcgcaacgccccctggaggctcttcttccgcaaagaggtcttcacgccctggcacagcccctccgaggacaacgtggccaccaacctcatctaccagcaggtggtgcgaggagtcaagtttggggagtacaggtgtgagaaggaggacgacctggctgagctggcctcccagcagtactttgtagactatggctctgagatgatcctggagcgcctcctgaacctcgtgcccacctacatccccgaccgcgagatcacgcccctgaagacgctggagaagtgggcccagctggccatcgccgcccacaagaaggggatttatgcccagaggagaactgatgcccagaaggtcaaagaggatgtggtcagttatgcccgcttcaagtggcccttgctcttctccaggttttatgaagcctacaaattctcaggccccagtctccccaagaacgacgtcatcgtggccgtcaactggacgggtgtgtactttgtggatgagcaggagcaggtacttctggagctgtccttcccagagatcatggccgtgtccagcagcaggggagcgaaaacgacggcccccagcttcacgctggccaccatcaagggggacgaatacaccttcacctccagcaatgctgaggacattcgtgacctggtggtcaccttcctagaggggctccggaagagatctaagtatgttgtggccctgcaggataaccccaaccccgcaggcgaggagtcaggcttcctcagctttgccaagggagacctcatcatcctggaccatgacacgggcgagcaggtcatgaactcgggctgggccaacggcatcaatgagaggaccaagcagcgtggggacttccccaccgacagtgtgtacgtcatgcccactgtcaccatgccaccgcgggagattgtggccctggtcaccatgactcccgatcagaggcaggacgttgtccggctcttgcagctgcgaacggcggagcccgaggtgcgtgccaagccctacacgctggaggagttttcctatgactacttcaggcccccacccaagcacacgctgagccgtgtcatggtgtccaaggcccgaggcaaggaccggctgtggagccacacgcgggaaccgctcaagcaggcgctgctcaagaagctcctgggcagtgaggagctctcgcaggaggcctgcctggccttcattgctgtgctcaagtacatgggcgactacccgtccaagaggacacgctccgtcaacgagctcaccgaccagatctttgagggtcccctgaaagccgagcccctgaaggacgaggcatatgtgcagatcctgaagcagctgaccgacaaccacatcaggtacagcgaggagcggggttgggagctgctctggctgtgcacgggccttttcccacccagcaacatcctcctgccccacgtgcagcgcttcctgcagtcccgaaagcactgcccactcgccatcgactgcctgcaacggctccagaaagccctgagaaacgggtcccggaagtaccctccgcacctggtggaggtggaggccatccagcacaagaccacccagattttccacaaagtctacttccctgatgacactgacgaggccttcgaagtggagtccagcaccaaggccaaggacttctgccagaacatcgccaccaggctgctcctcaagtcctcagagggattcagcctctttgtcaaaattgcagacaaggtcctcagcgttcctgagaatgacttcttctttgactttgttcgacacttgacagactggataaagaaagctcggcccatcaaggacggaattgtgccctcactcacctaccaggtgttcttcatgaagaagctgtggaccaccacggtgccagggaaggatcccatggccgattccatcttccactattaccaggagttgcccaagtatctccgaggctaccacaagtgcacgcgggaggaggtgctgcagctgggggcgctgatctacagggtcaagttcgaggaggacaagtcctacttccccagcatccccaagctgctgcgggagctggtgccccaggaccttatccggcaggtctcacctgatgactggaagcggtccatcgtcgcctacttcaacaagcacgcagggaagtccaaggaggaggccaagctggccttcctgaagctcatcttcaagtggcccacctttggctcagccttcttcgagcaaactacggagccaaacttccctgagatcctcctaattgccatcaacaagtatggggtcagcctcatcgatcccaaaacgaaggatatcctcaccactcatcccttcaccaagatctccaactggagcagcggcaacacctacttccacatcaccattgggaacttggtgcgcgggagcaaactgctctgcgagacgtcactgggctacaagatggatgacctcctgacttcctacattagccagatgctcacagccatgagcaaacagcggggctccaggagcggcaagtgaacagtcacggggaggtgctggttccatgcctgctctcgaggcagcagtgggttcaggcccatcagctacccctgcagctggggaagacttatgccatcccggcagcgaggctgggctggccagccaccactgactataccaactgggcctctgatgttcttccagtgaggcatctctctgggatgcagaacttccctccatccacccctctggcacctgggttggtctaatcctagtttgctgtggccttcccggttgtgagagcctgtgatccttagatgtgtctcctgtttcagaccagccccaccatgcaacttcctttgactttctgtgtaccactgggatagaggaatcaagaggacaatctagctctccatactttgaacaaccaaatgtgcattgaatactctgaaaccgaagggactggatctgcaggtgggatgagggagacagaccacttttctatattgcagtgtgaatgctgggcccctgctcaagtctaccctgatcacctcagggcataaagcatgtttcattctctggaaaaaaaaaaaaaaaaaaaaaaaaaaaaaa

SEQ ID NO: 31978 - DNA, 4050 bp, Homo Sapiens
cggcaggagagagagggagagacaagagacacacacagagagacggcgaggaagggaaagacccagagggacgcctagaacgagacttggagccagacagaggaagaggggacgtgtgtttgcagactggctgggcccgtgacccagcttcctgagtcctccgtgcaggtggcagctgtaccaggctggcaggtcactgagagtgggcagctgggccccagaactgtgcctggcccagtgggcagcaggagctcctgacttgggaccatggtgattcttcagcagggggaccatgtgtggatggacctgagatcggggcaggagttcgacgtgcccatcggggcggtggtgaagctctgcgactctgggcaggtccaggtggtggatgatgaagacaatgaacactggatctctccgcagaacgcaacgcacatcaagcctatgcaccccacgtcggtccacggcgtggaggacatgatccgcctgggggacctcaacgaggcgggcatcttgcgcaacctgcttatccgctaccgggaccacctcatctacacgtatacgggctccatcctggtggctgtgaacccctaccagctgctctccatctactcgccagagcacatccgccagtataccaacaagaagattggggagatgcccccccacatctttgccattgctgacaactgctacttcaacatgaaacgcaacagccgagaccagtgctgcatcatcagtggggaatctggggccgggaagacggagagcacaaagctgatcctgcagttcctggcagccatcagtgggcagcactcgtggattgagcagcaggtcttggaggccacccccattctggaagcatttgggaatgccaagaccatccgcaatgacaactcaagccgtttcggaaagtacatcgacatccacttcaacaagcggggcgccatcgagggcgcgaagattgagcagtacctgctggaaaagtcacgtgtctgtcgccaggccctggatgaaaggaactaccacgtgttctactgcatgctggagggtatgagtgaggatcagaagaagaagctgggcttgggccaggcctctgactacaactacttggccatgggtaactgcataacctgtgagggccgggtggacagccaggagtacgccaacatccgctccgccatgaaggtgctcatgttcactgacaccgagaactgggagatctcgaagctcctggctgccatcctgcacctgggcaacctgcagtatgaggcacgcacatttgaaaacctggatgcctgtgaggttctcttctccccatcgctggccacagctgcatccctgcttgaggtgaaccccccagacctgatgagctgcctgactagccgcaccctcatcacccgcggggagacggtgtccaccccactgagcagggaacaggcactggacgtgcgcgacgccttcgtaaaggggatctacgggcggctgttcgtgtggattgtggacaagatcaacgcagcaatttacaagcctccctcccaggatgtgaagaactctcgcaggtccatcggcctcctggacatctttgggtttgagaactttgctgtgaacagctttgagcagctctgcatcaacttcgccaatgagcacctgcagcagttctttgtgcggcacgtgttgaagctggagcaggaggaatatgacctggagagcattgactggctgcacatcgagttcactgacaaccaggatgccctggacatgattgccaacaagcccatgaacatcatctccctcatcgatgaggagagcaagttccccaagggcacagacaccaccatgttacacaagctgaactcccagcacaagctcaacgccaactacatcccccccaagaacaaccatgagacccagtttggcatcaaccattttgcaggcatcgtctactatgagacccaaggcttcctggagaagaaccgagacaccctgcatggggacattatccagctggtccactcctccaggaacaagttcatcaagcagatcttccaggccgatgtcgccatgggcgccgagaccaggaagcgctcgcccacacttagcagccagttcaagcggtcactggagctgctgatgcgcacgctgggtgcctgccagcccttctttgtgcgatgcatcaagcccaatgagttcaagaagcccatgctgttcgaccggcacctgtgcgtgcgccagctgcggtactcaggaatgatggagaccatccgaatccgccgagctggctaccccatccgctacagcttcgtagagtttgtggagcggtaccgtgtgctgctgccaggtgtgaagccggcctacaagcagggcgacctccgcgggacttgccagcgcatggctgaggctgtgctgggcacccacgatgactggcagataggcaaaaccaagatctttctgaaggaccaccatgacatgctgctggaagtggagcgggacaaagccatcaccgacagagtcatcctccttcagaaagtcatccggggattcaaagacaggtctaactttctgaagctgaagaacgctgccacactgatccagaggcactggcggggtcacaactgtaggaagaactacgggctgatgcgtctgggctccctgcggctgcaggccctgcaccgctcccggaagctgcaccagcagtaccgcctggcccgccagcgcatcatccagttccaggcccgctgccgcgcctatctggtgcgcaaggccttccgccaccgcctctgggctgtgctcaccgtgcaggcctatgcccggggcatgatcgcccgcaggctgcaccaacgcctcagggctgagtatctgtggcgcctcgaggctgagaaaatgcagctggcggaggaagagaagcttcggaaggagatgagcgccaagaaggccaaggaggaggccgagcgcaagcatcaggagcgcctggcccagctggctcgtgaggacgctgagcgggagctgaaggagaaggaggccgctcggcggaagaaggagctcctggagcagatggaaagggcccgccatgagcctgtcaatcactcagacatggtggacaagatgtttggcttcctggggacttcaggtggcctgccaggccaggagggccaggcacctagtggctttgaggacctggagcgagggcggagggagatggtggaggaggacctggatgcagccctgcccctgcctgacgaggatgaggaggacctctctgagtataaatttgccaagttcgcggccacctacttccaggggacaaccacgcactcctacacccggcggccactcaaacagccactgctctaccatgacgacgagggtgaccagctggcagccctggcggtctggatcaccatcctccgcttcatgggggacctccctgagcccaagtaccacacagccatgagtgatggcagtgagaagatccctgtgatgaccaagatttatgagaccctgggcaagaagacgtacaagagggagctgcaggccctgcagggcgagggcgaggtcctgcaggcccagctccccgagggccagaagaagagcagtgtgaggcacaagctggtgcatttgactctgaaaaagaagtccaagctcacagaggaggtgaccaagaggctgcatgacggggagtccacagtgcagggcaacagcatgctggaggaccggcccacctccaacctggagaagctgcacttcatcatcggcaatggcatcctgcggccagcactccggtcagtgccggaaagtcttttggtggctgagtggtgcctctgtcaacctagcaagagattaagccaagcatggcctgggtttggcttcgctgctagctagttggtggagttaggaccttggtggagttatttcatctttctaagcctctgattccttgtctgtaaagggggaatcctaaaacaggcatcccttggagatattgcaggttcagttgaaggcaacagaaataaatatcacaataaagagagctgcagaaataaaaaaaaaaaa

SEQ ID NO: 31979 - DNA, 3157 bp, Homo Sapiens
ccgggttgagctgcggcacacgtgcgacggccgtgatgaagttcgcttaccggttttcaaatttgctgggtacggtgtaccggcgtgggaacctaaattttacctgcaatggaaattcagttatcagtcccgtgggcaatagagtcactgtatttgaccttaaaaacaacaaatctgacacgctgcccctggccactcggtacaacgtcaagtgcgtggggctgtccccggatggccgcctcgctatcatcgtcgatgaagggggcgatgcgctgctggtcagcctggtctgcaggtctgtgctgcaccacttccacttcaagggctctgtgcacagtgtgtccttctcccctgatggcaggaagtttgttgtcacaaagggtaacattgcccagatgtatcatgcccctgggaagaagcgggagttcaacgccttcgttctggacaagacctattttgggccctacgatgagaccacctgcatcgactggacggatgactccaggtgctttgtggttgggagcaaagacatgtccacctgggtgttcggagccgagcgctgggacaacctcatctactatgcactggggggacataaggatgccatcgtggcctgcttctttgaatccaacagcctggacctgtactcactcagccaggacggagtgctgtgcatgtggcagtgtgacacgccccccgagggcttgcggctgaagccccctgcgggctggaaagcagacctgttgcagcgggaggaggaagaggaggaggaggaggaccaggagggcgacagagagaccaccatccggggaaaagccactccggccgaggaggagaagacaggaaaagtgaagtactcacggctggccaagtacttcttcaataaagaaggggattttaacaacctgacagctgcagcatttcataagaagtctcacctcttggtcactggctttgcttctggaatcttccatcttcatgagctgccagagtttaacctcatccactccctgagcatctcagatcagagcatcgcctcagtggccatcaatagctcgggggactggattgcttttggctgttcaggcctgggccagctgctggtgtgggagtggcagagtgagtcctacgtgctcaagcagcagggccacttcaacagcatggtggccctggcctactcgcccgacggacagtacatcgtgactggcggggacgacggcaaggtcaaggtgtggaacaccctcagcggcttctgcttcgtcacttttacggagcactccagcggggtgaccggtgtgacctttactgccaccggctacgttgtggtgacctcatccatggacgggaccgtgcgagcctttgaccttcacaggtaccgaaacttccgcaccttcacctctccacgccccacccagttctcctgtgtggcggtggatgcgagcggtgagatcgtctctgcaggggcgcaggactcctttgagattttcgtgtggtccatgcagacaggcaggctccttgatgttttgtctggacacgaagggcccatcagtggtctgtgttttaacccaatgaagtccgtcctggccagtgcctcctgggacaagacggtgcgcctatgggacatgtttgacagctggaggaccaaggagacgctggccctgacctctgatgctctggctgtgacttttcgccctgatggtgcggagctggctgtggccacactgaactcacagatcaccttctgggaccctgagaacgcggtgcagacgggctccattgagggcaggcatgacctcaagactggcaggaaggagctggacaagattacagccaagcacgcggccaaggggaaggccttcaccgccctgtgctactctgcagacggccacagcatcctggcgggaggcatgtccaagttcgtgtgcatctaccacgtccgtgagcagattctcatgaagaggttcgagatctcttgcaacctgtctctggacgccatggaggaatttttgaaccgaagaaaaatgacagagtttggcaacctggcactaattgatcaggatgctgggcaggaggatggagtcgcgataccactgccaggcgtcaggaaaggtgacatgagttctcggcacttcaaacctgagatcagggtgacctcactccgcttctctcccactgggcgctgctgggcggccaccaccacggagggactcctcatctactccctggacacccgcgtgctctttgacccgtttgagctggacaccagcgtcacccccgggagggtgcgcgaggcactgcgccagcaggacttcaccagggccatcctcatggccctccggctcaacgagagcaaactggtgcaggaggccctggaggcggtgcccaggggcgagattgaagtggtcacctcctcccttcctgaactgtatgtggagaaagtgctggagtttttagcttcctcctttgaagtgtctcgccacctggaattctacctcctctggactcacaaactgctcatgttgcacggacagaagctgaagtccagagccgggacgctgctgcctgtcattcagttcctccagaagagcatccagcggcacctggacgacctgtcgaaactctgtagctggaaccactataacatgcagtacgcactagcagtttccaagcagcggggcacaaaacgctccctagacccgctgggaagtgaggaggaggcagaagcatctgaagatgacagcctgcatctgcttggaggaggaggcagagactcagaagaagagatgctggcctagagccagccggttgcagcgttggattgtgccggctaagacctgccagggagatgggacccttgtgccacctgggccagcaaagaggaggggtccagagaacagctgaaatactgtcactagtggtagtgacttgcttttcctgtgcacacatgtagcccatcaggacagcgagccgacgggtcacgccaggggccggcacgcactggcacctggccccaggagcggggccgtgtgaacggtgatgaatgttgaaaatgcgtctcagagaggtattcacatgaactttgtatgagacttatttatatttttaacataaaggtttgataaagaacttagggattaaaaaaaagatggagttttct

SEQ ID NO: 31980 - DNA, 3480 bp, Homo Sapiens
cgatgaaggttactgcctatcgaggcacgacgcaagatcaatccgaggcgcagctaaccccctcagagcaagttcgcggcacccgacgcccctccccttttcctctggcctcccctgacggaagcggaagcggccctcgcgcacactagtcgtctggttctctggctccggaagctgcgctccttcaccctcctcgttggtgtcctgtcaccatggcgctggctgtcttgcgggtcctggagccctttccgaccgagacacccccgttggcagtgctgctgccacccgggggcccgtggccggcggcggagctgggcctggtgctggccctgaggcctgcaggggagagcccggcagggccggcgctgctggtggcagccctggaggggccggacgcgggcaccgaagagcagggtcccgggccgccgcagctactggttaaccgcgcgctgctgcggctcctggcactgggctccggggcctgggtgcgggcgcgggcggtgcggcggcccccggcgctaggttgggcactgcttggcacctcgctggggcctgggctcggaccgcgagtcgggccgctgctggtgaggcgcggagagaccctcccagttcccggaccgcgggtgctggagacgcggccggcgttgcaagggctgctgggcccagggactcggctggctgtgactgagctccgcgggcgggccagactgtgtccagagtctggggacagcagtcggcccccacccccgcccgtggtgtcctcctttgcggtttctggcacagtgcggcgactccagggagttctgggagggactggagattcactaggggtgagccggagctgtctccgtggccttggcctcttccagggcgaatgggtgtgggtggcccaggccagagagtcatcgaacacttcacagccgcacttggctagggtgcaggtcctagaacctcgctgggacctctctgatagactgggacccggctctggaccgctgggagagcccctcgctgacggactggcgcttgtccctgccactttggcttttaatcttggctgtgaccccctggaaatgggagagctcagaattcagaggtacttggaaggctccatcgcccctgaagacaaaggaagctgctcattgctgcctgggcctccatttgccagagagttacacatcgaaattgtgtcttctccccactacagcactaatggaaattatgacggtgttctttaccggcactttcagatacccagggtagtccaggaaggggatgttctatgtgtgccaacaattgggcaagtagagatcctggaaggaagtccagagaaactgcccaggtggcgggaaatgttttttaaagtgaagaaaacagttggggaagctccagatggaccagccagtgcctacttggccgacaccacccatacctccttgtacatggtgggttctaccctgagccctgttccatggctcccttcagaggaatccactctctggagcagtttgtctcctccaggcctggaggccttggtgtctgaactctgtgctgtcctgaagcctcgcctccagccagggggtgccctgctgacaggaactagcagtgtccttctacggggccccccaggctgtgggaagaccacagtagttgctgctgcctgtagtcaccttgggctccacttactgaaggtgccctgctccagcctctgtgcagaaagtagtggggctgtggagacaaaactgcaggccatcttctcccgggcccgccgttgccggcctgcagtcctgttgctcacagctgtggaccttctgggccgggaccgtgatgggctgggtgaggatgcccgtgtgatggctgtgctgcgtcacctcctcctcaatgaggaccccctcaacagctgccctcccctcatggttgtggccaccacaagccgggcccaggacctgcctgctgatgtgcagacagcatttcctcatgagctcgaggtgcctgctctgtcagaggggcagcggctcagcatcctgcgggccctcactgcccaccttcccctgggccaggaggtgaacttggcacagctagcacggcggtgtgcaggctttgtggtaggggatctctatgcccttctgacccacagcagccgggcagcctgcaccaggatcaagaactcaggtttggcaggtggcttgactgaggaggatgagggggagctgtgtgctgccggctttcctctcctggctgaggactttgggcaggcactggagcaactgcagacagctcactcccaggccgttggagcccccaagatcccctcagtgtcctggcatgatgtgggtgggctgcaggaggtgaagaaggagatcctggagaccattcagctccccctggagcaccctgagctactgagcctgggcctgagacgctcaggccttctgctccatgggccccctggcaccggcaagacccttctggccaaggcagtagccactgagtgcagccttaccttcctcagcgtgaaggggccagagctcattaacatgtatgtgggccaaagtgaggagaatgtgcgggaagtgtttgccagggccagggctgcagctccatgcattatcttctttgatgaactggactctttggccccaagccgggggcgaagtggagattctggaggagtgatggacagggtggtgtctcagctccttgccgagctagatgggctgcacagcactcaggatgtgtttgtgattggagccaccaacagaccagatctcctggaccctgcccttctgcggcctggcagatttgacaagctggtgtttgtgggggcaaatgaggaccgggcctcccagctacgcgttctaagtgccatcacacgcaaattcaagctagagccatctgtgagcctggtaaacgtgctagattgctgccctccccagctgacgggcgcggacctctactctctctgctctgatgctatgacagctgccctcaaacgcagggttcatgacctggaggaagggctggaaccaggtagctcagcactgatgctcaccatggaggacttgctgcaggctgccgcccggctgcaaccctcagtcagtgagcaggagctgctccggtacaagcgcatccagcgcaagtttgctgcctgctaggagccccccagggtctgggaccccgctcagcatggctgcaggtaccttgatagcccacagagagatctgggaaggaagggctcctcctcaggctgctgccaacccacctggaggccacctccctccaggagatcccagggtgcaaagtggcattgagacagcagcaacagctcaagagatatctcctgcctacttgcccctccttccaggccggctctaagagaaaggcccatctactcaggaagagggccaggccttgggttctggggattgggccctgagagggctagttctgtggctgaaaataaagcatgtcccgcccccg

SEQ ID NO: 31981 - DNA, 2430 bp, Homo Sapiens
cacaggggcactgacatctttgctggactcttttaatcctcataaacccaggctgctggcactcgaaatttgagaagggcaatcagtctggcctcttgcctttctggcctgcaggcccagcctgaacaaacaatttaggtggagctcctggaggctggaagcagagaggaggtacctcaccatcctctcctgccagctgttgcagactctgcctggggaactgtttaagggtgagcagaggcatttatctccatgttaacaagcagatgtcatggcacccccagtaccggagctccaagttccgtcatgtctttggcaaaccagccagcaaggagaactgctacgactccgtgcctatcacccgcagcgttcacgacaaccacttctgtgccgtgaacccccacttcattgcagttgtgactgagtgtgctggtggagggggcttcctcgtcatccccctgcaccagacagggaagttggacccccactacccaaaagtctgcgggcacagaggcaacgttttggatgtcaagtggaacccttttgatgattttgagatcgcctcctgttctgaagatgccacaattaagatctggagcatccccaagcagctgctgaccaggaacctcacggcctacaggaaggaactcgtgggccacgcgcgcagagtaggcctggtggagtggcaccccacggccgccaacatcctcttcagtgctggctatgactacaaggtgatgatctggaacctggatacaaaggagtctgtcatcacaagccccatgagtacgattagctgtcaccaagatgtgatcctctccatgtccttcaacaccaacgggagcctgttggccaccacctgcaaagaccgcaagattcgggttattgacccccgagcagggaccgtcctccaggaggccagctacaaagggcaccgggccagcaaagtgctgtttctggggaacctgaagaagctgatgtccacaggcacatcccgatggaacaaccggcaggtggccttgtgggaccaggataacctctctgtgcctctgatggaggaggacctggacggctcctcgggcgtgctgtttcccttctatgacgcggacaccagcatgctctacgtggtggggaagggagatggcaacatccgctactacgaggtgagcgccgacaagcctcacctgagctacctgactgagtaccgctcctataacccacagaaggggatcggtgtcatgccaaagagaggactcgacgtgtcctcctgcgagatcttccgcttctacaagctgatcacaaccaaaagcctcatcgagcccatctccatgattgtgccccgggggtcagaatcctaccaagaggacatataccctccaacaggaggggcccagccctccctgacggcccaggagtggctcagcgggatgaatcgagacccaatcctggtgtcccttaggcctggctctgagctgctgagaccccacccactgcctgcagagagacctatcttcaattccatggccccagcctcaccccggctcttgaatcagacagaaaagctggctgcagaagatggctggaggtcttcctccctgttggaggagaagatgccaaggtgggcagcagaacacaggctggaggagaagaaaacctggctgacaaatggctttgacgttttcgaatgccccccaccaaagacagagaatgagttgctgcagatgttctaccggcaacaggaggagatccgaaggctccgggagctgttgacccagcgagaggtccaggccaaacagttggaactggagatcaaaaacttgcggatgggctcagagcagctctgagcagagacctctgccctcctcaccctcagggacaccactcggctccatggggaggtttagaaccaaaccacaagtcccctcaaggacaaccactatttctatattttttaccagaaaaccaaactctccatcgctgaaagagattccagtgggacatggtgccgtttttctgtttgccttcttgcaacaacagtttctgaattgactttgttttcagatgatgccttctgatgaattctgttattaagggcccatgatgagctgtaacttctcaagaggaaagaacacagtagaaaactagagctggaaggatctaggttgacctgtctgtgattttcaaccctgtggtccagagaatagggaagactggccagacgcactggctcatgcctgtaatcccagcactctgggaggctgaggtgggcggatttcttgaggtcgggagtttgaaaccagtctcaccaggcgcagtggctcacgcctgtaattccagcatgttgggaggccgaggctggtggatcacgaggtcagcagttcgagaccagcctgaccaacatggtgaaaccccatctctactaaaaatccc

SEQ ID NO: 31982 - DNA, 2784 bp, Homo Sapiens
accaaaccgtcctctacagcctcctggccccggcgcaggctgcccgtactgcccgtggcatgagggagccggaagagctgatgcccgattcgggtgctgtgtttacatttgggaaaagtaaatttgctgaaaataatcccggtaaattctggtttaaaaatgatgtccctgtacatctttcatgtggagatgaacattctgctgttgttaccggaaataataaactttacatgtttggcagtaacaactggggtcagttaggattaggatcaaagtcagccatcagcaagccaacatgtgtcaaagctctaaaacctgaaaaagtgaaattagctgcctgtggaaggaaccacaccctggtgtcaacagaaggaggcaatgtatatgcaactggtggaaataatgaaggacagttggggcttggtgacaccgaagaaagaaacacttttcatgtaattagcttttttacatccgagcataagattaagcagctgtctgctggatctaatacttcagctgccctaactgaggatggaagactttttatgtggggtgacaattccgaagggcaaattggtttaaaaaatgtaagtaatgtctgtgtccctcagcaagtgaccattgggaaacctgtctcctggatctcttgtggatattaccattcagcttttgtaacaacagatggtgagctatatgtgtttggagaacctgagaatgggaagttaggtcttcccaatcagctcctgggcaatcacagaacaccccagctggtgtctgaaattccggagaaggtgatccaagtagcctgtggtggagagcatactgtggttctcacggagaatgctgtgtatacctttgggctgggacaatttggtcagctgggtcttggcacttttctttttgaaacttcagaacccaaagtcattgagaatattagggatcaaacaataagttatatttcttgtggagaaaatcacacagctttgataacagatatcggccttatgtatacttttggagatggtcgccacggaaaattaggacttggactggagaattttaccaatcacttcattcctactttgtgctctaattttttgaggtttatagttaaattggttgcttgtggtggatgtcacatggtagtttttgctgctcctcatcgtggtgtggcaaaagaaattgaattcgatgaaataaatgatacttgcttatctgtggcgacttttctgccgtatagcagtttaacctcaggaaatgtactgcagaggactctatcagcacgtatgcggcgaagagagagggagaggtctccagattctttttcaatgaggagaacactacctccaatagaagggactcttggcctttctgcttgttttctccccaattcagtctttccacgatgttctgagagaaacctccaagagagtgtcttatctgaacaggacctcatgcagccagaggaaccagattatttgctagatgaaatgaccaaagaagcagagatagataattcttcaactgtagaaagccttggagaaactactgatatcttaaacatgacacacatcatgagcctgaattccaatgaaaagtcattaaaattatcaccagttcagaaacaaaagaaacaacaaacaattggggaactgacgcaggatacagctcttactgaaaacgatgatagtgatgaatatgaagaaatgtcagaaatgaaagaagggaaagcatgtaaacaacatgtgtcacaagggattttcatgacgcagccagctacgactatcgaagcattttcagatgaggaagtagagatcccagaggagaaggaaggagcagaggattcaaaaggaaatggaatagaggagcaagaggtagaagcaaatgaggaaaatgtgaaggtgcatggaggaagaaaggagaaaacagagatcctatcagatgaccttacagacaaagcagaggatcatgaattttctaaaactgaggaactaaaactagaagatgtggatgaggaaattaatgctgaaaatgtggaaagcaagaagaaaactgtgggagatgatgaaagtgttcctacaggttatcacagtaaaacagaaggagcagaaagaaccaatgatgatagctcagctgaaactattgaaaagaaagaaaaagccaacctagaggaacgggccatttgtgagtacaatgaaaacccaaaaggatacatgcttgatgatgcagatagcagttcattagaaatcctagaaaacagtgaaacaacaccaagcaaagacatgaaaaaaacaaagaagatttttctgttcaaaagagtcccctcaataaatcaaaagattgtcaagaataacaatgagccgctcccagagataaaatccataggagaccagatcattttaaaaagtgataataaagatgccgaccagaaccacatgagtcagaatcatcagaatatcccaccaacaaatacagagagaagatcaaaatcctgtacaatactataaatatatatttatgttttcacagtcaccaagtgtattgtaatgtatacttgaaaaatgttataacttatgaagtaaagtttctgatagtagtctttaaaagatataagacttaatatgttttattcagcttctataagtgtgaccagttttgatatttatttatgctaatatttttaacaagtcatttcaaaatatgtgtatctcaaattctccctaaagtgttgtggccttaactgttcagtattgcaataaaaaatatatttttatatgtggaaaa

SEQ ID NO: 31983 - DNA, 3362 bp, Homo Sapiens
aaaaaatcaattttggaagatgtcactgaacaactcttccaatgtatttctggattcagtgcccagtaataccaatcgctttcaagttagtgtcataaatgagaaccatgagagcagtgcagctgcagatgacaatactgacccaccacattatgaagaaacctcttttggggatgaagctcagaaaagactcagaatcagctttaggcctgggaatcaggagtgctatgacaatttcctccacagtggagaaactgctaaaacagatgccagttttcacgcttatgattctcacacaaacacatactatctacaaacttttggccacaacaccatggatgccgttcccaagatagagtactatcgtaacaccggcagcatcagtgggcccaaggtcaaccgacccagcctgcttgagattcacgagcaactcgcaaagaatgtggcagtcaccccaagttcagctgacagagttgctaacggtgatgggatacctggagatgaacaagctgaaaataaggaagatgatcaagctggtgttgtgaagtttggatgggtgaaaggtgtgctggtaagatgcatgctgaacatctggggagtcatgctcttcattcgcctctcctggattgttggagaagctggaattggtcttggagttatcatcattggcctatccaccatagtaacgacaatcacaggtatgtccacgtctgctattgccacgaacggagttgttagaggaggtggggcctactatcttatttccagaagtttagggcccgagttcggtgggtcaataggcctgatctttgcttttgctaatgcagtggctgttgctatgtatgtggtgggattcgctgaaactgtagtagatctacttaaggagagtgattcgatgatggtggatccaaccaatgacatccggattataggctccatcacagtggtgattcttctaggaatttcagtagctggaatggaatgggaggcaaaggcccaagtcattcttctggtcattcttctaattgctattgcaaacttcttcattggaactgtcattccatccaacaatgagaaaaagtccagaggtttctttaattaccaagcatcaatatttgcagaaaactttgggccacgcttcacaaagggtgaaggcttcttctctgtctttgccatttttttcccagcagctactgggattcttgctggtgccaatatctcaggagatttggaggatccccaagatgccatccccagaggaaccatgctggccattttcatcaccactgttgcctacttaggggttgcaatttgtgtaggggcctgtgtggtccgagatgccaccgggaacatgaatgacaccatcatttctgggatgaactgcaatggttcagcagcatgtgggttgggctatgacttctcaagatgtcgacatgaaccatgtcagtacgggctgatgaacaatttccaggtcatgagcatggtatcagggttcggccccctcatcactgcgggaatcttttctgcaacactctcctccgccctggcctcccttgtcagcgcacccaaagtgttccaggctctgtgcaaggacaacatctacaaagccctgcagttttttgcaaagggatatgggaaaaacaatgaacccctgagaggatatattctcacttttcttatagccatggcatttattcttattgcggaactgaacaccattgctcccatcatctccaactttttcctggcctcatatgcacttattaatttctcctgcttccatgcctcttatgccaaatctccaggatggagacctgcgtatggaatttacaacatgtgggtatctctttttggagctgttttgtgctgtgcagtcatgtttgtcatcaactggtgggcagctgtcatcacctatgtcattgaattcttcctttacgtctatgtgacttgtaagaagccagatgtgaactggggctcctccacacaggctctttcctacgtgagtgctttagacaatgctctggaattaaccacagtggaagaccacgtaaaaaacttcaggccccagtgcattgtcttaacagggggacccatgacaagacctgctctcctggacataactcacgcctttaccaagaacagtggcctttgcatctgctgtgaagtctttgtgggaccgcgcaaactgtgtgttaaggagatgaacagtggcatggcgaaaaaacaggcctggcttataaagaacaaaatcaaggctttttatgctgcagtggcggcagactgtttcagggatggtgtccgaagtcttcttcaggcctcaggcttaggaagaatgaaaccaaacactctggtgattggatataagaaaaactggaggaaagctcccttgacagagattgagaactacgtgggaatcatacatgatgcatttgattttgagattggcgtggttatagtcagaatcagccaaggatttgacatctctcaggttcttcaggtgcaagaggaattagagagattagaacaggagagactagcattggaagcgactatcaaagataatgagtgtgaagaggaaagtggaggcatccgaggcttgtttaaaaaagctggcaagttgaacattactaagacaacgcctaaaaaagatggcagcattaacacaagccagtcgatgcatgtgggagagttcaaccagaaactggtggaagccagcactcaatttaaaaagaaacaagaaaaaggcacaattgatgtttggtggttgtttgatgatggagggttaacacttcttatcccctatatcttaactctcagaaaaaaatggaaagactgtaaattaagaatctatgtgggagggaagatcaaccgcattgaagaagaaaaaattgcaatggcttcccttctgagcaaatttaggataaaatttgcagacatccatatcatcggtgacatcaacattaggccaaacaaagagagctggaaagtctttgaagagatgattgaaccatatcgtctccatgaaagctgcaaagatttaacaactgctgagaaattaaaaagagaaactccgtggaaaattacagatgcagaactggaagcagtcaaggaaaagagttaccgccaagttcgactgaatgaactcttacaggagcactccagagctgctaatctcattgtcctgagccttcccgtggcaagaaagggatccatatcggatttgttgtatatggcttggttggaaatcctcacaaagaacctcccacctgtcttactagttagaggaaatcacaaaaatgtcttgacattttactcttaaaacatgaaagattggaatacattttaacttaatgtaatgcata

SEQ ID NO: 31984 - DNA, 3059 bp, Homo Sapiens
gccccccccccacgcctcctcccctcctcccgcccgcgcgtgctcccgcccctcgccgccgctcgctcgctcgccggccggcctccgctcggccccctccctcagctccggtgcgcggcggccgacgacccgcggcctgggcctcggcgcgccaccggcgcccgcgcggagcggcccgggggccctcacgcaggcccatggcggcggcgcggcgcgctctcgggccgggcaccacgcgggcgcggggccgggggcgcggggccgggggcgggtcccgccgggcgctgggccgtgggccgcctggagggccgcgagttcgagtatctgatgaagaagcgctcggtgaccatcggccgcaactcgtcgcagggctcggtggacgtgagcatgggccactcgagcttcatctcccggcgccacctcgagatcttcacgcccccgggcggcgcggccatggcggggccgctccggagctgccgcccgcgcagcccaggcccgacgccggcggcgacttctacctgcgctgcttgggcaagaacggggtattcgtggacggcgtgttccagaggcgcggggcgccgccgctgcagctgccgcgcgtgtgcacattcaggttcccgagcacaaacatcaagataacgttcactgccctgtccagcgagaagagagagaagcaggaggcgtctgagtctccagtgaaggccgtacagccacacatctcgcccctgaccatcaacattccagacaccatggcccacctcatcagccctctgccctcccccacgggaaccatcagcgctgcaaactcctgcccctccagcccccggggagcggggtcttcagggtacaaggtgggccgagtgatgccatctgacctcaatttaatggctgacaactcacagcctgaaaatgaaaaggaagcttcaggtggagacagcccgaaggatgattcaaagccgccttactcctacgcgcagctgatagttcaggcgattacgatggctcccgacaaacagctcaccctgaacgggatttatacacacatcactaaaaattatccctactacaggactgcggacaagggctggcagaattcaattcgccacaatctctctctgaatcgttatttcatcaaagtgccgcgttcccaggaagaaccaggcaaaggctcgttctggaggatagacccagcctctgaaagcaaattaatagaacaggcttttaggaaacgacggcctaggggcgtgccctgctttagaacccctctgggaccgctctcttctaggagtgccccagcctctcccaatcacgcgggagtgctgtctgctcactctagtggcgcccagacccctgagagcctgtcgagggaaggttcgccggcccccctggagcctgagcctggcgctgcacagcccaaactcgctgtcatccaggaagcccggtttgcccagagcgccccagggtcacctctgtccagtcagccagtcttaatcaccgtccagcggcagctaccacaggccatcaagcctgtcacctacactgtggccaccccagtgaccacctcgacctcccagccacccgtcgtgcagacggttcacgtcgtccaccagatcccagcggtgtcggtcaccagtgtggccggactggccccagcgaacacgtacactgtctctggacaagctgtggtcaccccggcagccgtgctggcccctcctaaggcagaggcccaggagaatggagaccacagggaagtcaaagtgaaagtagagcctattcccgccattggccacgccacgctcggcactgccagccggatcattcagacggcacagaccaccccggtccagacggtgaccatagtacaacaggcacctctaggtcaacaccagctaccaataaaaactgtaacacaaaacggcactcacgtggcatcagtccccactgcggtccacggccaggtgaacaatgccgcggcgagtcctttgcacatgttggcaacacacgcatccgcatcggcctccctgcccacaaagcgccacaacggtgaccagccggagcagccggagctgaagcggatcaagacagaagacggcgagggcatcgtcattgccctgagcgtggacacgccaccggcagccgtaagggaaaagggtgtccagaactagcgaccgggagagcttttctttaacgatatcaactctgtggtgccaaaaggagacgcggcctcccgccagcactcgggggtgcagggccctgtggttggacttcacctctcagcactgaaaacccaaaacccagctggccttaacactccttaaagacagaagtcacacttgaacaaaacccacacacaacaaaacctgatttgggagacggtgtctccactgagcacctgctgggctgagcttctacctacgagtgaaactctgtcctcccgcgaggaccaggcatcgctgtgtgaggacggcacggccagcgcctgctgtgagtgggtctcccaagactaggcctcaggacgcggggggagccatccccgccgccctcacaggacccaccaggcagcggagacatgtggaattagagtattttgaggtgtcctttctttacaaaataatggggtcttgggcatttcacatcactccatttctactgagactttcagaatcacacaggccctttccgtggatttcatttggggcaaagaaacaacatagttttgtttttgttttcagcctatggaatgatttccttttgtctgtcttgttcaagttcagacgaagctactctggcatctgcacatttccgtgttacagcagctgcctgatgaattttatccacctccatttcagcatgtggctcgcgtggacaggtggacggacgctgtggccgcatggaaccttgagaacccagggacgagccagtgccgggaaggaactgccgggactcaccgagctgcacttaactgttctctttctggctattttttgttgtttgtttctttgtgttgactttgtccctggcaaaattttccactctgagtaaaacaagtctcggaattc

SEQ ID NO: 31985 - DNA, 2570 bp, Homo Sapiens
ccccatcaggatgatatgagacttgaaagaagacgatgcatacaggaggagagacttcagcatgcaaaccttcatctgtccggcttgcaccgtcgttctcattccatgctgctggccttcagatggctgcacagatgccccactcacaccagtacagtgaccgtcgccagccgagcataagtgaccagcaggtgtctgccttaccatattctgaccagattcagcaacctctaactaaccaggtgatgcctgacattgtcatgttacagaggcggatgccccaaaccttccgtgatccagcaactgctcctctgagaaaactctctgtggacttgatcaaaacatacaagcatattaatgaggtttactatgcaaaaaagaagcgaagacaccaacagggccggggggacgattccagtcataagaaggagcggaaggtttacaatgatggttacgatgatgataactatgattatattgtaaaaaacggggaaaagtggatggatcggtatgaaatcgactccttaataggcaaaggttcatttggacaggttgtgaaagcttatgacagagtggagcaagaatgggtcgccattaaaatcatcaagaacaagaaagcgtttctgaatcaagcccagatagaagtgcggctgcttgagctcatgaacaaacacgacactgaaatgaagtactacatagtgcatttgaaacgccactttatgtttcgaaaccatctctgtttagtgtttgaaatgctgtcctataatctctatgatttgttgagaaacaccaacttccgaggggtctctttgaacctaacacgaaagtttgcgcaacagatgtgcacagcattgctttttcttgcgactccagaacttagtatcattcactgtgacttaaagcctgagaacatccttctttgtaaccccaaacgcagtgcaatcaagatagttgactttggcagttcttgtcagttggggcagaggatataccagtatattcagagtcgcttttatcggtctccagaggtgctactgggaatgccttatgaccttgccattgatatgtggtccctcgggtgtattttggttgaaatgcacactggagaacctctgttcagtggtgccaatgaggtagatcagatgaataaaatagtggaagttctgggtattccacctgctcatattcttgaccaagcaccaaaagcaagaaagttctttgagaatttgccagatggcacttggaacttaaagaagaccaaagatggaaaacgggagtacaaaccaccaggaacccgtaaacttcataacattcttggagtggaaacaggaggacctggtgggcgacgtgctggggagtcaggtcatacggtcgctgactacttgaagttcaaagacctcattttaaggatgcttgattatgaccccaaaactcgaattcaaccttattatgctctgcagcacagtttcttcaagaaaacagctgatgaaggtacaaatacaagtaatagtgtatctacaagccccgccatggagcagtctcagtcttcgggcaccacctccagtacatcgtcaagctcaggtggctcatcggggacaagcaacagtgggagagcccggtcggatccgacgcaccagcatcggcacagtggtgggcacttcacagctgccgtgcaggccatggactgcgagacacacagtccccaggtgcgtcagcaatttcctgctcctcttggttggtcaggcactgaagctcctacacaggtcactgttgaaactcatcctgttcaagaaacaacctttcatgtaggccctcaacagaatgcattgcatcatcaccatggtaacagttcccatcaccatcaccaccaccaccaccatcaccaccaccatggacaacaagccttgggtaaccggaccaggccaagggtctacaattctccaacgaatagctcctctacccaagattctatggaggttggccacagtcaccactccatgacatccctgtcttcctcaacgacttcttcctcgacatcttcctcctctactggtaaccaaggcaatcagccctaccagaatcgcccagtggctgctaataccttggactttggacagaatggagctatggacgttaatttgaccgtctactccaatccccgccaagagactggcatagctggacatccaacataccaattttctgctaatacaggtcctgcacattacatgactgaaggacatctgacaatgaggcaaggggctgatagagaagagtcccccatgacaggagtttgtgtgcaacagagtcctgtagctagctcgtgactacattgaaacttgagtttgtttcttgtgtgtttttatagaagtggtgtttttttttccaaaaacaaagtgcaaagctgcttgaatcaggaggagattaacacactgaaccgctacaagagggcaaagctgatttttttttttaacttgaaaagattgcaaagggacattgaagtgtttaaaagagccatgtccaaacccatcttcatggatagctcagaggtatcctctttttgctccccc

SEQ ID NO: 31986 - DNA, 1515 bp, Homo Sapiens
ttttttttttttttcatcaggtcagagccaaaggaaagcttgaaaaatgaagacattagcaggacttgttctgggacttgtcatcttggatgctgctgtgactgccccaactctagagtccatcaactatgactcagaaacctatgatgccaccttagaagacctggataatttgtacaactatgaaaacatacctgttgataaagttgagattgaaatagccacagtaatgccttcagggaacagagagctcctcactccacccccacagcctgagaaggcccaggaagaggaagaggaggaggaatctactcccaggctgattgatggctcttctccccaggagcctgaattcacaggggttctggggccacacacaaatgaagactttccaacctgtctttggtgtacttgtataagtaccaccgtgtactgtgatgaccatgaacttgatgctattcctccgctgccaaagaacaccgcttatttctattcccgctttaacagaattaaaaagatcaacaaaaatgactttgcaagcctaagtgatttaaaaaggattgatctgacatcaaatttaatatctgagattgatgaagatgcattccgaaaactgcctcaacttcgagagcttgtcctgcgtgacaacaaaataaggcagctcccagaattgccaaccacttcgacatttattgatattagcaacaatagacttggaaggaaagggataaagcaagaagcatttaaagacatgtatgatctccatcatctgtacctcactgataacaacttggaccacatccctctgccactcccagaaaatctacgagcccttcacctccagaataacaacattctggaaatgcacgaagatacgttctgcaatggtaaaaatttgacttatattcgtaaggcactagaggacattcgattggatggaaaccctattaatctcagcaaaactccacaagcatacatgtgtctacctcgtctgcctgttgggagccttgtctaatttcagataatggttagcattacgatggctactataaataaaccattcttactgctctcttccaaaacaaaactcagcatgatactttgagattgtgttctgagagatgatatgactacataaaatacaattaaaaatgttataatataatgaaaatgtagtaatttaagaaaacaccagatgagttaggaataaacctataacatttacaaaaagagcaaaactaagtgatagaaaatatttcacacatgttcttatagatcatgtatcacttgcaagttttaggagttcatatcctatatcatttcaaattaagtacataataaagtaaaattttgaaatgaacactttaggtatttttgccaagatttagatgtttttaattaaacttttctcttcctttttttttcactaaggcatgtttattcccctaatccattaaagagcatgaaaaaaagaataaatgtatttgaaaaaaaaaaaaaaaaaaaaaaaaaaaa

SEQ ID NO: 31987 - DNA, 2529 bp, Homo Sapiens
cttggctcttacaatgctcacttgttttcacaatgcagcaaaatgaaatgccttagaaaaagagtaacattccagaaaacggtgtaatttatttttcttccttaattgccccatctgtggaggatttctttgctgaacaccacatcaaagggatcttctgcatttaaaatagaagaggcatcatgctgaagagggaggggaaggtccaaccttacactaaaaccctggatggaggatggggatggatgattgtgattcattttttcctggtgaatgtgtttgtgatggggatgaccaagacttttgcaattttctttgtggtctttcaagaagagtttgaaggcacctcagagcaaattggttggattggatccatcatgtcatctcttcgtttttgtgcaggtcccctggttgctattatttgtgacatacttggagagaaaactacctccattcttggggctttcgttgttactggtggatatctgatcagcagctgggccacaagtattccttttctttgtgtgactatgggacttctacccggtttgggttctgctttcttataccaagtggctgctgtggtaactaccaaatacttcaaaaaacgattggctctttctacagctattgcccgttctgggatgggactgacttttcttttggcaccctttacaaaattcctgatagatctgtatgactggacaggagcccttatattatttggagctatcgcattgaatttggtgccttctagtatgctcttaagacccatccatatcaaaagtgagaacaattctggtattaaagataaaggcagcagtttgtctgcacatggtccagaggcacatgcaacagaaacacactgccatgagacagaagagtctaccatcaaggacagtactacgcagaaggctggactacctagcaaaaatttaacagtctcacaaaatcaaagtgaagagttctacaatgggcctaacaggaacagactgttattaaagagtgatgaagaaagtgataaggttatttcgtggagctgcaaacaactgtttgacatttctctctttagaaatcctttcttctacatatttacttggtcttttctcctcagtcagttagcatacttcatccctacctttcacctggtagccagagccaaaacactggggattgacatcatggatgcctcttaccttgtttctgtagcaggtatccttgagacggtcagtcagattatttctggatgggttgctgatcaaaactggattaagaagtatcattaccacaagtcttacctcatcctctgcggcatcactaacctgcttgctcctttagccaccacatttccactacttatgacctacaccatctgctttgccatctttgctggtggttacctggcattgatactgcctgtactggttgatctgtgtaggaattctacagtaaacaggtttttgggacttgccagtttctttgctgggatggctgtcctttctggaccacctatagcaggctggttatatgattatacccagacatacaatggctctttctacttctctggcatatgctatctcctctcttcagtttcctttttttttgtaccattggccgaaagatggaaaaacagtctgacctgaaagaaagaagactgcaatcaagtgagagctaaacaaaagaaaacctaaactaatgtcattggaaacaaaagcttgaaagaaacacatcgcatctacatttgtaacatgagaaggaaaacaatttttttttttttttttttgagacggagtctcgctctttcgcccaggctggagtgcagtggcgcaatctcggctcactgtaatctccgcctcctgggttcaagggattctcctgcctcagcctcccaagtagctgggactacaggcacacgccaccacacccagctaattttttgtatttttagtagaggcggggtttcaccatgttagccaggatggtctccatctcctgacctcgtgatccgcccgccttgtcctccaaagtgctgggattacaggcatgagccactgggcgcggccagataagtttttaaggttccttcttgctttagcattctgagaaatgtctaattggtagtaagacaagagtaatagcaacctgtattgttagtatttaaccaaataggctaaaattttaatcaggtaccttatgtattaaatagaaatcggaatgtaccataataaatccaaactctcaattacgccatggtaattcagtcactaaaatatgtaaagatagaaaattttttaatttaaagaagtgtgaaacatagccattgattgatcagaattctggaatctgaatattaaaaccttacttagtgactggaatggtatatgctccctccaaaagtttatctttgtttattgattaaaggtaatccttactttctttgtattacttaggttctcaattaaaggtaatccttactttctttgtattacttaggttcttaaatttctatgataaacatgtattgct

SEQ ID NO: 31988 - DNA, 432 bp, Homo Sapiens
  misc_feature (403)..(404): n is a, c, g, or t
  misc_feature (426)..(427): n is a, c, g, or t
gtatatcctagaaggttatgcagccatgctactatctaattcccagaaaatttactcatccgccaaaagaaacactcytgggacctattagaagtcactccccattttccccaaacccctctagtgcctgacaaccctctactgtgggaactttaacttttgggctttatttttcacagctctcgtggcattatccttcagtggggctattggactgacttttcttatgctgggatgtgccttagaggattatgggtaagttatcatttcaaaaagaactattcctctttctgtgtctttgtcactattagtatgggtgttagagaggttcggtcaatttagcaccaagttctaaccagtgagttagtggagcccagtttatgaacacagtccctttgtgggnnacaggtgtacttttgcagaggnntctgt

SEQ ID NO: 31989 - DNA, 3602 bp, Homo Sapiens
gcggcggctcggcactgttacctctcggtccggctggcgccgcgggcggtttggtcctttccgggcgcgcgggggcgacagcggcagcgacccgaggcctgcggcctaggcctcagcgcggcggcgggctcgagtgcagcgcggaaccggcccgagggccctacccggaggcaccatgagcgtggaggcgtacgggcccagctcgcagactctcactttcctggacacggaggaggccgagctgcttggcgccgacacacagggctccgagttcgagttcaccgactttactcttcctagccagacgcagacgccccccggcggccccggcggcccgggcggtggcggcgcgggaagcccgggcggcgcgggcgccggcgctgcggcgggacagctcgacgcgcaggttgggcccgaaggcatcctgcagaacggggctgtggacgacagtgtagccaagaccagccagttgttggctgagttgaacttcgaggaagatgaagaagacacctattacacgaaggacctccccatacacgcctgcagttactgtggaatacacgatcctgcctgcgtggtttactgtaataccagcaagaagtggttctgcaacggacgtggaaatacttctggcagccacattgtaaatcaccttgtgagggcaaaatgcaaagaggtgaccctgcacaaggacgggcccctgggggagacagtcctggagtgctacaactgcggctgtcgcaacgtcttcctcctcggcttcatcccggccaaagctgactcagtggtggtgctgctgtgcaggcagccctgtgccagccagagcagcctcaaggacatcaactgggacagctcgcagtggcagccgctgatccaggaccgctgcttcctgtcctggctggtcaagatcccctccgagcaggagcagctgcgggcacgccagatcacggcacagcagatcaacaagctggaggagctgtggaaggaaaacccttctgccacgctggaggacctggagaagccgggggtggacgaggagccgcagcatgtcctcctgcggtacgaggacgcctaccagtaccagaacatattcgggcccctggtcaagctggaggccgactacgacaagaagctgaaggagtcccagactcaagataacatcactgtcaggtgggacctgggccttaacaagaagagaatcgcctacttcactttgcccaagactgactctgacatgcggctcatgcagggggatgagatatgcctgcggtacaaaggggaccttgcgcccctgtggaaagggatcggccacgtcatcaaggtccctgataattatggcgatgagatcgccattgagctgcggagcagcgtgggtgcacctgtggaggtgactcacaacttccaggtggattttgtgtggaagtcgacctcctttgacaggatgcagagcgcattgaaaacgtttgccgtggatgagacctcggtgtctggctacatctaccacaagctgttgggccacgaggtggaggacgtaatcaccaagtgccagctgcccaagcgcttcacggcgcagggcctccccgacctcaaccactcccaggtttatgccgtgaagactgtgctgcaaagaccactgagcctgatccagggcccgccaggcacggggaagacggtgacgtcggccaccatcgtctaccacctggcccggcaaggcaacgggccggtgctggtgtgtgctccgagcaacatcgccgtggaccagctaacggagaagatccaccagacggggctaaaggtcgtgcgcctctgcgccaagagccgtgaggccatcgactccccggtgtcttttctggccctgcacaaccagatcaggaacatggacagcatgcctgagctgcagaagctgcagcagctgaaagacgagactggggagctgtcgtctgccgacgagaagcggtaccgggccttgaagcgcaccgcagagagagagctgctgatgaacgcagatgtcatctgctgcacatgtgtgggcgccggtgacccgaggctggccaagatgcagttccgctccattttaatcgacgaaagcacccaggccaccgagccggagtgcatggttcccgtggtcctcggggccaagcagctgatccttgtaggcgaccactgccagctgggcccagtggtgatgtgcaagaaggcggccaaggccgggctgtcacagtcgctcttcgagcgcctggtggtgctgggcatccggcccatccgcctgcaggtccagtaccggatgcaccctgcactcagcgccttcccatccaacatcttctacgagggctccctccagaatggtgtcactgcagcggatcgtgtgaagaagggatttgacttccagtggccccaacccgataaaccgatgttcttctacgtgacccagggccaagaggagattgccagctcgggcacctcctacctgaacaggaccgaggctgcgaacgtggagaagatcaccacgaagttgctgaaggcaggcgccaagccggaccagattggcatcatcacgccctacgagggccagcgctcctacctggtgcagtacatgcagttcagcggctccctgcacaccaagctctaccaggaagtggagatcgccagtgtggacgcctttcagggacgcgagaaggacttcatcatcctgtcctgtgtgcgggccaacgagcaccaaggcattggctttttaaatgaccccaggcgtctgaacgtggccctgaccagagcaaggtatggcgtcatcattgtgggcaacccgaaggcactatcaaagcagccgctctggaaccacctgctgaactactataaggagcagaaggtgctggtggaggggccgctcaacaacctgcgtgagagcctcatgcagttcagcaagccacggaagctggtcaacactatcaacccgggagcccgcttcatgaccacagccatgtatgatgcccgggaggccatcatcccaggctccgtctatgatcggagcagccagggccggccttccagcatgtacttccagacccatgaccagattggcatgatcagtgccggccctagccacgtggctgccatgaacattcccatccccttcaacctggtcatgccacccatgccaccgcctggctattttggacaagccaacgggcctgctgcagggcgaggcaccccgaaaggcaagactggtcgtgggggacgccagaagaaccgctttgggcttcctggacccagccagactaacctccccaacagccaagccagccaggatgtggcgtcacagcccttctctcagggcgccctgacgcagggctacatctccatgagccagccttcccagatgagccagcccggcctctcccagccggagctgtcccaggacagttaccttggtgacgagtttaaatcacaaatcgacgtggcgctctcacaggactccacgtaccagggagagcgggcttaccagcatggcggggtgacggggctgtcccagtattaaaaggtggcggcggaagagctaagcaacgtggcttagtccatcagcatcttattctgggtaataaaaaatg

SEQ ID NO: 31990 - DNA, 5181 bp, Homo Sapiens
ctgcagcggtccctctgggctgatcttccactctgaccttcagtaagtcctaaaactttccccggagtggccaggagataattcgccacattctgcaaacgtttccagggaagagcctcttaacctttgggggaagaacttgcggacaaagttacaaacgaacgcagtctatctcccgcgccatgaacggaatgatggctgtaactggtcatctaaagtcattaatggtctgcgaacaaattcttcctctctgtttcatctttgaataacttcgccacacaccaaccctcagtgctgcgaaagtcatggtgtttatttagatatcgactgagtacttataaaacttaaactttccaatgtaaaagtgaactccttggtaaggactcctggctgcatcaacaaagcaatgtgatgcctgattaatagtgctgattaatgttggctcaggttaatgctcagcctattacagtaattaaattgttcacccatatatcaaacaagagttaatgaaaaataatttatttagaacgtcgaggctttctcatagattgttcaaagacctatgatagcctttatgggtcacttgtaagagtaactggtggtagcagtcctcagcaacaaaaactcgattttaatagaggtctttagatggggaaacagtttatttctgaggctctgtgattgacagcggtagtaatgacacgtttcagaatgtgaaaagtacttggtcgataaaatgatatacacaaggggcagctgatggctgttcctacagaacgccattgaattttgattcttagttcttgtcaaggggtcattttaatcagaaagttaaacttttgggacaagctcccctctttgaaatagaagcattttaggaaatgcacaaataagtgaatgtgaattcaacaaactattaggatttttccactagccaaaatagctcgtttgagttggtgataaagataggtatatttaaaagagcatcatatcttaattatttccactatcttgtcacccgaaaagaaaactgaattgagcggaactttaatctcataaaaaaaattttcatctcaccagaaaggattaacaatatttaaggattttccaaaaacacatttttaaaaagtttatcttaaagtcatctatcattatagtttctattaataagcctcagtagaaatatgtatatgttatgtaatttaagtattttgagattactatgcaaagtgctgactagaatgttcctcctactgagaactatatagccccattatgaacgaacttctgtttttttttttttttttgaggcggagtttcgctcttgttgcccaggctggagtgcagtggcacgatctcggctcactgcaacctccgcatcccgggtccaagcgattctcctgcctcggcctcccgagtagctgggattacaggcgccgcctactaatttttttctatttttagtagagacggggtttcaccatgttggccaggctggtcgaactttttagtagtttctaggtgcaatttttgtgcgtgtatttgggttttcactaaaaatttcaatttcttctccgaattcaattattacgttctttattcccatgacatttgtcagatcgtctcattagagtggcttagtttaactgtcaagtctctagggcattcaatcgcagagaagtgagtaaaacgccagtctcacagcgtttttattaacagatggcggaaaacaaacgtctttggagtaaaaccgaagagaatgggttaaagggtcaataaacaattattatcgtgcttaaattggggggcttcgcatcagatccaatggggggccgctcgcccgatctggaggggctggacacccccaaccgaccccagagcgtcccccaggggccacctcagaggatggggtggttatcccccggctggaaggctcctacaggctgtcgaggggtcaaaccagagtgtcgcgggtgtgcttctgaggttagggtggaggactaattgaggaggctgggaagtctaactcgtgcagcggccctcggtgcagacagccgcgtaattcgggcatcagcctctttggcaagaaatagtgaggtcccctctcctccccactcttctcagctgctgcctccctcctacgggtgaattttctctcccgagaagggctgatttcctaggcttgctttccttccctcggcagcgctctgacgtgcacaccatgtgacaggcccccttctgctataagccgaggaaggtccgccctctcctggactcagccctggcctcgccgagctctgttcttagactctcacccgtcccgcacgttcctggtcgcctggcgttctgattcgcccgcccgggccccgccaccccctcctcagctgacggggcaaaagctgctccgagaggagaaggtcaagtcctccgcccgggccgggccgagcggagcccagggagcgcagcatccgcgcggctaccgcggcggcgcaggagttataaagtcggcgcgcgagactccgccgccacccggcagccccggcgcagctccggcagccgcagtcgcagcgcccccagcgtggcgccccccggccgggcctgccgcccgggacccgggctggggcgcagagggagcccggagcccggcgcccccatgcgccgccccgccgccgccgcgccacagctatgaccctgagcactgagatgtccgatgcctctggcctcgccgaggaaacagacatcgacgtggtgggggagggcgaggacgaagaagacgaggaagaggaggacgacgacgagggcggcggtggcgggccccggctggctgtccccgcgcagcggcggcggcggcggcgctcgtacgccggggaggacgagctggaggatctggaggaggaggaggacgacgatgacatcctgctggccccgcctgctgggggctccccggcgcccccgggcccggccccggcggcgggggcaggagccggtgggggcggcggcggcggcggcgcgggcggcggcgggagcgcgggtagcggcgccaagaacccgctggtgaagccgccctactcgtatatcgcgctcatcactatggccatcctgcagagccccaagaagcggctgacgctgagcgagatctgtgagttcatcagcggccgcttcccctactaccgggagaagttccccgcctggcagaacagcatccgccacaacctctcgctcaacgactgcttcgtcaagatcccccgcgagcccggcaacccgggcaagggcaactactggacgctggacccggagtccgccgacatgttcgacaacggcagcttcctgcgccggaggaagcgcttcaagcggcagccgctgctcccacccaacgccgcggccgccgagtctctgctgctgcgcggcgcgggagccgcagggggcgcgggcgacccggcagccgccgccgcgctcttcccgcccgcgcccccgccgcccccgcatgcctacggctacggcccctacggctgcggctacggcctgcagctgccgccttacgcgccgccctcggccctcttcgccgccgcagcggccgccgccgccgccgccgccttccacccgcactcgcccccgccgcccccgccaccgcacggcgcggccgccgagctggcccggaccgccttcggctaccggccgcacccgctcggcgccgccctacccggccccctgccggcctccgcggccaaggcgggcggcccgggcgcctcagcgctggcgcgctcgcccttctccatcgagagcatcatcgggggcagcttgggcccggccgccgctgccgccgccgccgcgcaggccgccgccgccgctcaggcctcgccctcgccctcgccggtggcggcgccgccagctcccggatccagcggaggaggctgcgcggcgcaggcggccgtgggcccggcggccgcgctcacccgatccctcgtggccgccgcggccgccgccgcctcctcagtctcctcgtccgccgccttggggactctgcaccaagggactgccctgtccagtgtcgagaactttactgctaggatttccaattgttaataacgctatgttagcgcgctcgaggaagaaggtaggaatcccggctccttttctcgtcttggtggttcggtgttttgttcgctcctccaggcgcggcccctctcgacctcgcgcgcccattttcgccgctgcgaattctcggacaaaactgtcaacagcccgggcgcgccttttggctctgcgggtccctctatttatgcaaagccgacctatgctacagccccccaacccccgacctggggtagggaggaagagggtgccggggaagggagtccgccctgtccaggcactagaggctcccttgacgtttggcagatgaaaaacaactaagcctttttgaggtgtagagattctcaggtccaggcgttaaaaaataatggtcaaaagaataatacaaaaatagtaaaggtcttgaagaatgccagcgaagcaattcttttttatttgaggacacttgtctggtgtactttttcatgaaaaggaaaaatggttaacatgtttacacaagaaaaaaagtcaaaattatcatttatttcaacctgtgttttgtatcataacagacgtgtggatttttttgtacttactgcgtattctttacaaggagtattgtaaattttactggcaattattattgtactattctaaatgtaagatttttacactttttcagaaataaaaatgcttaattttcaaagaaaattcaccaaaatgattggcttcagttgtccccttcttagtttttcttttctacttaaaaaaactttctatgtggggtaagcaggaactcaatatagaacagacttaaatactttcagagagaatttaagaacagcatcatgccatgatttttcacttgaacttcctaagtgaaaaccatggtaggagatcagaaattatttttaaatgactacaaataaaataagttactttggtatacattttcagatctgactctatgccattttaaagcgcattgaagtatgttaaaattaaagccacaggtacccaaagataattttataggaactttgcatttcatttttgagcttccttcctcatttaatttccactcagttcacgacaatattatatctgcag

SEQ ID NO: 31991 - DNA, 1654 bp, Homo Sapiens
acgagggtccggctgagccccgggatccgcctccctccgccaggacccgcacagataaactcatcctgaaagtcgctgttgttctcctgctgagcaagaatggaggccccactggtgagtctggatgaagagtttgaggaccttcgaccctcctgctcggaggacccggaggagaagccccagtgtttctatggttcatctccccaccatctcgaggacccctccctctccgagcttgagaatttttcttccgaaataatcagcttcaagtccatggaggacctcgtaaatgaatttgatgagaagctcaatgtctgctttcggaactacaacgccaagaccgagaacctagctcccgtgaagaaccagttacagatccaagaggaggaggagacccttcaggacgaggaggtttgggatgctctgacagacaattacatcccttcactctcagaagactggagggatccaaacatcgaggctctgaatggcaactgctctgacactgagatccatgagaaagaagaggaagagttcaatgagaagagtgaaaatgattccggtatcaacgaggagcctctgctcacagcagatcaggtaattgaggagattgaggaaatgatgcagaactccccagaccctgaggaagaagaggaggttctggaagaagaggatggaggagaaacttcctcccaggcagactcggtcctcctgcaggagatgcaggcattgacacagaccttcaacaacaactggtcctatgaagggctgaggcacatgtctgggtctgagctgaccgagctgctggaccaggtggagggtgccatccgtgacttctcggaggagctggtgcagcagctggcccgccgggacgagctggagtttgagaaggaagtgaagaactcctttatcacggtgcttattgaggttcagaacaagcagaaggagcagcgagaactgatgaaaaagaggcggaaagagaaagggctgagcctgcagagcagccggatagagaagggaaaccagatgcctctcaagcgcttcagcatggaaggcatctccaacattctgcagagtggcatccgccagacctttggctcctcaggaactgacaaacagtatctgaacacagtcattccttacgagaagaaagcctctcctccctcagtggaagacctgcagatgctgacaaacattctctttgccatgaaggaggataatgagaaggtgcctactttgctaacggactacattttaaaagtgctctgccctacctaaccttgccctttggagcagcctcgctgcaggaggtcactgagcaagagtcattccatcacagggactgcatgagaccatgtaacctccgacatgtatttaaacgtgtatagcttaacctggattaaacacgagcaagcgcgcggggtcctttgccgttggcttctagtgctagtaatcattggatgcatgatggggcagggccggtgatggtgcctcccccttgctggtgtcaggagaggggaaggcagccgctttcaccgctcattatgtagtctggctacagccctccaaaacagcttatactcttaagactaattttgaaataaaaccttcatttaattaaaaaaaaaaaaaaaaaaaaaaaaaaaaaattaaa

SEQ ID NO: 31992 - DNA, 1931 bp, Homo Sapiens
cggcacgagagtgagcgggtctgggcggctgctggcagcgccatggagacggtacagctgaggaacccgccgcgccggcagctgaaaaagttggatgaagatagtttaaccaaacaaccagaagaagtatttgatgtcttagagaaacttggagaagggtcctatggcagcgtatacaaagctattcataaagagaccggccagattgttgctattaagcaagttcctgtggaatcagacctccaggagataatcaaagaaatctctataatgcagcaatgtgacagccctcatgtagtcaaatattatggcagttattttaagaacacagacttatggatcgttatggagtactgtggggctggttctgtatctgatatcattcgattacgaaataaaacgttaacagaagatgaaatagctacaatattacaatcaactcttaagggacttgaataccttcattttatgagaaaaatacaccgagatatcaaggcaggaaatattttgctaaatacagaaggacatgcaaaacttgcagattttggggtagcaggtcaacttacagataccatggccaagcggaatacagtgataggaacaccattttggatggctccagaagtgattcaggaaattggatacaactgtgtagcagacatctggtccctgggaataactgccatagaaatggctgaaggaaagcccccttatgctgatatccatccaatgagggcaatcttcatgattcctacaaatcctcctcccacattccgaaaaccagagctatggtcagataactttacagattttgtgaaacagtgtcttgtaaagagccctgagcagagggccacagccactcagctcctgcagcacccatttgtcaggagtgccaaaggagtgtcaatactgcgagacttaattaatgaagccatggatgtgaaactgaaacgccaggaatcccagcagcgggaagtggaccaggacgatgaagaaaactcagaagaggatgaaatggattctggcacgatggttcgagcagtgggtgatgagatgggcactgtccgagtagccagcaccatgactgatggagccaatactatgattgagcacgatgacacgttgccatcacaactgggcaccatggtgatcaatgcagaggatgaggaagaggaaggaactatgaaaagaagggatgagaccatgcagcctgcgaaaccatcctttcttgaatattttgaacaaaaagaaaaggaaaaccagatcaacagctttggcaagagtgtacctggtccactgaaaaattcttcagattggaaaataccacaggatggagactacgagtttcttaagagttggacagtggaggaccttcagaagaggctcttggccctggaccccatgatggagcaggagattgaagagatccggcagaagtaccagtccaagcggcagcccatcctggatgccatagaggctaagaagagacggcaacaaaacttctgagcaaggccaggctgtgagggccccagctccacccaggctttgggtgaattctggatggcttgcctcatgtttgttagccagcacttctgctctgtcgtctctccacagcacctttgtgaactcaggaatgtgcgccagtgggaagggctctcttgacagtcagcgtgccatcttgatgtgtgtatgtacattggtcaggtatattatctcaaaggatttatattggcgcttttaactcagagttttaaaccccaggaacagagactcctagttgagtgatagctgggaaagttttacattgtctgtttttcttctcccaatagctttcaattgttctttctggaagacttttaaaaaaatataaatatgcatatatatatataaattataaatagattccccacgcaggtggtggcatctctgta

SEQ ID NO: 31993 - DNA, 2727 bp, Homo Sapiens
ggggacactggatcacctagtgtttcacaagcaggtaccttctgctgtaggagagagagaactaaagttctgaaagacctgttgcttttcaccaggaagttttactgggcatctcctgagcctaggcaatagctgtagggtgacttctggagccatccccgtttccccgccccccaaaagaagcggagatttaacggggacgtgcggccagagctggggaaatgggcccgcgagccaggccggcgcttctcctcctgatgcttttgcagaccgcggtcctgcaggggcgcttgctgcgttcacactctctgcactacctcttcatgggtgcctcagagcaggaccttggtctttccttgtttgaagctttgggctacgtggatgaccagctgttcgtgttctatgatcatgagagtcgccgtgtggagccccgaactccatgggtttccagtagaatttcaagccagatgtggctgcagctgagtcagagtctgaaagggtgggatcacatgttcactgttgacttctggactattatggaaaatcacaaccacagcaaggagtcccacaccctgcaggtcatcctgggctgtgaaatgcaagaagacaacagtaccgagggctactggaagtacgggtatgatgggcaggaccaccttgaattctgccctgacacactggattggagagcagcagaacccagggcctggcccaccaagctggagtgggaaaggcacaagattcgggccaggcagaacagggcctacctggagagggactgccctgcacagctgcagcagttgctggagctggggagaggtgttttggaccaacaagtgcctcctttggtgaaggtgacacatcatgtgacctcttcagtgaccactctacggtgtcgggccttgaactactacccccagaacatcaccatgaagtggctgaaggataagcagccaatggatgccaaggagttcgaacctaaagacgtattgcccaatggggatgggacctaccagggctggataaccttggctgtaccccctggggaagagcagagatatacgtgccaggtggagcacccaggcctggatcagcccctcattgtgatctgggagccctcaccgtctggcaccctagtcattggagtcatcagtggaattgctgtttttgtcgtcatcttgttcattggaattttgttcataatattaaggaagaggcagggttcaagaggagccatggggcactacgtcttagctgaacgtgagtgacacgcagcctgcagactcactgtgggaaggagacaaaactagagactcaaagagggagtgcatttatgagctcttcatgtttcaggagagagttgaacctaaacatagaaattgcctgacgaactccttgattttagccttctctgttcatttcctcaaaaagatttccccatttaggtttctgagttcctgcatgccggtgatccctagctgtgacctctcccctggaactgtctctcatgaacctcaagctgcatctagaggcttccttcatttcctccgtcacctcagagacatacacctatgtcatttcatttcctatttttggaagaggactccttaaatttgggggacttacatgattcattttaacatctgagaaaagctttgaaccctgggacgtggctagtcataaccttaccagatttttacacatgtatctatgcattttctggacccgttcaacttttcctttgaatcctctctctgtgttacccagtaactcatctgtcaccaagccttggggattcttccatctgattgtgatgtgagttgcacagctatgaaggctgtgcactgcacgaatggaagaggcacctgtcccagaaaaagcatcatggctatctgtgggtagtatgatgggtgtttttagcaggtaggaggcaaatatcttgaaaggggttgtgaagaggtgttttttctaattggcatgaaggtgtcatacagatttgcaaagtttaatggtgccttcatttgggatgctactctagtattccagacctgaagaatcacaataattttctacctggtctctccttgttctgataatgaaaattatgataaggatgataaaagcacttacttcgtgtccgactcttctgagcacctacttacatgcattactgcatgcacttcttacaataattctatgagataggtactattatccccatttcttttttaaatgaagaaagtgaagtaggccgggcacggtggctcgcgcctgtggtcccagggtgctgagattgcaggtgtgagccaccctgcccagccgtcaaaagagtcttaatatatatatccagatggcatgtgtttactttatgttactacatgcacttggctgcataaatgtggtacaaccattctgtcttgaagggcaggtgcttcaggataccatatacagctcagaagtttcttctttaggcattaaattttagcaaagatatctcatctcttcttttaaaccattttctttttttgtggttagaaaagttatgtagaaaaaagtaaatgtgatttacgctcattgtagaaaagctataaaatgaatacaattaaagctgttatttaattagccagtgaaaaactattaacaacttgtctattacctgttagtattattgttgcattaaaaatgcatatactttaataaatgtacattgtattgtaaaaaaaaaaa

SEQ ID NO: 31994 - DNA, 3305 bp, Homo Sapiens
  misc_feature (844)..(844): n is a, c, g, or t
cttccgagggggtgagtggcttcaccgccggtcccttgcagcgctgcctttcgatctctccacatctcggtggcgcgggatctcaagatgcgcctccacctgctcctgctgctcgcgctgtgcggtgcaggcaccaccgccgcggagctcagttacagcttgcgtggcaactggagcatctgcaatgggaacggctcgctggagctgcccggggcggtccctggctgcgtgcacagcgccttgttccagcagggcctgatccaggattcttactacagatttaatgaccttaaccacagatgggtctctttggataactggacctatagcaaagaatttaaaatcccctttgaaattagcaaatggcaaaaagtaaatttgattcttgagggagtggatacggtttcaaaaatcctgttcaatgaagtcactattggggaaacagacaatatgttcaatagatatagctttgatattaccaacgtggtcagggacgtgaactccattgagctgcgtttccagtcagcggtgttgtatgcagcacagcagagcaaagctcacactcsctaccaggttcccccagactgccctccacttgtgcagaagggtgaatgccatgtcaactttgttcggaaggagcaatgttcctttagttgggactgggggccttcctttcctacccagggaatctggaaagatgttagaattgaagcctataatatttgtcacctgaactacttcacattttccccaatatatgataagagtgcccaggagtggaatctggaaatagagtctacatttgatgttgtcagctcaaagccagttggtggtcaagtgatcntagccatccctaagttgcaaacacaacagacatacagcattgaacttcaacctgggaaaaggattgttgagctatttgtgaacattagcaagaatattactgtagaaacttggtggcctcatggacatggaaaccagactgggtacaacatgactgttctttttgaactggatggaggcttaaatattgaaaaatcagctaaggtttattttaggacagtggaacttatagaagagcctataaaagggtctcctggtttgagtttctatttcaaaattaatggatttcccatatttctaaaaggctcaaactggatcccagcagattcattccaggaccgagtaacctctgagttgttacggctccttttacagtctgttgtggatgctaatatgaatactcttcgggtttggggaggaggaatttatgagcaggatgaattctatgaactctgtgatgaactaggaataatggtatggcaggattttatgtttgcctgtgccctttatccaactgatcagggcttcctggattcagtgacagcagaagttgcctaccagatcaagagactgaaatctcatccttctatcatcatatggagtggcaataatgaaaatgaggaggcgctgatgatgaattggtatcatatcagtttcactgaccggccaatctacatcaaggactatgtgacactctatgtgaaaaacatcagagagctcgtactggcaggagacaagagtcgtccttttattacgtccagtcctacaaatggggctgaaactgttgcagaagcctgggtctctcaaaaccctaatagcaattattttggtgatgtacatttttatgactatatcagtgattgctggaactggaaagttttcccaaaagctcgatttgcatctgaatatggatatcagtcctggccgtccttcagtacattagaaaaggtctcgtctacagaggactggtctttcaatagcaagttttcacttcatcgacaacatcacgaaggtggtaacaaacaaatgctttatcaggctggacttcatttcaaactcccccaaagcacagatccattacgcacatttaaagataccatctaccttactcaggtgatgcaggcccagtgtgtcaaaacagaaactgaattctaccgccgtagtcgcagcgagatagtggatcagcaagggcacacgatgggggcactttattggcagttgaatgacatctggcaagctccttcctgggcttctcttgagtacggaggaaagtggaaaatgcttcattactttgctcagaatttctttgctccactgttgccagtaggctttgagaatgaaaacacgttctatatctatggtgtgtcagatcttcactcggattattcgatgacactcagtgtgagagtccatacatggagctccctggagcccgtgtgctctcgtgtgactgaacgttttgtgatgaaaggaggagaggctgtctgcctttatgaggagccagtgtctgaattgctgaggagatgtgggaattgcacacgggaaagctgtgtggtttccttttacctttcagctgaccatgaactcctgagcccgaccaactaccacttcttgtcctcaccgaaggaggccgtggggctctgcaaggcgcagatcactgccatcatctctcagcaaggtgacatatttgtttttgacctggagacctcagctgtcgctccctttgtttggttggatgtaggaagcatcccagggagatttagtgacaatggtttcctcatgactgagaagacacgaactatattattttacccttgggagcccaccagcaagaatgagttggagcaatcttttcatgtgacctccttaacagatatttactgaaggaatctaggttgtattttcagtggacaatgggaataaagcatttctaaagcaccgactggagaggaaggcaacagagacaaggagagaagccgagagacatgtctgcgtgctgccacgcatttgagcgattgctctgtgaagagttgtacactgaacacttccaggggaggctgtttacccaggcaatgtcctcaaacaagcctgtgccggggtgtcctggaatctgtgccaggactgtgtttttagcccttcacctctcagctttagcaggacatgaaccagttataacaagatggccctgcagctggttacaagaatgtgacatggcaggatctatggaaccaaatggaaggttttgaggtgatgtaggtctttcacagctagctttggggaatacggaatactcaaataaagtgctttgttattatttcagagggaatggcgattgaaatgttacaacagagatttcttggtggtagctatttgggtaaaggtatatgggtatttttctgtacatgtgaaattatataaaaataaaagttatataaattacattgacaactaaaaaaaaaaaa

SEQ ID NO: 31995 - DNA, 4157 bp, Homo Sapiens
ctgagccgcatctgcaatagcacacttgcccggccacctgctgccgtgagcctttgctgctgaagcccctggggtcgcctctacctgatgaggatgtgcacccccattagggggctgctcatggcccttgcagtgatgtttgggacagcgatggcatttgcacccataccccggatcacctgggagcacagagaggtgcacctggtgcagtttcatgagccagacatctacaactactcagccttgctgctgagcgaggacaaggacaccttgtacataggtgcccgggaggcggtcttcgctgtgaacgcactcaacatctccgagaagcagcatgaggtgtattggaaggtctcagaagacaaaaaagcaaaatgtgcagaaaaggggaaatcaaaacagacagagtgcctcaactacatccgggtgctgcagccactcagcgccacttccctttacgtgtgtgggaccaacgcattccagccggcctgtgaccacctgaacttaacatcctttaagtttctggggaaaaatgaagatggcaaaggaagatgtccctttgacccagcacacagctacacatccgtcatggttgatggagaactttattcggggacgtcgtataattttttgggaagtgaacccatcatctcccgaaattcttcccacagtcctctgaggacagaatatgcaatcccttggctgaacgagcctagtttcgtgtttgctgacgtgatccgaaaaagcccagacagccccgacggcgaggatgacagggtctacttcttcttcacggaggtgtctgtggagtatgagtttgtgttcagggtgctgatcccacggatagcaagagtgtgcaagggggaccagggcggcctgaggaccttgcagaagaaatggacctccttcctgaaagcccgactcatctgctcccggccagacagcggcttggtcttcaatgtgctgcgggatgtcttcgtgctcaggtccccgggcctgaaggtgcctgtgttctatgcactcttcaccccacagctgaacaacgtggggctgtcggcagtgtgcgcctacaacctgtccacagccgaggaggtcttctcccacgggaagtacatgcagagcaccacagtggagcagtcccacaccaagtgggtgcgctataatggcccggtacccaagccgcggcctggagcgtgcatcgacagcgaggcacgggccgccaactacaccagctccttgaatttgccagacaagacgctgcagttcgttaaagaccaccctttgatggatgactcggtaaccccaatagacaacaggcccaggttaatcaagaaagatgtgaactacacccagatcgtggtggaccggacccaggccctggatgggactgtctatgatgtcatgtttgtcagcacagaccggggagctctgcacaaagccatcagcctcgagcacgctgttcacatcatcgaggagacccagctcttccaggactttgagccagtccagaccctgctgctgtcttcaaagaagggcaacaggtttgtctatgctggctctaactcgggcgtggtccaggccccgctggccttctgtgggaagcacggcacctgcgaggactgtgtgctggcgcgggacccctactgcgcctggagcccgcccacagcgacctgcgtggctctgcaccagaccgagagccccagcaggggtttgattcaggagatgagcggcgatgcttctgtgtgcccggataaaagtaaaggaagttaccggcagcattttttcaagcacggtggcacagcggaactgaaatgctcccaaaaatccaacctggcccgggtcttttggaagttccagaatggcgtgttgaaggccgagagccccaagtacggtcttatgggcagaaaaaacttgctcatcttcaacttgtcagaaggagacagtggggtgtaccagtgcctgtcagaggagagggttaagaacaaaacggtcttccaagtggtcgccaagcacgtcctggaagtgaaggtggttccaaagcccgtagtggcccccaccttgtcagttgttcagacagaaggtagtaggattgccaccaaagtgttggtggcatccacccaagggtcttctcccccaaccccagccgtgcaggccacctcctccggggccatcacccttcctcccaagcctgcgcccaccggcacatcctgcgaaccaaagatcgtcatcaacacggtcccccagctccactcggagaaaaccatgtatcttaagtccagcgacaaccgcctcctcatgtccctcttcctcttcttctttgttctcttcctctgcctctttttctacaactgctataagggatacctgcccagacagtgcttgaaattccgctcggccctactaattgggaagaagaagcccaagtcagatttctgtgaccgtgagcagagcctgaaggagacgttagtagagccagggagcttctcccagcagaatggggagcaccccaagccagccctggacaccggctatgagaccgagcaagacaccatcaccagcaaagtccccacggatagggaggactcacagaggatcgacgacctttctgccagggacaagccctttgacgtcaagtgtgagctgaagttcgctgactcagacgcagatggagactgaggccggctgtgcatccccgctggtgcctcggctgcgacgtgtccaggcgtggagagttttgtgtttctcctgttcagtatccgagtctcgtgcagtgctgcgtaggttagcccgcatcgtgcagacaacctcagtcctcttgtctattttctcttgggttgagcctgtgacttggtttctctttgtccttttggaaaaatgacaagcattgcatcccagtcttgtgttccgaagtcagtcggagtacttgaagaaggcccacgggcggcacggagttcctgagccctttctgtagtgggggaaaggtggctggacctctgttggctgagaagagcatcccttcagcttcccctccccgtagcagccactaaaagattatttaattccagattggaaatgacattttagtttatcagattggtaacttatcgcctgttgtccagattggcacgaaccttttcttccacttaattatttttttaggattttgctttgattgtgtttatgtcatgggtcatttttttttagttacagaagcagttgtgttaatatttagaagaagatgtatatcttccagattttgttatatatttggcataaaatacggcttacgttgcttaagattctcagggataaacttccttttgctaaatgcattctttctgcttttagaaatgtagacataaacactccccggagcccactcaccttttttctttttctttttttttttttaactttattccttgagggaagcattgtttttggagagattttctttctgtacttcgttttacttttctttttttttaacttttactctctcgaagaagaggaccttcccacatccacgaggtgggttttgagcaagggaaggtagcctggatgagctgagtggagccaggctggcccagagctgagatgggagtgcggtacaatctggagcccacagctgtcggtcagaacctcctgtgagacagatggaaccttcacaagggcgcctttggttctctgaacatctcctttctcttcttgcttcaattgcttacccactgcctgcccagactttctatccagcctcactgagctgcccactactggaagggaactgggcctcggtggccggggccgcgagctgtgaccacagcaccctcaagcatacggcgctgttcctgccactgtcctgaagatgtgaatgggtggtacgatttcaacactggttaatttcacactccatctccccgctttgtaaatacccatcgggaagagactttttttccatggtgaagagcaataaactctggatgtttgtgcgcgtgtgtggacagtcttatcttccagcatgataggatttgaccattttggtgtaaacatttgtgttttataagatttaccttgtttttatttttctactttgaattgtatacatttggaaagtacccaaataaatgagaagcttctatccttaaaaaaaaaaaaaa

SEQ ID NO: 31996 - DNA, 6981 bp, Homo Sapiens
ttgctgcgtcaactgtgttccctttggcctggctgagtttgatactgtggggattcagtttaggcgctggcccgaggatatcccagcggtggtacttcggagacacctgtctgcatctgactgagccggctctcctggcctcgcgctgcacattctctcctggcggcggcgccacctgcagtagcgttcgcccgaacatggcgacacggagcagcaggagggagtcgcgactcccgttcctattcaccctggtcgcactgctgccgcccggagctctctgcgaagtctggacgcagaggctgcacggcggcagcgcgcccttgccccaggaccggggcttcctcgtggtgcagggcgacccgcgcgagctgcggctgtgggcgcgcggggatgccaggggggcgagccgcgcggacgagaagccgctccggaggaaacggagcgctgccctgcagcccgagcccatcaaggtgtacggacaggttagtctgaatgattcccacaatcagatggtggtgcactgggctggagagaaaagcaacgtgatcgtggccttggcccgagatagcctggcattggcgaggcccaagagcagtgatgtgtacgtgtcttacgactatggaaaatcattcaagaaaatttcagacaagttaaactttggcttgggaaataggagtgaagctgttatcgcccagttctaccacagccctgcggacaacaagcggtacatctttgcagacgcttatgcccagtacctctggatcacgtttgacttctgcaacactcttcaaggcttttccatcccatttcgggcagctgatctcctcctacacagtaaggcctccaaccttctcttgggctttgacaggtcccaccccaacaagcagctgtggaagtcagatgactttggccagacctggatcatgattcaggaacatgtcaagtccttttcttggggaattgatccctatgacaaaccaaataccatctacattgaacgacacgaaccctctggctactccactgtcttccgaagtacagatttcttccagtcccgggaaaaccaggaagtgatccttgaggaagtgagagattttcagcttcgggacaagtacatgtttgctacaaaggtggtgcatctcttgggcagtgaacagcagtcttctgtccagctctgggtctcctttggccggaagcccatgagagcagcccagtttgtcacaagacatcctattaatgaatattacatcgcagatgcctccgaggaccaggtgtttgtgtgtgtcagccacagtaacaaccgcaccaatttatacatctcagaggcagaggggctgaagttctccctgtccttggagaacgtgctctattacagcccaggaggggccggcagtgacaccttggtgaggtattttgcaaatgaaccatttgctgacttccaccgagtggaaggattgcaaggagtctacattgctactctgattaatggttctatgaatgaggagaacatgagatcggtcatcacctttgacaaagggggaacctgggagtttcttcaggctccagccttcacgggatatggagagaaaatcaattgtgagctttcccagggctgttcccttcatctggctcagcgcctcagtcagctcctcaacctccagctccggagaatgcccatcctgtccaaggagtcggctccaggcctcatcatcgccactggctcagtgggaaagaacttggctagcaagacaaacgtgtacatctctagcagtgctggagccaggtggcgagaggcacttcctggacctcactactacacatggggagaccacggcggaatcatcacggccattgcccagggcatggaaaccaacgagctaaaatacagtaccaatgaaggggagacctggaaaacattcatcttctctgagaagccagtgtttgtgtatggcctcctcacagaacctggggagaagagcactgtcttcaccatctttggctcgaacaaagagaatgtccacagctggctgatcctccaggtcaatgccacggatgccttgggagttccctgcacagagaatgactacaagctgtggtcaccatctgatgagcgggggaatgagtgtttgctgggacacaagactgttttcaaacggcggaccccccatgccacatgcttcaatggagaggactttgacaggccggtggtcgtgtccaactgctcctgcacccgggaggactatgagtgtgacttcggtttcaagatgagtgaagatttgtcattagaggtttgtgttccagatccggaattttctggaaagtcatactcccctcctgtgccttgccctgtgggttctacttacaggagaacgagaggctaccggaagatttctggggacacttgtagcggaggagatgttgaagcgcgactggaaggagagctggtcccctgtcccctggcagaagagaacgagttcattctgtatgctgtgaggaaatccatctaccgctatgacctggcctcgggagccaccgagcagttgcctctcaccgggctacgggcagcagtggccctggactttgactatgagcacaactgtttgtattggtccgacctggccttggacgtcatccagcgcctctgtttgaatggaagcacagggcaagaggtgatcatcaattctggcctggagacagtagaagctttggcttttgaacccctcagccagctgctttactgggtagatgcaggcttcaaaaagattgaggtagctaatccagatggcgacttccgactcacaatcgtcaattcctctgtgcttgatcgtcccagggctctggtcctcgtgccccaagagggggtgatgttctggacagactggggagacctgaagcctgggatttatcggagcaatatggatggttctgctgcctatcacctggtgtctgaggatgtgaagtggcccaatggcatctctgtggacgaccagtggatttactggacggatgcctacctggagtgcatagagcggatcacgttcagtggccagcagcgctctgtcattctggacaacctcccgcacccctatgccattgctgtctttaagaatgaaatctactgggatgactggtcacagctcagcatattccgagcttccaaatacagtgggtcccagatggagattctggcaaaccagctcacggggctcatggacatgaagattttctacaaggggaagaacactggaagcaatgcctgtgtgcccaggccatgcagcctgctgtgcctgcccaaggccaacaacagtagaagctgcaggtgtccagaggatgtgtccagcagtgtgcttccatcaggggacctgatgtgtgactgccctcagggctatcagctcaagaacaatacctgtgtcaaagaagagaacacctgtcttcgcaaccagtatcgctgcagcaacgggaactgtatcaacagcatttggtggtgtgactttgacaacgactgtggagacatgagcgatgagagaaactgccctaccaccatctgtgacctggacacccagtttcgttgccaggagtctgggacttgtatcccactgtcctataaatgtgaccttgaggatgactgtggagacaacagtgatgaaagtcattgtgaaatgcaccagtgccggagtgacgagtacaactgcagttccggcatgtgcatccgctcctcctgggtatgtgacggggacaacgactgcagggactggtctgatgaagccaactgtaccgccatctatcacacctgtgaggcctccaacttccagtgccgaaacgggcactgcatcccccagcggtgggcgtgtgacggggatacggactgccaggatggttccgatgaggatccagtcaactgtgagaagaagtgcaatggattccgctgcccaaacggcacttgcatcccatccagcaaacattgtgatggtctgcgtgattgctctgatggctccgatgaacagcactgcgagcccctctgtacgcacttcatggactttgtgtgtaagaaccgccagcagtgcctgttccactccatggtctgtgacggaatcatccagtgccgcgacgggtccgatgaggatgcggcgtttgcaggatgctcccaagatcctgagttccacaaggtatgtgatgagttcggtttccagtgtcagaatggagtgtgcatcagtttgatttggaagtgcgacgggatggatgattgcggcgattattctgatgaagccaactgcgaaaaccccacagaagccccaaactgctcccgctacttccagtttcggtgtgagaatggccactgcatccccaacagatggaaatgtgacagggagaacgactgtggggactggtctgatgagaaggattgtggagattcacatattcttcccttctcgactcctgggccctccacgtgtctgcccaattactaccgctgcagcagtgggacctgcgtgatggacacctgggtgtgcgacgggtaccgagattgtgcagatggctctgacgaggaagcctgccccttgcttgcaaacgtcactgctgcctccactcccacccaacttgggcgatgtgaccgatttgagttcgaatgccaccaaccgaagacgtgtattcccaactggaagcgctgtgacggccaccaagattgccaggatggccgggacgaggccaattgccccacacacagcaccttgacttgcatgagcagggagttccagtgcgaggacggggaggcctgcattgtgctctcggagcgctgcgacggcttcctggactgctcggacgagagcgatgaaaaggcctgcagtgatgagttgactgtgtacaaagtacagaatcttcagtggacagctgacttctctggggatgtgactttgacctggatgaggcccaaaaaaatgccctctgcttcttgtgtatataatgtctactacagggtggttggagagagcatatggaagactctggagacccacagcaataagacaaacactgtattaaaagtcttgaaaccagataccacgtatcaggttaaagtacaggttcagtgtctcagcaaggcacacaacaccaatgactttgtgaccctgaggaccccagagggattgccagatgcccctcgaaatctccagctgtcactccccagggaagcagaaggtgtgattgtaggccactgggctcctcccatccacacccatggcctcatccgtgagtacattgtagaatacagcaggagtggttccaagatgtgggcctcccagagggctgctagtaactttacagaaatcaagaacttattggtcaacactctatacaccgtcagagtggctgcggtgactagtcgtggaataggaaactggagcgattctaaatccattaccaccataaaaggaaaagtgatcccaccaccagatatccacattgacagctatggtgaaaattatctaagcttcaccctgaccatggagagtgatatcaaggtgaatggctatgtggtgaaccttttctgggcatttgacacccacaagcaagagaggagaactttgaacttccgaggaagcatattgtcacacaaagttggcaatctgacagctcatacatcctatgagatttctgcctgggccaagactgacttgggggatagccctctggcatttgagcatgttatgaccagaggggttcgcccacctgcacctagcctcaaggccaaagccatcaaccagactgcagtggaatgtacctggaccggcccccggaatgtggtttatggtattttctatgccacgtcctttcttgacctctatcgcaacccgaagagcttgactacttcactccacaacaagacggtcattgtcagtaaggatgagcagtatttgtttctggtccgtgtagtggtaccctaccaggggccatcctctgactacgttgtagtgaagatgatcccggacagcaggcttccaccccgtcacctgcatgtggttcatacgggcaaaacctccgtggtcatcaagtgggaatcaccgtatgactctcctgaccaggacttgttgtatgcaattgcagtcaaagatctcataagaaagactgacaggagctacaaagtaaaatcccgtaacagcactgtggaatacacccttaacaagttggagcctggcggaaaataccacatcattgtccaactggggaacatgagcaaagattccagcataaaaattaccacagtttcattatcagcacctgatgccttaaaaatcataacagaaaatgatcatgttcttctgttttggaaaagcctggctttaaaggaaaagcattttaatgaaagcaggggctatgagatacacatgtttgatagtgccatgaatatcacagcttaccttgggaatactactgacaatttctttaaaatttccaacctgaagatgggtcataattacacgttcaccgtccaagcaagatgcctttttggcaaccagatctgtggggagcctgccatcctgctgtacgatgagctggggtctggtgcagatgcatctgcaacgcaggctgccagatctacggatgttgctgctgtggtggtgcccatcttattcctgatactgctgagcctgggggtggggtttgccatcctgtacacgaagcaccggaggctgcagagcagcttcaccgccttcgccaacagccactacagctccaggctggggtccgcaatcttctcctctggggatgacctgggggaagatgatgaagatgcccctatgataactggattttcagatgacgtccccatggtgatagcctgaaagagctttcctcactagaaaccaaatggtgtaaatattttatttgataaagatagttgatggtttattttaaaagatgcactttgagttgcaatatgttatttttatatgggccaaaaacaaaaaaaaaaaaaaaaaa

SEQ ID NO: 31997 - DNA, 1931 bp, Homo Sapiens
ccatcctaatacgactcactatagggctcgagcggccgcccgggcaggtgttggctggaggggctgctgctgggaacacctggagtctccgcgggcagatctcatattttggattctggatatattataatgagtgacactttgacagcggatgtcattggtcgaagagttgaagttaatggagaacatgcaacagtacgttttgctggtgttgtccctcccgtggcaggaccctggttaggagtagaatgggacaatcccgagagaggaaagcatgatgggagccacgaagggactgtgtattttaaatgcaggcacccgacaggaggatcctttattcgtccgaacaaggtaaattttggaacagactttcttactgcaattaagaaccgctatgtgttagaagatggaccagaggaagatagaaaagagcaaattgttacaattggaaataaacctgtggagactatcggttttgactctattatgaaacagcaaagtcagctgagcaagttgcaagaagtttctctgaggaactgtgcagtaagttgtgctggtgaaaaaggaggagttgctgaagcatgtcctaatatcagaaaggtagatttgtcaaaaaacctgttgtcatcatgggatgaagtgatacacattgctgatcagctcagacacctggaagtccttaatgtcagtgaaaataaactaaaatttccctccggttcagtattaactggaacgctttctgtactgaaggttttagtcctcaatcaaacaggaataacgtgggctgaggtgctgcggtgtgtcgcggggtgcccaggcctggaggaactctaccttgagtctaacaacattttcatttccgaaaggccaacagatgttctccagacagtcaagttattagatctttcctctaatcaattaattgatgaaaatcagctgtatctgatagcccacctgcccaggttagaacaattaatcctctctgacactggaatttcttctctacattttccggatgctggaattgggtgcaaaacgtccatgttcccatccttgaagtacctggtagtaaacgacaatcagatatcacaatggtcgtttttcaatgagctagagaagttaccaagtctacgggctttgtcctgcctaagaaaccccctgaccaaagaggacaaagaagcagagacggcgcgactactcattatcgccagcattggccagctgaagacgctgaacaaatgtgagattctccccgaggagaggcggagagctgagcttgactaccgaaaagcttttggaaatgagtggaaacaggctggtggacataaggatccggaaaaaaacagactcagcgaagaattcctcacagcccatcccagataccagttcctctgcctgaaatatggtgcacctgaagattgggaactcaaaacacagcaaccacttatgctgaaaaaccagctactaacactgaagataaaataccctcatcaacttgatcagaaagtcctggagaaacaactgccgggctccatgacaattcaaaaggtgaagggattgctgtcacgtcttctcaaagttcctgtgtcagaccttctgttgtcctatgaaagtcccaaaaagccgggcagagaaatcgagctggaaaatgacctaaagtcattacagttttattctgtggaaaatggagattgtctattagtgcgatggtgacaaccaactaataaaatttaaagaccacactgcttatcgtgtctggggttcaccggaaataaatgattcactggaacaattctactgtcaaaacaaagggggtttacaacttgtcctaagtataacaagggatgtatttttagttgggaagtgaccatttctaggcttatacataatagcaataataaaggctttgaacctacagaaaaaaaaaaaaa

SEQ ID NO: 31998 - DNA, 39825 bp, Homo Sapiens
acgaggtcaggagatcgagaccatcccggctaaaacggtgaaaccccgtctctcctaaaaatacaaaaaattagccgggcgtagtggcgggcgcctgtagtcccagctacttgggaggctgaggcaggagaatggcgtgaacccgggaggcggagcttgcagtgagccgagatcccgccactgcactccagcctgggcgacagagcgagactccgtctcaaaaaaaaaaaaaaaaaagaagaagaaggagatgtaggctggtgtacatggaagaggaattcagagacaagactgcacgtgctagacactccctttgaaacatggtcgaacatcactcaccatgcctctccggcttgtctgattgcctcctcacatttcaaactggtggactgtctcctggaaggcttctcttgactcccatccctacttccctaattccattccactttcctttctcccatcttgttctacctccatctaggctaggtgctgtttctcctttatcttagagcattctttccctctgtcatggcccttgacacagatacacacacacacacacagtgttatacattgtttgctgattgtttgctactccggatccctcccctagagtggaaagttcaatgtgggcagtgattgtgttctattaagtcgccaagtctccagtacctaacaccagggcatggcttccaggtggcactcaacaaatgtaggttgaatgatgacccggtttgagagtacccaggttaagaagtttgggttttattttacaggtaattggaaccactggaaagttttgatcagggaaatatgattggagctctctttttgcaacagacattttccaccagtgcgtagggtagattcattggcttacttaaagcaggaaagctagttagagtgtccttgctgtgatcctaatgggaggcagtgaagcccagactggatcagtgagatcaaaataatactcaggcacaaagtggctagctaagatggggagctgacttggaagtagtggttagagttcatttttaagcaagcaatgccaggacattcaagaaaacttgtcctgatctgcagttggacatctaaaacaagaggcaggccagggctgggaataatagatgtgagcatcatacatcgtctccattatgtagaattttatgagctggggataaagataaatttatacggaaggtaatttaattaaggcacccactagaaagccatggacagaatttcaaggcgatgcctgccagcagggcctgtaggaaaacttaccacagaacacaggagtattgcgaatgggtttataagacaactaagttggagttgagaagacccatctgatgaaggggtcactcagcaagagggggaaggccacaggcatcctccttaggcaggggcaagatctagattgaaaatcctttttattttccagatgtaacatttgccactgtttcttctgacatgggctttctcctttagcagtttggtgtagtgaaagtcctcaggcctggcttctttctacacctggcccttcacaaatcacgtcacttcacttggccttattttcctcatccacaaaatgcagttctcaccacatggatcctaagctcccttccattcttaacagttcagcccaacttcaacactgaaacagtgttaagttgctagcaaacaatgtagctatctatgctctctatatatggaaacaacattctttaacacaactcctctccaatgtagagaggagagcactggactcaatgagttataattacctggaatacgattataccttaagtcaaatacagtagactccctgaatgccatattctttgaccagcttaacaaatttatcgcatctacttccaggacaagaatcctccattttcaacccctaggataaagcagggaacatttgcagtgtgctttaaataattatatggtctctaaccagaagatttcaaggttggagacaaatggaatattttctttggaatagtctcccagttggaggatataacagatgacaagtttataacatttgtaaagttaaagaataaatggaagggatcccaattttataaaacgtcacctggacagaataattttacaaagaccttgggctactagatagttatcacattaactggttctgaagtgatttaaattcagagaggtatttgagtacttgactactttgagactctgagaaaacacattgacaggagggaacagacaggttggcatttatattaacccttacttagggttatccattgcatgacattcaggtggaatggatttaggtacccattattttctccgaacaaggaaacccacaagttattatcaatttaattcatgttacactcacttgctatcaatgctaaaaaagggaaagaaacatatgttcagagttccttcaattcagcaaaactgtattggggatttgctaaatatattgaggattttagtagactaaaatctgcagtcttttcatatactagagtgtgattttgcaaattgtttcttccctttccaacccaccagaacctttgtctttggaaatatgctttgcttatatttttcaaatatagtaaaattttctttcaaagttaaactgaaaatactggtctttacatagtatttcttgaatcaaaattggcctattaatttctattaagcaatggtaggtttgccagattgaagggctgtgtcaactggctattttagaattaagtcagagcatccaaggatataggtcacagaagggaaattgtagccatgaaatgtgggagttgtagcaggcatgacccttgtctgaagacaccagagttggctctttctttactgtgtctttgagcaagccaaaaaaaaaaaaaaagtgtatcacacatcagagaaatgcttcgataggtcacttacgtgaaagtcattttatttcttttcttttttttttttagatggattctcgctctgtcgccaggctggagtgcagtgccgtgatctcggctcactgcaacctccgcctccagggttcaagcaattctcctgcctcagcctcctgagtagctgggactacaggcgtgcgccacaacacccagctaatttttgtattttagtagagatgaggtttcaccgtgttggccaggatgatctcaatctcttgacctcatgatctacccactttggcctcccaaagtgctaggattacaggcgtgagctactgcacccggccatcattttatttcttagctctttgcctgtcccatttgtgaaatggaggtgggcacccaccctgttgtcatatacttgaaaaatgcaagttttagcaatgttaaggttctactttaaacttactaaacttaagaagttaaaagttggagagacctaggtagccttgcagatgacgctaaacattggttatacaagttgatgtgatggtaacgtagggaaaaccaactgcacagtgcttcctttaaacacatacttatttcataaagttctgttttctcgagagcttattttgtttatctcaccttatagtccatatccagctgtaattgtcttactgtatctgttttctaacagatttattcttgtcttaaatatgatacttaaattttcccacaacctgttccttttttctcagggtctctgtgtataagacataaatattaaaccaaatttcaaatatttgttgctaagtaaaagactaatttatttttgtggtcacagaaggcactccagattaaattaaaaggttaattcaattggcctgcaaaaatgcactgaatggaatgcttagaaactaggaccaggctgggtgcagtggctcacacctgtaatcccagcacttaaggaggccaaggcgggcagatcacggggtcaggagatcaagaccatcctggctaatatggtgaaacctcatctctaccaaaaatgcaaaaaatcagccgggcgtggtggcacgcacctgtattcccagctactcaggaggctgaggcaggagaatcgcttgaacccaggaggcggaggttgcagtgagccgagatcacgccattgctctccagcctgggcaacagagtgagactccgtctcaaaaaaaaaaaaaaaagaaaaaagaaactaggaccaagcagagttagaaaaccaagcagtcccattacaggaatgggcatgttatgcactggtgttttcactgttgaatttattatgtaacttaagggaccgaagcttagggcttcatcctgaacccatcaaaggcagaaagggcccaacagagagaacattctgacatatctaaaaagtacctctcccacaccaggcatactcttactttaaaaaaaaaaaaaatggccagagggaatctgaagcctctgaataaaaatcaaagagaagagagagctgtttgcaaattaaagaatgtgttacttagataatctacgtgtaaggatatgtacatagcaaatcatcacctgaaaaatgcagattttaacaatgttagggttctactttaaacctgctaaacttgagaagttaaaagttgcaaaaccccctgggagaggctctaggtagcattgcagatgatgcgaaacattgattccagccttctgagaacaagtagcgtataataagaacgtttaaactaatcatacactttcactgataattctattcctaagcaaatagccgaaggaaaccatccaagagtgggcaaaaaaaaaaagatgcccttaacaattctatttatagtagttaaaaactggaaattccccaaccacccccactgtgggactagctaaacaaacttggggagagtaaatatcatgggatacacggtagcctcacagccattcattcactcactcactgattattttttcagtagattttgcagggctctgcaggtcatgttcaggattttacatgtttgtttgaagacaagtagaagccatttgttttttgttgtttgtttgtttttgtttgttttgttttgttttgagatggagtctcgctctgtcgcccaggctggagtgcagtggcacgatcttggctcactgcaaggtccaccttccgggttcacgccattctcctgcctcagcctcccgagtagctgggactacaggcagaggatcggcatggcaaggtgcggcggtgaaaagtggaggcggggcatctgttgggctgcagtctacgagcaatagttgtgacattaactaaggtgaggcccactgagagacgaggtggttccagaaacagataaaaggcagagtctgcaggtcttggtgaccactttcatgtgagatgagaaggaagagaggccttaacgattactcccaggtttctggtctgatcatctgagcatttgctgacctaagaaacaccatctcatctgtagagatgtttgtgttaggcacatcaaatgtgtggtgcctatatgacctccaggaggaattacttaggagatcacggaatgtggttctggagttcagaagaagtgccaggctggagtagatttagcatagacgagccgattgaagccatgggagtagatgaggttgcccaagaagaagggcaggtgagagacctggggaaccttactactgaagggctggagaaggaggaagagcagagaagtaggcggaaaaccaggataagtggaaatctctgaagccatggagtattctaagagaagggaagtagagattgctggtgagaatgttgttgagaagtcaggcagttccctgagtaccaaccattgccctttggatttgacaacagggaggtgacctgagcaaaagcagattggagaagggtgggagtgggaaccagaatggaaggtgaggaagtggtgagaatggtgttggacagctcccctgggaagtttggctataaagggaggagagaaacaggagcagtacctaacagggaggatggggacaaggggcatgtacatgtggacaggaaaaaaacttgaaactgcttaaaagctaaagggaagaaacccaatagaagaagttggcaatacgactgcaaatggggacagtaagagctaactgtaaactggaaatgtctgtatgaaatgatgtcaactggggaaaaaaattccatccatatgaatgtgactttgtaaaacttacgcatgtgctttaaatacaaaagtactgaaacaaagaacattttttgccagattttgtgagacatgtctgttcacgcttatgacaattgcaagagacaccatccattgagcgtttatgatggcagacgtggggctggtgctctgcacgtatcatctcatttaatccttataacagccctgccaagtctgtggcatagttctcattttacacacaaaaatattgaactaagccctgaactatggctcggagaagaaaaatagcttccctaagggcatacagctgacaaacagaggaacaagattcaaacttgggactcccttgctccagagcccaaattctttcctctaaaattaagtaacttaaataaatttaacccccctcaacagcatcttgcatgttcttggtcctcagacattagtaagattgatcagccaagtcacagcagtattgttcactcgctctctcctgtccatttggaacacattacaatacaataatggaatttaggattctcaaagaacgtgcctggcttttcatgtaaagatcaccaatgcaaaactgtgttttgtttctgtgtgtgcgtgtgtgtgcgcacgcgcgtgtgcatgcacccaggagtatatctagattttatgggcctgaggcttacggtttgggcaatatgaatctttctagaactcttcccagggacctgcgcaagtgaagggccccgaagctcactagcttcatggtacatcagcctctgcacatgcgtgtgtttacatgaactgtgtatgtatgcgtgaagatagatggaggaaccaacgaaaaccatggttctttgaccagtagggctcagttccattgaatagtacaatagaaatactagttagtaccagtcactgtgtttcttttctgggaagagagagaagatttattaaaaatcaaatgggttaagaattttctgaaaaatgccctttgaatttcagccattagctaagttagatatacagtgctgtggcgcatgctctttattttcagtaggcaaataaatataacatttttaaatatattctttatcccagagactgttttggcgttgtttgtttgtttgtttgtttgaaacaaggtctcactctcatgcaggctggagtgcagtgatgtgatcacagctcactgcagcctcgacctcctgggctcaagcaatcctcccagctcagcctcccgagtagccgggacaatgggcacgcatcaccacgcccaactaatttttgttttttttgtagagatggggatctcactatattacccaggctggtctcaaactcctgggctcaagtgatcctcctgcctctgcctcccaaagtgctgggattataggtgtgacgcacagcacctagccagattcttttgttagtaacaccttttagatgtgatctcctccatatatgaaaattggaagaatacatcaagagagcaggctgggtgtcgaggaatgaagggacactggaaatgaaagaagatggagggctgtcttcatttacttagcaacctgctatagacaagacacatattctgtgttacttcacaagccaaaactaagaaccaaagtacagggattgcaggggaagccagattccacctcagcagagaaactttctatcaactagagctgtccaaaaatggtttgcttgcgccgtgactggctacccatcactggaagtacccagccaaagccacttctttctgggagaaggggaggtgggagactcttagtgagcaaagtttgagtcaatctaggaaacctctagaatcctgtctagatctaatattccaagttattactgggacacactatcgctgccaatcatatgctcacagtgcacgcacagcaagtggtccccgtccgcatggtggtgatgtgtttttgctgagccagccgcattccctgacggagcccctagttgctgaggaaacatgtctgtgcatggactgactcagctaaggccacactcctgggtcttagaactaagttttttcgtgacccagtacccaggacctcgggtccatgttcccacccgtagccgcctcatggatagcatttaagataactcccaataccttattagtctcctaataggcttctggtctaggtaggaaactggccgagtccacttgacccgcccctccccctgcttcctcctgcacactcgggaagaacccctctgaccctgctcccttggccagcgtcagtatgggaggctgaagcgagcccatgcagaagcctgggaggtgtgcggcagaccacgtgtcagacccccagaggcttagcccaccaggtcaggatgagacgtccagagaacccaagactaggagagtggcctcagttaaccttctttaccctttctggaaggggaacgtaaagctggccgtgacccagatattcctctattctccatgtgagacctccttagagatctacacacctgtcccaagccactataataatatcaggaatagtaatgatgggagtgtttgtggtggtggtggtagtggtggtggtagtaaaatcaatgactagtgtttactgagcttttcctgtttgcctcacgccatgatgagcttgttacatagaccatcttattgaatcgttacaacgatctcacaaggtagatgccatcaacactgccattttatagatgaggaaactgaggccaagtgacattaaagggcatgcccgaggaggcaccagtctgactccagagcatggcctcttcaccatgctgctgtctttcctcagtttctctctcatgaaaacacagaaggaaaagtcacctgcctgctctccagcccttgtttgagccaccccaccgggggcttctccaagcccagaagcagccaccaagaggggtccagggagcagtgtgtgcaccaaaccctactctgggtgcttcttgacctttccctcctttaaccctcatagcaaatgctggaggtcggtgttattatttgcattttacagagaagttcagggacttgttcaaggtcacctggtgcacaggagttgggactcccaccgaggcagccgtgcccacctctgcagtcagcacctcccaccaccacaccagcccgcctggttaagtgaaccaagctgaacaccctcacagacactaaatttatatttcctggcctccccttccaaaatggatacactaattactggacctttttttttttagtaatagtaatcatcaggaacacatttttcaatgttttcatttttctattccgcatactaccaaaaaaaccagataaaacccagcaagtgtgaggccctgtaaattagcaaaagttcaggaagtcattacacgaaaccaaaagaaacaaagtgttgattaggggcttatttttgtatgagattaaaatatgaatcattaaaataggactgtatttcaggcttcttattcccgcctcatcagagacatcaccatgactactaggtttggattcaatgaattccgaagccgttctcagctctcaaatgcagtcatgtgtgccatggttctgccttatacatagcagtttcaaaagtctggtccaggacacctctgcatcttcctgcccatctccttttaataaaatgcccaagtgacatggtgtctgcagctctttgaggtattttgctttatttagtcatgatactaagtagtggcagaaagttatactaacagcaaccaaatttcaaaggtagaggtaggaacaaagtcaaggcaaaaacacaaggttctctcaggaatcccttagaatagggtatccgtggagttttatttagtgtcagtgatagaggagcaggagtttgtagaaaaaaagaaattaatatggaacgtttctcaggtccatgctgagcttgaaagaaaaaataatacagcaatatcttcaatccaaaatatgccttgaatttaagttggtaattaaaatgtttgtttaaaaaaagtcgctaaaattagagacaaagacccattgtttgttattactgctgactgcatatctgtgtgtggagaagggtgtgaggagacagtcacaggcctatgatattgtaaagatttatcacccacccccaaagggttttgaggcacccacctgcattttcagcttggatctaagtcaaggggtgggacaagaccatgacaggttttggggtttgtttattttttgctaattactcgtggacacttcaaataccaaatatatcagaacagaaaggcacccgctcaacccagcccctgccatcctctggcaatggcctgacatctctagatgattttctagagattgtggaaccttggagcaatgcctgtgtgcatttttaaaggagggaagcatcccagaacatgccagttccttatagagtatcttgaatagttaccacctctaaccggacttgtgaatttttttcatgtttattcttttcccgtctaggattgagattggttaaaaaggcatatttttctctgtagggaaaatttctgtgaagaatctatgagttgtcattggagcattacaaatgttcttaatgacttcataattcttcgagtaatctgaagtgcaagctaagatagatgtaaaaagaacatcctcacaaaaaataagagcaataaattgggatagtttaaattccctgccattgttcggcagctactgaagcagttcagtaatgtgggaaaatgttcaaaacctaatgtggagggaaaagaggatactcaactattaaaagcccgcttctaactatagaactatagatagtattaacagggcttctgtatcttagtgatgatgggattctaggtcatgttttgttttctttctgattttctgcctttttaaaacatttttggggccgtgcacggtagcttacacctgtaatcccagcactttgggaggcctaggcgagtggatcacttgagctcaggagtttgagaccaacctgaacagcatggtgaaaccctgtctctactgaaaatacaaaaatcagctgggtgtgttggttcgcacctgtagtcccagctacttggagggctgaggtgggaggatcacttgagcctgggaggtggaggttgtagtgagccgagatcgtgcctctgcacttcagcactggcaacggagcgcaaccctgtctcagaaaaaaagtatacgattttcataatcaaaaaagtttgatttacaacttcacatcgctctgaccttttgagtttcaagtgctgcattctgtgccccatgagcttggtgagggtaggaggtggcaggtgcgctccaattgtatctttggcaccgtgccaggcacttagctgctgctccgtagatcgttgttggaaaaacatctttccatttctcgatttccctttcctttttctttccaggtgatgtgctctatgaactccttcagcatattctgaagcagaggaaacctcggattcttttttcaccattcttccaccctggaaactctatacacacacagccggaggtcatactgcatcagaaccatgaagaaggtactggaagaggtttctcttttcttgcctgaggtttagacaaatccaggaagtttaattgttaacttgataagctggtcttcttcgtgtaagttcacttttcattcagtagacaattattgagtgcttactatgtacaaaatacactcttggttccctgaagctcacgatcaaagcgaagcagtgagatggatgtacacagaagcacagaagcgtaaccatatagtaggcaccgtaaaggtgtggtggaagggtccatgacagccaggtgcaggaagcagggtcttctcataaaggaagcaactctggagtatgccttagagcagtgctccccaccctttttggcaccagggaccagttttgtggaagacagtttttccaccaacagtggaggtgagggatggtttgggatgattcaagtgcattacatttattctgcacttcatttctattattacattatcatacataatgaaataattatacaatccaccataatgtcgaatcagtgggagccctgagcttgttttcctgcaactagacgttcccatctgggggtgatgggagacagtgacagatcatcagccattagattcccgtaaggagtgtgcaactagatcccgcgcatgcacagttcatgatagcgtttgtgcttctatgagaatctaatgccgctgctgatctgacaggacgtgggactcaggcggtaatacgagcagtggggagcagctctagatacagatgaagcttcactcacttgcccccaccgctcacctcctgctgtgcagcccagttcctaacaggccatggactggtaccagtcagtgacctggaggttggggacccccccttagaaatccagcaggattctgataagcaaggatgaagtgaagaacattccaggcaaagaaaatgacgtaagggtggggtaaggctttgaaatagagagcaattagatgacttggattataaagcttatcttctcccactcttttattacagaaaatttcaaacatactccaaatagaataaaataaataaacccttctgagccatcacccttgccttcacaatgatcagcattttgtcattgcagagctagtccaaggagcttagcttggaaccagagtgtggagaactttgatttctggaatatggaggaaagaaatgggaagtcattggagagttttttagcaaggggtaataaaagttggaagaaggaaagaaaaaaaaacccaaatctatgaactcagtgttgggccagggctttctgcatagggcaccaaaggaggctggttagagttcactcagtggcggtgtttatttcaagtgtcccagttgttcctcttaatcattggtagaaagcaaaagaccagaatttaatttaggccctggacctagttccagaataggtgttggggcacagaaatagagtataaaaaccttacttgaggccaggcgcggtggctcacgcctgtaatcccagcactttgagaggccgaggcgggcggatcacgaggtcaggagatcaagaccgtcctggctaacatggtgaaaccccgtctctactaaaaatacaaaaaaaaaaaaaaaattagccgggcatggtggcaggcgcctgtagtcccagctacttgggaggctgaggcaagataatggagtgaacccgggaggtggagattgcagtgagctgagattgcgccactgcactccagcctgggcgacagagcgagactctgtctcaaaaacaccaaaccaaagcgaaaggaaaccttacttgagcaccattgcattaaacagttgaacagcttgagcactcagtgatggatcgtgcctctgagggtcatgatcctcctgctcggattggtcagaccacagacgtccaaacgtgcatcagtttcttcatgtgtacttttccttaggtgcagattactagggacctcaaaccctggtcccttggggcatttccttaaaatgattgctcatccccaagagcagggctaacaattttgttttgttgttggcaaaccaaaaaatgagaagtttcttgtttttcctaattaacacttcacaaaagagagcctgactccaggcgatgacaccacctccttgtgccaagcatttcacagcagggcccctcgcttccgtgatggagaacgaacagcatttcgtgcacgctccctgccttcctctcatcctttcctcccctcactctacccttgctaaatttagcagctgccctcctcccccaattcagttattcattcttttgctcttcctgccatgtgcatttccggcttgcataatagccaccagccactccagagaagaggaggtgggtttactgaagcttgacattaaggcaaggaatatattacctagcctgcctttcagatacaaagggtatgtgatgggttttctttctgtctcttagtctttctctcattattttttttgttaatctcatttggaatttagccccattttattcctgagtgtgattggaggcttatggtctctcctcctcacagatccttcctcttttccctttggcctgatttgactcagcagtaggtgtgtttgttgttctcatttgcaggagctcagcaatagagaaagctggcttactctgagagctgctcgcaaaccaagtaaatacagatgtgccaccgcatacgctgtaatgagctttctctcaagtattatgatgttggtggttgtgagctcagtaggtaagaggatggagctaatgaggccgaggtcaagggtgtcattgccctgcagaccagttagctctgcttcagacccagctcttaaaagtagtgcattttcagagaccattccttaaagctcatggccaggaagcaaggtctgagagcatgtccgggcgcatgtgctccagtgaacaggtgcacacaacaaggagagaagtgtaggtctttatccggtggtatccagggagaagagctttccaaggcacagaagtgatatgaagaggtggccctctccctatcctcctgcctttcagctatatggtgcccttgatgacaaagagaacaagtagagaggtgcatggatcagtacaagtttcctgcctccagctacttcctctctctctcccttcttctccactgaaaagaaaaaaatccagctcaacataaattgtttccagaatcaatactgttccatttaattatgaaggataacagatgattgatgtgggcatatgttaacatacagaaagatctggttctgaaaaaaaaatctgtcaagtgaaattatacatatcaaatattacttccccagtgatttattttacataactgggaatacagttccatataaaagtatgttaacccaagatgacacatgttgctgccaacttggcataggtaagtaggtaggtgggtaggtaagtaggtggataggtggataggaatgacagaatggaaagagaacaaggcccaactcagctgttaagcagcctggcacaatgaagcatgcacggtcaagtgcaaacagaaggcatcattcaaccgccttgtgatttcacctcgtcgtggccacaaacttaaccagttcagacattcataatttcacaatgggcatttatatcacagtacaaatgtgtcttgctcaatctagcaccagttccccacatgtatcctctatgactttcttacattgaaacttacattgaaatcatgccttcgttagtagccacgtggcagtgctagaagctaggaagttggtgttagctcagaggttcacctccatgccctgacagtagacgaggatgatcatcatgctaattcaaactctctatatgtgaacatttgttacctctataatgtactccattctgaaatcacatcatggcttgagcaaagcagtcctcagattacacttacctctagaaaaaccagcattttcactctttttccttacttattagttatgggaagggagggtgattttatataattaggttaaccttataatttttcacccataccaacacacttatgacagtgacacagggctccagcaataagtaagccaggactacatatcaaatattcaggcaaaaccagaaccagaaccatcctcgacaaacaaactggggtgagtgtgtgtgagtatgtatgtatattttaaaggatgagatctggaaaccgggaaaccaggtcctaacccttcattctgccagaacagatcataagggctaagtttctcatttctctggctctgtctccccagttataagaagggggttaggctaaatggtttctgcagtctcttacagctctcaaatccccacattacgtccaaggaacctgagtcttcctgggtgatatgaagataagacatattcccttccctcagggtcttgagcatctaaaatctagaaaatcatagcagtgtcctgcctggtgttgctcagaagcgggagaaaatctcttctttcctcatttgtctcaccttattcagaacttcagataatgttgcccctctgagagtggcagcaagagtagcgtcattcacttatttcatcataaaaagctcagtttaaggacattctttttccttgactgttgtgactcattttatctttgtaatatgaattagaatgcaggtaggtagttatgtagaaaggaggtaaaataaacaatgatattacttccttcacaaaaaccaggaggcaaagcatctttagaaatatcaaagcagtaaatgactataaaataaatttattttgtcacgtgcagttgtgatgataacttcttttcacaccttaggttcttttattttgggttttatccccttaaatatatatatatatatatttttttaattgtcatttgtcctctagtgttagaactactggaatattggccccccaaaaactcaacggaaacataaaataagcctcccttctgggctaaagtctctgaatgagaccagctccacagaatcaccccatgggactggatatgcagtctgtagggagaaggagcaagatccggatttctcaaacgttctcatcccatcacccccttggagcttgataatttcagctctttagttgcatcctgtcctctgccccatcaaagagattatggggcagtgattcttaatcactttaatttgcagatattcacacatgcagggctgagattgtttctgtagcactggatgcagttttaaggtggcagttctgctctgggacagctctttatcacaaggtaaacatggaaatcgcaagtgatgaggagagctttcaagcatcgaagtgcaattgatctcaatttttcttacaactagcacatgggaatggctcaataattgagagaagtcatttctttgtgaaagatggagagggtggcatgtgttctgcgatggcccacagaagttttatttatatgattgctttattgaggggaatcgtacccctcctgccccaccaccaaacccaagtgcccaaagactgctttggcagaaggaagttgtatacaattttaatgagataattaaagaagatgaggtatatgaatctgctttttttttttttttttttttttttttttttttgagaaggagtctcgctctgtcgcccaggctggagtgcagtggtgcgatctcggttcactgcaagctccacctcctgggttcactccattctcctgcctcagcctcccaagtagcagggactacaggcatccgccaccatgcccggctaattttttgtatttttagtagagacagggtttcgccgtgttagccaggatggtctcgatctcctgacctcgtgatccgcccgcctcggcctcccaaagtgctgggattacaagcatgagccaccacacccggcctgaatctgcttcttaataacaaaataatagctaacatttattgggtccttgttgtgtgccggccctgttctaagctcttatatctttgaatcatttaatcctcaccacaaccctataaagaaggtgatattattacctccactttatagatgaagaaataaagattaagagcaataaagtaacatgccccaaaatcaagtagcaacgctgagatttaaacccaggtggggttgatgccagtgcctgcattcattccactgcgcagaatgaggagaccaaaatacattttcataaatatttgtagtgcaggcgccctgaaaatagagcacatgattgaaagacgagtagcagtagtggagatgagaacgccaaagcagttttcaggtcagctgactggggctacagtgtgtggcaggtcctgcttacgttactgccaaatttgtactaaacaatgtcaaagatgacttctgggactccaaagtatgtctagttcataatattaaaaactcatgctgagttggaccgaattcacccttctagatcattaactcccttgggatgggccgtcttagcatcacgaaaatctcccagcctgtgagaactgtgggttctgagccaggcaccggcttctgagagcagacacactggctgtcacctaccccctgaggagccagcccctcagtgcaggtcacgccttgaaagctggcccctctctacagcggcttagtaggtaacaggtagacgcattctttagctgctcaagtcacatcctgtcactggttgtaaacccactcgattctctagtcttgctggagtcgtgttgatgactgcagggtcaaggaggctgtgggctggggtttgacatctttgttacacatattaaccacggaatacatgacagagccagagagcatgccagcacgtatatgcgtgcactctacatcccccgactacctgggttctaatcccagctccccagtttaccggctgtgtgacttcaggcaactgccttgggtctcaggtctctacctgtaaaagaaggaaaatgacaggacctatctcaaagggttgacataagaaagaaatgagtctccagcctgggcgacagagtgagactctgtctcaaaaaaaaaaacaaaacaaaagaagaaagaaatgagttaatacggaaaatgcccttagaatagccaagcattcagtaaatgttattcattatcatgattcaatatttctggctgttatttggttgtttccccccctctgtttgtgtaaatttttaattgggataaaatacacaacatttacaattttaaccatttttaggtgtacttcagtagtggtaagtctattcacaatgttgtgcagttggtttttccttccacttttcttaaccattctcaatatcgcaactacatccactttgtgcaaacatcaggtttgtgcaccttatacgtagggaagggccattgcctccctcactgttatccaagaacacctttgaggattcatctgcactatgatttctgtgggaaaatacatttaaagtgccagtcttcattactctcagaacacggcctgtttggaagtaagcactgcttgcattttatgtcaccttgcagtatctggcgagcgctgggtcctccatgacccctttggaacctttgtattaatcttctggctgtctcctttaagaactacaagattaacctttttgcagccctttctgttctgggattcttgaatctggcagcaggtaacgacaggtcccatcagaaacaggtcaagatcttgacttcctgccctccctgggagcagggcccacgagcaccacttaacacctttttcccctgacccagcctcattccagccttctgcaagtcctgctttcctctccaggacctttgttcctgctttgcttcctatatttcagggcctagggcagcatgaccttttaccttctgacccttgcccctgctgcagcatgtgttttgtgacggagtgtagggactggattgtgcagagaccctctttgcatctgtctgggccctcagcctattacaggagggacccctcacccttcctgcctgcaccagggtcctccaactggaggctgcttttagccctagggctagcgtgctctcttaagccagaagttttaggggcaagagatccctaatatgcatgaatgactctcacaagacaggcaggaagtctccaagagacttcctttacccctagggaaatgccatctgatctttgagataaggggctgggagcagtttgatttcatctccagagaaggaagccctcagttaaggggtcatcttgctcttttccccactccagggcctctctgccttatctctgtgccacctgtgaccccaggccttatacatgattgagaggattacccaaacagacctaattgacttattggaaatccaatcctttgattttttaattcacttcttttgtgctgctttatggagacaaaggagactcccctatactgcctgtgaagagcaagacagtctgcagccccgactgtgaggactgtgaggcctcctgtgtcagcagatgtgcatgtactctctgtactgatcccctggaaaggtggcctgtttgaaagcagtcctgcccaggcctgcagtaatgaagattaagcctcagagtactacaggttacccattttgttttgtttagcccctttcatcaaatgcttataaaattctaggagcttacctagggtttattgttgataacctcaaacatatgtgaatcatccactccaaactagggcagttttcttctcaggccctccaagggagttcggtgacattggcacattgtggggatgaataggctgaaatgccaggtacacagttagtggaaagactccaaaccaagcaaaggttgaacgtcaggtaactggagtagggggtgtattagttagctagggccgctgtaacaaagtaccccaaacggggtggcttaaacaacagatatttattatctcacttttctggaggctagaagtccaaggtcaacgtgtgccagagttggttccttctgagagagctgtgaggtaggatctgttccatgactctcttctcgtttctggtggtttgctggcaagctttggcattccttgccttggaggtctctgccttcatcttcacctgcattcttcccctgtgtatgtctggaagtccagagtatactttttataaagacaccagtcatattggatgtttaaaatgacctcatcctaactaattacatctgcaaggaccgtctttccaaataagatcacatcctgagggtactaggggttaggacttcaacttatgaattttgggggagagatagtcaacccataatgggcataagagaccgggagtggtatatgaaatatagtttgaattccacctcaagaccttgagcttatgacttctgtctagctctgtgtatcattcatacttcccactaatttttaacaaaatgactgggagagggagaaagtgaaacccagtggactgaggcttgagtgagcattacctcctgggcctgttgatttgcgtctccctggtgaccttcttctctgaccagcatccgtgggcttagggaaagcacagtggtggaaatgtgatcctggtgtgtgagatgcaaacttgatcttagcctttgctctccctggaaacttatcggtcaaaactttcactaaaggcagttttttgtctgtttgtttaggtttactggttatttattatttatagcatggttaaattgggtcaaatttttatgaattttaagtagagaaacttttctaataagaggaaaggataagaaatcagacctttttgtaaagaaaattaccccacttaaagtcctggtttattttaggccgtttggcagtgagaagaagggattatttgtgtctgacagaggtctacaaggaaaaaggtttgggatcagaaaacacttccaaccagaatgacggttccctgccagtccttggtctttcttcctcccttccttctgtgcccacatggactaattatgtctggctttccctccctcttccttgtatatttcccttccatatcaagaccttcagaatgagggcaatgtggataatttcccagttttccagctgggcagctcaccaagaacaaacccagacatcaaggccagaccaaaaaaatcttcttgttttagacagaagactcctacatctgggggatttaatgcacccactgtccgctcagtgcatttcctgtgtccggagcttctctgcctgccggctctggtctcgtaagtttccatgccctgctgccaacttataataacagaggcggcaggcagcaggctgagaatgtcatagcctactccatacatgggcactgctttgcagactgaaacaaagcttgcagggtctcattgcaggcctctcagccttgacagtggttgtgcccagaccaccaggagcctggaattaaataccctcggatccagttctctactgttaatgttatcagcttcatcaagtacttcctctttgagtgatatctgtggagaaataaataaatcaagctcctccaagtcctgttcctgcctggatcctgagtccaaagtaaaatctgagttggattatccaaagcactatcaccctcctgcattgttcccaaggtctgggcaggaacggagagtgaaatctctccaggacattacatcagttcctcctttacccttggcatgaaagttcttcctctcctggtcctcccagacttcctaaggcctgccctgagtgcacacccacacactaagccttgaagcccaggacatcaaagaaagcctgcaggtaaccagattactgaccaacgcctgtgaccgttttgaaatttataagacgggaaatggattcaggaaatgggatttttcaatacatggtcttcatcatccttaagtatttttaagccttaataagcttttaagtaaagagagacattctgtaaatggcatttagaagaaaatataggaaagttcaaactggaactgtcttcaatagttgtttacagtgatcatattctgtgacaaatgaaaagtggaccagggacaaaagataaatacatttctatgggcagcagaattgacatccatattatctataaaaggaaagtttgccttgtctacaaaagattacagatcattttagttggtgcccagtaagcatttctatgcatttgggttaaagtgaggaagttagtgcttgtctttccaacctatatccttgcaaggttaattaagcactttaaaaaaaaaaagctttttataacaggaaatatcaaacctatacaaaagtaaagagaattgtgtaatgaatcaccatgtacccatcaccagttttgatgatcaactcaaggccaatcatgtcttcctctgtggtctacctcctctctccttcaccatcccagattattttacagcaaatctcagatacataatttcccttgtaaatagtatcaacaggctgggcgcggtggctcatgcctgtaatcccagcactttgggaggctgaggtgggcggatcatgaggtcaggagatcgagaccatcctggctaacatggtgaaaccctgtctttactaaaactacaaaaaattagccgggcatggtggcgggcacctgtagtcccagctactcaggaggctgaggcaggagaatggcgtgaacccgggaggtggagcttgcagtgagcagagatcacgccactgcactccagcctgggtgaaagagcgagactccgtctcaaaaaaaaaaaaaaaaaaatagtgtcaacataggtctcaaaaaaagactataaaatcataatagaaccatcatatcacttgaaaactagtagttcctcggtatcatcaaataatctgctagtgttcactttttgccaaccatctcataaatgttttttacagtttggatcagaatccaaacaacatctatacattgcagatggttaacgtatctcttaagtttttttcaacctataggttcccatctgcaaccttcttgtgtgtgtgtttgagcagtccctctcttcaggtttttttaaagaagtcagccataattagtatattcgtatatataatatattatatatattagcgtaggcttatatatactatgtaagtatatacttatatagtattagtatatactatatatcatatatactataatcatatatagtatatatggtgtgtgtgtatatatatactatatatcatactatgcatatatagtatattagtataatctccccctgtacatagtttctttttttcctctggttgctttcaagattttctctttatttttggttttcagcagtttgactatggtgtacctgggtgtggtttttattttacatatcttacttgagattcttggaccttcgaatttactgttgttgataatgttgttaccaaatttgaggacaatctagccattattttttaatttattctactctgtttttttctatattctccttcttggacaccaattacatgtgtgttagaccacgtgatattgttccacaggtcactgaggatttgttttgtttggatttcatttttactgatctgtcttcaaattttctaaccctttcttctctcatctccgttctgctattaagtccatctagtccggtctttcatttcagatattatacttttcagttatagaatctttattttgcctttttttttaattccatttcccttttggcagcctgtatgtgtcatcatttattacaaccatgattttcttttagggcttgaacttatttataatagctgctgtaaagtttttctgtttgtttgtgttaactccaacatctgcattatctcaggttctgtttcttttgatggcctttcctccttattatgagtcacatgtttgtatttcttctcatatctagaaaattgtgactggatgctgagcacattgagacactggattgtgttctattccactgaagagtattgacttttgttctaggaggcaatcaaattactggccagttactttgaatctgtagaggcatggtcttacgtttcattaggtccaatctgtttctattttgccttttgcccttagcagatccccttgtcctagggtttttactcctacattgtggccattctggggtaacaaacagcctgaagtgtttacagagcctttgaacttgatgagactcaaactctgaactctgtctccactgcagtagccagtagctgaggtttccgcttagatcttttgattatacaactgttgcttttcactgaactccaaagggtctccctggcacttgggctattcgttaatcagacaagaatttgaggaagcttttacatgccaatttaatcactctcccctctgtggctcccactgtatgggatttgtttcttcaattttctgccattctggcagctacctactctatctcaagcaactttctgtttatcttctaactgcccctgtgctgcacggactggggaggaacatgcagcatagggcagttaggagatcaacagaatcagggggaaagctgtttaaatatggacctcactctgtgcagttcccttctttcaagagtgaaatcctctccggtttttgtctgcccttgataccttcaaatagttttttcaatgtatttaatatggtttctttcatttctatccgtaagaaggttagtttggtacacgccactctgctattgttgaactgaaattgcccctttccttgtttagataagtggtggcagatcataaatacttcatcttgcttttcgtatctaaccatagattctgatgctagtccttagcaaaatatcaagatactcctcattcctttttacttttacgtagtactccattttttagagatatatactataatttattaaatcagtcttctattgatagctattccaatgatgaggcacttgaatttatggcagtgggttatacagtagtcacaaaataagccctttgccttcaaggagatgatcttttaatattgtgaacaatatttttgttcagtgatcatatgatagatgagatctagtagaactttcaaaaaagaaaaaagtccgcattttcttcttaaccctgtgtaaaacttaaaaccactatgtctgtctctgtttactgaccctatcaaattacggaattcactttatgtgttcttcatatatgtatattatcttaatggacaaaggtgatatgtttgacttgctttacttagaactgtggacaattctttgaccagaacaaggacagcaagcatgcacatccttttggtgagactgccctgggaacagatgtggccagagagagttcattgagttgggtgtggagccgtgtagaaatccccatttttatgggcagatttctgtccttctgcaccttagcagggacttctggagccaggtgtgtgccggtccattccccgacccagccctcagagctacttctcttgctgagctgtgtacacttctgatgttatcctcgctcacatgtcaccagcttgcaactttgagtgggatgagttagaggtgtccatccatcctgcttcttccttacttctgcctgtctctgagcactcaggagcaaagtgctcccaaaagttctttcaagttcagtaagattgtcattctgtaaattggggccactgtgcatgcttagagcaggttttggtgtgactttgtgtcatagtttctatattgcagtgacagatgttgtcatgagtacacaggttctagaatctgactggagtctggttctataatctcctaactggctgtgtgaccttgggtaagttatttaacttctttacgcctcagttttatcatctgtaaaataggggtactagtggtatctcttggttaggagtgtcatgagtgtcataaggttgggggtttttttcttttttcttctttttttttttttttttgagacaaagttttgctctgtcacccaggctggagtgcaatggtgtgatcttggctcgctgcaacctccacctcctgggttcaagtgattctcatgtctcagcctcccgagtaactgggattacaggcgggagccaccgcacccagccaggagtgctataagttttaaacagtgaaatccagcatctaagatatagttattactaataattattactaatattattaacattatcactaatactaataactcctagagttagagaatatgaaaattttagttgtgaaaatgtaagtcaatgaaagcatctagagagaaacctgtaagaacccttccacctctgaaagcgacgtagaagagttaaatgatggccaaaagatggggcatggaagtttggcttccttgtgcctacaggccacaggtaggtcattaacggaatgcttgtagacatccttaggttgtctggcaatagaaaaatagtttcaatatgcacaccttaaggccaggcgcggtggctcacgcctgtaatcccagcactttgggaggctgaggcaggcagagcacgaggtcaggagacccagaccatcctggctaacacggtgaaaccccatctctactaaaaataaaaaaaattagccgagcatggtggtgggcgcctgtagtcccagctactcgggaggctgaggccggagaatggcatgaacccgggaggcagagcttgcagtgagccgagatcgtgccactgcactccagcctgggcaacagagtgagactccatctcaaacagaaaaaaaaaaaaaaatatgcacccttcaaattgttaagcagtgaaaaagacactgcattctggggagaaaggtcctttacacatacctacacgctcctccatttaccgcctgtagagccgcagggagtttcctgtcctgccaactcactggggtctgtgattgtctttccctctgctccacagataactgtgtccagaggacccccaggccatccgtggataatgtgcaccataaccctcccaccattgaactgttgcaccgctccaggtcacctatcacgacaaatcaccggccttctcctgaccccgagcagcggcccctccggtcccccctggacaacatgatccgccgcctctccccggctgagagagctcagggacccaggccgcaccaggagaacaaccaccaggagtcctaccctctgtcagtgtctcccatggagaataatcactgcccagcgtcctccgagtcccacccgaagccatccagcccccggcaggagagcacacgcgtgatccagctgatgcccagccccatcatgcaccctctgatcctgaacccccggcactccgtggatttcaaacagtccaggctctccgaggacgggctgcatagggaagggaagcccatcaacctctctcatcgggaagacctggcttacatgaaccacatcatggtctctgtctccccgcctgaagagcacgccatgcccattgggagaatagcaggtgagtgagttcccctctcgccgctccagcatcatggggacctgacaaagtcccactctcccctgtgatctttgcagccagcctcgcaccattcccaattaggcgccctccaaggctctgtgagggcaattggaggcttctgcttggatgaggctaaatccctaatggcttggttaatgagccgctgggatggagtagttaatgagcctcagaaatgttaagaaacaaatgtcctacgtccagcttacaaggagagtcacatcagaatcaaggctaagcgaaaacatttaaaataaaaggtttatgagcatgctaatggccctgtcctgaagtttccagcagctaattaatgaccagacacagcataaagaagctttgtctcagattcaggcctgtaattccatcctgtgagcggtaacgccatgcagccttcaccttaggagcgggtaggagaggaaaacaggattatggtattggaggcaggtgttgctgggccatttggacagaggaaaccactcccagattctctttcatttattataagaagcccaaatttgcttacttaagggaagaaaccagtggaaaccagtgggaaaaatatctacacattgtctgtttcctaggatgctcataatttacatgaactcattcttcagaagcttaatcctctaaccatgtgacaaggttagctcttttcgtagagcatttctccattagatatttgttgagcacctgctgtgtacaaataaatgcattaggagtagggatacagagctagtttaacatgcaatatctttttccccaaggaatttagaatatagtgggagagacaaaggtgaaaaccactaagatataaggcagaatgaagtaagccccatttcccattcattttatgtaccagcattcattgagcacctactgtctgccagagtaataaagcgctgtagaagcaaagcagaaggaaggtgtgttttgactggagggaccaagcaaggctttgcaggggagagagcctgatactgaagtgactgtgctttcgatagtgggaaggaggcctggaggcaggagagaacggacctgttcagggaagggtgagaaatgccccctcctccctgagcccatgacccggtgagagctctagctgaccatcaaggtgctgccatgctgatggcagtggaagaacaggctcctacaagcctactttacttctgccttgaggtactgtcccttttttttttttttttttccacactctgttgcccaggctggagtgcagtgacggaatctcggctcactgcaagctccgcctcccgggttcacgtcattctcctgcctcagcctcctgagtagctgcgactacaggcgcccgccaccatgcccagctaatttttttcatatttttagtagagacggggtttcaccatgttagccaggatggtcttgatctcctgacctcgcgatccgcctgcgtcggcctcctaaagtgctaggattacaggcgtgagccaccgcgcctggccggtactgtcccttttttatttaaatcatgtatttctagatttttctctggccccaagtgcaccaccagtgttgtctcagtttcactgttataaatcatttacatcagggatgttgaatccagaaaataaaatggcaaacaaaaatgacttatatgttttaaaaactatgaaaaaggaaatgatatatgtttgggattccattcaaaacgatcctgcagagttagggggtgagatgtgggtggggcctacataaaacaaggctagccatcaccagctagtggctatatgtctgggtgatagatgcatgggggttaatattattgatctctctgcttttacctgtacattagattgttttaatcagaaaatgaaaaaataaaactggggaaaaaaagaatagtagataaagaagcaaagagcttgggcaaaacatgtgaatttccccaaataattggagaaggaggatgaggtcagtgtattgctgtgaattctataaatgacccatctcgtgctttccaggcaatacccttcttgtctgtataccctctcgtcttgtttcttgcatggtgtgtgcagcagtacttgacattttgcagataccttttgcttgtttataattctcaggaccgctctttaaggtagctcatgactgcagtattcatcttatgtggaagggtcatttgtacaggggaaaccacagaggaaactgagccccagagaggcaaaggcctttgccaaggtcagataggggccccatgaccgaggtgtgcaggacaacccttgctgcccgtggctgctgtccatagtgctgccctcgtgggcctggcttgcttcccaagatctctcctgtctacctcccaggtgacactgccttcaccacttcttgggaatctaccataagcccatgaatcaagaaagacacatggtttagacttgaggagttatttttcccttatttagtaggtttgtaaatttcaaaatattagtctcttaaaattatattactttttttttttttttttttttgagacagagtctctgtcacccaggctggagttcagtgatgcaatctcggctcattgcaacctctgcgtcctaggttcaagtgattctcgtgcctcagcctcctgagtagcagggattacaggcacacgccaccatgcctggcgaatttttttgtatttttagtaaagacggggtttcaccgtgttggccaggctggtcttgaactcctgacctcaagtgatctgcctgccttggcctcctaaattgctgggattacaggcatgaaccactgcacccagcctatactactatttttttcatctcattccccaatatcagtgtttgatgatggatgcggcctcatcggttaggaagcttggtggaatactgcacccaccaaatgatgagcctgggtgtctatgggtgcccgctctctcaagggcacacagaaataggcaatatgtgcttttcttgatggctctaggaagtcaagaatattcatgtaaaataatcctggggcctagatcttttgggggaatgcgttaactccttcagtataacacaatgtcctaaaactaattaccagtgctataatggcatattcaaaagtttttaaatctcccaatatatattttaactaatgcaaccaaatccaaatttaactcattccactgaaaggcattgtttttctccgaagaaggtaggactgaatcatccctaaagttccttccagctctgccagtctgtagtctgacagtcttgattctgtaaccctcccaagaaaacacaagagttttaagcacctttgtttctttgaggatacccctgtgtgtactccactcttctgatgtctttctggactcctcgatccttgtaaaattgattctgtttattggaggtgaaattcattgggtgattcctgtgtacaacgtaaaagttctgtcattaactgaatagccataaaaagcctttaaatctccgtaaagcagctgttagatgagaaaacttagttccttaaagcttttcaaatgagcacagcacaaaaagaaatgaaggtgctgctgaatgtcaaactgatgagtactatagctggagggtatagatggaaatagtactcatgaatgtggatcacaaaatgaagctaaattcttactattcagatatgatttgttcaggtgccctagaatttatgcatttggacaccttctgtgtataaggcactgttctgcattcttgatggggtggggacagcctcagagaggtataagacacagtctttatcatgaaagagctgagcacagttaactataaaagcgaagcacatgacatgtatcttagaagggctcctgttaagtaccacaggaggtcagagtagggatgtcagggcaagctacatggagggctggcttttagctgggcttggatgaatgcttagaatgtggacaagtggagattagagaaaaacaggtcattccagatggagaaaacttaccaggagcaaagcaagataaggctcggtgtattttttctatttcaggtagaaatgtaaatctacaagttgagatctattgaggtcatttaaaaatctatcatttttcaggctgggtactgtggctcacgcctgtaatcccagtactttggaaggccaaggctggcagatcacctgaggtcaggatttcgagaccagcctggccaacatggtgaaaccccatctctatcaaaaaatacaaaaattcgtcgggcatggtggtgcacacctgtagtcccagctaccgaggaggctgaggtgggagaatcgcttgaacctggaaggtggaggttgtaatgagccaagattatgccactgcactccagcctgggcaacagagtgatactctgtctcaaaaaaaaaaaaaaatgtgtgtgtatatatatatgtgtgtatatatatacacacacatatatgtatatatatatgcgtatgtatatatacacacacacgtgtatgtgcgtgtgtacacacatgtgtatgtgcgtgtgtacacatatatgtgtatgtgcgtgtgtacacacatatatgtgtgtatacacatatatgtgtatgtgcgtgtgtacacacatatgtgtatgtgtgtgtgtatatacacatatgtgtgtgtgtatgtatatatgtgtgtatatatgtatatatgtgtgtatatatgtatatatgtatatgtgtatatatatgtgtatatatatatatgaaatttttcataaattcttttcattatctattatcactgaaattccatcataccattaagatacatgcagaattgttctcactcataggtgggaattgaacaatgagaacacatggacacaggaaggggaacatcacacaccgggtcctgttatggggtcgggggaggggggagggatagcattaggagatatacctaatgtaaatgacgagttaatgggtgcagcacaccaacatggcacatgtatacatatgtaacaaacctgcacattgtgcacatgtaccctaaaacttaaagtataattaaaaaaaaaagatacatgcaaatttatgtctgttaggtatttaccatatggaaaaactaaaataatcaagaaaggaaattcagtaggtggttgacagtttaaatacaaatcacaaatgacatctttttaaatataacaagtagcttatttttaaaggtgtcacttactttgcaaaggataaggagaactgttattaagaatttaccaggttggaatggctagtgtttatgggagagagtttagcacaagacggagtgagacaagattgctggggtcttattttgaatccagcagccaacgctgtatggaatagtgaaaaagttgcctctttctgtgcttgttttctacttggtatctttaagaatgggctatttaggagcaaggagcctagcagaaagcatctgtcaatcttctaaaactttacctacaaaagttttactggcttgtgtcccaccagtgtgtttcaaagccagaaagtatattggccacaagcacctgtaggtggctgaggtgtgactgtagtcatccgtgagtcatgttttcagtatgtattgaaattccttatttggacttgatttcaaaggtagaagggccttttacaggtgaaggaactgagattgagacacatcaagagtctagcctcgagcttctgttcagtgtttttcccaaaattattgtttccttctggtctgggactctagagcaaagattgaaaactgtggcccaaagtgtgagccaaatccagccaccatgcgttttttttaaatcaagttttcctggaaaacagccaaacccatttatttggtattgcctatgtctgcttccatgctgcagtggcagagttgagtagttacaacagagattgcatggccagcaacacctaaaacatttattagttggccctttacagaaaacgtttgatgctctctgccttgcaacattgtgtacgtggtggtcagtgtgcttggaatcataggtgcaatgtaggatgcagacttagaaaacagtgcccttgctcccaaggaattatttgcactttagatgacaaggcatgtttgagacatgtgaaaggaacaataacaagttatgtaagagaggagacaggttctggactgcaggctatattttcagaccaaccagaatagttacgataatatcattaacataaataaaatactaagtatttagctacgtaaaagaaacgatttatttgcactttggattatacagttcttcattcattgattcaaaaattattgccagtctgctcatgtgccaggcattgttctagatgatagggcactgcatctctaaatgccaaatttcgtatccttgctggtggaaggcaatgtcctcttgctttatgccatgacacaaactaagctcctgctttaactatagacagctaaatcttaaacgaacacttttcagtcagtttagttttctcttaaagtactttaattccgttaaaacctgagccaccagatttcctgtctgcctgtctcttccttggccttaatccaaaactctgctgaggaagaagattcgttggtacactgacaattgttttataatccattcatttcataacccctcatttgctacccaaaagtggggacctaaatctgtacagatttacgtgttcaaaggccatggcctacccaaatagagaatatctcctttcttgtgtttctctcacaacttttgctgaagtctctccatctttgtgaacatgaacttctcgatttgtgaggctatcgctggtcaattgggtcattaatcctacagcaggcaagacacagaatttcctctcagctcaagatctcttcactcccaaccctcttagaacacacttcgcagcaatccttggaatctttaaaggtagccttttgtgactttaaaaaatacttttactatctctcaaggttacatccttaacagaaacaaaaagattctaatcagcgagacatcaagtctcttgcattgcttatttgtcacccaactaaaacaatgtactttcttgatttggttttattgactggatgaattatatatatacaaagattcaattcgggaagcctctgaagtaagatgaagaaaaaagtatgaaactccagagaaagcagtttgaggcttgtcctcaggggcttcaaggactgggagaagtcactgtattctggcatcttgcttctgtctccacttcctcccacagtgtttaatgctgctgtgaatttgtttcaaaggaagcctatagacttttttttttttttttaattttgtacatgagcctcaggagcagccttgacagctaaaagacctcgtaaaggagaagtgtgaagggattgcatgaaagtgctgggggcaagtctcagccctcggcctttgttggaaggtgtggggtgtgcaaacacatgtgcaccttcgcacacatgcatctgtgcataaatatctgtgtttgcaggaaagaaaagatagggttgtgggatgtccccagaagccacagggattccagtgttttagtaccaggtgaaagagccgcttcctcccacactatctcagggagatgcccttctgtagacctctgtagcccagtaccctcaagagctcctggagacagatggccccgaacagtcctagggaagcagtgtgggcctgtggcaaaagcttggactgcgaagtcagcatgattggaatccggttcttgactcccaagcaggtgcataatgtccctgagcccttctttccttatctgtaatattgagaatagtaatacccatttctgggcccttttgactgttaatgagacaacatgtgaatgcatggcacaagaaagttaattgctacgtgtcactgtccccccctgcctcactgctgagctgccatcctgcccatctgagagggactgtgtgggagctgtgggtacagccagcacaactgcctgcagagccacgcagggcactgacagggaaggcctgtgtggggtgcccttcaaggccacctccgttttcttatttccttggagatttacttttgtgctcctgcttcccctccctgaagctttgcctgctgtccatatttggaggggatgaataagatgagcactggggaggggaggagccatcactccagcaggaatattcccagcggctgagtcactgcatttgattttcagtgtgaacaactgagaaatcaaagagccctaaaagaggaggaagtttcaggacaatgtttttaaaagataaaaaaacatcaacagcatggtgtctgagtggaaaataatagaaggggcttgaggagactggaaattccagtttgtgtaagggcgcacagtgctgtaatacagagtcctacctccctgcagtccctggatgtgaattcccaggctgcacccacacctgagcaaagcggaggctgggccttattaggttctgactgcgggctggatctcagctgcaggctgtgagtttcggataccggtgtttcccagccttctccacaccttatgtaatcacaggtgaaaaggtccagcctcatttgcagctgtggttcttctgccccaggaagccaggaagcgtagatttttgtattatttgcctccacttctccctcccccagcgtgccaccgtgcacatatgttttctgttttcctaagccacggcaaagcacaagcaattgcccattgtaaacacacctctgcgtatcaacacacacctggctgcactggattgaccaactttctgcttctaggtaatggctgatctagaatagaggaggaggagggaaaaaaaaaaaaaaacaagcagcagatggccccctgaatgttgtaaaccgtgtttctctaagcagggtttctcaacactctcgatatttgggccaaataataatttgtggggttgcttactatattgtaagacattcagcagcatccctggcctctacccactagatgctaggagcaccctgcaccccagtgtgacaaccagaaatgcctccagatattgccacatgcccccagttcagaaccatatttgtaaagcttagtagcaactttttttttcatatgctactttgcgtgttttgttgctgaactggaaataaacgttaatttttaggtaataaatttcaaaaaatgtaacagggacactcagcctctcttctggtaattatgcccatgacactgtcatttgcaggccttctttaaaattccacttgggcagttaaaagaacataaaatgactttcttagaagctttcctgaaatttaaattaaccacaatcattaaacattccctatgtcaataatttgactttcctactcaaagttttttaaggcatcagttttgtctagcgtggtttttttctttagaaaccatgttggttatgtgtgaattgcccatctttttacaatctctgctcaataagtttatacaatgagtctctggtaagagacagacgtgggagtgaaaatatttctccttaaccacaggaagggattttttacaatgcctttagctgcggataccgagggtacctcacccagcaggaaggagagggaactatacttgggctaaacactttcataaactacttctcatggaaaagaaaatccaaatagtggaaatttctttaaaatatccatgtgccttgagatagaagaaagccctttcgtttaagaaaaatgcacttaaaattaatgaataccttgtgatccaaaaacattttatacatatacgttcaggtgttttgaagtggagtgaacttctatttatagagtgtgttgcgctttattatatagtattatgcatttacattgatgatcaaagaacattgtatctgtgcaggcatgggttccgaaaaggctgaaaaattccaggtgagccgtggcaacaacctctaaaggatctaggaacctaaagaggatctgccttttatttaatagaaatcttagaaacaaaaataactgacatggcttgaatgtcaattgtttaaaaaaaaaaaaaaaaaaaaaggaaaaaaaatctattgtgtggtcaggcagttatttttatcatctaggcataatttttaccaaagaaacaaaacaatcaataatgttataaaagccacttatactctgagcttgaaacaactgctttatgccacaaaattcctattgctgtctccgttagtgactaattcaatatgtcctgaatgtcaacgtatttttattactcagctaaagttggctttgctggattaaatgtcatttaaaatgatcaattggcagcttgtttggggttgttttcacatttatgaaaggaaaagtttgccggatacaaatgttcttgaagctgatagggaaacggtgttctctggtaagccctgcccttccttttgccatctgataagtagataacattctaggtcctagtttgatgcctccgaaaaaccaacatggcagcccagtgcaggttaagcccttacattggagaaatggtctggttcacgtttcactgttttatgagaagtagaatgtaccattacagtaaaagagaagcaacagaaacatgcagtgaaaacgcccatgcttgtggttagagaactgtccgctttctttttgctctacagtaggcttctgagtggagtgccttccgcctagagtcaagagggctgccatgatgtcacccaccttcatatgggcaaaatgtctttatatgaaactgtaaaagacaaccaggtcgtttcttaattgctgaaatttattaaaatgaacacactagaaaatcacattcccaatccagaggaatccaatggcgtcgtcagcctatttgcaatggaaatgattgtaaacctatagggagacataggaggggctgcacacaaactactttcgttcgtcctgatttactggcttcttttccccctagagatacagtctcactctgtcactctatcgcccaggctgagtgcagtgggttgatcatggctcactgcagccccaaacccctgggctcaagcaattctcccacctcagcctcccaactagctgggattacaggcatgcaccaccacgcctggataatttttaaattttttgtagagatgaggtctcgttatgttgcctgggctggtcttgaactcccggactttcaagcaagtctactgcccctgcctcccaaaacaaacattgggattataattataagccaccacacccaaccctaatttacaggcactgtatgtgataatatgtgattttgtcagatgttttccagttggaagagattatggaaaattaaaatgtgtctgccatttgatagtaggacaaatactgaaatattaagccacagctgagttctggccttagtccttttggggctgctctgacaaactgccgtagactgggtagttggtacgcaatagatacggattgctccacagttctgggggctggggagatcaaggccctggcagatgaggcatctggtgagggcccactttctggttcatagacagcaccttcttgctgtgtcttcacttggtggaagggtgaggggtctctctcaggcctcttttaaaagggcactaatcccactcacaggggtggggcccccaagacctaatcacctcccaaaggtaccttggtagttagttaggatttcaacagatgaatttggggaggacatgaagattcagaccacagca

SEQ ID NO: 31999 - DNA, 6661 bp, Homo Sapiens
gcagcgggcggcagctgcggcgcaaccggctccggagctgcctggcgcggccgggcgggcggcgccgctcaggctcgggctccggctgggcccggcgcggcctcggggctgcccatcgcgcgcggcgggccgggccggtgacgccggacgcccatggacgcctctgaggagccgctgccgccggtgatctacaccatggagaacaagcccatcgtcacctgtgctggagatcagaatttatttacctctgtttatccaacgctctctcagcagcttccaagagaaccaatggaatggagaaggtcctatggccgggctccgaagatgattcacctagagtctaactttgttcaattcaaagaggagctgctgcccaaagaaggaaacaaagctctgctcacgtttcccttcctccatatttactggacagagtgctgtgataccgaagtgtataaagctacagtaaaagatgacctcaccaagtggcagaatgttctgaaggctcatagctctgtggactggttaatagtgatagttgaaaatgatgccaagaaaaaaaacaaaaccaacatccttccccgaacctctattgtggacaaaataagaaatgatttttgtaataaacagagtgacaggtgtgttgtgctctccgaccccttgaaggactcttctcgaactcaggaatcctggaatgccttcctgaccaaactcaggacattgcttcttatgtcttttaccaaaaacctaggcaagtttgaggatgacatgagaaccttgagggagaagaggactgagccaggctggagcttttgtgaatatttcatggttcaggaggagcttgcctttgttttcgagatgctgcagcagttcgaggacgccctggtgcagtacgacgaactggacgccctcttctctcagtatgtggtcaacttcggggccggggatggtgccaactggctgacttttttctgccagccagtgaagagctggaacggattgatcctccgaaaacccatagatatggagaagcgggaatcgatccagaggcgagaagccaccctgttagatctgcgcagttacctgttctctcgccagtgcaccttgctgctcttcctgcagaggccgtgggaggtggcccagcgcgccctagagctgctgcacaactgcgtgcaggaactgaagctcttagaagtctctgtcccacctggtgctctggactgctgggtgtttctgagctgtctggaggtgttgcagaggatagaaggctgctgtgaccgggcacagatcgactcaaacattgcccacactgtggggctatggagctatgccacagaaaagttaaagtccttgggctatctatgtggacttgtgtcagagaaaggacctaactcagaagatctcaacaggacagttgaccttttggcaggtttgggagctgagcgaccagaaacagccaacacagctcagagtccttataagaaactgaaagaagcattatcgtcagtggaagcttttgaaaaacactacttagatttgtcccatgccaccattgaaatgtatacaagcattgggaggattcgatctgctaagtttgttggaaaagatctggcagagttttacatgaggaaaaaggctccacaaaaggcagaaatctatcttcaaggagcactgaaaaactacctggctgagggctgggcactccccatcacacacacaaggaagcagctggccgaatgtcaaaagcaccttggacaaattgaaaactacctgcagaccagcagcctcttagccagtgaccaccacctcactgaagaggagcgcaagcacttctgccaggagatacttgactttgccagccagccgtcagacagcccaggtcataagatagtgctacccatgcattcctttgcacaactgcgagatctccattttgatccctccaatgccgtggtccacgtgggcggcgttttgtgcgttgagataaccatgtacagccagatgcctgtgcctgttcacgtggagcagattgtggtcaatgtccacttcagcattgagaaaaacagctaccggaagactgcggagtggcttaccaagcacaagacgtccaatgggatcattaactttccacccgagaccgcacctttccctgtatcccaaaacagtttgcccgcgctggagttgtatgaaatgtttgagagaagcccatctgataactccttgaacacgactgggattatctgcagaaacgtccacatgctcctgagaaggcaggagagcagctcctctctagagatgccctcaggggtggctctggaggagggtgcccacgtgctgaggtgcagccacgtgaccctggaaccaggggccaaccagataacattcaggactcaggccaaggaacctggaacgtatacactcaggcagctgtgcgcctcggtgggctccgtgtggttcgtcctccctcacatctaccccattgtgcagtacgacgtgtactcacaggagccccagctgcacgtggagccgctggctgatagccttctggcaggcattcctcagagagtcaagttcactgtcactaccggccattatacgataaagaatggagacagcctgcagcttagcaatgccgaagccatgctcatcctgtgccaggcggagagcagggccgtggtctactccaacacgagagaacagtcttctgaggccgcgctccggattcagtcctccgacaaggtcacgagcatcagtctgcctgttgcgcctgcgtaccacgtgatcgaatttgaactggaagttctctctttaccttcagccccagcactcggaggggagagtgacatgctggggatggcagagccccacaggaagcataaggaccaacagagaactggccgctgcatggttaccacagaccacaaagtgtcgattgactgcccgtggtccatctactccacagtcatcgcactgaccttcagcgtacccttcaggaccacacacagcctcctgtcctcaggaacacggaaatatgttcaagtttgtgtccagaatttgtcagaacttgactttcagctgtcagatagttatcttgtagataccggtgatagtaccgacctgcaactagtaccactgaacacgcagtcccagcagcccatctacagcaagcagtcggtgttcttcgtctgggaactcaagtggacagaagagcctcccccttctctgcattgccggttctctgttggattttccccagcttctgaggaacagctgtctatctccttaaagccgtatacttatgaatttaaagtggaaaatttttttacattatacaacgtgaaggctgagatctttcccccttcgggaatggagtattgcagaacaggctccctctgctccctggaggttttgatcacgaggctctcagacctcttggaggtggataaagatgaagcactgactgaatctgatgagcatttttcgacaaagcttatgtatgaagttgtcgacaacagtagcaactgggcagtgtgtgggaaaagctgcggtgtcatctccatgccagtggctgctcgggccactcacagggtccacatggaagtgatgccgctcttcgccgggtatctccccctgcccgacgtcaggctgttcaagtacctcccccatcattctgcacactcctcccaactggacgctgacagctggatagaaaacgacagcctgtcagtagacaagcacggggacgaccagccggacagcagcagcctcaagagcaggggcagcgtgcattcggcctgcagcagcgagcacaaaggcctacccatgccccggctgcaggcactgccggccggccaggtcttcaactccagctcgggcacacaagtcctggtcatccccagccaagatgaccacgtcctggaagtcagtgtaacatgacaacgccagggtgaacacacgccacttcccagctaggagtgcactttatgggactgtgactggactcttccgttctggctccagccagaccttcagtggtcctgcctggccgtggggacatcagagagtgtcatcacgcagctggccagctgagttctgttgttgttttcatgccgcctgtgatctcagattcctgcttttctcaccccgtccccatgctggtgtccgacgccgcttactcagagccctggcctccctccccctacctcacacgctgctcatgaaagtttccacccacgctgtctccacggaacagcctccgtctgctggctcttcgtggaaggccatttgtctttcaggtagacactcagcagccctcacggtcttagtgacgtgtgtgcctttctggtcacacagctgcccagtttcctgatcggggtggatttgtgtcccctaaggggtaaaacagccgtttaccgcagatcctctcattgtgcttttctagaataacacccttctaggggaggcgggtgggggagggagggatcataaccccttctgtgccttgggatgccggagctgggggacctggaggcccatcagccggagccacgtgaaaggtactgaagaaagctgagacccggctgtgaggagcgcctcagcggtgaggtggtttagggataaatgtttctggaaccctgtggtcccccataatgttgatagaatatcatatgcactgggagttaaatatatttaatttaatgatcattatatatgtgggggttaatatgttgtttttctgtccctttaaagtctttacatgtaattgtagctgtataatcgttatttttcttttgcatcttaagtcttagaaattaagatattccatcgtgaggatgagagaggtcctcagtgtgtttttggtctggttgtagggaaggactcaagtcctggaatgtcctccactggtctactgagttgcagtcacactgttccaatggattatttgctttcggttgtaaatttaattgtacatatggttgatttattatttttaaaaatacagactaactgatgtaatgtttatgtataagttgcaccaaaaatcaaggacaaaaataagtgtgtttgtttttacaggtgtgaaagtcacagcttgtaaataagtgttgtatgtattaaaccttttccagttctccaaagcgatgtatttttgtacacttgaaatagagtactcttaatttactgggcaaatgtgcttggaattgaacttgacaagattagctcaagcagatagagtcgggtccagcagtgggtggccctcgtgtgaatccccgtggatgtgcaagttgtggagagaaggagcaccgggttcctgcccagcactgtgcttgcgggaggcggtggggcatgggaggaaggaggcacagaccggggaaatatgacagccgtcatttccagtattctctgtgttgtcttttagctcattcaataaataaaggtggtgtgatttttttttcctcctgtctttttcatttgtagaaactggagacgtgtaaagaagataaataattgtgtaattaaactttccagaaatttatcttcctcatgtgcagtttaacaaacttggtcaaactagttagcaaattagaacttcagaatctaatgatagtttagggtttctaaaataaggttttttattgtaaaaattgacgattgccctgcatttctaccaagtcctgtgaataaagagatgggagatttgattccgtcagaagagactgtaatccgtgtcgtcagcctgggagccttccccagtgtaatgtagctttctctcttaccttctggaagagggaatgtttcatttattactgtttgattttcttgtatctggttctactcccaggatgaaattatccaactacatatatatttagaggaagaaagtgaaggggaaatttaaaatgtttacggcgcttaattgcctggaaatgaaatgaaatcaaatttatcagtttttttccccctaattacccaaaagatcttttggcaaactatgttacatgaatgcttctgcctctttaagacaaagaagaatgtcacccaaaattgtcatttttttcttaatgttcatcataaaagtcctaaaagagtaactgtaattggatgtttattgtttttatctaaagtaaggtgtatgtgtttgagacaagcaggttttgttgataaagagatgttaaataattgtgaagccagatatgcaatgtgtatctaaaaagcaaggaatttgcagccgttttacaaatatctgtggaacatgtaaatactgtcaaatggaaaataaaataagttataattttttgtgaatttcatgggatgtcctatgattgggaaaaattataactcttctgattctaatgtggaaattgttgtatttaatctgaaaatgactttacctacaacagttccattgtcagcacagcctaggagggtcagattcctgtattaattactcttagtggagatgccagatatcccatacagaattagcagagaaaatacacacaggcttctattcaaattttctttagtgcttaaaattaagttttaaaatgaaatcagacactgcaggtttgtatataaaatgaaaagctatactactttttataaaagggcaaactgggctgatgtaaatgttttactttcaactgtgttctttaaaataaat

SEQ ID NO: 32000 - DNA, 4374 bp, Homo Sapiens
gggcacgagccctgccatgtctcgccggaagcctgcgtcgggcggcctcgctgcctccagctcagcccctgcgaggcaagcggttttgagccgattcttccagtctacgggaagcctgaaatccacctcctcctccacaggtgcagccgaccaggtggaccctggcgctgcagcggccgcagcgcccccagcgcccgccttcccgccccagctgccgccgcacgtagctacagaaattgacagaagaaagaagagaccattggaaaatgatgggcctgttaaaaagaaagtaaagaaagtccaacaaaaggaaggaggaagtgatctgggaatgtctggcaactctgagccaaagaaatgtctgaggaccaggaatgtttcaaagtctctggaaaaattgaaagaattctgctgcgattctgcccttcctcaaagtagagtccagacagaatctctgcaggagagatttgcagttctgccaaaatgtactgattttgatgatatcagtcttctacacgcaaagaatgcagtttcttctgaagattcgaaacgtcaaattaatcaaaaggacacaacactttttgatctcagtcagtttggatcatcaaatacaagtcatgaaaatttacagaaaactgcttccaaatcagctaacaaacggtccaaaagcatctatacgccgctagaattacaatacatagaaatgaagcagcagcacaaagatgcagttttgtgtgtggaatgtggatataagtatagattctttggggaagatgcagagattgcagcccgagagctcaatatttattgccatttagatcacaactttatgacagcaagtatacctactcacagactgtttgttcatgtacgccgcctggtggcaaaaggatataaggtgggagttgtgaagcaaactgaaactgcagcattaaaggccattggagacaacagaagttcactcttttcccggaaattgactgccctttatacaaaatctacacttattggagaagatgtgaatcccctaatcaagctggatgatgctgtaaatgttgatgagataatgactgatacttctaccagctatcttctgtgcatctctgaaaataaggaaaatgttagggacaaaaaaaagggcaacatttttattggcattgtgggagtgcagcctgccacaggcgaggttgtgtttgatagtttccaggactctgcttctcgttcagagctagaaacccggatgtcaagcctgcagccagtagagctgctgcttccttcggccttgtccgagcaaacagaggcgctcatccacagagccacatctgttagtgtgcaggatgacagaattcgagtcgaaaggatggataacatttattttgaatacagccatgctttccaggcagttacagagttttatgcaaaagatacagttgacatcaaaggttctcaaattatttctggcattgttaacttagagaagcctgtgatttgctctttggctgccatcataaaatacctcaaagaattcaacttggaaaagatgctctccaaacctgagaattttaaacagctatcaagtaaaatggaatttatgacaattaatggaacaacattaaggaatctggaaatcctacagaatcagactgatatgaaaaccaaaggaagtttgctgtgggttttagaccacactaaaacttcatttgggagacggaagttaaagaagtgggtgacccagccactccttaaattaagggaaataaatgcccggcttgatgctgtatcggaagttctccattcagaatctagtgtgtttggtcagatagaaaatcatctacgtaaattgcccgacatagagaggggactctgtagcatttatcacaaaaaatgttctacccaagagttcttcttgattgtcaaaactttatatcacctaaagtcagaatttcaagcaataatacctgctgttaattcccacattcagtcagacttgctccggaccgttattttagaaattcctgaactcctcagtccagtggagcattacttaaagatactcaatgaacaagctgccaaagttggggataaaactgaattatttaaagacctttctgacttccctttaataaaaaagaggaaggatgaaattcaaggtgttattgacgagatccgaatgcatttgcaagaaatacgaaaaatactaaaaaatccttctgcacaatatgtgacagtatcaggacaggagtttatgatagaaataaagaactctgctgtatcttgtataccaactgattgggtaaaggttggaagcacaaaagctgtgagccgctttcactctccttttattgtagaaaattacagacatctgaatcagctccgggagcagctagtccttgactgcagtgctgaatggcttgattttctagagaaattcagtgaacattatcactccttgtgtaaagcagtgcatcacctagcaactgttgactgcattttctccctggccaaggtcgctaagcaaggagattactgcagaccaactgtacaagaagaaagaaaaattgtaataaaaaatggaaggcaccctgtgattgatgtgttgctgggagaacaggatcaatatgtcccaaataatacagatttatcagaggactcagagagagtaatgataattaccggaccaaacatgggtggaaagagctcctacataaaacaagttgcattgattaccatcatggctcagattggctcctatgttcctgcagaagaagcgacaattgggattgtggatggcattttcacaaggatgggtgctgcagacaatatatataaaggacggagtacatttatggaagaactgactgacacagcagaaataatcagaaaagcaacatcacagtccttggttatcttggatgaactaggaagagggacgagcactcatgatggaattgccattgcctatgctacacttgagtatttcatcagagatgtgaaatccttaaccctgtttgtcacccattatccgccagtttgtgaactagaaaaaaattactcacaccaggtggggaattaccacatgggattcttggtcagtgaggatgaaagcaaactggatccaggcgcagcagaacaagtccctgattttgtcaccttcctttaccaaataactagaggaattgcagcaaggagttatggattaaatgtggctaaactagcagatgttcctggagaaattttgaagaaagcagctcacaagtcaaaagagctggaaggattaataaatacgaaaagaaagagactcaagtattttgcaaagttatggacgatgcataatgcacaagacctgcagaagtggacagaggagttcaacatggaagaaacacagacttctcttcttcattaaaatgaagactacatttgtgaacaaaaaatggagaattaaaaataccaactgtacaaaataactctccagtaacagcctatctttgtgtgacatgtgagcataaaattatgaccatggtatattcctattggaaacagagaggtttttctgaagacagtctttttcaagtttctgtcttcctaacttttctacgtataaacactcttgaatagacttccactttgtaattagaaaattttatggacagtaagtccagtaaagccttaagtggcagaatataattcccaagcttttggagggtgatataaaaatttacttgatatttttatttgtttcagttcagataattggcaactgggtgaatctggcaggaatctatccattgaactaaaataattttattatgcaaccagtttatccaccaagaacataagaattttttataagtagaaagaattggccaggcatggtggctcatgcctgtaatcccagcactttgggaggccaaggtaggcagatcacctgaggtcaggagttcaagaccagcctggccaacatggcaaaaccccatctttactaaaaatataaagtacatctctactaaaaatacgaaaaaattagctgggcatggtggcgcacacctgtagtcccagctactccggaggctgaggcaggagaatctcttgaacctgggaggcggaggttgcaatgagccgagatcacgtcactgcactccagcttgggcaacagagcaagactccatctcaaaaaagaaaaaagaaaagaaatagaattatcaagcttttaaaaactagagcacagaaggaataaggtcatgaaatttaaaaggttaaatattgtcataggattaagcagtttaaagattgttggatgaaattatttgtcattcattcaagtaataaatatttaatgaatacttgctataaaaaaaaaaaaaaaaaaaaaaaaaa

SEQ ID NO: 32001 - DNA, 65608 bp, Homo Sapiens
  misc_feature (44521)..(44521): n is a, c, g, or t
  misc_feature (57769)..(57769): n is a, c, g, or t
  misc_feature (57800)..(57800): n is a, c, g, or t
ccgcccccagccccagccccgccgggccccgccccccgtcgagtgcatgaggttgacgctactttgttgcacctggagggaagaacgtatgggagaggaaggtgcgcgggccgcggggtgtggggcgagggcctggagggggtgcccgggcagcgtggggcacgggagggggccgggtctgccaggaggccgcgccctgcctcctccgggatgagctcgtccttacgaagcccgcaggcccctccctgtccccctcccgcccgggatccccctccccggcccccggcgagctgccctcctgcgggtctgggggcccctggaccctttttcctcctcccacgtccccccgcgaaggactcccagacactgcccaccccgcgtcggcctccatccgcgtgctctgtccaccacccgggcctcgctggggccaccctttatccagtctcggaagaaagagcggctggggacacagccccgggtcccagtggccgcctgcccggctctgtgaccttgagccaggcgctgacttcctggtcctcagtttccccttctgtacatttggaaactgggtagttgcccccccggtgtcggtgattgggggccagatgggtagagcggagataggcgtccaggaagccggaggccgtgtactgcgggagcctcatccactctccctgtccgtgccccaaacccggtgcctgccctcagtcttggctgggagcatgactcatcctaacctcctctttagccccttctccctcactggggcccaaggcgcagtactgcactgcagttagggttcaaggactcccccagcctaggacagggtctgggggcccctccttggatctccttcgctgacctgtcacttagatccacctggccccaaggcagggcctgactccacacctccccctgccaccaactcttcccaggcccatgaaaacctgattggggtaggggcccaccttcctgtagcccctgcctacctaaggtacctgcgtcttcacagagggtcaggctgttgtggccttgggacctagctatgtgactgggcaagccatgccatctctggggctcagtctccccttctgtacagtggagaggggcaggtctggggcattttccagggcccaccagctccaagggtgccaggccccaaggatgactaagcatcgtgtggctggctagaggaggtgccaggcctccctgggacaggtgtctgggagtacccacgtctgcagccccttccccttgccaagccagggcattcattgccaaggatctgttagggccggcacctccaggcttcctgcccttgacctcccagctggcttcagcccaggatgcactaatccagccctgtccagtccctgcctttgaagggccctcttagtacttcttcctgggcaggagagggaagaaaggaggctgtgataggaatgtcacccactgccttatccctaaagccactgcttcctttctcctcatttaccttgccagatccaatgctatagcgggaggatggacctgatcctcctcctaagctgatacatagggaaacagggccagagaagcttggcaacctagtcagtatctcagcaagactcaggccagcgccctttcttctcctatttggcacagcgactgccctgcctgggcgctgcacatgtgcagtgtgcgaggattggtgcaggtgtaggtatatgtggggtgggcagggcaagctgggcctgcaccagatcacacttcctgagaatgcttcccaactcccttcccaccctgcaggaagcgagttgcccgtgtgtgcaagctgcggccagaggatctatgatggccagtacctccaggccctgaacgcggactggcacgcagactgcttcaggtagggtggggtgcccagggcctgtgttgccctaaacaaggcctgccagagaggacaggctggtcaaggaatgggggaggccgggatatgcctcctggtgccgtcccctattgtgacttcgtggccttaatttaccatttatgacatgaggtgttttgactagaaaatccctacaggccttcctgttgtcattttatttatctatttttttttctttttgagacggagtctcgctctgtcacccaggctggagtacagtggtgcgatcttggctcattgcaacctcttcctcctgggctcacgcagttctcctgtgtcagcctctggagtagctgggattacaggcgtgcaccaccacgcccagctaatttttgtatttttagtagagacgggttttgccatgttagccaggctggtctgaaacttctgacctcaagtgatcttcccacctcagcctcccaaagtgctgggatgacagacataaaccaccgctcctggcctcattttattttcttttatgtatttttcttttttcgaaatggtcttgctctgttgcccaggctggagtgcagtggtgccatctcggctcattgcaacctccatctcccgggctaaagtgatcctcctacttcagcctcccgagtagctgggattataggtatacaccacaatgctcagctaattttttaaattttgtgtaaagacagggtctcactattgagacccaggctggtcttgaacttgtgacctcaagcaatcctcctgccttggcctccgaaagtgctaggcttacaggcgtgagctaacgccttggcctctgttgtcatcctagatctctgagatctaaatcttagagaggatgggagagacctccaattgagccagtgcctgcaattcagccccctgctggcacccagacagggggaagagttggaaggaatgtccctcctgccttctgggtgttcatgctcttgcagggagggaagacaaaccaggccttaagggaaaccaggccaccctcagtgtcttcccaggctgcttgcgaacatgcataacccagtcacaccagccccagtgtccagacacacacccacaggtaggaagaaagtagggtcagggttgtggcggaggataaagagtacatgaggacctgaaggtcacccagtaggaccatcctgagaagccaggagcaggggtctacctgccttgagccagagcagggccagagcaggggtctcaaaggatgtgagatttcctgggtagaaaagtagagtggaggtggggcgtggtggctcacacctataatcccatcactttttggggctgaggtgggcagatcacttgagttcaggagttcgagacaagcctgggcaatatggcaacaccctgtctccactgaaaatacaaaaaattagccgggcgtggtgcgcatgcctgtagtcccagctactcaagaggctgaggtggcagggttacttgagcctgggaggtggaggctgcagtgagctatgatcgcaccactgcactctagcctgggcaatagagcgagacccagtctcaatttttaaaaaagaaagaaagaaaaacaaatggtgtgggagagaattacaggcatagtcaccaaacagcaaggttcaggggagaaaactccataaaagggtagaaggtgaagcttctgggatgcccagcaggggtcaagacatccaccactaggactttattttaggcttctgccttggtttattttttggtttttggtttttttgagacagtcttgttgtgtcgcccaggctggggagcagtggcgcgatccctcctcactgcaacctccgcctcccaggttcaagcgattctcctgcttcagcctcccaagtagctgggattacaggtgtgcaccaccacgcccggctaagttttgtattttcagtagagatagggttttgccatgttggccaggctggtctcgaactcctgacctcaagtgatctgcccgcctcagcctcccaaaatgctggaattacaggcatgagccactgcacctggcctcggtttgtttttttgtttcttcttttctttttttttacacagggtcttgctgtgtcacccaggctggcgtgcagtggtgagatcatagcccactgtagcctccagctccaactggttcaagcgatccttctgactcagcctcccaaagtgctgggattacaagcataagccaccatgcccagcctgttttttcttttttaggaataacgtctaacgttttctaacattcagtaagggacaacccctgttctaagtactttgcatagttagatattagtgctgtctttgttttgccagagagaaaattgggacacagagaggttaattctcttgatgaaagtcacacagccagtgagtgaaatgaacacactcagtgtggctgaaaggagacagacagcatgccctgggattctgcatcaggtgctcagaaagaggccttcggggggcaagagggctctcaacaggcagaggaaaccatctgcacagcggtgggatggtgcggactgctgagggaacaggaacagttcccttggaaggaacagaataagctgagggatccaacaagaaacaaagttgagaccgattcgtgaagggccttgaatgccaagataaggagtttcagaagtcaggatgggggtggtggctcatccccgtaatcccagcactttgggaggccgaggcaggcagatcacttgaccccaggagcttgagaccagcctggccaacgtggtgaaacccccgtctctactaaatattcaaaaattagccaggcatggtggcacatgactgtaatccaagctactcgggaggctaaggaaggagaatcacttgaacctgggaggcggaggctgcagtgagctgagatcacgtcactgcactccagcctgggagacagagcgagactccatctcaaaaaaaaaaaaaaaaaaaaatagaagggagtcggcagaaagccagggaggggctggggtgacatgctgttgaagaatgccatcccagtgggccggtggtggtatctaggcagggaagggactgtcccagtaactcaagggtctgagctcataggacctgacctgggacagtgactgaggatggagagaatttcaggcagaagggacagtttttggtgagtatttgtcatattggctaccatgcattgagcactcttcatgctaatttgttaaatcttcatcataactctatgagggactgtatgtgcccagtttgcatgggagaaacagagattccatgcaatcaagtgcctcgctgaaggttgtaacatctagagctgggactaaaaccttctcactccacatcgccacagagtaggaaaggcaggggctggcggtggcacatgcctataatcccagccctttgggaggcggaggcaggtggatctcttgagcccaggagtttgagaccagtgtgggcaacatagtgaaaccttgtctctacaaaaaaattagctgagcatggtggtggtgcctgtagtcccagctactcaagggcgctgacatgggagggttgcttgagcctgggaggtggaggttgcagtgagctatgatcacaccactgcaagccagcctgggtgacagagtgaaatcccatctcaaaaaaaagaaagaaaggaagaaagaaaaaggcaggggcttcggggagggcatgggcactggcgaatggcagggtggaacctgaagccatctggttttctaacctgggcactggggagttggtggtttgttgactctgatggaattgggggtcatgttggggaggagacatgctcatctgtgttgagctggaggggacatgggctatccatggtggctgtgtcctgcccagagctagccatgggagcctgagtccagttggaggtaggaaagtcagaaaaaacggccgcctcggagctggccctgagatggtgagtgggatttgtgatagggccaagacgaatgaagggaagaactttggggacccctgtgtctgcggtgaggggggagatggagccttgggtgatggagagagggtcaggagtagagccacagaagccacaggagggaagccgtgttacaggatgggtgtacctggctttggagtggcctgtcccaaatcactcaccaggagaggggtgagtccccgggtcagggcagtaaagaggaggcatgtttgtgctgtccctggtgtagtgaaactcaagaaggaagccaggtgcagtggctcacgcctgtaatcccagcactttgggaggccaaggcaggcagatcacctgaggtcgggagtttgagaccagtctggccaacatggtgaaaccccatctctactaaaaatacaaaaattagccgggcctgttggtgggcgcctgtaatcccagctactcaggaggctgaggcagaagaatcgcttgaacccgggaggcagtgattgcagtgagtcaagaatcgcgccactgcactctagcctgggtgacagagcaagactccatctcgaaaaaaaaaaagtctcaatatggggaaagatccactagaagtaagagccatggcttctacctcgtggcttgtgggtgtgatactcccaacagtccccaaagctggtggtcctcaccgcgtgacagtgagcagagcagctcagagggggtcactgctcacctgggtgcatggctgaccacagccaggctggctctcagtgggatgcccaaggtgctagactctgcttagtctccctcgggccctgggcttgaggcattgggcccggcccagacctcatttcatgcactgagacctttgttccagggcccctcacccctctgaaggtgttcgggcaggggcaatgtgataaggccatgaggggtctgcagcctccagccccactggggaggtggccagtgatttccaccttcctggcccctctgcatgcccctcccagtggaacttcctagggtccctgagtcagtcacttgcaaataattatggcgtgcccactctgcattaggcccctctcacaacaacccagtaagggggtgctatttatttattaaagcgattttttttttgagtctcgctctgtcgcccaggctggagtgcggtggcgcaatctcggcttactgcaagctctgcctcccgggttcacaccattctcctgcctcagcctcccaagtagctgggactacaggcgcccaccaccacacccggctaatttttttttgtttgtttgtatttttagtacagacgaggtttcgctgtgtgagccaggatggtctcgatctcctgacctcgtgatccgcccacctcagcctcccaaagtgctgggattacaggcgtgagccaccgtgcccggcaatattaaagcgattttaaggccaaggctggtaactcacgcctgtaatcccagcactttgggaggctgaggcaggaggactgcttgaggccaggagtttgagatcaacctaggcaacatagtgagactccatctctacaaaaaaattagccaggcgtggtggtgcgtacctgtagtcccagctactcaggaggctgagatgggaggatcatttgaacccaggatgtcgaagctgcagtgagctgtgatcacgccactgcactctggcctgggcaacagagcgagacactgtctcaaatttttaaaaagcgattttacaaatgaggtgcagagttcagtcacttgccaaaagtctcacagcgcgtgaggagtagaatcaggactcgaaccgaggcagcctggcttcagagcctacagtgtaaccacagcttagtcccacacctcccagaccaacagggtccctgccttctagtgggcaagacactcagtgaacaaatgtagtgtcaggtattgggggacagcactctcaggaagtgatgtttaagggacagaattgaagggagcagtgtttagaggatgtcgggggtagggccggtgcatgtgcaaaggccttggggtgggaatgtgcttggcacaactgaggaccacaaagccagcgtgcgggagtgcagtcagtggccaggggtgcatagagccttgtgggccccgtggaaggtgccgttggctgtacactttttttttttttttttttttttttttttgagacagagtctcgcttttgttgcccaggctggagtgcagtggcgtgatctcagctcactgcaacctccgcctcccgggttcaagcgattctcctgcctcagcttcctggtagctgggactacaggcgcccaccaccacacctggctaatttttgtgtttttaatagagacggggtttcaccatgttagccaggctggcctcaaactcctgacctcaagcgatctgtctacctcagcctcccaaagtgctggggttacaggcatgagccactgcgcacaggcagctgtgcatctttgaatgtcataacctgagcatctgagagctgctcctgtcccctggcccctgctcttgaggaagtcccacgctgataggacagacagggtcataagtgctgtgatgggggcctgcaggctgctggagggctcagccgggaccagatgctgcccctctttgtagagtgggacaattgctgcaggcccatgggacctctggtattagccctgagggttgtcactccggggcctgcccctttctgtgttctgacctcccagccccttgcaggccccgcctcccggaaggttatgaccaggcttggactggtccaggcttccctttggctcacatactgcctctgcgaggtcccctccaggaagcctcctgtgcacaacccccagggctgccgcatccctggtagcatctccttggcagctgggtgggctggccctgggcaaggagggctgagcatgctgctggcctgtggggttggagcagcggcgggatgcaacctccctttcttcaggggacctttttggcgaagacaaactgtccataggaagtcgacctctgttcccttgggggcagcagtggaagaggcagctgcttttgagcttgtccctgtccccagagaagcctgaggccttcagtgccgttgccagggccgaggctgaggagcctacagcgtgtgttcaggactgagggccagggacgggcacaggctccctgcctggggtccaagcctagatcgctcgctccccacccgcaccaaagcccaggcaaagggtgcttcagccacttcctgttgcaggctcagaccaagtcccctggcacccacgcggctgcagctcctcctgtgcgctgcagccacgctggccccaccctctgcagcctccaatcctgagcccctgagggaggatggggaagcagctggtctggccacccctgccctcccttagacctccagagcccccagtgtagccacagaggatgctgttggcttcagccccaagaagacgccgcttcctccagagggctaagtaagtgggaatccccctccctacttgtcctgggctccaggcagggcccctggtgtaaggcctgggctggaagccgacccacctaggtccaggctctggggcagaactgaaactccttggttactgtcggctgcagctgggagcaggccactccaaagctgtgggtccttccaggacagtctccccatgaggccggtcctccacctgctgtttcttcacacctggtggccagggatgtggccctgggtagaacgatgattctccactcctgtcattatggaagccaccgctgtctcccagcccagccagccacctgggctgcagagcacccctttcatgccctccgggtgcctcccccttctcctgccccagcctggctttgtcctaccctgctctcagggaggggtaccctggagtggggccagggcatggctctcccccgagggagttcctctctggctgtccccagggcagctctgcacagcctcagtacctggcgcacctcccttgacatccttcttagggacagtcaggcactctgtgtggggcactcaagagagccaggcccgtcagcctctagctcctgccagaatgcaggcctgaggggtgaggggcggggcaggggcaggggcagggacaggaactccggcttgctctccatccgcaaaggttcactgaggccccgagccccagccactgagccaccaagtcagcctgggccaggcctgggtgccctgtctgcaatggaggcagagacggggtctcggggcagttctgaggatgctgggtgcacagcgggggcctcgccggcaggaatcacttatgctctctcctgggccaagctttgtggatgcccagcctggggccgcggggagctggcaggtcagtggcagacactggtgggcagacctagtgtctggtagaacaggcatcaaggaagtggtgaccggagggaagccaagtgcactcaaaccctcgggtgagtcatcaccgccgggtctttcacagctgctgaaagtgagcaacagtgatgaaggtttgtgagtttctgcgtgagcgagtgaatggaccagtagcagtttccaggttgtggaagagcgttccctccccgggatggggacacttggttacagcaattcctaatcccccacccacccaccgcccactgcagaggtatgcgggggccctgcttcctgcaggcaggagtgaggggcactcctgtgatgtggcacccctgtgaccgaggtcatgtgtgatcggtgtaagggcaggaagcgagtcattggtctgcaccaggcgtgggggcttctgcgagggcaggacccaaagtcggcctggcctcccggctgcagcactcctttccctttcgaattaggttagagccctgggacgggaggtgccctgtagaccacccccctcaccaacttccgtcctccgccccacccccgcggtgatccggtgaactgccggccccctgctgtgcaccgagtggggcagtgaccctgacgtggcgtctcctgccgcccctgccaccgccaccacctccggtggcccagcctccgcattccccacccccatggaggaatgcaccaggcctcccttcctggatgcacccctcacccacatgcttccaaaccctggcattttctgctccccctttactcccaccccttcccctaggctcccagacaaaggggaactggctggatcctcttaaagggacagtgtcccaccagcttactgctgaactcccctcctcaaccccagttccctagttacagttaattagcattagcagacagcccatgagtgatacccatgcaggccccaggctgtggagagtttcctgggtaggaaacagcccttaaggtccctcatctcatccaggtcccagtctttcctacctgcctctctcctagattgtggccctttggagcctggttcttctgtccctgtgtgaccgacacatagcacccaaacagtggcagagcgggacggaccccctagcctgttctctgtgtgggtctgtaccctgacccagacatgcccccccacagcaggacccaggggggcacatgtgtgcctgcgggttcactggggcacccgcatttggtttattttattttttagagagagggtcttgctgtgtcacccagctggagtgcagtggtgtaatcatagcacactgcagccttcaactcctgggctcaagcgatcctccctccccagcctccctagtagctgggagtacaggacccactgtatcctggctaattttttaataattttttaagagatggggtcttactgtgttgcccaggctggcctcaaacctctggcctcaagtgaacctcccaccttcgcctcctgaagtgctgagattacagcatgagccaccatgcccatcccagactgacatttctatatttgttcatcctggctgggcagggctgctggtccccacccaccgggatgcttggctgggaaaaagccgggaatgtaggtctaaccctggcctgtgttgtggcacctacagcctggcattcctccccatctgcccttcaaggccccaccaaccaggcctccttggtagcctctagtgaggaaacaggcgaaccgtggctttgatgaccctgcacacctggggattctcctctatttttctttttcttttttttttttttggagacagagtctcactctgtcgccaggctggagtgcagtggcacaattttggctcactgcaacctctgcctcccaggttcaagcgattcttctgcctcagcctcccgagtagctgggattacaggtgcccaccaccatgcctggctagtttttgtatttttagtggagactgggttttgccatgttggccaggctggtctcagactcctgaccccaagtgatctgcccacctcggcctcccaaagtgctgggattacaggtgtgagccaccgctttgggaggccgaggtgggcggatcacgaggtcaagagctcaagaccatcctggccaagatggtgaaaccccatctctactaaaaatacaaaaaattagctgggcatggtggtgtgtgcctgtagtcccagctactcaggaggctgaggcaggaggatcacttgaacctggaaggcagaggttgcagtgagccgagatcgagccactgcactgcagcctggcgacagagcaagactccgtctcaaaaaacaaacaaaaagaaaacttgttctaattcttacaaaggtgcctgtagccgaggcagcggcccaggtgaggtggaggagggcgggagtggacgtctcagcccggcccctctcctgcaggtgttgtgactgcagtgcctccctgtcgcaccagtactatgagaaggatgggcagctcttctgcaagaaggactactgggcccgctatggcgagtcctgccatgggtgctctgagcaaatcaccaagggactggttatggtgagcgccccctgccttgcacactcacctggggtgggggtatccaagcagaccccatgctccaggtctctctcccatcattgtctctcctggtctcctttttgctggtctttggagctgctttctgagcctgactgtctgtctgtatccctcagcgcccccatctatggagccagctctgtccaggagctcagcagctggccagccgggtccctgcagttgtttttttggtgacacccttggaagaggcctaggggaggatctgtgggggttgttgggtctgctgagctgggctgttccctcctcacccccgcaccaggtggctggggagctgaagtaccaccccgagtgtttcatctgcctcacgtgtgggacctttatcggtgacggggacacctacacgctggtggagcactccaagctgtactggtgagtgccttggcccctccctgagcctaggaggcccacctgtgtcacagatctgcaagggtgctgactctcccacacccgggcctcctgccctttcccatggggtgaggtttgttggggcaaatgttcatatctcctttcccatcccggcatggaaacaagtgagaaataacacacagaagtcagtgtgaaaaagcctcagacggccaggcatgctggctcacgcctgtaaacccagcactttgggattccgaggtgggtggatcccttgaggctaggagttcaagaccagcctggccaacatggtggaaccccatctctattaaaaatacaaaaattaaccaggtgtggtggcgggtgcctgtaatcccagctactcaggaggctgaggcaggagactctcttgaacctgggaggtggaagttgcagtgagccaagattgcaccactgccctccagcctaggcaacagagcaagactctgtctcaaaacagaaaacctcagacgtcagctttcttactggccatgactgcagcatggtgctggcacaaaccaccagaggtggggtggatgccacaagttaaggacaccatccccagcataactgctccctctttagacaccagccacaagttcaggggtccccaacccactcacacttctgaccgactggctacaaattcagggactcccaagaccctgccaagtttgatcgtttgctaacagactcacagaactcaggaaatcctccatttttatcccagttttattatgaaggacacagctcaggtccgaccaaatgaagaagcatctcccctccctcccctagcacatcaatgtgatcaccaaccaggaagcttcactgagcttcagcagccagagtttttattgggatttcattacatcgtcatgactgattgagtcattggccgtatgatcaagcttagtctctagcccccgttcttggaggtcaggctggatgaaagctgcaaccctcttcaaatcacatgatgtatctttgcggggctgagtcatctcattagtatcaactcaggaatagtctgaggggctcatgaataacaaagataccccattccaaggacttagagtctccctcccaggaatcaggacaaaacccagacagattctttcttatacaacactgatcaagctggattagaggacaacgtggcttgatcccagatgggcttttaatgacttcctcctgaactggatttatcctcaggccttgtcctggccgccttacaggatcacagcgagtagacagacccgaatgactcagagggacgagggctggctgggcacgcacagttcctgctcccagttccataggaagagtgaaagaaaagaaagctggccaggtgcagtggctcacccctataatcccagcactttgggaggccaaggcaggcagatcacctgaggtctggagtttgaggccagcctggccaacatggtgaaaccgtctctactaaaaataagaaattagccaggcatggtggtgcttgcccgtaatcccagctactcaggaggctgaggcaggagaatcgcttgaacccaggaggcggaggttacagtgagccaagatcacaccactgcacttttggacaattgctagctttccttttcttttgagacagagtcttgctttgtcacccaggctggggtgcagtgttgtaatcaacagagtgagactccatctcaaaaaaaaaaaaaaaaaggaagggattgggggaagagcctggggctgggggctgcagagatgctgaaattgatgacgcccttgacactcttttcttcccaccccggcggctcttgcagcgggcactgctactaccagactgtggtgacccccgtcatcgagcagatcctgcctgactcccctggctcccacctgccccacaccgtcaccctggtgtccatcccagcctcatctcatggcaagcgtggactttcagtctccattgaccccccgcacggcccaccgggctgtggcaccgagcactcacacaccgtccgcgtccaggggtgagtggccggcctgccgaggctgccgtcggtgtggctatggctgttgatgtgggtggcagagtctggcactgggggccctgaaaatgaatgggcgagtgtttgggtacagatggggcccagttctgacaacctggtttgccagatttctggcccagtcattcctctgaataccattacaaatgccagatacaataaaaagacattttcaaccgggcatggtggcccacacctgtaatctcagcacttcgggaggccgaagtgggtggatcacctgaggtcaggagttcgagaccagcctgggcaatgtggtgaaaccccgtctctactaaaaatacaaacgtagccaggcatggtagtgtgtgcctatagtgccagctgcttgggaggctgaggcaggagaatcacttgaacccaggaggtggaggtttcagtgagccccgactgccattgcactccaggctgggcaacaagagtgtaactctgtatcaaaaaaataaaaataaaaaaaacacactcaaaaaataaaaagacattttctttagtccatgtctgatccaacaagaaagaggaggaaccaagtcaagaatgagtgaagaagctgggcgcagtaactcacacctgtaatctcagcactttgggaggccaaagtgagaggatcacttaaggccagaagtttgagaccagcttgggcaacatagcgagacctgcatgtctacaaaaaaaaaaaaaaaaattaaaaattagccaggcatggtgaaatcactgaacacataaaggctgggcatggttgctcacacttataatcgaaacactttgggaggctgagatgggaggatcacttgaggccaggagttcgaaaccagcctgggaaacattgtagtcacagctacttgggaggctgaggcagaaggatctcttgagcccaggaagtggctacagtgagctataattgcacgactgcactctaggctgggcaatggagcaaaaccctgtctcaaaaaaatggggcagggctgataaagattagattactgtgtgactttgagcagctgctttctctctaggctttgggggtctgtttgaacaatgagggagttggataccttggagctttctaagatttctgtggcgcctttattgacaccttgagaagtagcatgcagtgtttctacttttgggcaattggtcacttctttttttttgagacagtctcactctgtcgcccagtctggggtgcagtggtgtgataccagctcactgcaacctccacccacaaggttcaagcaattcttgcacctcagccccctgagtagctgggactacaggtgaccacatgtggctaatttttgtatttttagtaaagacagggtttcaccatgttggccaggctcgtttcaaactcctgggctcaagtgatcctcccttctcggcctcccaaagtgccgggattacaggtgtgagccaccgtgcccggcccaagtgctagctttctctctctctttttttttttttcgagacggagtctcgctctgtcgcccaggctggagtgcagtggtgtggtctcggctcactgcaagccccgcctcctgggttcacgccattctcctgcctcagcctcccgagtagctgggactacaggcacctgccaccatgcccggctaattttttttttatatttagtagagacagggtttcaccatattaggcaggatggtctcgatctcctgacctcgtgatccgcccgtctcggcctcccaaagtgctgcgattacgggcatgagccaccacgcccggccctaccaagtgctagctttcatttgacgcagtgaatgtttcttgtacacctggcaggtgcctggcactgcataggcactgttgagatgtgaaggtggccctggggacagaaaattatactgggcttgactgtgtgtctccatcccttgacatcagccaagccagcagctgctttacatacatgatgagcagacagctgcttgaaagagatgaggaaactcccagaccaacggctcttaccagagggccaagggaggtccccacagagtcagaggctgcagctggtccctgaaatccaggcagaattttagaaatgaagacagtcagctgggtgcagcggctcatgcctgttatctcagccacttcggagggctgaggtgagaggattgcttgagcccaggaggtggaggctgcagcaagctatgatgacaccatgcattccagcttgggcgacagagcgagaccctatctctaaaataaaaatgaagaagacagttaatgacgtctcctccctgtctgcctcactgggtaagcattcgcccagccaacatctggaacatcccagttctgcaaagagccacacccttcccagaaagagcccaacttgccaaagatttacttatttgttttaaactggttttagttgaccgcttttcattttgtgtatagcagcgttttaaggaaggtctaatttatccaggccacctgctgctttagcaaaccaagggagaggatgtgagattctaaggaatttacatatgtatgtcatatatatatatatatatagacacacaatttttttttgagacagggtcttgctctgtcatacaggctggagtgcagtggccaatcatagctcactatagcctcagatgcctgtgctcaagcaatccactcacctcggcctcctgagtagtgagactacaggcacacaccaccacacccagctaattttttaattttttgtagagactgagtcttgctgtgtcgcccaggctagtcttgaactcctgggctcaagcaatcctcccacattggcttcccaaagtgctaggattacaagcgtgagccactatgcctggcttatttttaaggttatatgcatgcaaagcctgtatcaatgaaaatattttctttggtttttttcaacttttcatcttcgcattttgcagatttatagaaaatttgctaaaataataagtccattgaatacatacacacccttcaccaaggttcaccaattcgtaactgccatatttgggagttatatgtgtgtctctctatatatacatatatggatacagatacatatacatgtttagtgacttgtttatatttgtacatacatgtacatgttgttatttattgatcgtttgggagtaagttgcagggatcattgactcccccacaattatgctagatattctcaaaagaaggaccttctcttttttttttttttttttttttttttggagacagggtatcactgtcattgaggctggagtgcagtgatgcgatcacagctcactgcagcctcaacctcccaggctcaagtgatcctcccacctctgcctcccaagtagctgggactacaggcacgggccaccacgcctggctaggcattctgttatgtaattatccaattgtatcttatagttcagtgatcacattttggaaatgtaacattgataccattatctaatacacagaccatattcaaattttgcctattgtctctatactgaactactgaactgtcctttatagcaatctccccctcatccacagtccagtccatgatcaacattgcatttaatcgtcatgtgtcatcagtatcttttttttttttttttttgagacggaattttgctcttgttgcccaggttggagcgcaatggcgcaatcttggcttattgcaacctccgcctttgggcttaagtgattctcctgcctcagcctcctaagtagctgagattacaggcgtgcaccattatgcatgcctaatttttgtatttttattagagacggggttttaccatgttgccctggctggtcttgaactcctgacctcaaatgatccacccacctcagcctcccaaaatgctgggtttacaggcatgagccactgcgtctggccatttcctcagcctttcattgcccttcatgatcttgacatttttgaagtgtacaggccagtcattaaagtaaaatgtttttccttttttttttttttttttttaaaaagagacagggtctcactgtgttgcccaggctggtctcagactcctaggctcaagtgatcctcccgcctcagcttcccaaagtgctgggattacaggcgtgagccatcgtacctgccctcgcatttgggtttgactgatgtttcctcttagggagacaggctctgcaggtttggcctgatactgcataagtgatcctctgtccttccgagtggatcttgccaggagacatatgatgtcagtgtgcccttggctgaggatgttcactttgattacttgttttttctgtactgtaaggatttttttccctttgtcatcaataaaccatttgtgagatttgagtctgtaaatatcctgttcccaaaaacccttccccaaatgatttgagcatctattgatgattcttgcctgtagcgattattactagggtggctaccaaatgctgaatttctaactctgttcttccttctgcatttgttactgtaaggaagagcttctcccccatacgagaatagtctttttgtttgcttggttgtttttttgagatagggtctcactctgttgcccaggctggagtgcagtgacatgatcatagctcactgcagcctcgacctcatgggctcaagcgatcctcctgcctcagcctctcgagtagctgggactacaggcagcaccaccatgcctggctaattttttattttttgtaatggtgaggtctcactattttgctcaggctggtctcgaactcctgacctcaagtgatcttcccacctcagcctcccaaatagctgggattacaggagtgtgccaccatgctcagctaattttctgtaaaaaatgtcatagagatggggtcttgctatgctgcccaggctggtctcaaacccctagtctcaagcaatcctcccaccttggcctcccaaagtgctgggattccaggcatgagccaccacacctggccctgtttttcttaaagttctcagtctcctctctgccttacccccatccccttttccatctccaggacctagggcagagacaaagtgagcattccctaaaaagcttttatgaggcaaaatgaaaaccagctcacgcctataatcccagcactttgggaggccaaggtgggtggattacctgaggtcaggagttcaagaccagcctgaccaacatagagaaaccccatctgtactaaaaatacaaaattagccaggcatggtggcacatgcctgtaatcccagctactcaggagcctgaggcaagagaatcacttgaacctgggaggcggaagttgcaatgagccgagatcactccattgcactccagcctgggcaacaagagcaaaactctgtctcaaaaaaaaaaaagaaaagaaaagaaaaccaggtccctaacaccgaagagttaaaagaaataagtaaatttggcaaattggtctttttgtgagttagcttataggcaactgatcgagggtctctttcccgtcttcaccctgcaattgtggctcagggcaagctgccagctccctcctgccaatgcaggagcaatagagcttggcctcctcttgcagggcgagtttgggagtcagatatgaagccactaatccgggacctttttgggacccaaggcactcatctgccccaagcataccaggcaggccaggtgcaatgactcatgtctgtaatcctagcactttgtttttgcgacggagtctcgctctgtccacccaggctggagtgcagtggcagaatcttgactcactgcaacctccacctcccaggttcaagcaattcctgcctcagcctcccaagtagctaggactacaggcgcccactgccacgctcggctaatttttgtattttcagtagagacggcgtttcaccatgttggccaggctggtctcaaactcctgacttcaagtaatccatccaccttggcctccccaactgttgggattacaggtgtgagccactgcgcccggccagtcctagccctttgggaggctaaggcgggcggattgcatgagctcaggagttcgagaccagcctgggaaatgtggtgtaaccccgtctctactaaaaatacaaaaaaaattagctgggtgtggtggtgtgcacctgtaatcccagctactcaggaggctgaggtacgagaatcgcttgaactcaggaggcagaggctgcagtgagctgagattgtgccattgcactccagcctgggtaacagagtgagattctgtctccaaaaaaaaaaaaaaaaaaaattcgagaccaaacatacctgggatttggaaggatagatctgttcccccagggtggagacaatggtccattgaatgggaacagctgagcatcttgtgtgggtggccagtgcctacaagcgtgccacctttctccagctcacacctgtggcagacatcagtaattgattacagaattcctcccctgaaaccagaactcggtgttctggccatctgctacttcccagtcacacgaagtagaatcctccacctgctcaccctggatctggtgcccttcgccttggtttcctgttggggctctgagggacaggtgggcactggcctgacccctgccttacccacagagtggatccgggctgcatgagcccagatgtgaagaattccatccacgtcggagaccggatcttggaaatcaatggcacgcccatccgaaatgtgcccctggacgaggtacggtcctgagtctgtggggcaggacgggaggtagtgccttcatgcctagccccctccccactccacccccattcacatgcctgctgtccccagattgacctgctgattcaggaaaccagccgcctgctccagctgaccctcgagcatgaccctcacgatacactgggccacgggctggggcctgagaccagccccctgagctctccggcttatactcccagcggggaggcgggcagctctgcccggcagaaacctgtcttgtaagtcagcctgctcctcggttcagctgggtgctttcactcctgctggggctcaggggctgtgggacctaggtcggggagccagccctgcacaaatgcagcccaggcttgagccagggaggtggaggctgcagtaagctgtcatcacaccactgctctccagcttgggtgacaaaacaagacccactctcaaaaaaaaagaggaaacacacattttttaaaaagccggggacggggccaggcgtggtggctcatgcctgtaatcccagcactttgggaggccgaggcaggtggatcacctgaggtcaggagttcaagaccagcctggccaacatgggaaacctcatctttactgaaaatacaaaaattagccgggcttggtggcaggtgcctgtagtcccagctactcaggaggctgaggcagatgaatcacttgaacccaggagatggaggttgcagtgagccaaggtcacgccactatactccagcctgggcaacagtgtgagactctgtctcaaaaaaaaagaggatgacagagcaggatctgaggggttgaggggagctgggggctgccactagagccaggataggccgagacactgggatgggcagcctttggactgtcccaggcgggccctcccaaagcagggggtgattgcatagactggcatggacaggggcatgcaggcaggaggaggaaggggcagggccttggccgggtgctacctgtcccccggtggcacttggcaccatgtgtgccccccaggaggagctgcagcatcgacaggtctccgggcgctggctcactgggctccccggcctcccagcgcaaggacctgggtcgctctgagtccctccgcgtagtctgccggccacaccgcatcttccggccgtcggacctcatccacggggaggtgctgggcaagggctgcttcggccaggctatcaaggtacagagcatgccagggtctcaggggacagtctgggtgggacccctccatcctccttccttcccagtctatggaaacacagtggaaggggtatctggcttccagactccctggccagtgccctctcctcccttggcctcctggagctaattaggaacaggggacctcctacaggtagactgagaccttatgtgcgggaggtcattgaaaggtggctcctagccaggcacagtagtttatccctgtaatcccagcaccatgagaggctaaggctgtaggatcgcttgagcccaggaattcaagaccagccttgacatcatctctacaaaaaatttaaaaattaattgggtatagtggtgcatgcctgtggtcccagctacttgggaggcttaggcaggaggattgtgagccaggagttcaaggctgcagtgagctatgatcatgccacagcactccagcctgggcaatagagcaagaccccatctcaaaaaaaaaaaaaaaagacaagggattaatacatcccatccacttgggtatttgggaacatcccatgcacagcctagagtatgaagccatctgcacatctccctggcagtcctggggtggagatggggcttcctagaaggcgggcttacagcagagcttctgtcttcacacctctgtgtcccacacgcaggtgacacaccgtgagacaggtgaggtgatggtgatgaaggagctgatccggttcgacgaggagacccagaggacgttcctcaaggaggtcagtgagcggaatgccctcttccctccagagggacttccaggtgctcacccctgccccatcaacacaggtcggaaaagggctctgggaaccattgaaagaagagcgagcaggccaggcatagtggctcacgcctgtaatcccaacactttgggaggttaaggagagaggatactttgagaccaacctgggcaacatagcaagaccccgtctctacaaaaaaattttaaattaaccgagcttggcaatgtgcacctgtcatcccagctactcggggggctgaggtgggaggctcgcttgagcccaggagttggaggctgcaatgagccatgatcgcaccactgcactccagcctggggaacaaggcaagaccctgtgtccaaaaaaaataaaagtaactgcattggtcgggcatagtggctcacgcctgtaatcccagcactttgggaggctgagccgggcggatcacctgaggtcaggagttcgagactaccctggccaacatggcaaaaccccgtctctactaaaaatacaaaaattagcccagcatgatggtggtgagtgcctgtcatccaggctactcaggaggctgaggcaggagaatttcttgaactcaggaggcggaggttgcagtgagccaagatcgtgccgctgccctccagcctgggcgacagagtgagactccttctcaaaaaaaaaaaaaagaaaagaaaaaagaaagtaactgcaggcaggggactgggaaaaagagcatcgctgggggtgggggcagctcaagcagagggcacaggacgccagagggtgtggcagaggcaggagaggggagctgggggttccgtatctttgagaccgcctacagcccctggtgggatggaaaagggagaagcagacccaagcacagctgggaccacacagagcccgggcccagcctgtttgtgccccgccaggtgaaggtcatgcgatgcctggaacaccccaacgtgctcaagttcatcggggtgctctacaaggacaagaggctcaacttcatcactgagtacatcaagggcggcacgctccggggcatcatcaagagcatggtgagtcctgggcagagccagccacccccgctgtgcggccccgggcaaagcagctccctctgtgagcctcagtctcatctcttcaatggggggaagccacaggggtctcaaaggccctctgaaccctgattcctaatcaaaaaggggagcgactgactccatctaaagctaggaaaggccaggtacaatggtgcacacctgttattctggcactttgggagcccaaggcaagaggatcactcgaggccaggaattcaaggctgcagtgagctgtgatctcaccactgcactccagcctggaccacacagcaagaccctatctcaaaaactaaaataaaattcagagctttccttaaggatttgaataaaattacaaatccatctttagaaataaagtgctcaggccaggtgcagtggctcatgcctataatctcagcactttcagaggctgaggccagcagatcacctgaggtcaggagtccaagaccagcctggccaacatggtgaaaccccgtctctactaaaaatacaaaaattagctgggcctggtggcaggcacctgtaatcccagcactttgggagactgaggttggcagatcacctgaggtcaggagttcgagaccatcctggtaacccgtctctactaaaaatacaaaaaattagccgggcaaggtggcaggtgcctgtagtcccagctactcgggagactgaagcaggagaatggcgttgaacccagggggcagagcctgcagtgagccaagatcgcaccactgcgctctagcctgggtgacagcgagattccgtctcaaaaaaaaagcacttggaggaagcctcacagagtcctgtgctggaccacaccctggggatccagtcctggcctccagccccatttctgtaccaccctgagaccatgggatcttcctcaggttggattaccttgtatccaaggtgtggaccctatgggctcctgctaggtgtaacttgacacaacgggttccgttgtcaggtgcaatttagaaactctgggctaggccaagcgcagtggctcacacctgaattcccaaactttggaaggccgaggcaggagggtcactagaggtcaggaggtcaagaccagcttggacaacataatgagatcccaatcccatctctacaaaaaaaattaaaaaattagccaaatgtggtgacacatgcctgtggttccagctccacaggaggctgaggcagaaggatcacttgagcacaggaggtcgaggctgcactccagcctgggtgatagagtgagaccctgtctcaataaaaaataaagatctccaaggggatgaggtttgagaatgaggcgtctcccccaaatgatttgagcccaaagccccgttctcctggcatggctcagtgctgccactgcgcaggtgaccttgctgggcccttctacctcttacctgtctgtgaaagtaggttctaattttttaaaaacctagaaagatgagttttttgtttttgtttttgtttttcccgagatggagttttgctcttactgtccagcctgaagtgcaatggcgtgatctcggctcactgcaacctccacctcccaggttcaatcgattctgcctcagcctcccgagtagctgggattacaggagcccaccaccacacccggctaatttttgcgtttttagtagagacagggtttcaccatgttggtcaggctggtctcaaactcctgacctcgtgatccaaccactctgacctcccaaagtgttgggattacaggcgtgagccaccacacctgacagaaagatgagattttatagaaaataaatatagcttgttttctcagaggaggcagattgggagctatagaggaatatccctgcttagagtttgaaatcagttctgttaggaaataatgtttgtaggggccgggtgcggtggctcacgcctgtaatgccagcactttgggaggctgaggcaggtggatcacttgaggttaggagtttgagaacagcctggccaacatggtgaaaccctgtctctactaaaactacaaaaattagctgggtttggtggtggacacctgtaatcccagctacttgggaggctgaggcgagagaattgcttgaggccgggtgcagtggctcatgcctgtaatcccaacactgggaggccaaggtgggcagatcacctgaggtaaggagttcaagaccagcctgaccaacatggtgaaaccccgtctctactaaaaatacaaaaaattagctgggtgtggtggcgcatgcccatagtcccagctactcaggaggctgagacacaagaatcacttgagccccggaggcgaaggttgtagggagctgagatggtaccactgcactccaccctgggtgacagagtgagactccatctaaagaaaaaaaaaaaaggaaataatgtctgtgagctgtgttgactcatactccttagaagcagacagttgtgggtgcccgaagaaatcggggtgttggggagcccagggaccctctaggacgcttgcctcttcctgcctctgtctcatgcaaccatccctgccatcggggcccccaccggccccaccctggccattctttctccatcccaggacagccagtacccatggagccagagagtgagctttgccaaggacatcgcatcagggatggtgagtgagccgggtgctctagctccattcataatcccaccaggaatttgcaaacagaacccacaaagaagctttgaaagagggcagagggggtcgatgggagagtgggaagaatcgtcccgactggcctgattggggtgggagcagagggagttcctggggagccaggatgggctggggtccctctgcacagctgccccctgactcccgtgtccccgtccctaggcctacctccactccatgaacatcatccaccgagacctcaactcccacaactgcctggtccgcgaggtgagtaccagggccccacgtggctgggtgtcaggagacagcaggagcccatccaaccccagcctcagggccttcccagaactggaggcccctccatgttgcctccatgacttcaatttgaggtgggggtggggggcagcagcccgtggggaagagcgcagggtcaggaggcagacagacctgggtttgagtcctgtctctgccactgactcatggtggaccatcagagtcccaggctggtaggagggtctcataaatcaatgaaggagaaagtgacatgtaagctacaaaggaccaggaccgtggtcttcatagagcacagcccatggcagagtggccatgggctacaccagacagcaccagcatctgggggccacagagtgggggcataggcgtatgggctggagtggtcagggcaggcttcctgaaagaggaggcttggccagacacagtggctcacacctgtaatcccagcactttgggaggccgaggcaggcggatcacgaggtcaggagatcgagaccgtcctggctaacatgggcactgtggctcacacctacaatcccaacactttgggaggccgaggtgggtggatcacttgaagccaggagttcaagaccagcctggccaacatggctaacacggtgaaaccccatctctactaaaaatataaaaaattagccgggcgtggtggcaggtgcctgtagtcccaactacttgggaggctgaagcaggagaatggtgtgaacccgggaggcggaacttgcagtgagccaagatcgcgccaccgcactccagcctgggtgacagagcgagactccatctcaaaaaaaaaaagaggaggctttaggtggatatttaagcaggggacgggcaggcaaagagcccagtgtctaaggattgtcaagggaggagagcccggttctccaccaaaagcacaggagcgagtaaccatgcccatctggagaggtggtgtattcgtgtcctggggctgccatcatgaagtactgtgaaccagatggctcaaaacaacagaaatgtgctgggcacagtggctcacacctaaaatcccagcaatttgggaggccaaggcaggtggattgcttgagctcaggagtttgagaccagcctgggcaacattacgaaagcccatctctgccaaaaatacaaaacggaatagccagccgtggtggcataagcctatggtcccaactacctgggaggctgaggtgggaggatcacttgagcctgggaggtagaggttgcagtgagccaagattgtgctactctactccagcctgggagacagagccagaccctgtctcaaaaaaacaaaacaaaacaaggccaggcactgtggctcacgcctgtaatcccagcactttgggaggccgaagtgggtggatcacttgaagccaggagttcaagaccagcctggccaacatggcaaaaccctgtttctactaaaaattcaaaaattagcaggcatggtggcgcatgcctgtaatcccagctactcgggaggctgaggcaggagaattgcttgaacccaggaggcagaggttgtagtgagctgagattatgccactgcactccagcctgggtgatagagtcagacaccgtctcaaaaaaaaaaaagcatcacatggcaagaggggctgacaagagacccccaaactgaccattatacagacccactcttgtgataactaacctggtccctcaataacccattaatctgttaattcatacagagccctcatgacccaatcacctcttacaggccctgcctcttaataccgttagagtcaggccaggcatggtgacatgggcctgtagtcccagctagttggaaggctaggtgggaggatcccttgagtccaggaggtaaatgttacagtgagctctgattgtgtcactgcactccagcctgggcaacagagcgagcccctgtttttaaaacagcaacaagccaggcacagtggctcacgcctgtaatcccaacactttgggagactgaggcaggcagatcacttgaggtcaggagttcaagaccagcctcaccaacacagtgagacccctctctactaaaaatacaaaaattagctgggcgtagtggtgggtgcctgtagtctcagctactcatgagactgaggcagaattgcttgaacccgggaggtggaggttgctgtgagccgagatcacgtcactgcactccagcaacagagtgggactccatctcaaaaaaaataaaaaataacagagatctgtgttggcttacacctgtaatcccagcactttgggagtccaaggtgggcagattgcttgagcccaggagtttgagaccagccaggcaacatggcaaaaaaataaaaaaatttgtctctacaaaaaaattaaaaaattagctggcatggtggtgagtatctatagtaccagctactcaggaggtggaggtgggaggatcgcttgagcctgggaagttgaggctgcaatgagctgtgttcgtgccactgcactccagcctgggccacgggagggagactctgcctcaaaaaaaaaaaaaaaaaatcaaacccgaaaagcaaaaaacatagacctcacctgcttattgggaatattcaagataaaattaggccaggcacggtggctcacgcctgtaatcccagcactttgggaggccgacgtgggcggatcacgaggtcaggagatcgagaccatcctggctaacacggtgaaaccccgtctctactaaaaatacaaaaaattagctgggcatggtggcaggcgcctgtagtcccagctacttgggaggctgaggcaggagaatggcgtgaacctgggaggcagagcttgcagtgagctgagatcgtgccactgcacttcaacctgggcaatagagcaagactccaactcaaaaaaaaaaaaaaaaagataaaattgggccaggtatggtggcttactcctgtaatcccagcactttgaaaggctgaggcaggtggaccacttgaggccagaagttgaagaccagtctgggcaacatagcaagaccctatctcaatcagtcaatcaacctaaataaatagtaaatctggtggcatgccaagcacaggacctgggtctataatcaaaattcctgtcttgatgggcacagtggctcacacctgtaatcccagcactttggtaggccacagtgggtggatcacctgagatcaggagttcgaaacctgcctagccaagtatggtgaaacccgtctttactaaaaatacaaaaattagccaggcatggtggcaggcgcctgtaatcccagctactcgggagggtgaggcaggagaatcgcttgaacctgggaggcggaggttgcagtgagccgagatcatgccactgcgctccagcctgggtgacagagcaagactccgtctgaaaaaaaaaacaaaagaattcctgtcttctctccgaaacaaagcagcatcagtgcccccgcaggtgggagggagcgcttgcaggagggagcagtgggtccgccacgacggtctggggagcaggtggggagggggcagagggtgcagcgtgtggtgggagggaggaagccacactgctatcttcaggtgcttcccgcagctccatttgcaaagagcggatgggtttggggaaggaaggggtccccaccctgtgccaatacagcgtatcagaggtatgttctctgggctgtctacgggttggcttggggtcctggggaggggcaggccaagcgggcagtactaggatcgggtcccagcatgacccggcttcaccttcccagaacaagaatgtggtggtggctgacttcgggctggcgcgtctcatggtggacgagaagactcagcctgagggcctgcggagcctcaagaagccagaccgcaagaagcgctacaccgtggtgggcaacccctactggatggcacctgagatgatcaacggtgagtggttcagccctgcccatcatggccctcacgggaagccatgggggagcccaggagagctgtaacctcccaagcccctggcccctcccagcctccttggctcttcagttaccctgtgggtcctgttgctcctataacacacttagtggcagccaggcacggtggctcacgcctgtaatcccagcactttgggaggctgaggtgagtggatcacctgaggtcagtagttggagaccagcctagccaacatggtgaaacccccattctttactaaaaatacaaaaattagctgggcatggtggcgggtgcctgtaatcccagctactagggaagctgaggcaggagaatcgcttgaacctgggaggcagaggttgcagtgagccgagatcgcgccattgcactccagcctgggtgacgagcgaaactccatctcaaaaaataaataaatagaagacacttagtggcttaaataaatgatcatacagttctggagtctgaagtccagcgtcagcctcaccgggctgaaatcaaggcgccggtagggtgagctccttctgcaggctccggggcacctgtttcctgaccttttctggctcgtggaggcttcctcattcctcctgttgctgccccctcctctgtcttcagggctggctgcaaagcatcttctcttctctgatctctgcatccatccccgcatctctttccctggctctaaccttcctcctttttttttttttttttaaagagggtctcgctctgttactcaggctggagtgcagtggtgccaccatagctcactgcagcctcaaccttctgggctcaaactgtcatcccaccccagcctcctgaatagctgggaccacaggcatgcaacaccacacccagctaatttttttattttttattttttatttttttttgagacagagtctcgctgtgtctcccaggctagagtgcagtggcgtgatctcagctcactgcaagctccgcctcctgggttcacgccattctcctgcctcagcctcccgagtagctgggactacaggcgcccgccaacacgcctggctaattttttgtatttttagtagaaacggggtttcaccgtgttagccaagatggtgtcgatctcctgacctcgtgatccgcccgtctcggcctcccaaagtgctgggattacaggcgtgagccaccgcgcctggccaattttttaaatttttaatagagacgggggtatcactatgttgcccaggctggtctcaaactcctggcttcaggcgatcctcctgccttgacctttcaaagtgctgggattccaggcatgagccaccatggccctccatccttctgatagggacccttacggtgacattgggcccacctggataatccaaaagcagccctccatctcaagaccctcaacttaatcccatctgcagagtccgatggaaggtgggacgtatacaagtcccagggatcaggacgcagtcatctttggggatcatagttctgcctcccacagggtctgcttccctcagtccatttctttgctgtcaatggtcctatatatgcccagattataggttataaagtccttctacaagcaggtgacacatgaacacaggttcagggcaggcagaccccagccatcacctcatcatagttaacctagttaaattagcctggcatgtggcgtggtgcctaatgcctgtggtcccagctactcaggaagccaaagcgggagatttacttgagccaaggagatcaaggctgcagtgagctatgatcataccactgccttctagcctgggcaacggagtgagaccctgtctcaagaaaacaaaaaataggccaggcacagtggctcacacctgtaattccagcactttgggaggctgaagcaggcggattgcttgaggccaggagttcgagaccagcctggccaacatggtgaaacgctgtctctactgaaaatacaaaaattacccgggtgtggtggcacagctactagggaggctgaggcaggagaatcacttgaacccaggagcagaggttacattgggccaagattgcaccactgcactccagcctgggcaacagaggaagactgtgtctcaaaaagaaaaaaaaaaaaaccttcctgtaatcccagcactttgggaggctgaggtgggcggatcacgaggtcaagagattgagaccatcctggtcaacatgatgaaaccccatctctactaaaaatacaaaaaaattagctgggcgtggttgcacgcgtctgtagtcccagctacccgggaggctggggcaggagaatgatgtgaacccaggaggcggagcttgcagtgagccgagatcgcaccactgtactccagcctgacgacagagtgggactctgtgtcaaacacacacacacacacacacacacacacacacacacacacacacacacacagagttaacatagcccgcaaagaagactataaaacagtcttagtggccgggcgcagtggttcacgcttgtaatcccagcactttgggaggccgaggcaggtggatcatgaggtcaggagtttgagaccagcctggccaacacagtgaaaccccatctctactaaaaatacaaaaattagctggacatggtttcgggcgcccgtaatcccagctactcaggaggctgaggcaggagagttgcttgaacccaggaggcagaggcaggagagttgcttgaacccaggaggcagaggttgcagtgggcgacagagcaagactctgtctcaaaaaacaaaaaagtcttagtgtttcctatgtttagggattagtgtgaggattaaaggttgtaaactcatttccacctagttggcattcagtaaatgagaattgacatttagtactaattgtttcgggtattttgttttttgttttttgttttttgttttttctgagaccgagtcttgctctgtcatccaggctagaatgcatggtgcgatctcggctcactgcaactccgcctcccgggttcacaccattctcctgcctcagcctcccacgtagctgggactacaggcgcccgccaccacgcctggctaattttttgtatttttagtagagacggggtttcaccatgatctcgatctcctgacctcgtgatccacccgcctcagcctcccaaagtgctgggattacaggtgtgagccaccgtgcccggccagttttttgtttttgagatggagtcttgcattgtcacccaggctggagtacagtggcgtgatctcggctcactgcaacctccacctcctgggttcaagtgattctcctgcctcagtttccctagtagctgggattacaggcacctgccaccatgcctggctaatttttctatttttagtagagatggggtttcaccatgttggccaggctgatcttgaactcctgacctcaggtgatccacccgcctcggcctcccaaagtgctgggattacaggtgtgaaccactgtgcccggccatgtaccgattatttttaacatcattaagtagctggtatcattcccattttacaataaggaaactgaggctcagagagtctgtgtcagtttcctgaggttgctgtaataaattgttagaaacttgattatttaaaacagcagaaaatggtcaggcacagtggctcacacctgtaatcccagcactttgggaggccgaggcgggcagatcactggaggtcaggagttcgagaccagcctggccaacatggtgaaacaccatctctactaaaagtacaaaaattagctgggcatggtggcaggcgcctgtaatcccagctactcgggaaattgaggcaggagaatcgcttgaacccaggaggcagaggttgcagtgagccacaatcgtaccactgcactcttgcctggacaacaaagcaagactccatctcaagataaaataaacagcagaaatttattccctcttagttttggaagccagaaggttgaaatccaacagggctgcgctccctccagggcgatctaggggagaatgcattccttgcctcttccaccttctggttgttttgcattcctgggcttgtggccgcatcactccagtctccacccctgtcttcacagggccacctcctcctcttctgctgtgtcttctctgtgtctctctcaagagggcatttgcagtggcatttggggcccacccagatcatccagcatcatctcatctccagatccttaacttaatcccatctgcaaaagaccctttttctgacccagtaacattcacagattccagagacctgacatggttcccttttgggaccagcacagagttcatgacttgtgcaaagtcacgcagctgatcggtgcctcgaactccttgtccagggctctgccccttgctcctcagagctcccaaaggcttgctcagacctggtggggttgggggaaagagcctaagcctgggttcccatagaggttgccggcatctgcctcctgggcctggacctcccggccggggcatcctcccagctggcctggtcccctgccttttggcatccctggcacccccatgtgttcatctgctgacagtcggtctctttatccaggccgcagctatgatgagaaggtggatgtgttctcctttgggatcgtcctgtgcgaggtaggtccagggttgggtagcagcggtgttgaggcctgggctcctccccactcacccaggctgcaggctcagcatctgcaggggcctcatgccaggaagcctgcccacagcaaggcatgggctggcccccatggggtactgcagtcaggctgcagccaggcccagtgccacctgccctcaaaccacctggatggcacccagatgcccaggctgagggccccctggagtaactgccgggccttgtactggacagatcatcgggcgggtgaacgcagaccctgactacctgccccgcaccatggactttggcctcaacgtgcgaggattcctggaccgctactgccccccaaactgccccccgagcttctaccccatcaccgtgcgctgttgcgatctggaccccgagaagaggtgagtggggtggggccctggcctgggagacggtggggccgattcccgggacagccagacccaccgttccccacccacctgtcacccaggccatcctttgtgaagctggaacactggctggagaccctccgcatgcacctggccggccacctgccactgggcccacagctggagcagctggacagaggtttctgggagacctaccggcgcggcgagagcggactgcctgcccaccctgaggtccccgactgagccagggccactcagctgcccctgtccccacctctggagaatccacccccaccagattcctccgcgggaggtggccctcagctgggacagtggggacccaggcttctcctcagagccaggccctgacttgccttctcccaccccgtggaccgcttcccctgccttctctctgccgtggcccagagccggcccagctgcacacacacaccatgctctcgccctgctgtaacctctgtcttggcagggctgtcccctcttgcttctccttgcatgagctggagggcctgtgtgagttacgcccctttccacacgccgctgccccagcaaccctgttcacgctccacctgtctggtccatagctccctggaggctgggccaggaggcagcctccgaaccatgccccatataacgcttgggtgcgtgggagggcgcacatcagggcagaggccaagttccaggtgtctgtgttcccaggaaccaaatggggagtctggggcccgttttccccccagggggtgtctaggtagcaacaggtatcgaggactctccaaacccccaaagcagagagagggctgatcccatggggcggaggtccccagtggctgagcaaacagccccttctctcgctttgggtcttttttttgtttctttcttaaagccactttagtgagaagcaggtaccaagcctcagggtgaagggggtcccttgagggagcgtggagctgcggtgccctggccggcgatggggaggagccggctccggcagtgagaggataggcacagtggaccgggcaggtgtccaccagcagctcagcccctgcagtcatctcagagccccttcccgggcctctcccccaaggctccctgcccctcctcatgcccctctgtcctctgcgttttttctgtgtaatctattttttaagaagagtttgtattattttttcatacggctgcagcagcagctgccaggggcttgggattttatttttgtggcgggcgggggtgggagggccattttgtcactttgcctcagttgagcatctaggaagtattaaaactgtgaagctttctcagtgcactttgaacctggaaaacaatcccaacaggcccgtgggaccatgacttagggaggtgggacccacccacccccatccaggaaccgtgacgtccaaggaaccaaacccagacgcagaacaataaaataaattccgtactccccacccaggtcctgcgtggcgatgtgtgtctggggccctggggaaatagtcaaggtaagaggagttagtcttccctgaccagaagacaaggatgagtgtggtggctcatgcctgtgatcccagcactctgggaggctgagacaggacgatcccttaagcccaggagttcaagaccagtctggacaacatagtgagatcctgtctctacaaaaatttttttttaattagttgggcagaggccaggtgtggtggctcatgcctgtaatcccagcactttgggaggcagaggcgggtggatcacctgaagttaggagttcaagaccagtctggccaacatggtgaaaactcgtctctactaaaaatacaaaaattagccgggcgtggtggcacatgcctgtagtcctagctacttgggagactgaggcaggagaatcgcttgaacccgaaaggcagaggttgcagtgagccgaggtggtgccattccactccagcctgggaaagagcgagactttgtctccaaaaaaaaaaaaaaaaaaattggcaggccaggcacagtggctcacacctgtaatcccagccctctgggaggccgaggcaggaggatctcctgaggtcaggagtttgagaacagcctgactgacatagtgaaaccccatctctactaacaatacaaaattagccaggtgtgatggcacatgcctgaaatcccagctacttggggggttgaggcaggagaattgcttgaacccaggaggcagaggttgcagtgagccgagatcgcaccattgcaccccagcctgggcaacaagagcgaaactccatctcaaaaaaaaaaaaaaaaattagttgggcatggtggcatgcacctatagtcccagctactcaggaggctgaggtgggaggatcctttgagcccaagagatcaaggctgcagtgagccatgtttgcaccactgcactccagcctgggcaacaaaacaagactctgtctcaaaaaaaaaaaaaaaaaaaaaaaaaggcagggatggaggggggaagagaacacagcccagttttaggtggagctgaggtggtggcccagccaggacaagtgaagagtcttcagaggctgggtttggagggccgtgcatattccggaggtactgctttcatacttaaatgttttcttgtaaaactcacacctgtaatcccagcactttgggaggccaaggtgggcggatcatctgaggtcgggggttcaagaccaacctgaccaacatggagaaaccccgtctactaaaaatacaaaaaattagccaggtgtggtgacacatgcctgtaatcccagctactcgggaggctgaggtaggagaattgcttgaacctgggaggcggaagttgtggtgagctgagatcgtgccattacacttcagcctgggcaacaagagcaaaactccatctcaaacaaaactaaactaaactaaactaaagggttctatcaagaagatgggctgcacgtgatggctcacacctagactcccagcgcttcaggaggccgaggtggaaggatcacttgaggccaggagttcaagatctgcctgggcaacatagcaagaccctgtttttacccaaaaaataaaaaaattacccagatgctgtggtgtgtgcctgtagtaccagctactgagaggctgaggcaggaggaccgcttgagcctgggaggtcaaggctgcagtgagctgtgatcgtgccactgcactccagcctgggtgacacagcaagaccttgtctcaaaaataaataaaacattttaaaaacacactaggtattgcaaatacagggcatttaatttggttttttgtttctgttttgttgttgttttgagacaggtctcactctgtcacccaggctggacagcagtggcacagtcatggctcactgcagcctcaacatcccagggttgagtaatcctcccacctcagcttctcaggtagctgactatagatacacgccactacaccaagttaatttaaagaaaaaaaatgtgagaggccaggcgcagtggctcacgcctgtaatcctgacactttgggaggccgaggcaggcggatcacctgaggtcaggagttcaagaccagcctggccaacatggtgaaaccccatctctactaaaaatacaaaaattagccaggtgtggtggcaggcacctgtaatcccagctactcgggaggctgtgacagaagaatcatttgaacctgggaggcggaggttgcagttagccgagatcacgccattgcactccagcctgggtgacaagagtgaaactgcctctcaaaaaaaaagtttagaggcaaggtctcactttcttctctaggctggcctcaaactcctgggctcaagcagtctcctgggcctcccaaagtgctgggattacaggcatgagactccatgctcagccacatttaatacgagaatttttttgttttgtttttttggtttttttttttgagatggagtctcgcactgtcacccaggctagagctcagtggcacgatctccgctcactgtaagctctgccttccgggttcacaccattctcctgcctcagcctcccgagtagctgggactacaggcgcccgccaccatgcccggctaatttttttctatttttagtagagacggggtttcaccatgtgaaccaggatagtctcgatctcctgacctcatgatccacccatctcggcttcccaaagtgctgggattacaggcgtgagccactacacccagccaatacaaggaaatttttacatggctgttgaaagacagaggaaaggccaaaagtggacacttaggtaacccagagatgattgcaggagagagctaccaccctcggtggggggattgaaggggagaggtgatcacttgagttatctaatgttgcatagggaagtcacctctcaacttggttgcttaaagtaacagggatcactcattgctcatgatttctggttttttttttttttttttgagacggagtctcgctctgtcgcccaggctggagtgcagtggcacaatcttggctcactgcaagccattctcctgcctcagcctcccaagtagctaggactacaggcgcccgccaccacacctggctaattttttgtatttttagtagatacagggtttcaccgtgttagccaggatggtctcgaactcctgacctcatgatccgcccaccttggcctcccaaagtgttgagattacaggcgtgagccaccgcgcccagcttgatttctgtttgtcaagaatttgggagtcattttggtggggaatttgtatgtgggggtctctcctggggctgcagtcctttgagggtgtaactggggctgaagttcccttccaagaaccctcatatgtggctcactcacatggcgggcaatttggtgctagcagttgattctacagagaaaaacgggcttgagccaatgtgctacaagccaatactatgacaccaggcttttggttttttgtttttatgatttatgtatgtattttttttttttttgagacagaatctcattctatcaccctggctgcagtgcagtggcacaatctcggctcactgcaagctccacctcccaggttaaagggattctcgtgcctcagcctccctagtagctgggactacaggcgtgcaccaccatgcctggctaatttttgtacctttagtagagacagggtttcactatgttggccagactggtctcaaactcccgacctcaagtgatccacctgcctcagcctctcaaagtgctgggattacaggtgcaggcaaccatgactggccgttttttttgtttttaaagttggggtctcactatgttgtcccggctggtcttgaactccaaggctcaagtgatcctcctgcctcgacctcccaaagtgctaggcttacagtcatgagccaccatgcccagctgacaccaggcttttcagaaaagaatagctttattgcaagtcaaccagtaaggagacagaagtctagctcaaatctgtccccctgtgctggctttaaggcggtaattttattaggaaaggtttagggggtggattctgatattaggtgattggcggaagcaaaggggaggcctggaaagtgctcaggcatgcgcagttccctcttcatgttatctcatggggggcatgtgcaaattccgggggtggttagtatgtaacatgcactggaaattcgggctgtgacatcagcaagcttgttctgtgcaaactgcagttggccatattggtcccaatctatttcagccagcgtgttaatcccaccagcagatgaatttcagcatttctgcaagtcgtttctttttttatctgccatcctgcaaactggaaaatttctgctagtcactggtttctttaactctttggggcacggtttcactggtaggaggcctcagtttatcccatgggcctctccatagggctacttcagagtccccacagcagcctccagaatgaatatcccaagaaagaaaagaaaagtgccactaggggccgggtgtggtggctcacgcctgtaatcccagcactttggaagtctgaggcaggaggatcccttgagcccagaagttcaagccagcctgggcaatgtagggagacgccatctctactaaaaaaaaaaaaaaaaaagaagaagaatttaggccgggcgtggtggctcacgcctgtaatcccagcactttgggaggctgaggcaggcggatcacgaggtcaggagtttgagaccagcctggccaagatggtgaaaccctgtctctactaaaaatacaaaaattagccaggcacggtggcgggcgcctgtaatcccagctactcaggaggctgaggcaggagaattgcttcaacctgggaggcggaggttgcagtgagccaagatcgtgccactgtactccagcctgggtgacaaagcaagactccatctcaaaaaaaaaaaaaaaaaaaaaagaaagaaattagctgggtatggtggcacacacctgtggtcccagctatttgggaggccaaggcaggaggattggttgagcccagaaggtcaaggctacaatgagccagattgtaccattgcactccagcctgggcaacagagtaagacgccatctcaaaaaaagaaaagaggccaggtgcagtggatcacacctgtaatcccaacattgtgggaggccaagacaggatcccttgaggccaggagtttgagaccagcctggccaacttggcaaaaccctgtctttaccaaaaaatacaaaaataagctgggcgtggtggcccactcctgtaatcccacctacttgggaggctgaggcgggagaatcacttgaacctgggaggcagaggttacagtgagccgagactgcgctattgcactccagcctgagcgacagagcgagactccgtctcaaaaaaaaagaaaaaaattaccacaagcgcagctctgggtgcattgcttatgaattaactcctgctttgcaaggagcagctctggttcaataaaagattgctgtgtaacaccaccagcttacccttgaattctttgagtgaaaccaaaaaccctcccaggctaatccacaatttgggggcttagctatatgcctgtatcggtactaattgtcttcattattgtagctttgttgtaacttttgaagttgagaaatgtgagccttccaactttgtttttctttttctagactgttttggctatttgaagtcccttgaatttccacaagaattttttttttttaagtgccaagatctcagctcactgcaacctctgcctcccaggttcaagcaattctcccaacttagcctcccaagtagctgggactagaggcatgcaccaccatgctaatttttgtgtttttagtagagatggggtttcaccatgttgtccaggctggtctcaaactccttgcctcaagtgatccacccaccntcaggctcccaaagtgctgggattatagatgtgagccaccatgcccagcctccacatgaatttttaggatgagcttgtcaatttctgaaaacaagccagctggggatttgtttgtttagacacaagatgtcattctgtcacccagactggagtgcagtggcacaactcctagctcactgcagcctggaacccctaggctcaagtgatcctctcatctcagcctcctgagtaccagggaatacagacacatgccaccatgccctgctaattttttaatttttgtagcgacatggtctcaaactcctgcccaaccaggctgatctctttttttttttgagatggactctcactctgtcgcccaggctggagtgcagtggcgcaacctcgcctcactgcaacctctgcctcctgggttcaagcgattctcctccctcagcctcccgagtagctggtgggcatgggcgcctgccaccatgcccggctaatttttcatatttttagtagagatggggtttcaccatgttggccaggctggtctcgaactcctggcctcaagtgatcctcctgcctcagcctcccacagcactggaattacaggcatgagtcactgttcccggtccagctgaggattttgacagggattggtttatgtctatatgtgaactggggagtattggaatattgacatcgtaataatattaagtctctcaggccaggcatggtggctcacacctgtaatcccagcactttgggagctcgaggcaggtggatcaattgaggtcaggagttcaagaccagcctggccaacatggcgaaaccccgtctctgctaaaaatacaaaaattagccaggtgtggtggtgtgtgcctgtagttccagctacttgggaggccgaggcaagaggatcacttgaacctggtaggcagaggtggcagtgagcctagattgcaccactgcactccagcctgggtgaaagagcaaggctctgtctcaaaaaaaaaaaaaaaaaaaggaagaaggaggaggaggagggggagaaggagaaggggaaggaaggaggaaggaggaagaagaagaaatacctgaaactgggtaattttttttttgagaaaggatcttgctctgtttcccaggctggagtgcagtggcacaatcttggctcactgcaacaaccacctcctgggttcaagcgattctcatgcctcagcctcctgagtagctggaattgagatgtgcacaccacgcccagctaatttttatatttttagtagagacgcggtttcatcatgttggccaggctggtctcaaacccctgacctcaggtgatcaacccacctcagcctcccaagtgccgcaattacaggcgtgtgagccactgcgcccggcttcaaaagtaccatttaatggctgacaattacttgccctgaaatgtgaaacaaaattcatttactacattgtttttaagatagcacctgaccttcagtaatcggaaataatgatttcctataaataaaaaccactgcagtgcttttagtgattagtgtacatagagtttttcccctggctgtgacatcatattattaaaagcattaagcacctggaattcatgctgtagttgatttataagttacataatgtacaaagctccttttataagaatgttttgtggtcacaattacttcaaaacccaattacattcaaataatctaatagctcatgctttggcaattatagaagtgtgattttgacacatagaaattttatgaggttagcaaataaaaaacgctataaaagaggtgaacaatggttcctctgtttaaatttagagtgcagcaatatttaggtaatatttttcagttaatataatcagcctagaatatagcattgtaaatcatacagtgttttagaaatacggatctaaagaaggtaataccttttccaaattataaaattttggcaaatcaatacagtactttgtaatacaataaaactatgtttttgttggagtcatatatgactttaatcataatttccactgcaaaagcaccacctaaatactaaatcaattatgaaggcttttcatgacagtttataacagagtcagttgttttacacaaattaatatggcttttaaaaaattatataatttcttggccgggcacactggctcatgactgtaatcccagcactttgtggggctgagaccagcaaattgctgagctcaggagtttgagaccagcatggacaacatggcaagaccctgtctctaaaaataaaaatgttttaaaagctgcagagttaacacagtagagaaatcatgtgcatataaaatatgctacgtttccttctgggattggtccaaaactgctcacaaaaaacttcaaaactctactttaagaagttccaggccgggcacggtggctcacgcctgtaatcccagcactttgggaggccgaggcaggcgaatcacaaggtcaggagttcgagaccagcctggccaacatggtgaaaccccgtctctactaaaaatacaataaaaattagctcagcatagaggcgtgcgcctgtaatcccaggtactcgggaggctgaggcaggagagtcacttgaacctgggaggcggaggttgcagtaagccaagatcgcgctactgcactccagcccaggcgacagagcgagactctgtctcaggaaaaaaaaaaaaaaaagaagctccaataccaaattaaagtcgtttttcaagtattggtaaatcttccataaacagggcaacacttaatgatcaatagatcattcgactagggcttatgctggtggatctcttttgtttaaagctccaaactcagctgggcttggtgcttcacgcctgtaatcccagcactttaggaggccaaggcaggtggatcacctgaggtcagaagttcgagaccagcctggccaacatagtgaaacccccgtctgtactaaaaatacaaaaattagacaggcgtggtggcacagaaaaaaaaagtcaattatcctatttggggatttaaattatactattttttatttttttgagacagagtttcactctgtcacccagtctggagtgcagtggtacaatcttagctcactgcaacctccacctcctgagttcaagcgattctcctgcctcagcctcccgagtagctaggattacaggcaccagccaccacctggctaatttttgtattttttgtagagacggggtttcaccatgttggccaggctggtctcaaactcctggcctcaagtgatctgcctgcttcggcctcccaaagtactgggattacaggagtgagccaccacaccacctcgaccagccttttcctctataaatttaaaaaaaaaaaaaggccaggtgcggaggttcatgcccgtaatcccagcactttgggacggatcactgtaattccagctactcaggagcctgaggcaggaggatcacttgaacccaggagtcggaggttgcagtgaaccaagattgctccactgcactccagcctgggcaacagagcaagactccagctcaaaaacaaagaaaaaagaaaaaggccaggtaaggtgacttacatctgtaatcccagtactttgggaagctgaggcaggaggattgcttgagcccaggagttcaaggctacagtaagctagtaagctatgattgcaccactgtgctgcagcctgggtgacagagccagaccctgtctcatgaaaaaaaaaaaaaaaaaaaaaagaaaagaaaagaaaggaagaaaagtgccaaattgtttctcaaagcagttctagtgatttatggtctcacttgcagtatatcagattcttcgttgtccagatctttttaattttttacagactaacaggtacaatacagtatcttactgtggtactaatttgagtttccctgatttcctctatagttgagcatctttacgtgtttagtggccactcatgtttcttcagatcttctgcctgccttcctccctcccttcctcccttcctccctcccttcctcccttcctcccttcctccttcccgccctcccttccttttttttttttttttttttttttttgagacggagtcttgctctgtcgcccaggctggagtgcagtggcgggacctcagctcactacaagctccacctcccaagttaaatcgattatccggcctcagcctcctgagtagctgggactacaggcgcccgccaccacgcccagctaattttttgtattttcagtagagacagggtttcaccgtgttagccaggatggtctcgatctcctgacctcatgatccgcccacctcggcctcccaaagtgctgggattacaggcgtgagcgtgagccaccgcgcccggccccttccttctttttttttaaaaagagagacgggtgctccctttggcagcagatatactaaaaaagagagacgggaaggccaggcacagtggctcacacctgtaatcccagcactttgagaggccgaggctggtggatcacctgaggtcagaagttcgagaccagcctggccaacatggtgaaaccccatctctactaaaaatacaaaattagacgggtgtggtagtgcatgcctgtaatcccagctactcaggaggctgaggcaggagaatcaatgaacccgggaggcgaaagttgcagagagatgagattgtgccattgcattccagcctgggcaacaagagcgaaactacgtctcaaaaaaaaaaatgcataagttttgtgaacaaatatttcataattttctctactgaggtcttagactttttttttttacattttacagaatacttcatatcttctttgtctctcccctttttttttgcaatcaccttgaaaacattaagattcagatggtcctctaattttcctgtctcctgttatcctttgtggtgtgtgtgtgtgtgtgtgtgtgtgtgtgtgtgtgtgtgtgtttgagacagagtctcactctgctggacaggctgcagtagagtgatggcatctcggctcgctgcaacctccgcctcctgggctcaagtgattctcctgcttcagcctcccgagtagctgggattatcggcatgtgccaccacccctagctaatttttgtatttttagtagagacggggtttcaccatgttggccaggctggtttcaaactcttgacctcaagtgatctgcccacctcagcctcccaaactgctgggattacagacgtgagccactgcgcccagcctgttatcctttgtttttggaaggaagcatttgaaaaagagtgactctatcttgaataggggctgggtaagatgaggctgagacctgctgggctgcattcccagtaggtgagacattcttattcacaggatgagacagaaggttggcaggactggtatcacaagatacgggtcacaaagaccctgctgataaaacaggatgctgacagggcacagtggctcactcctgtaatcccagcattctgggaggctgaggcgggcaaatcacttgatgccaggagatcaagaccagcctggccaacatggtgaaaccctgtctctaccaaaaatacaaaaattacccagacatggtggcaggcacctgtactcccagctactcaggaggctgaggcaagagaattgcttgaactcgggaggcagaagttgcagtgagccaggatcgcaccactgcactccagacggggcaacagatcgagactccatcccaaaaaaaaaaaaaaaaaagaaaacaaaaacaggacgcagtaaagaagccagccccaaaacccaccaacggtgatgaaactgacctctggtcatcctcactgctcattatacactaattataatacattaccatgctaaaagacactcccaccaggactatgacagtttacaagtgccacggcaacacccggaagttaccctatatggtctaaaagaaggaagaaccctcagttctgggaaatccctgccctttcctggaaaactcatgaataacccatacttcgtttagcatagaatgaagaaataactgtaagtatactcagtcaagcagcccatgccactgctctgcctatggaggagtcattctttattcctttcctattctttttttttttttctttttcgagacagagtcccactctgttgcccaggctggagtgcagtggcacgatcttgactcactgcaacctctgcctcccaggttcaagcaattctcctgcctcagccttccgagtagctggaattacaggtatgcaccaccacacccagctaatttttgtatttttaatagagatggagtttcaccaggttggccaggctggtctcgacctcctgacctcaggtgatccacttgcctcagcctcccaaagtgctggaattacagacgtgagccactgcgcccggctattcctttattttcctgataagcttgctttcaggtcgggtgtgatggttcacatgtgtaatcccagcactttgggaggcctaagtggcaggactgcttgagcccagaaattcaagaccaaccagcgccacatagtgagtgagaccatatttctattaaaaaaaaaacgaaaacaaaaaaaacttggccaacatgacgaaaacctgcctctactaaaaaaatacaaaaattagccaggaatggtaacacatgcctgtaatcccagctactcaggaggctgaggcaggacagtcacttgaacctgggaggcagagcttgcaatgagctgagatcaagccactgcactcgagcctgggtgacagagcgagactctgtctaaaaaaaaaatacaaaataaaaaaaagaacttatttatgtaaccaaataccacctgttcacctgttccccaaaaacctgttgaaacaaaaataaataaataaatataaagaaataatttttatttatttattttattatattttgagacgaagtttcactcttgtcgcccaggctggagtgcaatggcgtggtctcagctcactgcaacctctgcctcctgggttcaagcgattctcctgcctcagcctcccgagtagctgggactacaggcacctgccaccacgcctggttaattttgtattttagtagagacagggtttcaccatgttggtcaggctggtctccagctcctgacctcaggtgatccacccgccttggcctcccaaagtgctggaattacaggtgtgagccaccacacccagcctttaattttattttctatagagaggagtcccataatattacccaagctggtctcaaactcttggcctcaataaatcctcccacctcagcctcctgagtagctaggactacaggagtgcaccaccatgcccagctaatgtttttatgttttgtagagatgagggtctcattatgttgcccaggctcgtcttgaactcctgggctcaagtgatccatcctcctgcctcagcttcccaaagtgctgggattacaggtgtgagcaaacatgcccagcctaatattattaatacatcgtagctgtccatatttatagggtgcatgtgaaattttgttacgtgcatagaagtgcgattgtaggaaccaaggaaaaaacttctgcttcaccttctcaaggtttgctgataaatcagctcacaaaaggcagattaattggaaaaagggggatacaaattgcattcacacgtatctggggagaaccacaccacagcgtgattacccaccaccccaaaggcattcagacgcttatataccatcttcttttttttttttaagtagagactgggttttcgccatgttgccaggctggtcttgaactcctgcactcaagtgatcttcccctcttggcctcccaaagtggcgctgggattaccgccatgagccactgtgcctggcactatatacatatatatagatatgtatacatatctatatctatagatatctatatatctatagatatctatatatctatatctatatgtatacatatctatatatatagacatgtgtatatatatctatagatatctatatctatagatatagatatactatcttgcagatacagaaagaataggggtttggatcctggtaaaacaggttatggcagggggaagaaagaggaattctattgaggggacataaaagattactgggggctaggcagagtggctcatgcctgtaatcctagcactttgggaggccaaggtgggcagatcacttgaggtcaggagttcgagaccagcctggccaacatggcgaaaccctgtctctactcaaaacacaaaaattagccagtcatggtggcacatagctgaaatcccagctactcaggaggctgaggcaggagaatcacttgaacccaggaggaggaagttgcagtgagctgagatggcatcactgcactccagcctgggtgacagagtgagactccatctcaataaaaataaaaataaaaataaagcattgctggggagaatgaatggatttaggaacagagattaacttgtacataattctctttggaatttcaatgagcctgagggagacattatcttgcggaagagtctgttcaggtgtggttccattcttgattttatagaaaggagaagaaaaaaaaacaattgttttccttgttgaggggggatgtctggatcttaggcagagaaagtaacttcaacttcatcctgtgctgtgggagaaaagacggtcttttagacacagtttatcgttactgctgcttttcctgtgtttggcctataccttcctgcctctttgaatgatgggtagaccagagtttgtgagtcaatttgtattagctgtgtgatctggagcaagctactgttgtcagaggagtttgaaccacagtgattccatcttgaatagggggtgggtaaaatgaggctgagacctgctgatattgacaggaggcagccaattgcctaggccaataggggcgggtccgcggtgaaaccccacctccaacccgaagacggtttaaagcctgaaactgaaggtacaagtttaaaccttagaccggattgagagcttaccttcctgtttgtcgcgctttcctctgattgatccccacccttcgcctattttacatatacccaccctttcctaattggttttctactctttctttttttttttgacagagtctcgctctgtcacccaggctggagtgcagtggtgcaatctcggctcactgcaatctccaccccccgggttcatgtcattctcctgcctcagcctccccagtagctgggactacaggcgcctgctaccacgcccggctaattttttgtattttttagtagagatgaggtttcaccgtgttagccaggatggcctcaatctcctgaccttgtgatctgcccgccttggcctcccaaagtgctggcattacaggcatgagccaccgtgcccggcggttttctactctttcatgaccacctttgagtagtgtctttgctttaactcacctcattagcataaactccagtgtgatcaaaaggactcattataaataacaaaagacattcctccaactcctggacttaagggatccctcaagcaagcctcagcctcctgaatagctgggactactcctttttgcatactcacaagccaatcagcacacactccccaccctgtgcctataaaggctccagactcagtcagcaggggaaaagacgacctgacttcggggaaggcaacctgcacttcccatcccctctccagctcccctctccactgagagtcgctttcattgctcaataaaattctccaccttcatcatccttcaatcgtccgtgtaacttcattcttcctggatgctggacaagagcttgggacccagtgagtgaggatacccagaaaggctgtcacactgggcctttgccctcgcctgtgaagggcagctgtccccatgtgatgaggcaaggggccagctgatctgctgacatgtcaccatctgtggacagcagaactaaaggagcactgtaataacaccctctctgcagcttcggggacacgggcaccctcacctaggtgctgctgctttcccctcaaggtgacgtgcctgctctggccatgggccctgcatacagcttgctcctgtgttggtgcctggagaagccagctggccagatcccacacttagtcacttgtgtgctccctcctgcaaggggttgagcacagggggctgagtagatggggcatcccttccatgagtccagcgaaggtgcctagaaaaaccctgcatcaccactgagctactttcccaggaggtgaggcattcccagtcacaggatgacacaggagggtggcacaagacataggtgacaaaaaaccttgctgataaaacaggttgcagcaaagaagccggccaaaacccaccaaaaccaaggtggcgatgaaagtgacctctggtaggctgggtgcggtggctcaacgcctataatcccagcactttgggaggcccaggcgggcggatcacctgaggccaggagtttgagaccagcctgaccaacatggagaaactccgtctctactaaaaatacaaaaaattagctgggcgtggtggcacatgcctgtaatcccagctactcaggaggctgaggcaggagaattgcttgaacccgggaggcggaggttgcagtgagccaagatcgtgccattgcattctagcctggatgacaagagtgaaactccatctcaaaaaatagaaagaaagtgacctctggtcgtcctcactgctcattatgtgctaattataatatattagcatgctaaagacactcccatcagtgccatgacagtttagaaatgccgtggcaacatcaggaagttaccctatattgtctaaaaaggggaggaaccggccgggcgcagtggctcatgcctgtaatcccagcactttgggaggccaaggcaggtggattgcaaggtcaagagttcaagaccagcctggccaagatgtgaaaccctgtctctactaaaaatacaaaaattagctgggcatggtggcgggcgcctgtaatcccagctactccagaggctgaggcaggagaattgcttggacccaggaggcagaggtagcagtgagctgagattgcaccattgcactccagcctgggtggcagagcaagactctgtctcaaaaaaaagtggggaggaaccctcagttccaggaattgcccgtgcctttcccagaaaattcatgaataatccacccttgttgggcatgtaatcaagagataactataaaaaatatccagccagcaaccttaggggatgctctgcctatggagtagacattctttgttcctttactttctttttttttttttttttttgtgagatggagtctcactttgtcatccaggctggagtgcagtggtgcaatcttggctcactgcaacctctacctccccagctcaagcgattctcctgcctcagcctcccaagtagctgggattacaggcgtatgtcaccacgcccagctagtttttgtattttttagtggagacagggtttcaccatgttggctagtctggtcttgaactcccaatctcaaatgatccgcccaccttggcctatcaaagtgctgggattacaggtgtgagccactgtgcccagcctattcctttactttcttaatatacttgcttccactttactccatggactcgcctggaattgtttcttgcgtgagattcaagaactctctcttggctgggtgtggtggctcacgcctgtaatcccagcactttgggaggccgaggcaggtggatcatgaggtcaggagtttgagaccagcctgaccaacatggggaaaccctgtctctactaaaaatacaagaaaattagccgggcgtggtggcacgtgcctgtaatcccagctactcaggaggctgaggcaggagaatcacttgaacccgggaggcagagggcgccactgcagtccagcttgggcaatagagtgagaccctgtctcaaaaaaaaaaaaaaaaaaaaaaagattaaaaaagaaccctctcttggggtcttgattgggactcctttccagtaacagtgtgaaagaaaaataaaatcaccagaccccaaactcactatgtcaaagggcaaaaagctaagcttaggaactgagtcatacaggaaactgcattttcttttgttcctaaccagatagctgcaagattgaatgccacgtatctccacaggtggcttccctcaccctgaccatgtaaattcagcttaccttcacaggtacaggacaaataaaaaaatagaaatctggccaggcatgggggctcacacctgtaattccaacactttgggaggctggggtgagagaattgctggagctcaggggttggagatcaccctgggcaacccagtgagaggctgtctctacggaaaagattttaaattagcctggtgtggtagtgcacacctgtagtaccagctactcaggaggctgcattgggagtattgcttaagctcaggaggtcgaggctctagtgaggtgtgatcgcaccgctgcactccaacctgagcaacagaataagaccctgtctcaaaaaaaaaaaaaaaaaaaaaaaatcatggccgggcgtggtggctcacggctgtaatcccaacactttgagaggccaagggatcacctgaggtcacgagttcgtgaccagcctgaccaacatggtgaaaccccgtctctactatagacaaaaaattagacaggcatggtggcacatgcctgtaattccagctacttgggaagctgaggcaagagaatcacttgagctgaggcggcagaggttgcagtgagccaagattgcaccattgcattccagcctgggccacaagagtgaaactctgtctcaaaaaaataacaataatttttttttttttttgaggtggagtcttgccctgtcacccaggctggaatgcagtggcacgaccttggctcactgcaagctccgcctcccgggttcacgccattctcctgccccagcctcccgagtagctgggactacaggcgcctgccaccacgcccggctaaatgttttgtatttttagtagagacagggtttcaccatgttagccaggatggtctcaatctcctgatctcatcatccgtccgcctaggcctcccaaagtgctgggattacaggtgtgagccaccgcgtccggccaatatttttcttttttttaaatcatacttccaggtccnggtgcggtggctcacacctgtaatcccagcnctttaggaggctgaggtaggcagatcacaaggtcaggagttcgagaccagcctggctaacatggtgaaaccctgtctgtactaaaaactacaaaaattagctgggcgtggtggcacacacctgtaatgctagctactcaggaggctgaggcaggagaattgcttgagcccgggaggcggaggttgcagtgagctgagatcacactactgcactcctgcctgggggacaaagtgagactctgtctcagaaaaaaataataataataaatcatacttacccccaccctaagacaaaagcataattgacttcttcctctactctgtgtttactttatcttgtgtaaaatacagatatatttagcacaagatgaattcataatagactgttcctttttccctcctttcacatgtgttaaaagaaaaacttcagccaaattaaatttaagggagtttaattgagcaatgaacaatttgtgaatcgggcagcccccagaatcacagccgattcagacagactccagtgcagccatgtgatggaagaagatttatagacaaagggaaatgacatacagaagtcagtgaggtacaaaaacaactggattggctacaggtcggcatttgccttatttgaatatggctcaaacagttggctacatctgactggccaaaactcagtgattggcacagggtgtgggctatggccgagttatacctccgcttgttacagttcacaatgtacagaaaaacctttaggccaaattgaaatatgtaaagaagcagctttaggctaaacttgattaacgtatgtaagatgtggattcagtgatcatgaatgaaagcctcacagaaagtgaccacttatttcactaccttccctagtgtttttgttgttgttgtttgttttgttttgttttgttttttgagatggagtctcactatatcatccaggctggagtgcagtgaagcgatcttggctcactgcaagctccgcctcccgggttcacgccattctcctgcctcagcctcctgagtagctgggactacaggcgtccgtgaccacgcccggctaatttttttgtatttttagtacagacggggtttcactccgtgttagccaggatggtctcgatctcctgacctcgtgatctgcccacctcggcctcccaatgtgctgggattacaggcgtgagccaccgcacccggccaccttccctcctttttcatttctttcctccttcccctcctgcccactctttctcctttaaatattgaagtcctcaaaactctctggaaaagccatgggtcacagatttttctttggcttgggtctctttttcctgggcatgtcctcaaccttagcaaaataaacctctaaattcattgagtcccctcctctcccctcccctcctcttcccttcccttcccttcccctttctttgagacagggtctcactctgtcatccaggccagggtacagtggtgcaaatgatagggacaagaggcagggaaattctgggcagaagagggtgggtccccagagagggcattgccctcaagctgaaaaacctggaactgcagcccaaagtgagaactgacatccctgttttttgttttttggttttttttgagatggagtctccccttctgtcacccaggctggagtacaatggtgcgattttggctcactgcaacctccacctcccgggttcaagtgattctcctgcctcagcctcccgagtaatccgagccgggattacaggcacacaccaccacacccggctaatttttgtatttttattagagaaggggtttcactatcttggccaggctggtgttgaactcctgatttcgtgatccaccctccttgcctcccaaagtgctgggattacaggcatgagccaccgtgcccagccaacatcgctgctttcctgcttgaatgttgccttttccaaaaccacccttgacctgccctgcccccaatcctgtgcccataaaaaccccaggcccagctagcagagagaggagaagcagctggacgtcaaagaccatggttgaacattggagagaagtggcttgacttcagagggacagtttgctggagtagctttggaggagtatggccagggacagctggacttcagagaaagattaccttcctgctctgtccccttttcagctccccttcccgcttagagccactttcatcagcaataaagtctcctgcatttaccatcttcaattcatttgtgtgacctaattcctcctggacactgaaaaagaacttgggtgccacgagtgtggatgcaaaaggctgtcacaccgatcctccactaagctgttaacacttaagccattcacagacagcagagctaaaagagtactctaacactgcctctggggcttcaatagtctccggcaccctccgctagacactatcatggggctggtatggagatggctcttgctggcgcctaaaaactctcgccccgtctcctgcacctgctcacctgtgctccctctcctgtgaggggtggagtagtgagtgagtggagttcacccctaccagcaccaaagcagctggctagttcttaggcaacatcctgcttcacaatcacagctcactgcaacctcccacctcccaggctcaagtgttcctcctgcctcagcctcccaaagtgctgggattgcaggcatgagccaccatgcccagccagtcattttctttggtttacactactttacctccctgagccttattttccccaaatgagaggtagaaactcctctgttgggaggattaaatgagatatgtctcaaatttttgttgaaaactggacattttattttatcttattttacttatttttgagacaaggtctcactcactctgtcactcaggctagagtgcagtggtgcaatcttggctccctgaaagcttaacctcctgggctcaagtgatcctcctgtctcagcctcctgagcagctgggactataggctccagccaccacacttggctaatttatttttatttttattttttgtagagacagagtctcactatgttgcctaggatggtctggaactcctgggctcaagtggttctcctgactcggccccacaaagtgctggcattacaggtgtgagccatggcacccagcaaaaactggacattttaaatcatgtattgtaattctaaattctgatgtcctggtggtagctgttgtagattttgacattgttgttgtttgctggttgtctgtttggttgtttaataacttgaagccactaaaggaagcctctgttttgttttgtgattcttgcttttattttcaagactggcttcctaggggtccatctctgaatcagcattgcttagtgcccagccactgtttggtcagaaggtttccgtaaacaccttgacacactaagccttccttggtcaagaggacctgtgaggggggttgggacacaggttaaattatttcctcaagggcgttgacatttctttcttttttcttttttttttgagatggagtctgtctctatcactcaggctggagtgcagtagcatgatcttggctcactgcaacctctacctcccaggttcaagcgattctcctgcctcagcctcccgagtagctgggattacaggcgcccgccaccacacccaactaatttttgtattttagtagagatggggtttcaccaccatgttggccaggctggtctggaaccctcgacttcaagtgatccacctgcctcagcctcccagagtttgggattacaggtgtgagccaccacacctggcctctttttttcttttcttttctttttttttttttttgagatggagtttcgctcttgttgcccaggctggagggcaatggcatgatctcggctcactgcaacctctggctcccgggtacgagcaattctcctgcctcagcctcccaagtagctgggactatagacatgcgccacacgcctaattgtttgtatttttagtagagatggggtttcaccatgttgaccaggcaggtctcgaactcctgacctcaggagatctgctcacctcagcctcccacaggtatgagccaccatgctcagctttattttgttttattttattttattttattttattttattttatttgagacagagtctcgctctgtcgcccaggctggagtccagtggagctatctcggctcactgcaacctctgcctctcaggttcaagcaattctcatgtctcagtctctcaagtagctgggattacaggtgtgtgccaccacgcccagataatttttttattattagttttagtagagtcggggttttgccatgttgcccagcctggtcttgtactcctgacctcaagatatccacccgcctcggcctcccaaagtgctgggattataggcatgagccaccatacccggcctctttttttaatttttatggatatgtggtaggtatatgtatttatgaggtacatgagatattttgatacaggcatacaatgcatcataatcacatcagagtaaatggggtatccatcatctcaaacatttatcatttctttgttacaaacattccaattatgctcttctagttatttttaattgcataataaattattgttgactgcccaggcacagtggctcacgcctgtaatcccagcactttgggaggccgaggcaggtggattgcctgaagtcaggagttcaagaccagcctgaacaacatggagaaatcccgtctctactaaaaatacaaaattagccaggtgcagtggcgcatgcctgtaatcccagctacttgggaggatgaggtaggagaatctcttgaacccaggagacagaggttgcggtgagccgagatcgcaccattgcattccagcctgggcgacattttgtatgacattgcttaaccataaactcttcatttgcttttgtttttcttttctttttttttgagacggagtctcgctctgttgcccacgggttccaccgtgttagccaggatggtctcgatctcttgaccttgtgatccgccagcctcggcctcccaaagtgctgggattacaggtatgagccaccacccacggcctgtttttcattttattgtctgagaatcccttgcagcctgggggcatagattcggggaattctcccactcctcactttcttttcttccttaggaatatcttggccaggtgcagtggcttacacctgaaatcccagaactttggcaagctaaggcaggaggaatgcttgaggtcaggagtttgagacccgcctggggaacaaagtgagatcctatctctatttaaaaaataagaataatggccagtcttgggggatcactcctgtaatcccagaactttggaaggcagaggtgggaggatcacttgaacccacaaggttgaggctgcagtgagacgagattgttctgccacactccagcctgggtggcagagtgagaccctgtctcaaaacaacaacaacaattaaaaaaaaaaaaaaaagaatatctttatttctgacttgggggcttgcaggtggctgaactatttctgtggaatgatctggaaacccacacatatgtgaagccaggtcagggctttgaattctttgaattatcaggctgaggcaggcaagtttgtcactcctcaaggtagatgaactcatgatctccagtctaccctttcacagactgtgtggcttttcaaggatcacatttcaaagggatctcaggcacaatttccatttgaactgggtccagatacaatttccatttgaactggacctcaatgtagtagtctctcattgtttgaagtatcactcggagttctttgtctcacaaccatgaaaattaaggagcatgggcaccaaggatgaggctggagtgaaagtttaataagctaaagaagaaagctctctgccgtggagagggggtctgaaagaggccattattatttatttatttatttgagacagagtttcactcttgttgcccaggctggagtgcaatggcatgatctcggctcaccacaacctccacctcccgggttcaagtgattctcctgcctcagcctcctgagtagctgggattataggcatgcaccaccacacccagttaattttgtattttcagtagagacggggtttctccatgttggtcaggctagtgtcgaactctcctcaggagatccacccacctcggcctcccaaagtactgggattacaggcatgagccaccgtgcccagccaaaagaggccatttttacagttgaatgcaaaagcttttataagaaaccaatgagggctgggcatttcatttacataaggtgtgaatttctcctatctccaccccatccttctaatgcgcatgggggcccttagcttaatttactccatattgctttaatttttttttaaattagccatattttgcaaaaaaaaaaaaaaaagtgcatacatcctataatgtcctattttatctagtaactctagcctagggcctcatctcctgacctgacacgggcattaaagcaagctcctggccactgaccctcagtgaccattcagagcagagacgtgatcaattcattgcctatcatctgtggcgtttagtttcctctttgtttctggattcctaggatttccctttctttcatgggagctcaactgggcattgaaaataattttttttaattgtattaaacatttcaaagagtttcaataggaaggttttctggttctccctgcctggcaaatcagaaacatatggagaggtttttcagtacatgtttcatagcccttctttctctgccaaaattctgatatagccccctggagaacaacaaaatctggatggagtttgggccagaattggggtggggtatagattggctcctatgtgcttggaaaataactcacaacccactttcccagtgttgattcaattctttgtgtcttagacattttttctcattttgttttgtttgagacagggtctcgctctgtcacccaggctggagtacagtggcacaatcttagctcactgtagtcttggcacccccgggctcaagccatcctcctgcctcagcctcccacatagctgggactacagatgcgcaccaccatgcccggctaagtcttttttttttttttttttttttttgagacggagtctcgctctgtcacccaggctggagtgcagtggcgtgatctcggctcactgcaagctccgcctcccaggttcacgccattctcctgcctcagcctccagagtagctgctgggactacaggtgcccactaccacacccgactaattttttgtatttttagtagagatggggtttcaccatgttggccaggatggtctcgatctcttgacctcgtgatccacccgcctcggcctcccaaagtgctgggattacaggcgtgagccaccacgcccggccaattttttgtatttttagtacagacagggtttcaccatgttagccaggttggtcttgatctcccgaccttgtgatccgcccgtcttggcctcccaaagtgctgggattacaggtgtgagccagcacgcccggccctggctaagtcttagacttttgtttccccaacgtctaacacagtttcatggcccatagaagatactgagtgcatgaatgaggaatgcacgaatgactcttggcagacacttcgtggtcagcataaaagagggagaaagctggctgggcaaagtggctcacacctgcaatcccagcactttgggaggccgaggccagtggatc

SEQ ID NO: 32002 - DNA, 4078 bp, Homo Sapiens
gcgggggcgcgccccggggtgggcacggggcagtcgtcgggagcgcgcgagtgcgccggaggacggggagagaccccgagacccccggggcacgaagtccagagcgagcgggttatgcctccgcctcgttgccctgaaagccgcagcgacagcgaaaagggctaagattcggccatgagcagcgcccctcggcgccccgccaagggcgcagattctttctgtacgccagagccagagagcttgggccctgggacgcctgggttccccgagcaggaggaagacgaacttcaccgcaccctgggcgtggagcggtttgaggagatcctacaggaggccgggtctcgtggaggggaggagccaggccgcagctatggggaggaagactttgagtaccaccgccagtcctcccaccacatccatcacccactgtccacccacctgcctccggatgcacgccgccgcaagacaccccagggcccaggacggaagcctcgaaggcgcccgggagcctccccgactggagaaaccccgaccattgaggagggggaggaagatgaggatgaggccagcgaggctgagggggcccgggctctcactcagccgtcccctgtctccacaccctcctcggtgcagttctttctccgagaggatgacagtgccgaccggaaggcagagaggaccagtccatcttcccctgcaccactgccccaccaggaggcgactcctcgggcctccaaaggggcccaggctggaacccaggtggaggaggcggaggcggaggcggtggcggtggccagtggcacagcagggggtgacgacgggggtgcctcggggcgccccctgcccaaagcccagcctgggcaccgcagctacaaccttcaggagaggaggcgcatcgggagcatgactggggctgagcaggcactgctgccccgggtccccacggatgagattgaggcccagacgctggccacggccgacctagacctcatgaagagtcaccggtttgaggacgttcctggggtgcggcggcacttggtgcggaagaatgccaaaggttccacacagagtggccgagaagggcgggagcctggccccacacctcgggctcgaccccgggccccccacaagccccatgaggtgtttgtggagctgaatgagttgctcctggacaaaaaccaggagccccagtggcgggagacagctcgctggatcaaatttgaagaggacgtggaggaggagaccgagcgctgggggaagccccacgtggcctccctctccttccgcagtctcctggagctccgcaggaccctggcccatggggctgtgctcttggatctggaccagcagaccctgcccggagtggcccaccaggtggtggagcagatggtcatctctgaccagatcaaggccgaggatagggccaacgtgctgcgggctctgctgttgaaacacagccacccaagtgatgagaaggacttctccttcccccgcaacatctcagctggctccctgggctccctgctggggcatcaccatggtcagggggctgagagtgacccccacgtcaccgagcctctcatgggaggtgttcctgagacccggctggaggtggagcgagagcgtgacgtgccgcccccagcaccaccagctggcatcacccgctccaagtccaagcacgagctgaaactgctggagaagattcctgagaatgccgaggccacggtggtccttgtgggctgcgtggagttcctctcccgccccaccatggcctttgtgcggctccgggaggctgtggagttggacgcagtgttggaggtgccggtgcctgtgcgtttcctcttcctgctgctgggcccgagtagtgccaacatggactaccacgagatcggccgctccatctccaccctcatgtcagacaagcaattccacgaggcagcctacctggctgacgagcgggaggacctgctgacggccatcaacgccttcctggactgcagcgtggtgctgccgccttcagaagtgcagggcgaggagctgctgcgctctgtggcccacttccagcgccagatgctcaagaagcgagaggagcagggccggctgctacctacaggggctgggctggagcccaaatctgcccaagataaggcgctcctgcagatggtagaggcggcaggggcagctgaagatgatccccttcggcggacggggcggccctttggggggctgatccgagatgtgcggcgccgctatccccactacctgagtgacttccgagatgcacttgaccctcagtgcctggccgcagtcatcttcatctactttgccgccctgtctcctgccatcacctttggggggctgctgggagagaagacacaggacctgataggggtgtcggagctgattatgtccacagcgctccagggcgtggtcttctgcctgctgggtgcccagcccctgttggtgatcggcttctcagggcccctgctggtctttgaggaggccttcttctcgttctgtagcagcaaccacctggagtacctggtgggccgtgtgtggatcggcttctggctggtgttcctggccctgctcatggtggccctggaggggagcttcctggtccgcttcgtctcccgcttcacccaggagatcttcgccttcttgatctcactcatcttcatctatgagaccttctacaagctggtgaagatcttccaggagcaccccctgcatggctgctcagcctccaacagctcagaggtggacggcggtgagaacatgacatgggccggggcaagacccacgctggggccgggcaacaggagcttggctgggcagtctgggcaggggaagccccggggccagcccaacacggccctgctgtcgctggtgctcatggccggcaccttcttcatcgccttcttcctgcgcaaattcaagaacagccggttctttcctggccggatccggcgggtgattggggactttggggtgcccatcgccatcctcatcatggtgcttgtggattacagtattgaggacacctatacccagaagctgagcgttcccagtggattctcggtgactgccccagaaaagaggggctgggtcatcaaccccctgggagagaagagccccttccctgtgtggatgatggttgccagcctgctgcccgccatcctggtcttcattctcatcttcatggagacacagatcaccacgctcatcatctccaagaaggagcgcatgctgcagaagggctccggcttccacctggacctgctgctcatcgtggccatgggcggcatctgtgccctctttggcctgccctggttggctgctgccactgtccgctctgtcactcacgccaacgcgctcactgtcatgagcaaggctgtggcacctggggacaagcccaagattcaggaagtcaaggagcagcgggtgacggggctgctggttgccctgcttgtgggcctctccatagttatcggggatctgctccggcagatccccctggccgtgctctttggaattttcctgtacatgggagtcacctcccttaacgggatccagttctatgagcggctgcatctgctgctcatgccgcccaaacaccacccagatgtcacttacgtcaagaaggtccggaccctccgtatgcacctgttcacggccctgcagctgctctgcctggccctgctctgggccgtcatgtccacagctgcctccctggccttccccttcatcctcatcctcacagtgccgctccgcatggtggtgctcacccgtatcttcaccgaccgagagatgaaatgtctggatgctaacgaggcagagccggtgtttgatgagcgggagggtgtggacgagtacaatgagatgcccatgcctgtgtagccgccaccgagggacagccgagggaccgatggacgaggggacaggctggtgggatgggttccccctcccatgcccctccctcctttttatttaagtgaataatttaaagtattctcctcccccactgcccctgcagtaaagtgctttggcccccaaaaaaaaaaaaaaaaaaaaaaaa

SEQ ID NO: 32003 - DNA, 5892 bp, Homo Sapiens
ccaggagagcggcgtggacgcgtgcgggcctagaggcccacgtgatccgcagggcggccgaggcaggaagcttgtgagtgcgcggttgcggggtcgcattgtggctacggctttgcgtccccggcgggcagccccaggctggtccccgcctccgctctccccaccggcggggaaagcagctggtgtgggaggaaaggctccatcccccgccccctctctcccgctgttggctggcaggatcttttggcagtcctgtggcctcgctccccgcccggatcctcctgaccctgagattcgcgggtctcacgtcccgtgcacgccttgcttcggcctcagttaagcctttgtggactccaggtccctggtgagattagaaacgtttgcaaacatgtcccggatcgaaaagatgagcattctgggcgtgcggagttttggaatagaggacaaagataagcaaattatcactttcttcagcccccttacaattttggttggacccaatggggcgggaaagacgaccatcattgaatgtctaaaatatatttgtactggagatttccctcctggaaccaaaggaaatacatttgtacacgatcccaaggttgctcaagaaacagatgtgagagcccagattcgtctgcaatttcgtgatgtcaatggagaacttatagctgtgcaaagatctatggtgtgtactcagaaaagcaaaaagacagaatttaaaactctggaaggagtcattactagaacaaagcatggtgaaaaggtcagtctgagctctaagtgtgcagaaattgaccgagaaatgatcagttctcttggggtttccaaggctgtgctaaataatgtcattttctgtcatcaagaagattctaattggcctttaagtgaaggaaaggctttgaagcaaaagtttgatgagattttttcagcaacaagatacattaaagccttagaaacacttcggcaggtacgtcagacacaaggtcagaaagtaaaagaatatcaaatggaactaaaatatctgaagcaatataaggaaaaagcttgtgagattcgtgatcagattacaagtaaggaagcccagttaacatcttcaaaggaaattgtcaaatcctatgagaatgaacttgatccattgaagaatcgtctaaaagaaattgaacataatctctctaaaataatgaaacttgacaatgaaattaaagccttggatagccgaaagaagcaaatggagaaagataatagtgaactggaagagaaaatggaaaaggtttttcaagggactgatgagcaactaaatgacttatatcacaatcaccagagaacagtaagggagaaagaaaggaaattggtagactgtcatcgtgaactggaaaaactaaataaagaatctaggcttctcaatcaggaaaaatcagaactgcttgttgaacagggtcgtctacagctgcaagcagatcgccatcaagaacatatccgagctagagattcattaattcagtctttggcaacacagctagaattggatggctttgagcgtggaccattcagtgaaagacagattaaaaattttcacaaacttgtgagagagagacaagaaggggaagcaaaaactgccaaccaactgatgaatgactttgcagaaaaagagactctgaaacaaaaacagatagatgagataagagataagaaaactggactgggaagaataattgagttaaaatcagaaatcctaagtaagaagcagaatgagctgaaaaatgtgaagtatgaattacagcagttggaaggatcttcagacaggattcttgaactggaccaggagctcataaaagctgaacgtgagttaagcaaggctgagaaaaacagcaatgtagaaaccttaaaaatggaagtaataagtctccaaaatgaaaaagcagacttagacaggaccctgcgtaaacttgaccaggagatggagcagttaaaccatcatacaacaacacgtacccaaatggagatgctgaccaaagacaaagctgacaaagatgaacaaatcagaaaaataaaatctaggcacagtgatgaattaacctcactgttgggatattttcccaacaaaaaacagcttgaagactggctacatagtaaatcaaaagaaattaatcagaccagggacagacttgccaaattgaacaaggaactagcttcatctgagcagaataaaaatcatataaataatgaactaaaaagaaaggaagagcagttgtccagttacgaagacaagctgtttgatgtttgtggtagccaggattttgaaagtgatttagacaggcttaaagaggaaattgaaaaatcatcaaaacagcgagccatgctggctggagccacagcagtttactcccagttcattactcagctaacagacgaaaaccagtcatgttgccccgtttgtcagagagtttttcagacagaggctgagttacaagaagtcatcagtgatttgcagtctaaactgcgacttgctccagataaactcaagtcaacagaatcagagctaaaaaaaaaggaaaagcggcgtgatgaaatgctgggacttgtgcccatgaggcaaagcataattgatttgaaggagaaggaaataccagaattaagaaacaaactgcagaatgtcaatagagacatacagcgcctaaagaacgacatagaagaacaagaaacactcttgggtacaataatgcctgaagaagaaagtgccaaagtatgcctgacagatgttacaattatggagaggttccagatggaacttaaagatgttgaaagaaaaattgcacaacaagcagctaagctacaaggaatagacttagatcgaactgtccaacaagtcaaccaggagaaacaagagaaacagcacaagttagacacagtttctagtaagattgaattgaatcgtaagcttatacaggaccagcaggaacagattcaacatctaaaaagtacaacaaatgagctaaaatctgagaaacttcagatatccactaatttgcaacgtcgtcagcaactggaggagcagactgtggaattatccactgaagttcagtctttgtacagagagataaaggatgctaaagagcaggtaagccctttggaaacaacattggaaaagttccagcaagaaaaagaagaattaatcaacaaaaaaaatacaagcaacaaaatagcacaggataaactgaatgatattaaagagaaggttaaaaatattcatggctatatgaaagacattgagaattatattcaagatgggaaagacgactataagaagcaaaaagaaactgaacttaataaagtaatagctcaactaagtgaatgcgagaaacacaaagaaaagataaatgaagatatgagactcatgagacaagatattgatacacagaagatacaagaaaggtggctacaagataaccttactttaagaaaaagaaatgaggaactaaaagaagttgaagaagaaagaaaacaacatttgaaggaaatgggtcaaatgcaggttttgcaaatgaaaagtgaacatcagaagttggaagagaacatagacaatataaaaagaaatcataatttggcattagggcgacagaaaggttatgaagaagaaattattcattttaagaaagaacttcgagaaccacaatttcgggatgctgaggaaaagtatagagaaatgatgattgttatgaggacaacagaacttgtgaacaaggatctggatatttattataagactcttgaccaagcaataatgaaatttcacagtatgaaaatggaagaaatcaataaaattatacgtgacctgtggcgaagtacctatcgtggacaagatattgaatacatagaaatacggtctgatgccgatgaaaatgtatcagcttctgataaaaggcggaattataactaccgagtggtgatgctgaagggagacacagccttggatatgcgaggacgatgcagtgctggacaaaaggtattagcctcactcatcattcgcctggccctggctgaaacgttctgcctcaactgtggcatcattgccttggatgagccaacaacaaatcttgaccgagaaaacattgaatctcttgcacatgctctggttgagataataaaaagtcgctcacagcagcgtaacttccagcttctggtaatcactcatgatgaagattttgtggagcttttaggacgttctgaatatgtggagaaattctacaggattaaaaagaacatcgatcagtgctcagagattgtgaaatgcagtgttagctccctgggattcaatgttcattaaaaatatccaagatttaaatgccatagaaatgtaggtcctcagaaagtgtataataagaaacttatttctcatatcaacttagtcaataagaaaatatattctttcaaaggaacattgtgtctaggattttggatgttgagaggttctaaaatcatgaaacttgtttcactgaaaattggacagattgcctgtttctgatttgctgctcttcatcccattccaggcagcctctgtcaggccttcagggttcagcagtacagccgagactcgactctgtgcctccctccccagtgcaaatgcatgcttcttctcaaagcactgttgagaaggagataattactgccttgaaaatttatggttttggtatttttttaaatcatagttaaatgttacctctgaatttacttccttgcatgtggtttgaaaaactgagtattaatatctgaggatgaccagaaatggtgagatgtatgtttggctctgcttttaactttataaatccagtgacctctctctctgggacttggtttccccaactaaaatttgaagtagttgaatggggtctcaaagtttgacaggaaccttaagtaatcatctaagtcagtacccaccaccttcttctcctacatatcccttccagatggtcatccagactcagagctctctctacagagaggaaattctccactgtgcacacccacctttggaaagctctgaccacttgaggcctgatctgcccatcgtgaagaagcctgtaacactcctctgcgtctatcctgtgtagcatactggcttcaccatcaatcctgattcctctctaagtgggcattgccatgtggaaggcaagccaggctcactcacagagtcaaggcctgctccctgtagggtccaaccagacctggaagaacaggcctctccatttgctcttcagatgccacttctaagaaaagcctaatcacagtttttcctggaattgccagctgacatcttgaatccttccattccacacagaatgcaaccaagtcacacgcttttgaattatgctttgtagagttttgtcattcagagtcagccaggaccataccgggtcttgattcagtcacatggcatggttttgtgccatctgtagctataatgagcatgtttgcctagacagcttttctcaactgggtccagaagagaattaagccctaaggtcctaaggcatctatctgtgctaggttaaatggttggcccccaaagatagacaggtcctgatttctagaacccgtgactgttactttatacagcaaaggaaactttgcagatgtgattaaagctaaggaccttaagacagagtatcctgggggtggtggtggggtgggggggggtcctaaatgtaatcacgagtaagattaagagcaaatcaattctagtcatatattaaacatccacaataaccaagatatttttatcccaagaatgcaagatttcagaaaatgaaaaatctgttgataaatccatcactataataaaaccgaaggtgaaaaaaattctgaaaaaaaaaaaaaaaaaaaaaaaaaaaa

SEQ ID NO: 32004 - DNA, 22693 bp, Homo Sapiens
atgagcgggatcgtgtgcagaagaaaaccttcaccaagtgggtcaacaagcacctcatcaaggttggtggcgcatgctggtgcgtgtcacaggggctgaggctgtgggaggcgctgagggagggtggcccctgccgcccaaggctgtccccatgctgcctgtgtgctcacctttcatctctgaaacctgttattttctgtcctctttcttccctacgcctgctcctgcctctctcttcctcctcttccttctggtctttcctggtctctcctcgcagcactggcgggcagaggtaggtgcctccgtggggcagggtgtgttccgtgggctcccgggagactcagcccccgcctccttccctctgggaccagcacccactctgtagatcagccactcagggcctattggtggctctgggggactggccacctcagccgctgctgtccccacaggcccagaggcacatcagtgacctgtatgaagacctccgcgatggccacaacctcatctccctgctggaggtcctctcgggggacagcctgccccgggagaaggggaggatgcgtttccacaagctgcagaatgtccagattgccctggactacctccggcaccgccaggtaaggctgcccggcaggccgtgggccccacccagacccctcaccaagccagccccgccctgtgggccgtgaccgagagcccctcgctcacaggtgaagctggtgaacatcagggatgatgacatcgctgacggcaaccccaagctgacccttggcctcatctggacaatcattctgcacttccaggtagaacggctgcccccaggacccccaccccctgcaggagtttccagggtagcctgggctccttggctggcgggttgatccgctttctggctagggcgtggcctgggaggtgactggcgccgtaggtatggtggcacctgggtgccttcctgccagccgcaaccctggactggatctgtggcctgagggtacaggcctctctctgaggccacctatccgtgccctctggccctggctgggcagggcccagagcctccctgtggaggaatgcaggccccggtgcctgccctggggaggcttctgcgcagcacaggctgactcacccgctgcttgtcctggctgcacaggaaaccacaaatctgagagctgagcaggcagagcctggtgctggcacggcagctgagtcacacaggctggcaggacgacaggcagctaggggtgggtgggcagaacctggcctgagcatgccactgagtgtaaagccaggctgccagaggccccacctgccagcctgcaaccatcgatggagctcgacccccagccttttccaggcctgggggttctgggccaggtttagtggtacacttgtgggttcctcttatgcccactgcccttccactctgctccatcccagctccgggaggtgcagggtgcagcctagccctccccagctaggggagtgggcacctgctgtgtggtggcagtgagggttgggggttctgagctgcgtggtggcagctgccaccggctggagtggctggacttgtggccccgaggcatggccagtcccagcagcttcccaacagggaagggccctggagcccggtgctgccctggctggtttggtggccccatgcactccccctgggtgctgagctacccctgcccctgtgcatgtggctgtgggcacagagcaggcctggtggctgtggctgagctgtggcctcctctctgctgtgagcagatctcagatatccaggtgagtgggcagtcggaggacatgacggccaaggagaagctgctgctgtggtcgcagcgaatggtggaggggtaccagggcctgcgatgcgacaacttcacctccagctggagagacggccgcctcttcaatgccatcatccaccggcacaagtacatggccccgggggcagggggctgtgggctgggggcacccccacagcgcctccactaggcaacttcagacacgttggggcagggaggagggcaggaggaacagggatgagtgccagctggccgcctcggggtggtggagttcagggcccagccccaccctggtgtccttcagaagcaccaccacttgatctcaagactggagggcccgcgggctgctggtcctcacagccaggtgcatgtgccctctgtggacgcctccggaggggcctggtggggagggtggctgcagggaaccccagctgcctggcaccctcagctctgcgcagtcctctgtgctgtgcccctgggcttctgggtgtgggggtggcagggtgctctcagctctgcccatgtgacagtgtatttttcagggtgagtgttgggggggtccatggttgctgggatgtgtgaggagccggcctgtgcacccgcctgtgtggtgtggccgctggtcttgtcccacccacctgaccagccacctgcttgtcccaggcccctgctcatcgacatgaacaaggtgtaccggcagaccaacctggagaacctggaccaggccttctctgtggcggagcgggacctgggagtgacgcggctcctggaccctgagggtacgtctgcgtggccttcctccctgtcccttcccctgctgcctgccccagagccaccgctgagctgcccttccctgcagacgtggatgtccctcagcccgacgagaagtccatcatcacctacgtctcgtcgctgtatgacgccatgccccgcgtgccggacgtgcaggatggggtgagggccaacgtgagtggggggcccggagggcagggggcttgggcctggacgccccgacgacccctgacagccgcccgtgcctgcccgcaggagctgcagctgcgctggcaggagtaccgggagctggtgctgctgctgcttcagtggatgcgacaccacacggccgcctttgaggaacgcaggttcccctccagcttcgaggagattgaggtgggcctgccgtggggggcggggtcctgggcctgccctgagagcccggcgtggttgccgacagcttcgtccctggcagatcctgtggtctcagttcctgaagtttaaggagatggagctaccagccaaggaggccgacaagaacaggtccaagggcatctaccaatccctggaggtgagtgggaccgctggaggggtgggtggtgtcctggaacgccccaggcctgaaaggttcttccggagccgacctggccctgcctttgggaccagggctgtcccaggtctggtgggctggggtctgaaggcccagcgccccaccccctgccccctgcctatagggcctgagtgtggcccctgtctacagggagcggtgcaagcaggccagctcaaggtgccccctggctaccacccgctggatgtggagaaggagtggggcaagctgcacgtggccatcctggagcgggagaagcagctccgcagcgagtttgagaggtgggtggggccctgtggtggcaggggaaccacccgagggtgtgtcactgcctgggaaggaaacccccctccccgccccgcccccggcgggggaacccaagctcccactcgccttaggacagtgggccacagccagggagaccggagcgggaggcgagctgcagtctgtggccagggctgtgccggacccggccaacgcggccccttccctgtgctgctgctgcaggctggagtgtcttcagcgcatcgtgaccaagctgcagatggaggcggggctgtgtgaggagcagctgaaccaggccgacgccctgctgcagtcggtgagggggtgtggggcaggcagtgggcgggagggaggccggaggagcctgccccgccctgcagccctaaagccaggagggggctgtccccctgggctcctggggcaggggcaggggcaggggcggggcatgtggtggggaatccaggcctgagctcctccctcctcgtgtgcagctaactctcactgcctgctttgggcagagttggtttttggccacggggcagaacccacgctgggctgccttgcccccgccaggccccctccccgacagcggcttactgttaggggaggggttgggggagggcccaacccactgctgattgcccaggaggacagggcccacgtggcattacaggaggagttacccagggtgggtgatggaggatgaggcccaggaccccacagacatggtcatgggggtctcggttcttggactgggctaagtactctggacttggtcccaatcccccagaaggccagtaggaagatgtgtgaggtgggcagggagggaaggggaaggacagggatggaggcagtggcccactgaggctgaggaagcggctgagggtggccgtcttggccggggcccctgtgaggtcagagggggatcagctgtgctccgagtcatggcaacgaccttgcaggatgtccggctgctggctgcaggcaaagtgccacagcgggcgggggaggtggaacgggacttggacaaggcggatagcatgatccggctgctcttcaacgacgtgcagaccctcaaggatggacggcacccgcagggcgagcagatgtaccgcaggtgggccccgccctgccctccctgaagcccaggtacacacggccccaggcccgccaacacctacctgagtcctctgctgccccagggtgtaccgtctgcacgagcgcctggtagccatccgcaccgagtacaacctacggctgaaggcaggcgtggcggcccctgcaacccaggtggcccaggtgactctgcagagtgtgcagaggcgccccgagctggaggactccactctgcgctacctgcaggacctgctggcctgggtggaggagaaccagcaccgtgtggatggcgctgagtggggtgtggacctgcccagcgtggaggcgcagctgggcagccaccgaggcctgcaccagtccatcgaagaattccgggccaagatcgagcgggcacggagtgacgaggtgggtggcgctgaccgatgggcagtgcgggggtgggccgggcccagccactgcagacctcaccgtctcatctgttgcagggccagctctcccccgccacccggggtgcctaccgtgactgcctgggtcggctggacctgcagtacgccaagctgctggtgagtgggggcagggccacccgggggaggtgggtaccccgcggcctgctgacacgcaccctcctgcccacagaactcctccaaggcccgcctcaggtccctggagagcttgcacagctttgtggcagccgccactaaggagctaatgtggctgaatgagaaggaggaggaggaggtgggcttcgactggagcgaccgcaacaccaacatgaccgccaagaaggagagctactcggtgagcggtggcccagctgccctgaaccccacagccccctccccagctgtgccctggccgtcccctatggtcagagaccagtgggggccctgggtcgagtttgctgggagcgtggcagagccgggtgtggccggccgtccctgagaccctttgctctggtgccaggcgctgatgcgggagctggagctgaaggagaagaagatcaaggagctccaaaatgctggggaccggctgctgcgggaggaccacccggcccggcccacggtggaggtggggctccctgggtaagggcggggctgcggggggggccgtgccgggtccccaggcggggcggggcggggcctgaccgggacctgctgtcccgcagtccttccaggcggccctgcagacgcagtggagctggatgctacagctgtgctgctgtatcgaggcacacctgaaggagaacgctgcctactttcaggtgagaaccggagccccctccgcactgtggctcagcggcagccttgcaggagcccctggaccccctcggcagctccaatcaggagccctcctgtctgcagacgttgccagctgctgcctgcagcctgaccggggccttggacaggggtgctccccaggcctcctgggggctttgccactccttcctcagtgcccccgtcttgggcctgccctgggacaactgtgggctggggctctggtcccaggtagcctggcgtgaccccctcccgctgccccagttcttctcagatgtgcgggaggccgaggggcagttgcagaagctgcaggaggcactgcgtaggaaatacagttgtgatcgctccgccaccgtcacccggctggaggacctgctgcaggatgcccaggtgagggagggggtgtgcaggggcgtgtcaggaggggctggcctggagtctgggctgcacgggtactctggagattagggggcaactggaggggccagcaggagttgggaggcaccatgggaggtgtagaggtcagccgaagcgggaatgaggcaggatgttctgggctgcatgggtactctggagattagggggcaactggaggggccagcaggagttgggaggcaccatgggaggtgtagaggtcagccaaggggggaatgaggcaggatgtggggagccgagaggcagccggtccaagccgggccgcccccatctccatagccacagagtgagtggaagcctgaagtcagcagctgccgccagcccttgtgctgtagaaggggcaccgccagcccttgtgctatagaaggagcactgccagcccttgtactatagaaggggcaccagctgtttggcctgagatctggagcgggcagagtggaactgggctttgtgctctgggagcaggggtgggatcacccaggagggcgggtgcacagtggggagtgacagggaagagggactggagactgaaatggcctctgaggtcggcagggctgggccggggggagagccggcagctcccaggtgtgtgccgtcctgcggcctggcccccgcagaggggtgggatgggaggaggcagtaccttctgcagcccgcaggggaggggcaaggggcgagggcattgtagggaccagagcgtagctgggaggacatggtgggtgagctggggtgagaggagggtgccctgtctgggttgggaaggagcgagggtgcatgggtctgcttggggccaacccccggggcctgtcccagctatacctcctgcttccaagtgctgccaccccgggagcatcaggagggccccacaggcctggtcccggggtctgggggtgcctggggcaggcctgtgggtctccatggccctcgtctggatgctgcccctcccccacaggacgagaaggaacagctgaacgagtacaagggccacctctcaggcctggccaagcgggccaaggccgtcgtgcagctgaagccccgccacccagcccaccccatgcggggccgcctgcccctgctggccgtgtgcgactataagcaggtggaggtgagtgcaggccgggggtccactggggggcgtggccaggcagggcagggtgtggccatgtcctcaccgactctgcccgtcccaggtgactgtgcacaagggtgacgagtgccagctggtgggccctgcacagccgtcccactggaaggtgctcagcagctccggcagcgaggccgccgtgccctccgtgtgcttcctggtgcccccgcccaaccaggaggcccaggaggccgtcaccaggtgggtggcgggggctcagcaggtgggggctggaaggcgggtggggcgctggtgacgctgactgtagccctgacctgccaggctggaggcccagcaccaggccctggtcacgctgtggcaccagttgcacgtggacatgaagagccttctggcctggcagagccttcgccgcgacgtgcagctcatccgctcgtggtccctggccacggtacgcctgcccccgagccgggggctctctgggtgggaggaggggagaggcgttgtgcagggcacggccgcctcgcccggcactcagccccacgtgcttcccccagttccgcaccctgaagccagaggagcagcgccaagccctgcacagcctggagctgcactaccaggccttcctgcgggacagccaggacgcgggcggcttcggacccgaggaccggctgatggctgagcgcgagtacggctcctgcagccaccactaccagcagctgctgcagagcctggaacagggtagggcacggcagggctggggcggttgggctggtgcgaggtgggcggtggagtgacccacatgtgttccccaggtgcacaggaagagtctcgctgccagcgctgcatctccgagctcaaagacatccggctgcagctggaggcctgtgagacgcgcaccgtgcaccgcctgcggctgccgctggacaaagagccggcacgggagtgtgcccagcgcatcgccgagcagcaggcaggggccgtccccccccatccagtcccatccctctccccatccctcctcccaccctccctcctttggccttcaaggggcgctgtgtgctgcgctcggtgatgagtgcgttcccactccctgtctttgcagaaggcacaggcagaggtggaggggctgggcaagggggtcgcccggctctctgccgaggccgagaaggtcttggccctaccagagccatcgcctgcggcccccacgctgcgctcggagctggagctgacgctgggcaagctggagcaggtccgcagcctgtctgccatctacctggagaagtgagtgcacctggccacaggcgaggggctggggtcggctggggggtgctggggtgagggctgtgaccttgcaggagggtgcaggagggaacgagttgggggctgttcagagatctggccaggaggcgggaggcccacctggggtggtggccgcagaggtggtgagaagagttcagggctggatacgcttcgacagtggcggccgggggacttcctggtgatgagattcgggtgtggggaagagacagtggagctgggcagcggctgctgagtgaggtggggaagctgtggatccactttcagtggcacagtaaggaatcctgcaccctgcctctcgtctgtcctgttcctggcctggacttaagggcctctggcatttatttccaatgtgttatgtcatagtctcttcctgtgttgcaaaccacaggtccacccgctgtctactcctcacagaaccagcacagtgatagggccgccgcctcttcctgtgttgcaaaccacaggtccacccgctgtctactcctcacagaaccagcacagtgatagggccgccacctcttcctgtgttgcaaaccacaggtccacccgctgtctactcctcacagaaccagcacagtgatagggccgccgcctcttcctgtgttgcaaaccacaggtccacccgctgtctactcctcacagaaccagcacagtgatagggccgccgctggctaccacagggtgccatttccaccccggtgtccccttcgcccagtcttgggctgcaagggctgagaactacgcttccaggccctgtgggcaccaggatgccgctgtcatccagccagtgggctcgtcctgtctcggggccttggggtctgccgttcctggctggcgcaccccctctccaggctgggtcctgagtgtccttgtgttacagaggctcccaacctccttctccccaaggctgttcttctcctgaagcaagcctctgaccacagggtcagctgacccccagggttgggtctgggcttggcaggcagcaccctgggtcgctgtggcttgggttccattcccttgggctattgctcgagccccatgtcatggccctgagccccgctttcccgccaggctcaagaccatcagcctggtgatccgcggcacgcagggggccgaggaggtgctcagggcccacgaggagcagctcaaggaggcccaggccgtgccggccaccctcccggagctcgaggccaccaaggcctctctgaaggtatcgtttcgaggcttgggcttcatggcggggtgggggtacagcgggcccagctgaagccgcacatgtccctcctgtccccaacagaagctgcgggcccaggccgaggcacagcagcccacgttcgacgccctgcgggatgagctgcggggggcacaggaggtgggggagcgactgcagcagcggcacggggagcgggacttggaggtggagcgctggcgggagcgggtcgcccaggtgcttgagcgctggcaggctgtgctggcccagaccgacttgcggcagcgcgagctcgagcaactgggccgccagctgcgttactaccgcgagagtgcagaccccttgggcgcctggctgcaggacgccaggcggcggcaggagcagatccaggccatgccgctggccgacagccaggctgtgcgggagcagctgcggcaggagcaggtgggcttgggtcggtggggacggggcggctgggcgtgccctgcggccacggctctgaccacaccatctcccaggccctgctggaggagatcgagcgccacggcgagaaggtcgaggagtgccagaggtttgcgaaacagtacatcaacgccatcaaggtgaggcccagccgcctgcaccaggccccaagtccgggaccgttgccaggatgatggcgggctttccctgagcctgggccatgccagggaaagcccatgtgagggtttaggggctgggcaggggccatcggagggcagagctggtggctgaccgcagtgcattgccacaggactatgaactccagctggtgacgtacaaggcgcagcttgagccggtggcctccccggccaagaagcccaaggtccagtcgggatcagagagtgtcatccaggaggtagggtggggccgaacctaactgggtgaggggctggcaggcctctggctggagctgcagctctcgcagggctaaccctggctctactccacagtacgtggacctgcgtacgcactacagcgagctgaccacactgacgagccagtacatcaagttcatcagcgagactctgcggcgcatggaggaggaggaggtacagcccgttgggcggaggctgggcagagggttccatctcaccacctgttgtgtcccacacacagccacaggagctgcctgaggccacctctcgtggccctccccactctccccactggcgctgccaccaccccctgcccccagctcagcctgccccaggctgccccacctgtggcctgcccccctggcctggtgtggctacactgctcccccacagtggctggtgccgcctctcctccctcgtgagcgtcccccctgcagcctagcggccgtcctgtgggctcttccttggcgttgtgcgttggcctttccgctcaaccctttgctgccagaagtcgggggtgctgagttgtggggctagggagggtcttccaaggcacccatggtgttgggttctccgtaccttctgggtggccgtgaatcctcttccgagttggctcgggtctgcagtgctgtctccacggtggccgcctcgcctcaccccgccccacccagggttcccaccctggtcggggagaggggtccagtggtgggagccaggcccactggtgtccagcagagctcaggcagggctgtgtgctgggtgtggctcgcaggttccgagctcctgctttgctctctctctcccccgtccgtctgtctccgtcgcctgtctgcgggaagcagggaggacgcctgggcctccttccccaggctggtgagcacagtggggccggctgcgatcgctgcccgagcgccctgggcgggtgcacgctgtctcctccgccgggctggggcctctgtcttccccgacccctgctccgcgctgtctgagtgaactgtgccggtgcgtgccccgtcagcgcctgcccgtgttcacactctctcggcttctcttcttctctctgctgtggccacagaggctggctgagcagcagcgggcagaggagcgcgagcggctggccgaggtggaggccgcgctggagaagcagcggcagctggccgaggcgcacgcccaggcaaaggcacaggcggagcgggaggcgaaggagctgcagcagcgcatgcaggaggaggtggtgcggcgggaggaggcggcggtggacgcgcagcagcagaagcgcagcattcaggaggagctgcagcagctgcggcagagctcggaggcggagatccaggccaaggcccggcaggcagaggcggctgagcgcagccggctgcgcatcgaggaggagatccgcgtggtgcgcctgcagttggaggccaccgagcgccagcgtggcggggctgagggggagctgcaggcactgcgtgcacgggcggaggaggctgaggcacaaaagcgacaggcgcaggaggaggccgagcgcttgcggaggcaggtgcaggacgagagccagcgtaagcggcaggcggaggtggagctggcctcgcgcgtgaaggccgagaccgaggcggcgcgcgagaagcagcgggccctgcaggccctggaggagctgcggctgcaggcggaggaggcggagcggcgcctgcggcaggccgaggtggagcgagcgcggcaggtacaggtggccctggagacggcgcagcgcagtgcagaggcggagctgcagagcaaacgcgcctccttcgccgagaagacggcacagctggagcgctccctgcaggaggaacacgtggctgtggcacagctgcgggaggaggctgagcggcgggcacagcagcaggccgaggccgagcgggcgcgcgaggaggcagagcgggagctggagcgctggcagctcaaggccaacgaggcgctacggctgcggctgcaggcggaggaggtggcgcagcagaagagcctggcgcaggccgaggctgagaagcagaaggaggaggcggagcgcgaggcgcggcggcgcggcaaggcggaggagcaggccgtccggcagcgggagctggctgaacaagagctggagaagcagcggcagctggcggaaggcaccgcgcagcagcgcctggccgcggagcaggagttgatccggctgcgggccgagacggagcagggggagcagcagcggcagctgctggaggaggagctggcccggctgcagcgtgaggcggctgcagccacgcagaaacggcaggagctggaagccgagctggccaaggtgcgggccgagatggaggtgctgctggccagcaaggcgagggctgaggaggagtcgcgctccaccagcgagaagtccaagcagaggctggaggccgaggccggccggttccgcgagctggccgaggaggccgcccgcctgcgtgccctggcggaagaggccaagcggcagcggcagctggccgaggaagacgcggcgcggcagcgggccgaggcggagcgggtgcttgcggagaagctggccgccatcggcgaggccacgcggctcaagacggaggcggagatcgcgctcaaggagaaggaggcggagaacgagcgcctgcggcggctggcggaggacgaggccttccagcggcggcggctggaggagcaggccgcgcaacacaaggctgacatcgaggagcgcctggcccagctgcgcaaggcatcggacagcgagctggagcggcagaaggggctggtggaggacacgctgaggcagcggcggcaggtggaggaagagatcctggcgctgaaggcgagcttcgagaaggcggccgctggcaaggcggagctggagctggagctgggacgcatccgcagcaacgcggaggacacgctgcgcagcaaggagcaggccgagctggaggccgcgaggcagcggcagctggcggcggaggaggagcggcggcgccgtgaggctgaggagcgcgtgcagaagagcctggcggccgaggaggaggccgcacggcagcggaaggcggcgctggaggaagtcgagcggctgaaagccaacgtggaggaggcgcggcgcctgcgggagcgagcggagcaggagtcggcgcggcagctgcagctggcccaggaggccgcccagaagcggctgcaggcggaagagaaggcacacgccttcgcggtgcagcagaaggagcaggagctacagcagacgctgcagcaggagcagagcgtgctggaccagctgcgcggcgaggcggaggcggcccggcgggcggctgaggaggcggaggaggcccgggtgcaggcggagcgtgaggcggcgcaggcccggcggcaggtggaagaggccgagcggctgaagcagtcggcagaggagcaggcacaggcccgggctcaggcacaggcggctgcagagaagctgcgcaaggaggccgagcaagaggcggcgcggcgggcacaggcggagcaggcggccctgcggcagaagcaggcagctgacgcggagatggagaagcataagaaattcgccgagcagacgctgcggcagaaggcgcaggtggagcaggagctgacaacactgcggctgcagctggaggagaccgaccaccagaagaacctgctggacgaggagctgcagcggctgaaggcggaggccacggaggccgcacgccagcgcagccaggtggaggaggagctcttctcggtgcgcgtgcagatggaggagctgagcaagctcaaggcacgcatcgaggctgagaaccgcgcactcatcttgcgtgacaaggacaatacgcagcgcttcctgcaggaggaggctgagaagatgaagcaggtggcggaggaggccgcgcggctgagtgtggcggcccaagaggctgcgcgactgcggcagctggcagaggaggacctggcacagcagcgggccttggcagagaagatgctcaaggagaagatgcaggcggtgcaggaggccacgcgactcaaggctgaggcggaactgctgcagcagcagaaggagcttgcgcaggagcaggcgcggcggctgcaggaggacaaggagcagatggcgcagcagctggcggaggagacgcagggcttccagcggacgctggaggccgagcggcagcggcagctggagatgagcgctgaggctgagcgcctcaagctgcgtgtggccgagatgagccgagcccaggcccgcgctgaggaggacgcccagcgcttccggaagcaggcggaggagatcggtgagaagctgcaccgcacggagctcgccacccaggagaaggtgaccctggtgcagacactggagatccagcgacagcagagtgaccatgatgccgagcgcctgcgggaggccatcgctgagctggagcgtgagaaggagaagctccaacaggaggccaaactgctgcagctcaagtctgaggaggtaccgccccctctacgtgcgacgggcgggtgggcccggggatctgctttggtgggtgatgggtgctcctgggctggcggtccctgatcacaccctcttcttctgcagatgcagacggtgcagcaggagcagctgctgcaggagacgcaggccctgcagcaaagcttcctctctgaaaaggacagcctgctacagcgggagcgcttcatcgagcaggagaaggccaagctggagcagctcttccaggacgaggtggccaaggcacagcagctgcgtgaggagcagcagcggcagcagcagcagatggagcaggaacggcagcggctggtggccagcatggaggaggcgcggcggcggcagcatgaggccgaggagggcgtgcggcgcaagcaggaggagctgcagcagctggagcagcagcggcggcagcaggaggagctgctggctgaggagaaccagaggctgcgtgagcagctgcagctcctggaggagcagcaccgggccgcgctggcgcactcagaggaggtcactgcctcgcaggtggctgccacaaagaccctgcccaatggccgggatgcacttgatggccccgcggcagaggcagagccggagcacagcttcgatggcctgcggcggaaggtgtcagctcagaggctgcaggaggccggcatcctgagtgcggaggagctgcagcggttggcgcagggccacaccacggtggacgagctcgcacggcgggaagacgtgcgccactacctgcagggccgcagcagtatcgcagggctgttgctgaaggccaccaatgagaagctgagtgtttacgccgccctgcagaggcagctgctgagtcccggcacggccctcatcctgctggaggcgcaggcggcctcaggcttcctgctggaccctgtgcggaaccggcggctgaccgtcaacgaggctgtgaaggagggtgtggtgggccccgagctgcaccacaagctgctgtcggccgagcgcgccgtcactggctacaaggacccctacactggccagcagatctctctcttccaagccatgcagaagggcctcatcgtccgggagcacggcatccgcctgctggaggcccagatcgccacgggcggcgttatcgaccccgtgcacagccaccgcgtgcccgtggacgtggcctaccggcgcggctacttcgacgaggagatgaaccgcgtcctggcggaccccagcgacgacaccaagggcttctttgaccccaacacgcacgagaacctcacgtacctgcagctactggagcgctgcgtggaggaccccgagacgggcctgtgccttctgccactcacggataaggctgccgagggcggggagctggtctacactgactccgaggcccgggacgtctttgagaaggccaccgtgtctgcgccgttcggcaagttccagggcaagacggtgaccatttgggagatcatcaactcggaatacttcacggcagagcagcggcgggacctgctgcggcagttccgcacgggccggatcacagtggagaagatcatcaagatcatcatcacggtggtggaggagcaggagcagaagggccggctttgctttgagggcctgcgcagcctggtgccagccgccgagctgctggagagcagggtcatcgaccgcgagctctaccagcagctgcagcgaggtgagcgctctgtgcgagacgtagccgaggtggacactgtgcggcgggctctccggggtgccaacgtcatcgcgggtgtatggctggaggaggcggggcagaagctgagtatctacaatgccctgaagaaagacctgctgccatccgacatggccgtggccctgttggaagcccaggccggcaccgggcacatcatcgaccccgccaccagcgcccggctgaccgtggacgaggcagtgcgtgctggcctggtgggccccgagtttcatgagaagctgctatcagccgagaaggctgtgacagggtacagggacccctacacagggcagagcgtctccctgttccaggccctgaagaagggcctcattccccgggagcagggcctgcgcctgttggacgcccagctgtccacgggcggcatcgtggaccccagcaagagccaccgcgtgcccctggatgtcgcctgcgcccgaggctgcctggatgaggagaccagcagggccctgtcggcaccaagggccgacgccaaggcctacagtgaccccagcacaggggagccggccacctacggcgagctccagcagcggtgccggcccgaccagctgaccgggctgagcctgctgccgctctcagaaaaggctgctcgggcccggcaggaggagctctactcagagctgcaggcccgtgagacctttgaaaagaccccggttgaggtccccgtgggtggcttcaagggcaggacggtgacggtgtgggagctcatcagctctgagtacttcactgcggagcagcggcaggagctgttgcgtcagttccgcacgggcaaggtcaccgtggagaaggtcatcaagattctcattaccatcgtggaggaggtggagaccctgcggcaggagaggctgtccttcagcggcctccgtgcccctgtgccagccagcgagctcctggcttccggggtcctcagcagagcccagtttgagcagctcaaggacggcaagacgacggtcaaggacctttcggagctgggctccgtgcggacgctgctgcagggcagtggctgcctcgccggcatctacctggaggacaccaaggagaaggtgtccatctacgaggccatgcgccggggcctgctgagagccacaacggctgcgctcctgctggaggcgcaggcggccactggcttcctggtggaccccgtgcggaaccagcgcctgtatgtccacgaggccgtgaaggcgggcgtggtgggccccgagcttcacgagcagctgctgtctgccgagaaggccgtcaccggctacagagacccctactcgggcagcaccatctccctcttccaggccatgcagaagggcctggttctccggcagcacggcatccgcctgctggaggcccagatcgccacgggcggcatcatcgaccccgtgcacagccaccgcgtgcctgtggacgtggcctaccagcgcggctacttcagtgaggagatgaaccgcgtcctggcggaccccagcgacgacaccaagggcttctttgaccccaacacgcatgagaacctcacgtacaggcagctgctggagcggtgcgtggaggaccccgagacgggcttgcgccttctgccactgaaaggggcggagaaggctgaggtggtggagaccacgcaggtgtacactgaggaggagacaagaagggcatttgaagagacacagatcgacattcccggcggcggcagccacggcggctccaccatgtccctgtgggaggtgatgcagtcggacctgatccccgaggagcagcgggcccagctgatggctgacttccaggccggccgggtgaccaaggaacgcatgatcatcatcatcatcgagatcattgagaagacagagatcatccgccagcagggtctggcctcctatgactacgtgcgccgccgcctcacggctgaggacctgttcgaggctcggatcatctctctcgagacctacaacctgctccgggagggcaccaggagcctccgtgaggctctcgaggcggagtccgcctggtgctacctctatggcacgggctccgtggctggtgtctacctgcccggttccaggcagacactgagcatctaccaggctctcaagaaagggctgctgagtgccgaggtggcccgcctgctgctggaggcacaggcagccacaggcttcctgctggacccggtgaagggggagcggctgactgtggatgaggctgtgcggaagggcctcgtggggcccgagctgcacgaccgcctgctctcggctgagcgggcggtcaccggctaccgtgacccctacaccgagcagaccatctcgctcttccaggccatgaagaaggagctgatccctactgaggaggccctgcggctgctggatgcccagctggccaccggcggcatcgtggacccccgcctgggcttccaccttcccctggaggtggcttaccagcgtggctacctcaacaaggacacgcacgaccagctgtcagagcccagcgaggtgcgcagctacgtggacccgtccaccgacgagcgcctcagctacacgcagctgctcaggcggtgccgtcgtgacgacggcaccggccagctgctcctgccactgtcggacgcccgcaagctgaccttccgtggcctgcggaagcagatcaccatggaggagctggtgcgctcgcaggtcatggacgaggccacggcgctgcagctgcgggagggcctgacctccatcgaggaggtcaccaagaacttgcagaagttcctggaaggcaccagctgcatcgctggtgtcttcgtggacgccaccaaggaacggctctcggtgtaccaggccatgaagaaaggcatcatccgccccggcacagcctttgagctcctggaggcgcaggcggccaccggttacgtcatcgaccccatcaagggactgaagctgacggtggaggaggctgtgcgtatgggcattgtgggccccgagttcaaggacaagctgctgtcggccgagcgcgccgtcactgggtacaaggacccctactctgggaagctcatctccctcttccaggccatgaagaagggcctgatcctgaaggaccatggcatccgcctgctggaggcccagatcgccacgggcggcatcatcgaccctgaggagagccaccggctgcccgtggaggtggcctacaagcgcggcctcttcgatgaggagatgaacgagatcctgaccgacccctcggacgacaccaagggcttctttgaccctaacacggaggagaacctcacctacctgcagctgatggagcgttgtatcactgacccccagacgggcctgtgtctcttgccgctgaaggagaagaagcgggagcggaagacgtcctccaagtcctccgtgcgcaagcgccgagtggtcatcgtggaccccgagacgggcaaggagatgtcagtgtacgaggcctaccgcaagggcctgattgaccaccagacgtacctggagctgtccgagcaggagtgcgagtgggaggagatcaccatctcctcctcggacggcgtggtcaagtccatgatcatcgaccgccgctccgggcgccagtacgacatcgatgatgccatcgccaagaacctcatcgaccgctcggcactggaccagtaccgcgccggcacgctctccatcaccgagttcgccgacatgctctcgggcaacgccggtggtttccgctcccgttcctcctcggtgggatcctcctcctcctaccccatcagccccgccgtctccaggacccagctggcctcctggtcagaccccactgaggagacgggccccgtggctggcatcctggacacggagacgctggagaaggtgtccatcaccgaggccatgcaccggaacctggtggataacatcacggggcagcggctgctggaggcgcaggcctgcaccgggggcatcatcgaccccagcaccggtgagcgcttccctgtcaccgacgccgtcaacaagggcctggtggacaagatcatggtggaccgcatcaacctggcccagaaggccttttgcggcttcgaggacccacgcaccaagaccaagatgtcggccgcccaggccctgaagaagggctggctctactacgaggccggccagcgcttcctggaggtgcagtacctgaccggcggcttgatcgagcccgacacgccgggccgcgtgcccctggacgaggccctgcagcgcggcacggtggacgcccgcaccgcacagaagctgcgtgacgtgggcgcctactccaagtacctcacctgccctaagaccaagctcaagatctcctataaggacgcgctggaccgcagcatggtggaggagggcacggggctgcggctgctggaggctgccgcgcagtccaccaagggctactacagcccctacagcgtcagcggctccggctctaccgctggctcccgcaccggctcgcgcaccggctcccgggccggctcccgccgcggcagctttgacgccaccggctccggcttctccatgaccttctcttcatcctcctactcctcctcgggctacggccgccgctacgcctcggggtcctcggcctccctggggggccctgagtctgccgtggcctgaggctgcctgcgcccaccccgctctgcatgcggcccagcccggctcccaccgaggcgcgggggccgttttcaacgcttaaaggtgtcttcctcccaagtggtgcctaaagtttaaccaaaaagaccagactaatatattaatatatatctgctgtccagacagcctgtatcttgggggacagggctggcccagccctgctggccgcctcaccccctcgggtctcctcactcccttctacctgccactcacacagccaggtgccttggagggtcccaagctgggccccagcccaccctcctgtcttcccagggtagcccgcctgccagtcctagctgcacagggcagctgggcccaaccctgtctgtagagggccctggtgtttctagcactggcctgcacggtgggccttgctggggacggggggccccagtcagcctctctcccagtctacccagagaagccccttccccatgggaagacgaggccctcgggcccagcccccacagtgctgtctgatctgtgctttccagctcaccccccacactcactcctgagacccctggcctccggcgtcagcctccagcctctgttcccctagtaagtgccttccatgtcggcctctaaccccaggccccgaggacccagacccagtggggaggcggacgttccagccggcatggctgggaactgcagacctgtcctcctggtgggtccaggggcccctccagcttgtggagccccacactggggtgccgcctgcccgtctctctcccatggagccccagccccctttgggcccagggacaccagccaggctctgtgctgaccctcctgttgcgcccagccctggtctcagcagcgaccacccctgcctccaccctctgagctttgcatgttccactaaccccgggcgggtggcaggtggaggtgtcaggctgctggcgcctctgcaagggcagaacactaacctgaccgtgggcggggccttgcggtatccgcccccaataaaagcaattccaaccttcccgtgcctccggccttgtgtcttggggtcaggtgtgtgtcacggacagggtggacatt

SEQ ID NO: 32005 - DNA, 67046 bp, Homo Sapiens
agctcttctcaatcttgcagggttagttcctggtgtcggcgtggctcctggagttggcgtggctcctggtgtcggtgtggctcctggagttggcttggctcctggagttggcgtggctcctggagttggtgtggctcctggcgttggcgtggctcccggcattggccctggtggagttgcaggtgagtttcatgagtcaatgagcctgaggggcccccgaagcctccatgggccccgcctccatctctaatccccctctctctccctccctcagctgcagcaaaatccgctgccaaggtggctgccaaagcccagctccgtgagtgcctcgcccacctttctctcctctccccaacgatctcagagctggttaggggcaacagccagggaggaggccgctgcttggatctgggccccttcctctgggactaggctcagctccctgggcaggacacctccttaggggcatgctccctgcctgctgtcgccaccactgccctctgtctgcaggagctgcagctgggcttggtgctggcatccctggacttggagttggtgtcggcgtccctggacttggagttggtgctggtgttcctggacttggagttggtgctggtgttcctggcttcggggcaggtgcagatgagggagttaggcggagcctgtcccctgagctcagggaaggagatccctcctcctctcagcacctccccagcaccccctcatcacccaggggtgcatagtaaaatccttgttaggttctcctaagcatctgggggtaacagatagcgggaggagggcagaccaggccaagggaccccaggctgcccaattgcagagtatctgcctcctcagtagaggggtggcagggctccagactgagaaaaagcctgccctccaaccagggaaggagcaggtagatcagcctggctccccttcagcagtgctctgtggccaggggaccactaggaactccagttcttcaccagctggtgactgagccccactctgtgcccagcctcaggcagtccatgctaggcctggggagagaaggaaggggcagacggaaggtggaggcactgttcagccctaaagctctgtgcctgtacagcttcagggctttgaggaagcaatagaggccaaggaagtcagggagggctctctagaggaggcggcagaactcccaggcacagagctcggctcctgaccactccccaacttttctttctccccagtacctggagccctggctgccgctaaagcagccaaatatggtgagtgcaccccacaaccacttgtggctcccttgccaccacaccatccctgacagcacaggactggggtggtcacaatagaaaaaggcagtttcggccgggcgtggtggctcacacctgtaatcccagcactttgggaggccgaggcaggcagatcacctgaggtcaggagttccagaccagcctgaacaatatggttaaaccccatctctactaaaaattcaaaaattagccaggcgtggtggcgggcacctgtaatcccagcactttgggaggccgaggtgggcagatcaactgaggtcgggggttccagaccagcctgaccaatatggtgaaaccccatctctactaaaaacacaaaaattagccaggtgtggtggcgggcacctgtaatcccagctactcgggaggctgaggcaggagaatcgcttgaacccaggagatggaggttgcagtgagccgagatcacgccactgcactccggcctggacgacagagcgagactgtatctcaaaaaaagaaaagaaaagaaaaagaaaaaggcagtttctaggacacgtttatgacagtttaaaaacctggcccctgcccactaaatgcttatggtgccttcaacccctgtgaccaccaaaaacacccttgaaatcccagttgccccccaggaggcaattccaccatccctaagcttgccctgaccctgacagttacatggtccctgtgtccaggaagggactgggcctgctgtgggtatgaggagtctgggcagcctctgcctccactccagctctctggcccgagcaaaggagctggtattcctcatctgggcaccccgggcccccgcccgccttcctgtcctgccagcaggaccgctcccaccacgagccagcccagaggacgtggcagtcccacagcctctgcacttggcgctctggcagccctgcctggccagacccacgctgtctgtagcccctgaattcctggcctcctgtgagcagcgttggtgggaggtggaagactcccccagggatccaccaaccagccgggcaggtccacttggggccagtttctacctcggaaaatcctggcttcctcagcgccgacccccagcagccctggcctcctcccctgctcactgctgactgcttggcaggcctgagtcaacagacattgccagggaaacagagtgacgtcatgtggtggagccgcgaagggcgcaggctccccagccacttcccgtccctgaagccctgagcacactgcttaacctctgctctgcctcagcgttctcatctgcaaaatgggaatgacaatagtgcctacctttcctgctgcaatgcataaaaaatgggctgctaagtgtgaagcactcaaaatgttaagtgcctgctgtagatactattaccgttgtttgtttgtttgtttgtttgttttgacagagtcttgctctgtcgcccaggctggaatgcagtggtacgatcttggctccctgcagcctccatctcccgggttcaagtgattctcctgcctcagccttccaagtagctgggattacaggcgcccgccaccacgcctggctaatttttgtatttttcgtagaaacagggtttcaccgtgttggccaggctggtctcaaactcctgacctcaggtgatccactagcctcagcctcccaaagtgctgggattacaggtgtgagccaccgcacccggcttacaaaagaacttttaaggccaggcacagtggttcacaccttcgggaggctaaggcaggaggatcgcatgagcccaggagttggaggctgcagtgaactatgattgtaccactgcactccagccggggtgacagagcaaaaccccatctcaaaatgaaacaaaatatggactggacttcctgtccactgctcctccacagtgtcacatggcccctgccacctgtctgcttgccttgtgtccctggggcagggagacccatcgttcagaaatggaacactcattttccctcctctccccgcaggagcagcagtgcctggggtccttggagggctcggggctctcggtggagtaggcatcccaggcggtgtggtgggtgagttgaaaccccaggaggggcagggtggggagggaatctaaccagtacagagtgcctccctgaactcggtctgtgttcccaggagccggacccgccgccgccgctgccgcagccaaagctgctgccaaagccgcccagtttggtgagcactgggtggaggtgggagctgccgccaggcccccaggcccccagggtgtgggaggagcttctgaccaggcactgtagactcagagtccctgccccagacacctcctggctccactgtgccatcgaaggccaggggagacctcaggctccacctgtgtccccagaggacacctccgccctccacaggccgaggcttcagtcccacctttctgaccagcggagtctaatgctcagctgtctccacaggcctagtgggagccgctgggctcggaggactcggagtcggagggcttggagttccaggtgttgggggccttggaggtgagagttgttctgaaatcagtgagtgtgtgtggtgtgtgtatgcgagacagagatggagacagagacagagacagagactttcgttcccacccctggcacgtctttgctcaagatgtcctcttggccaggtgcggtggctcacgcctgcaatcccagcactctagtaggccaaggtgggcggatcactagaggtgaggagtttgagaccagcctgggtgacatggcgaaacctcatctctaccaaaaatacaaaaataagccgggcgtggtggtgggcacctgtatttccagctacttgagaggctgaggccagaggatcgcttgagcccaggaggcagaggctgcagtgagctgagatggtaccactgcattccagcttgggcagcagagtgagaccctgtcatctaaaaaaaaaaaagaaagaaagaaaagaaaagaggccaggcatggtggctcacgcctgtgatcccagcactttgggaggctgaggtgggcagatcacgaggtcagatcaagaccatcctggctaacacagtgaaaccccgtctctactaaaaatacaaaaaattagctgggcgtggtggcagacgcctgtagtcccagctactcaggaggctgaggcagaagaatggcgtgaacctgggaggcggagcttgcagtgagccgagatcgcgccactgcactccagcctgggcgacagagcgagactccgtctcaaaaaaaatatatatatatatatatatatatgtatgtatgtatgtatataaattagctgggcatggtgacacacgcctgtaatcccagctactcgggagcctgagacaggagaatcacttgaacccaggaggcagaagttgcagtgagccaagatcacgccgctgcactccagcctgagcaacagagcaagacctcatcccaaaacaaaataaaaacaagaaatgtggcaaacgggagctggggctatcccttgccgccagggtcccagtcctccccctctcctctctctttcaacccacctgaccactgcggtgggagtaaattaggagaatgatggttatgccagttctccaagaaagaaatcaaagcttggagagaaattgctttccctaagtctccaccatggtggccgaccttgtgtggccatttccccctttcttgggctgtcattgtgtctccccctgtaaactagcctgcacagctcttcctgtgagtgccacaagaccagacacacagtaggagcttaacaattaagacttttggggccgggcatggtggctcatgcctgtaatcccaacactttgggaggcttaggtaggtggattgcttgaggccaggagttcaagaccagcctggacaatgtagcaagacccccccccaccaccacctctacgaaatatttaaaaattagctgggcgtggtgtgtgcctgtagtttcagctacttgggaggctgaggcaggaagatcacttgaacccgggagttcagggctgcagtgagctgtgatcaagccactgcattccagcctgggcaacagagcaagaagctggatagatgaaggagagatggggggatagactgggaggatgagtccatgggcagacggtaaagggtgagtaggtcagaagacagggcctagccaggtgcagtggctcacacctgtaatgtcagcactttgggaggccgaggcaggtggatcacctgaggtcaggagttcgcgaccagcctggccaacatggtgaaacctgtctctactaaaaatacaaaaattagccaggcgtggtggtgggtgcctgtaatcccagctgctcaggaggctgaggcaggagaaccgcttgaacccaggagatggaggttgcagtgagccgggatcgcgccactgcactccagcccaggcgaaggagtgagactctgcctcaagaaaaaaaaaaaaaaaaaagacagggcctgacaggtggcattggcattcctgagccgtcatgtgcctcatctccccaggtatacctccagctgcagccgctaaagcagctaaatacggtgagttcccctctgatgccttcctgccagtggcctgcaccccctgccatgcccatcgccaccctcccccagcccagctcaggcctccctctggctccccctacccctgaagatcttgtctgggacattccttaacccagaacccagcagggatatcagggcctcttcccgatgggggtgtcttatcctgaccccacctgcctcttctcaggtgctgctggccttggaggtgtcctagggggtgccgggcagttcccacttggaggtaggggtggccagctctgctacgtagtcctcagctctgtcccgatctagagggggcctgtccatctagcagtggggactcccagagcccatgtccacacaaggacaggagactggggctggtgagggcactttaggattgcagatgtactgggcaaacgggcaagctataaggttggggacagtgccaggctgagctcagggttgaggccatgaggtgccacacctggttgctaggtggcggcatgttgtgttgagaaagccactctggctgtagtgagggggattggctgggcgtggtggctcacgcctgtaatcccagcactttgggaggcctaggtgggtggatcacttgaggtcaggagttcgagaccagtctggtcaacatggtgaaaccctgtctctactaaaaaaaatgcaaaaattagccaaacgtggtggacgcctgtaatcccagctactcgggaggctgaggcgggagaatcactggagcctgggaagcggaggttgcagtgagccaagatcgcaccactgcactccagcctgggtgacagagcaagaccccatctcaaaaaaataataataaaataaaatataaaaaattatatagtgggggggatggagaggaggtgatcccagacagaggtcttgggtgagccagtgcaggcagaaagtgatgaggctggagtcagtttccacccctaccaacccaccaacctgaaatctctcctgcaggagtggcagcaagacctggcttcggattgtctcccattttcccaggtatgccaggctccctgcccctgggccctgccctggagctgcagccacctcctccctcctctcctgtgccatctcctgctcagaagggctgagccagcacccaggggtggaccccacagcctcaggtcacacgaggctggaccccgagctgaatgtagagcctcccctccttcttgctgacctcttataaacacagggaacatttgctttttaaaaacacagttcatggccagtgtgatggctcacacctgtaatcccagcactttgggaggctgaggagggcagatcacctgaggtcaggagttcaagaccagcctggccaacatggcgaaaccctgtctctattaaaaatactaaaattagccgggtgtggtgctcacgcctgtaatcccagccctttgggaggccaaggcaggtggatcacgaggtcaggagatggaaaccatcctggctgaaacggtgaaaccccgtctctactaaaaatactatagtcttctttttttttttgagatggagtcttgctcctgttgcccaggctggagtgcagtggcacgatcttggctcactgcaacctctgcctcctaggttcaagcgattcttctgcctcagcctcccaagtagctgggactacaggcatacaccactacgcccagctaatttttgtatttttagtagagacggggtttcaccatattggccaggctggtctcgaactcctgacctcgtgatccgcccgcctcggcctcccaaagtgctgggattacaggagtgagccaccacgtccggccgtctctactaaaaatacaaaaaattagccgggcatggtggcgggcacctgtagtctcagctactcgggaggctcacgcaggagaatggtgtgaacccgggaggcggagcatggtgtgaacccgggaggcggagcttgcagtgagccgagattgcgccactgcactccagcctgggcggcacagcaagactccgtctcaaaaaaaaaaaaaaaattagccaggtgtggtggtgcacgcctgtaatcccagctactctggaggctgagacaggagaattgcttgaacccaggaggcggaggttgcagtgagctgagactacaccactgccctctagcctgggtgatgacagggcaagacgattgcgtctcaaaaaaaaaaaaaaaaaaaaaaaaaaaccttcagaggcagatgtctgttcctgccccactctctgctcactgccaccaggtggcggtaaggagccatatctggctcaagcagggttaggaactgctccgggccgcgctactagacaatggtgccttacctaatacagactgatgccttgaaacagggttcacccatcagactattcccaggagggggtaggaatcctgggtttgagtcccagctcagacactatgtggataagaccctctctccctctactgggccttgatttacttatctgatgccctctcagatgtatgggtccaccccactccctgagagggccgtctcctgcagacactgactctcccttcatcccatgttccttgatggagctgctcttagcctttccccgaaaggcttcttggagcagtggagccaggagccagtgccaggccccgtccttccccagccaggccccatgacctgcccccttttctgcgagcgttggtttcatccaagtaatatcttgggggcttctcccgccccatctgtccagtggaagttgatggcatggatcaggtctgagtttggcctggggccatgacttggcttctcttggcttcttggagcctccattcgagtgggtcagagcaggcggggattagagccgaaactgagaggggccggactcacagtgatgtgcacctcctcccgtccaggtggggcctgcctggggaaagcttgtggccggaagagaaaatgagcttcctaggacccctgactcacgacctcatcaacgttggtgctactgcttggtggagaatgtaaaccctttgtaaccccatcccatgcccctccgactccccaccccaggagggaacgggcaggccgggcggccttgcagatccacagggcaaggaaacaagaggggagcggccaagtgccccgaccaggaggccccctacttcagaggcaagggccatgtggtcctggccccccaccccatcccttcccacctaggagctccccctccacacagcctccatctccaggggaacttggtgctacacgctggtgctcttatcttcctggggggagggaggagggaagggtggcccctcggggaaccccctacctggggctcctctaaagatggtgcagacacttcctgggcagtcccagctccccctgcccaccaggacccaccgttggctgccatccagttggtacccaagcacctgaagcctcaaagctggattcgctctagcatccctcctctcctgggtccacttggccgtctcctccccaccgatcgctgttccccacatctggggcgcttttgggttggaaaaccaccccacactgggaatagccaccttgcccttgtagaatccatccgcccatccgtccattcatccatcggtccgtccatccatgtccccagttgaccgcccggcaccactagctggctgggtgcacccaccatcaacctggttgacctgtcatggccgcctgtgccctgcctccacccccatcctacactcccccagggcgtgcggggctgtgcagactggggtgccaggcatctcctccccacccggggtgtccccacatgcagtactgtataccccccatccctccctcggtccactgaacttcagagcagttcccattcctgccccgcccatctttttgtgtctcgctgtgatagatcaataaatattttattttttgtcctggatatttggggattatttttgattgttgatattctcttttggttttattgttgtggttcattgaaaaaaaaagataatttttttttctgatccggggagctgtatccccagtagaaaaaacattttaatcactctaatataactctggatgaaacacacctttttttttaataagaaaagagaattaactgcttcagaaatgactaataaatgaaaaacctttaaaggaaactgtgtcttagcttccttcgtatgatttaatctgccttcaactcgctggcctggatggggataagggctctgcttcagggaacctccaccacccacagtgtatttgagaggttgcccaaccaaaagcccctgctgctggcttctggggcatcgatctttctccaagtttggcttgtactttaacaatgaggccaggagtttgagacccacctggacaacatagctgtccagtggagaatcactttgtaccatatagctacaaaaaaaaaaaaaattacccaagattggtggtggtgcatgcctgtggtcccagctactcaggaggctgaggtgggaggatcgcttgagcccaggatttcgaggctgcagtgagctatgattgcgccactgcactccagcctgggtgagacagcaagatcctgtctcgagagagagagagagagaaacagaaagagacagagaggaaagatggctgacctaagaaaatgcagaagacagtcaaaggtaaccattttcctccgaaacagtcccctctgaggaagacccactctcatgcgtggccatgtaaggccatttggcttgagaagtttaagaagtgatacccagcagcaggttcagctccacccttactcagatgcacccattcccattctggcccttcctcctccccttgaggccagaaatccgtggggcccgggaatgtgttcacctgcagcccacatccctacctctagaccacgctctggataccagatactggaattcccttccccaaccaccaagcccacttccagggctcactcagcctcaggcctgtgccaccctcctgagagcgggccccgtgctgagtgtgcacacctctaagccagaaatgtggcaacagagctgttcgtggggagtgtgggtggggctcaccatgcagactggagcatatgtgggtttgcatacgaggatccttgcgatcccagaaggagctgggagggaaagagaaagctggtggagggtatgctcagagagagcttcccagaggacagtaaagggcaaaaaacattttaccaggcaaagaatagaacagagaggagggtcaggcctttcaggcagaggacaggacaactagatgtctggtaggagagggcagtgctgaggacttatggaggatgatcaggagggggtgagcggcgtggttcaaggagatgcacaagagggttgctgtaataatccagggaggggtgacacagcctgccctagagtggtgacaaagtagatccatccatccatccatccacccatccacccacccatctgtccacctacccacccatcaacccacccatccacccacccacccaaccattcttccatccatccatgtctccttccacccatccacccacccacccatctatccacccacccatccatccatccatctatccacccatccatccacccaccagtccatccatccattcattacttcactcgacaaaaatatccattgctggtttttcctcaggtctccggcctctaaaagtcagtaagccccagcattcaggcctgtggactccctgtcttggtttctcatagcttgcggttttatttatttatcagagacagggcctcagtctttcgcccaggctggagtgcagtggtgctatcacagctcactgcagccttaaactcccaggctggagcaatcctcccaactacaggcacataccaccatacccagctaatttttaaatttttttatagagatagaatcttgctatgttgcagccaggcgtggtggctcatacctgtaatcccagcactttgggaggccgaggcaggcggatcatgaggtcaggagttcaagaccagcctggccaacatggtgaaacctcatctctactaaaaatataaaaattagccgggtgtggtggtgcatgcctgtaatcccatctacttgggaggccaaggcaggagaatcacttgaacccaggaggcggaggttgcagtgagccgagaccgtaccattgcactccagcctggcgacagagcgagactctgtctcaaaaaaaaaacaaagaatcttgctatgttgcccaggctgctctcaaactcctggcctcggcctcccaaagtgttggggttacaggtgtgagccacctcagctggttgctcgtggctttaaatatttaatacgacctattcattggtgactctccaattgacatctccagcatgaccgctcccctgagcccaggacttgcacatccaaggccaattctaacatctctacctagaaatctcatagacatggcctaggtagcgtggttttccctccctgcctttcccatctcagtaaagggcagccctactcttccagaggttccggcctgcaactctgtaaccatctctgactctgctcttccctcactccccacagcagattcaccagcaaataatacggcaccaccttcagaatatatccagagttggccaggcacactgactcacacctgtaatcccagcactttgggaggccgaagtgggcagattacctgaggtcgggagttcgagaccagcctgaccaacatggagaaaccccgtctctactaaaaatacaaaaaaattagccaggcatggtggtgcatgcctgtaatcctagctgctcaggaggctgaggcaggagaatcacttggacacgggaggcagaggttgcggtgagccgaggtcacaccattgcgctatagcctgggcaacaagagcgaaactctgtctaaaaaaaaaagaatatatccagagtcctaccacgtctcagggctaagccacaatccccagtatctcttgcctgaattactgaaatagctccctgaaccccttagttctcccctggctccccttcggccttctctccactcagcaaccaaagcaatctttttttttttttttttttttttttgagatggagtttcactctgttgcccaggctggagtacattggcgtgatctcagctcactcaacctctgcctcccgggttcaagagattctcctgcctcagcctcctgcgtagtgggactactggcatgtgccaccatgcctggctaatttttgtgtttttagtagagacaaggtttcaccatgttggccgggctggttttgaactcctggcctcaagcgatcctcctgcctctgcctcccaaagtgctgggattacaggtatgagccaccacatctggcccaaagcaattctttcaaagcataagtcaactcgggtcatgcatctactccaagtcctgcagtggttcctgtctcatcagagacaaagccagaggcctttctatggccaagaagcccctacttgcatggcagcagctctcctgacctcacattctgctattcgagccatgcggtcgccctggccatcttacttttccttgagtgcaacaggtcacccactgccagccttggcatctgctatctcttctgcccaaaacgccctttcatcagctatctgtgtttctggctcactcagctgcttcaggtcttgactcaggtgtcaccttctcagagtgtcctacactgacacctttctaaaattgcaaattgggctggatgcggtggcctgtgcctataatcccagcactttgggaggctgaggtgggaggatcacttgaggccaggagttcaagaccagcctgggcaacatagcgagactccatctctatttaaaacataaataaaattgcaagctgcaccctcctcctctgctcattactccctcacctggctctacctccgttttgtgttttgttttgttttttgagatggagtctcactctgtcgcccaggctggagtggcaatggcaaaatctcacctcactgcaacctctacttcccgggttcaagcaattctcccacctcagcctcctgagtagctcggattacaggcacccgccatcatgcctggcaaatattttttgtatttttatacagacagggtttgaccatgttggccaggctggtcttgaactcctgacctcaggtgatccaccctccttggcctcccaaagtgctgggattacaggcatgaaccaccgcgcccagcctgtctctgccttctttgactccagagcacctgtcaccataaacaaaatatattttacttctttgttttctgtctctctacaccagactgtaaactctaagatgggcactgctttaagaataacacagcctggacacagtggctcatgcttgtaatcccagcactttgggaggccgaggcaggcagatcacttgaggtcaggagttcaagaccagcctggctaacatggcaaaaccccaacaacaacaaaaaaaattagctgggtgtggtggtgcatgcttgtaatcccagctactctggggactgaggcaggtgaatcgcttgaacccaggaggcagaggttgcagtgagccaagattgcgccactgcactccagcctgggcaacagagcaagactgtctcaaaaaacagaaaaaaaatttttttaaagaccctatctccaaatacagtcatattctgcagtattggagtaaatgcttcaagatataaattttgaggagacacagttccacccctaagagttacctcatggaaaaagggtctttgtagttgtgattaagtcaaggatcttgagagatagggagattatcctgctgggccctaaatgctacataggtattcttatgagaagctggggctgggcacaatggctcacacctatcatcccaacactttgggaggccaaagcaggaggatcacttaagccaggaggtcaaggctgcagtgagctatgattgtgccactgcactccaatctgggtgacagagtaagaccctatctgaggaaaaaaaaaattggaaaatctagataaaatggataagttcctagaaagccacagcctgccaagactgaatcatgaagaaatagaaaatcagcatagaccaatagtgagtaaggagattaaatcagtaataaaaagtctcccaacagagaaaaacccaggaccagatggcttcactggaggattctaacaaacatttaaaaaattaacaccaatcctcctgaaactcttccagaaaactgaagtagagggaacacttccaatctccttctaagaggccagcattattctaataccaaagacacaagaaaagcaaactataggccaatatcctttatgaacattgatgcaaaaatcttcaacaaaatacaagcgaaccaaattcaatagcagattaaaaggattatacaccataaccaagtggaatttttcctgaaatgttaggatgtttcaacatatgaaaatcaatcagtgaaatataacatataaacagaatgaaagacaattacatgatcatctcaattgcaacagaaaaagcagcaagatcaaataaactttcatgataaaaacattcaacagactaggaatagaagcaaaccacttcaacctaataaaggctatagatgaaagcccacagctaacatcatacttaatggtgaaagactgggcttgagtggtggctcacacctgtaatcccagcactttgggaggctgaggcaggcagatctcttgagcccagaagttcgagaccagcctgggcaacatagcgaagccctgtctctacaagaaaatataaaaataagccgggcatagtggcacatgcctgtagtcccagctgttcaggaggctgaggcaggagaattgcttgagactgggaggttgaggctgcagtgagccatgatcatgccactgcactctagcctggaaaacagagtgacaccctgtctcgaaaaaaataaaaaggacttaaagcttttcctctaagattaggaataagacaaggatgcctactcctatcacttctattcagcatagtattggaagtcctagtcagaacaactaggcaaaaaaaaaaaaaaaaaaaaagaaattaaagatatccaaattgagaagaaagaagtaaaattatctctgttcacaaataacagactcttatatgtaaaaactcctaaagatcgaacatgcccacaaaattagttgtgtttccacatcctcacaatgaacaatctaaaaaggaaattaagaaaacaattccaggccgggcgcggtggctcacgcctgtaatcccagcactttgggaggccgaggcgggcggatcacgaggtcaggagattgagaccatcctggctaacacggtgaaaacccatctctactaaaaatacaaaaaaaattagccgggcgtggtggcgggcacctgtagtcccagctactcgtgaggctgaggcaggagaatggcgtgaacccgggaggcggagcttgcagtgagccaagatcgtgccactgcactccagcctgggggacagagcaagactcaaaagaaaacaaggaaacaattccatttataatagcatcaaaaagaataaaatactagaaataaacctaaccaaggaagtgaaagatttgtacactgaaaactgtaaaacactgctgaattaaattaaagaagacacaggtaaatataaaaattttacatccatgttcatggatggtaagacttaattgttaagaggcctgtagtactcaaaacaatctacggtttcaacacaattgccatcaaagtcccaatggtattttttgcagaaacagaaaatttcatcttaaacctcatgtgaaatctcaagggactccaaatagccaaaacaattttgagaaagaagaacaaagttggaggactcacactttgtgatgccaaaacgtattacaaagttacagtaacccaaacagtgtgatactggcataatgacagacaaacagaccaacagaacagaatatttataatggctcagaaatattaataaagcctcgtgtatatgattaaatgatatttgacaagatgctaagaccattcggtggggaaagaatagtctcttcaacaagcagtgttagtggccagacacagtggctcatgcctgtaatcctcacacttctgggaggccaaagtgggaggattgtttgagcccaggagttcgagaccgccctgagcaacatagacagatcccatctctctttaaaaaaacaaaaaacataacaaaaaagccaaattttattgggaaaactggatatccacatacaaaagaataaagtggccgggcacggtggctcatgcctgtaatcccagcactttgggaggccgaggcaggcaaatcacaagatcaggaattcgaaaccagcctggccaatatggtgaaaccccatctctactaaaaacacaaaaattagctgggcatggtggtgggtgcctgtaatcccagctactcaggaggctgaggcaggagaatcacttgaaccagggaggcagaggttgcagtgagctgagatcatgccactgccctccagcctgggtgacagagcgagaccctgtctcagaataaagtctgggggccgggcacggtggatcacacctgtaatcccagcattttgggaggctgagcgggtggatcacctgagatcacaagtttgagaccagcctgtccaacatggtgaaaccccgtctctactaaaaatacaaaaattagccgggcctggtggcatgcacctgtaagcctagctacttgggaggctgaggcaggagaattgctcgaacctgggaggcggaggttgtggtgagctgagatcatgccactgcactccatgggcaacagagcaagaccctgtctcaaaaaaaaaaaaaaaagttcgatccttatcttacaccatatacaaaaaataactcagattaaataactaaatgtaagacccaaaactataaaatgcctgaaacaagacacagcagattgatttcaggattgatttccaacaatctgatttcagacttctggcctccagaactgtgagaaaataaatgtcttgttttcagccaccaagtttctggtaatttgtcatagcagccaggggaaactgatatagtacagtgaataagtaataactctaatgccaggtaaatcggtgctatgaagataaaaagcccgggaggagagttacaaggaatgttatcaccctaacttaggatggttaatggacctggcctcaagtcaaaagccctgtaacaaccacgtacttgggaagttagaacagcagagaggtgcaccacgatttttcttctttttaattagagaaaggggccaggcgcggtgctcacgcctgtaatcccagcactttggaaggccgaggcgggtggatcacctgaggtcaggagttcaagaccaacctggccaatatggtgaaaccccgtttctactaaaaatacaaaaattagccgggtgtgatagcatgcgcctgtaatcccagctactcaggaggctgaggcaggagaattgcttgaacccaggaggcagaagttggagtgagccgagattgcaccattgctctccagcctgggcgacagagcaagacttggtctcaagcaatcctcctgcctcagcctcccaagtagctaggactacagtcacgtgccaccatacctggctaattttttttttttttagagatgaggtctcgctatgttgcccaggctggtttcaaatttctggcctcaagggatcctcctgccttggcctctcaaatggctgggattacaggtgtgagctaccatgactgaccatcatgattttaacaaaactgacaggagaataaaaataagggcaaagtagtagccagaggctaggtcccataagcgcagaagcagggaccttagggttagaaagcaaaggaatgtcacacatgttcagaggctctgcaggatgacagggcatagggacatgacttgggaggctgttgctctaaatacctaactaggccaagaaggagggagaagtgctggaattctggatgtattttacatatagagccaataggatttgccaatggatcagaggcagggagtcaagagagggaatgggagcagtcacgccatatagtacacctgtagttccagcagctagggaggctgagatgggaggatcgcttgagcctgggaggtcaaggctgcagtgagctttgatcgtgccactgcccaccagcctgggtgatagaggaagatcttgtctcaaaaaaaaaaaatgtctgtgagtttaaactaaattactggatgatggtggtgtcatttactgagataagaaacacctggggaggaactatccgggcacaaattatgagctctgacctggacacattaagtatgaggtcccatttgccatccaggtggagatcccaaatagacattcgggttcttgtgtctgcagttcgaggagaggtcagaggagtcaccaagccatgcatctgagtgagctcacgcagagtgggcgagatgtgagcaggcagggtctgacagcagggatcccatgacgccagcctgctttgcatgctaggacagctcaggctctggccctgccttcaacaacagccttgggctcacgttacaacagcatccccaaggagcctcctgcttgtcactggcttgtgtccagccaggcacaaatttgcaactgggcaattctaacctctagagtgagtaagccattcccatggggcgctcaactcctcatagaaaaaacttttattggccgggagtggtgactcacactgtaatcccagcactttaagaggccgaggtgggatgatcacttgaggtcaggagttcaagaccagcctggccaacatggtgaaaccctatctctactaaaaatacaaaaattagccaggcgtggtggcaggcacctgtaatcccagctactcgggaggctgaggcaggagaatcacttgaatccaggaggcagaggttgcagtgagccgagttagcgccactgcagtccagcttgggcaacagggcgagactccatctcaaaaaaacaaaaacaaaacaaaaaacttttatcaggccggactcagtggctcatgcctataatcccagcactttgggaacacaaagtggaaaggatcaattgagcacaggagttcgagactagcctgggcaacatggtaagacccccccccatctctacaaaagataaaaattagccagacgtggcgtgtgtgcctgtgggtccacctacctagaagtctgaggtgggaggatcacttgagctcaggagtttgaggctgcagtgagctacgatcgtgccactgcattccaccctgtgtgacagagtgagaccctgtctctcttaaaaaaaaaaaaaaaaaaaagtccaaaaatcctttttgcagccaggcgagatggctcacatctataatcccagcactttgggaggcctaggtgggcgaatcgcctgaggtcaggagttcgagaccagtctggccaacctggtgaaaccccatctctactaaaaatacaaaaaattagccaggcatggtggtgcacacctgtaatcccagctacttgggaggctgaggcaggagaattgcttgaacccaggaggtggagattgcaatgagctgggatcgtgccactgcactccagcctgggaaagaagagcaaacctccatctcaaaataaataaataaataaataaatataaataaaaagcaaaaatcctttttgctttcagcaaaaaaaatcttgcatgagcaatgtaactgaatatgtcagatctgatgtttcacctggaactgtggctgacaaggagctcctacaaggtgtggaagtgccagctccatcttttcgctcatctgggtgtgttagcatcttctttttttttttttttgtttatttgtttgagacaggctgtacaatggcatgatcagagctcactagagcctccaaatcctggactcaagcgatcctcccgtctcagcctcctgagtagctgtgactacaggtgcacaccaccactcccagataatttttttttttccgaagagatgtgagggggtctcactatgttgcccaggctggtcttgaactcctgacctcaagcgatcctcccagttcagcctcccaaagtgctgggattacaggtataagccactgcacccagtctgcatcatcttcaatctgtgctttctttttttttttttgagatggagtcttgctctgtcaccaggctggggtgcagtggtgcaatctcggctcaccgcaacctccaactccctggttcaagcgattttcctgcctcagcctcccaagtagctgggattgcaggcacgtaccaccatgcccagctaatttttgtatttttagtagagacggggtttcaccatgttggccaggatggtctcgatctcctgacctcacgatccacccgcctcagcctctcaaagtgctgggattacaggtgtgagccaccacgccaggcccaatctgtgctttctttgcaggaattgttttcaactatgagtccattctgtgagggttaatttagtcaaaactggataacatcactcaaccaagctggctcaggctcacagcccctccaggccactatgcacttctctgccctgcactgtgggcacagcatcaacatggccctgcccgctgcatccagacgggattggttaacgggaggcaatggaagaataagaagagcaggggagtcagatcagaatagcccttctgggccctcttccccatgagtcccccagaactggggacccctcttgcacagctcctctcaggcaggcctctcctccagggaccccctctatgcccccttaccctgggctggtaactgctgccacccctccaactgtgccagtccttactgatctcctttaatcccccctccccagtgcattgcaaacatcccctttatcaaactctccccagttagccccactaagtggcactttctgtttccagccagggtcctgcctggtatatgccctacagccaagttacaaggctctcattcccctctctttccttcccctttttttccctccctatcttttttgacagggtctctgtcacccaggctagagtgcaatggtgcaatcatagctcactgcagcctcaacctcctgaggtcaagtatcctcccacctcagcctcccaagtaactaactacaggcatgagccaccatgcctggctaattaaaaaaaaaaaaaaaagtctgggcgcggtggctcacgcctgtaatcccagcactttgggaagccgaggagggtggatcacctgaggtcaggagttcaggaccagcctggtcaacatggtgaaacctcatctctactaaaaatacaaaaattagtcggtcatggtggtgcacgcctgtaatatcagctactcgggaggctaaggtgggagaattgcttgaacctgggaggtggagactgcggtgagccgagatcccgccactgcactccagcctaggcaacagagcgagaccgaatctaaaaaaagaaaaaaaaaatctagtattttcttcccaccccacgtaattgttttgcacccaggggtgagtgccccccactttgcagacgtgcctagacctctccccacaaacatgatgactagagttggagctgggctagcgctgcctcttgttcactgggttcacgtgggcacgtggctccactccggtcactgcttcctgggcagagggatgacgtggaaggtagacctaggggggacagggttgcttcctgcccatgtccagcattctagaattgtccacatctaggcagggcgttccaccatcagtgctggactggaccacccaattcctttggacgcttgactcagcccaaacccgtgctccctccaggaccctgggcagggcagccccagctccaggtaatcggcactgagaagagtacacctgtcaccgcctggcaggggctcgctcctttctctggtgctgctcattcgcgaggcctgagacgcggaccgtcaccttccccgggcccagcctggcctcaatgcaggcctcagagagagggacaaaacccggcccgcctccctcccctccccaaggcgaccaccagtgtcctgggggtccacagggcctctccggctctgatccgagttcccggctgcagctggtttgggtctgtgggggcctcgcgcagggaagcggaggccccttctctaggctcctacatcctcctggcctgccccagcagagctagcggccctccgagacagctgggcctcgcagctcccagccgaggcctgtcgctgggagaaagaagaatgaatgaagggcggaaggggcggggaggggcggggcgcgccgcgccagctcgcggcgcccccaggccgggccgcagcggggcgtggcctctagaggcgtggccttgggcgtgggggcggggttttctggtggggcggggccgcgcagggccgttcccgccgccggccgcccgcgccccgcccccgtgccgcagctcacaggccccgcctcggtccgcccctccgctcgctccccaagccgccgcggcgccgagccggtttccccgccggtgtccgagaggcgcccccggcccggcccggcccggcccgcgccctccgcccccgcctccccgggccggcggcggtgggcgagctcgcgggcccggccgcccccagccccagccccgccgggccccgccccccgtcgagtgcatgaggttgacgctactttgttgcacctggagggaagaacgtatgggagaggaaggtgcgcgggccgcggggtgtggggcgagggcctggagggggtgcccggggcagcgtggggcacgggagggggccgggtctgccaggaggccgcgcccctgcctcctccgggatgagctcgtccttacgaagcccgcaggcccctccctgtccccctcccgcccgggatccccctccccggcccccggcgagctgccctcctgcgggtctgggggcccctggaccctttttcctcctcccacgtccccccgcgaaggactcccagacactgcccaccccgcgtcggcctccatccgcgtgctctgtccaccacccgggcctcgccctggggccaccctttatccagtctcggaagaaagagcggctggggaagccgcagccccgggtcccagtggccgccgggcgcctgcccggctctgtgaccttgagccaggcgctgacttcctggtcctcagtttccccttctgtacatttggaaactgggtagttgcccccccggtgtcggtgattgggggccagatgggtagagcggagataggcgtccaggaagccggaggccgtgtactgcgggagcctcatccactctccctgtccgtgccccaaacccggtgcctgccctcagtcttggctgggagcatgactcatcctaacctcctctttagccccttctccctcactggggcccaaggcgcagtactgcactgcagttagggttcaaggactcccccagcctaggacagggtctgggggcccctccttggatctccttcgctgacctgtcacttagatccacctggccccaaggcagggcctgactccacacctccccctgccaccaactcttcccaggcccatgaaaacctgattggggtaggggcccaccttcctgtagcccctgcctacctaaggtacctgcgtcttcacagagggtcaggctgttgtggccttgggacctagctatgtgactgggcaagccatgccatctctggggctcagtctccccttctgtacagtggagaggggcaggtctggggcattttccagggcccaccagctccaagggtgccaggccccaaggatgactaagcatgcctgtggctggctagaggaggtgccaggcctccctgggacaggtgtctgggagtacccagctctgcagccccttccccttgccaagccagggcattcattgccaaggatctgttagggccggcacctccaggcttcctgcccttgacctcccagctggcttcagcccaggatgcactaatccagccctgtccagtccctgcctttgaagggccctcttagtacttcttcctgggcaggagagggaagaaaggaggctgtgataggaatgtcacccactgccttatccctaaagccactgcttcctttctcctcatttaccttgccagatccaatgctatagcgggaggatggacctgatcctcctcctaagctgatacatagggaaacagggccagagaagcttggcaacctagtcagtatctcagcaagactcaggccagcgccctttcttctcctatttggcacagcgactgccctgcctgggcgctgcacatgtgcagtgtgcgaggattggtgcaggtgtaggtatatgtggggtgggcagggcaagctgggcctgcaccagatcacacttcctgagaatgcttcccaactcccttcccaccctgcaggaagcgagttgcccgtgtgtgcaagctgcggccagaggatctatgatggccagtacctccaggccctgaacgcggactggcacgcagactgcttcaggtagggtggggtgcccagggcctgtgttgccctaaacaaggcctgccagagaggacaggctggtcaaggaatgggggaggccgggatatgcctcctggtgccgtcccctattgtgacttcgtggccttaatttaccatttatgacatgaggtgttttgactagaaaatccctacaggccttcctgttgtcattttatttatctatttttttttctttttgagacggagtctcgctctgtcacccaggctggagtacagtggtgcgatcttggctcattgcaacctcttcctcctgggctcacgcagttctcctgtgtcagcctctggagtagctgggattacaggcgtgcaccaccacgcccagctaatttttgtatttttagtagagacgggttttgccatgttagccaggctggtctgaaacttctgacctcaagtgatcttcccacctcagcctcccaaagtgctgggatgacagacataaaccaccgctcctggcctcattttattttcttttatgtatttttcttttttcgaaatggtcttgctctgttgcccaggctggagtgcagtggtgccatctcggctcattgcaacctccatctcccgggctaaagtgatcctcctacttcagcctcccgagtagctgggattataggtatacaccacaatgctcagctaattttttaaattttgtgtaaagacagggtctcactattgagacccaggctggtcttgaacttgtgacctcaagcaatcctcctgccttggcctccgaaagtgctaggcttacaggcgtgagctaacgccttggcctctgttgtcatcctagatctctgagatctaaatcttagagaggatgggagagacctccaattgagccagtgcctgcaattcagccccctgctggcacccagacagggggaagagttggaaggaatgtccctcctgccttctgggtgttcatgctcttgcagggagggaagacaaaccaggccttaagggaaaccaggccaccctcagtgtcttccaggctgcttgcgaacatgcataacccagtcacaccagccccagtgtccagacacacacccacaggtaggaagaaagtagggtcagggttgtggcggaggataaagagtacatgaggacctgaaggtcacccagtaggaccatcctgagaagccaggagcaggggtctacctgccttgagccagagcagggccagagcaggggtctcaaaggatgtgagatttcctgggtagaaaagtagagtggaggtggggcgtggtggctcacacctataatcccatcactttttggggctgaggtgggcagatcacttgagttcaggagttcgagacaagcctgggcaatatggcaacaccctgtctccactgaaaatacaaaaaattagccgggcgtggtggcgcatgcctgtagtcccagctactcaagaggctgaggtggcagggttacttgagcctgggaggtggaggctgcagtgagctatgatcgcaccactgcactctagcctgggcaatagagcgagacccagtctcaatttttaaaaaagaaagaaagaaaaacaaatggtgtgggagagaattacaggcatagtcaccaaacagcaaggttcaggggagaaaactccataaaagggtagaaggtgaagcttctgggatgcccagcaggggtcaagacatccaccactaggactttattttaggcttctgccttggtttattttttggtttttggtttttttgagacagtcttgttgtgtcgcccaggctggggagcagtggcgcgatccctcctcactgcaacctccgcctcccaggttcaagcgattctcctgcttcagcctcccaagtagctgggattacaggtgtgcaccaccacgcccggctaagttttgtattttcagtagagatagggttttgccatgttggccaggctggtctcgaactcctgacctcaagtgatctgcccgcctcagcctcccaaaatgctggaattacaggcatgagccactgcacctggcctcggtttgtttttttgtttcttcttttctttttttttacacagggtcttgctgtgtcacccaggctggcgtgcagtggtgagatcatagcccactgtagcctccagctccaactggttcaagcgatccttctgactcagcctcccaaagtgctgggattacaagcataagccaccatgcccagcctgttttttcttttttaggaataacgtctaacgttttctaacattcagtaagggacaacccctgttctaagtactttgcatagttagatattagtgctgtctttgttttgccagagagaaaattgggacacagagaggttaattctcttgatgaaagtcacacagccagtgagtgaaatgaacacactcagtgtggctgaaaggagacagacagcatgccctgggattctgcatcaggtgctcagaaagaggccttcggggggcaagagggctctcaacaggcagaggaaaccatctgcacagcggtgggatggtgcggactgctgagggaacaggaacagttcccttggaaggaacagaataagctgagggatccaacaagaaacaaagttgagaccgattcgtgaagggccttgaatgccaagataaggagtttcagaagtcaggatgggggtggtggctcatccccgtaatcccagcactttgggaggccgaggcaggcagatcacttgaccccaggagcttgagaccagcctggccaacgtggtgaaacccccgtctctactaaatattcaaaaattagccaggcatggtggcacatgactgtaatccaagctactcgggaggctaaggaaggagaatcacttgaacctgggaggcggaggctgcagtgagctgagatcacgtcactgcactccagcctgggagacagagcgagactccatctcaaaaaaaaaaaaaaaaaaaaatagaagggagtcggcagaaagccagggaggggctggggtgacatgctgttgaagaatgccatcccagtgggccggtggtggtatctaggcagggaagggactgtcccagtaactcaagggtctgagctcataggacctgacctgggacagtgactgaggatggagagaatttcaggcagaagggacagtttttggtgagtatttgtcatattggctaccatgcattgagcactcttcatgctaatttgttaaatcttcatcataactctatgagggactgtatgtgcccagtttgcatgggagaaacagagattccatgcaatcaagtgcctcgctgaaggttgtaacatctagagctgggactaaaaccttctcactccacatcgccacagagtaggaaaggcaggggctggcggtggcacatgcctataatcccagccctttgggaggcggaggcaggtggatctcttgagcccaggagtttgagaccagtgtgggcaacatagtgaaaccttgtctctacaaaaaaattagctgagcatggtggtggtgcctgtagtcccagctactcaagggcgctgacatgggagggttgcttgagcctgggaggtggaggttgcagtgagctatgatcacaccactgcaagccagcctgggtgacagagtgaaatcccatctcaaaaaaaagaaagaaaggaagaaagaaaaaggcaggggcttcggggagggcatgggcactggcgaatggcagggtggaacctgaagccatctggttttctaacctgggcactggggagttggtggtttgttgactctgatggaattgggggtcatgttggggaggagacatgctcatctgtgttgagctggaggggacatgggctatccatggtggctgtgtcctgcccagagctagccatgggagcctgagtccagttggaggtaggaaagtcagaaaaaacggccgcctcggagctggccctgagatggtgagtgggatttgtgatagggccaagacgaatgaagggaagaactttggggacccctgtgtctgcggtgaggggggagatggagccttggatgatggagagagggtcaggagtagagccacagaagccacaggagggaagccgtgttacaggatgggtgtacctggctttggagtggcctgtcccaaatcactcaccaggagaggggtgagtccccaggtcagggcagtaaagaggaggcatgtttgtgctgtccctggtgtagtgaaactcaagaaggaagccaggtgcagtggctcacgcctgtaatcccagcactttgggaggccaaggcaggcagatcacctgaggtcgggagtttgagaccagtctggccaacatggtgaaaccccatctctactaaaaatacaaaaattagccgggcctgttggtgggcgcctgtaatcccagctactcaggaggctgaggcagaagaatcgcttgaacccgggaggcagtgattgcagtgagtcaagatcgcgccactgcactctagcctgggtgacagagcaagactccatctcgaaaaaaaaaaagtctcaatatggggaaagatccactagaagtaagagccatggcttctacctcgtggcttgtgggtgtgatactcccaacagtccccaaagctggtggtcctcaccgcgtgacagtgagcagagcagctcagagggggtcactgctcacctgggtgcatggctgaccacagccaggctggctctcagtgggatgcccaaggtgctagactctgcttagtctccctcgggccctgggcttgaggcattgggcccggcccagacctcatttcatgcactgagacctttgttccagggcccctcacccctctgaaggtgttcgggcaggggcagtgtgataaggccatgaggggtctgcagcctccagccccactggggaggtggccagtgatttccaccttcctggcccctctgcatgcccctcccagtggaacttcctagggtccctgagtcagtcacttgcaaataattatggtgtgcccactctgcattaggcccctctcacaacaacccagtaagggggtgctatttatttattaaagcgattttttttttgagtctcgctctgtcgcccaggctggagtgcggtggcgcaatctcggcttactgcaagctctgcctcccgggttcacaccattctcctgcctcagcctcccaagtagctgggactacaggcgcccaccaccacacccggctaatttttttttgtttgtttgtatttttagtacagacgaggtttcgctgtgtgagccaggatggtctcgatctcctgacctcgtgatccgcccacctcagcctcccaaagtgctgggattacaggcgtgacaccgtgcccggcaatattaaagcgattttaaggccaaggctggtaactcacgcctgtaatcccagcactttgggaggctgaggcaggaggactgcttgaggccaggagtttgagatcaacctaggcaacatagtgagactccatctctacaaaaaaattagccaggcgtggtggtgcgtacctgtagtcccagctactcaggaggctgagatgggaggatcatttgaacccaggatgtcgaagctgcagtgagctgtgatcacgccactgcactctggcctgggcaacagagcgagacactgtctcaaatttttaaaaagcgattttacaaatgaggtgcagagttcagtcacttgccaaaagtctcacagcgcgtgaggagtagaatcaggactcgaaccgaggcagcctggcttcagagcctacagtgtaaccacagcttagtcccacacctccagaccaacagggtccctgccttctagtgggcaagacactcagtgaacaaatgtagtgtcaggtattgggggacagcactctcaggaagtgatgtttaagggacagaattgaagggagcagtgtttagaggatgtcgggggtagggccggtgcatgtgcaaaggcttgggtgggaatgtgcttggcacaactgaggaccacaaagccagcgtgcgggagtgcagtcagtggccaggggtgcatagagccttgtgggcccgtggaaggtgccgttggctgtacagctttttttttttttttttttttttttttttgagacagagtctcgcttttgttgcccaggctggagtgcagtggcgtgatctcagctcactgcaacctccgcctcccgggttcaagcgattctcctgcctcagcttcctggtagctgggactacaggcgcccaccaccacacctggctaatttttgtgtttttaatagagacggggtttcaccatgttagccaggctggcctcaaactcctgacctcaagcgatctgtctacctcagcctcccaaagtgctggggttacaggcatgagccactgcgcacaggcagctgtgcatctttgaatgtcataacctgagcatctgagagctgctcctgtcccctggcccctgctcttgaggaagtcccacgctgataggacagacagggtcataagtgctgtgatgggggcctgcaggctgctggagggctcagccgggaccagatgctgcccctctttgtagagtgggacaattgctgcaggcccatgggacctctggtattagccctgagggttgtcactccggggcctgcccctttctgtgttctgacctcccagccccttgcaggccccgcctcccggaaggttatgaccaggcttggactggtccaggcttccctttggctcacatactgcctctgcgaggtcccctccaggaagcctcctgtgcacaacccccagggctgccgcatccctggtagcatctccttggcagctgggtgggctggccctgggcaaggagggctgagcatgctgctggcctgtggggttggagcagcggcgggatgcaacctccctttcttcaggggacctttttggcgaagacaaactgtccataggaagtcgacctctgttcccttgggggcagcagtggaagaggcagctgcttttgagcttgtccctgtccccagagaagcctgaggccttcagtgccgttgccagggccgaggctgaggagcctacagcgtgtgttcaggactgagggccagggacgggccacaggctccctgcctggggtccaagcctagatcgctcgctccccacccgcaccaaagcccaggcaaagggtgcttcagccacttcctgttgcaggctcagaccaagtcccctggcacccacgcggctgcagcctcctcctgtgcgctgcagccacgctggccccaccctctgcagcctccaatcctgagcccctgagggaggatggggaagcagctggtctggccacccctgccctcccttagacctccagagcccccagtgtagccacagaggatgctgttggcttcagccccaagaagacgccgcttcctccagagggctaagtaagtgggaatccccctccctacttgtcctgggctccaggcagggcccctggtgtaaggcctggggctggaagccgacccacctaggtccaggctctggggcagaactgaaactccttggttactgtcggctgcagcctgggagcaggccactgccaaagctgtgggtccttccaggacagtctccccatgaggccggtcctccacctgctgtttcttcacacctggtggccagggatgtggccctgggtagaacgatgattctccactcctgtcattatggaagccaccgctgtctcccagcccagccagccacctgggctgcagagcacccctttcatgccctccgggtgcctcccccttctcctgccccagcctggctttgtcctaccctgctctcagggaggggtaccctggagtggggccagggcatggctctcccccgagggagttcctctctggctgtccccagggcagctctgcacagcctcagtacctggcgcacctcccttgacatccttcttagggacagtcaggcactctgtgtggggcactcaagagagccaggcccgtcagcctctagctcctgccagaatgcaggcctgaggggtgaggggcggggcaggggcaggggcagggacaggaactccggcgtgctctccatccgcaaaggttcactgaggccccgagccccagccactgagccaccaagtcagcctgggccaggcctgggtgccctgtctgcaatggaggcagagacggggtctcggggcagttctgaggatgctgggtgcacagcgggggcctcgccggcaggaatcacttatgctctctcctgggccaagctttgtggatgcccagcctggggccgcggggagctggcaggtcagtggcagacactggtgggcagacctagtgtctggtagaacaggcatcaaggaagtggtgaccggagggaagccaagtgcactcaaaccctcgggtgagtcatcaccgccgggtctttcacagctgctgaaagtgagcaacagtgatgaaggtttgtgagtttctgcgtgagcgagtgaatggaccagtagcagtttccaggttgtggaagagcgttccctccccgggatggggacacttggttacagcaattcctaatcccccacccacccaccgcccactgcagaggtatgcgggggccctgcttcctgcaggcaggagtgaggggcactcctgtgatgtggcacccctgtgaccgaggtcatgtgtgatcggtgtaagggcaggaagcgagtcattggtctgcaccaggcgtgggggcttctgcgagggcaggacccaaagtcggcctggcctcccggctgcagcactcctttccctttcgaattaggttagagccctgggacgggaggtgccctgtagaccacccccctcaccaacttccgtcctccgccccacccccgcggtgatccggtgaactgccggccccctgctgtgcaccgagtggggcagtgaccctgacgtggcgtctcctgccgcccctgccaccgccaacctccggtggcccagcctccgcattccccacccccatggaggaatgcaccaggcctcccttcctggatgcacccctcacccacatgcttccaaaccctggcattttctgctccccctttactcccaccccttcccctaggctcccagacaaaggggaagtggctggatcctcttaaagggacagtgtcccaccagcttactgctgaactcccctcctcaaccccagttccctagttacagttaattagcattagcagacagcccatgagtgatacccatgcaggccccaggctgtggagagtttcctgggtaggaaacagcccttaaggtccctcatctcatccaggtcccagtctttcctacctgcctctctcctagattgtggccctttggagcctggttcttctgtccctgtgtgaccgacacatagcacccaaacagtggcagagcgggacggaccccctagcctgttctctgtgtgggtctgtaccctgacccagacatgcccccccacagcaggacccaggggggcacatgtgtgcctgcgggttcactggggcacccgcatttggtttattttattttttagagagagggtcttgctgtgtcacccagctggagtgcagtggtgtaatcatagcacactgcagccttcaactcctgggctcaagcgatcctccctccccagcctccctagtagctgggagtacaggacccactgtatcctggctaattttttaataattttttaagagatggggtcttactgtgttgcccaggctggcctcaaacctctggcctcaagtgatcctcccaccttcgcctcctgaagtgctgagattacaggcatgagccaccatgcccatcccagactgacatttctatatttgttcatcctggctgggcagggctgctggtccccaccccaccgggatgcttggctgggaaaaagccgggaatgtaggtctaaccctggcctgtgttgtggcacctacagcctggcattcctccccatctgcccttcaaggccccaccaaccaggcctccttggtagcctctagtgaggaaacaggcgaaccgtggctttgatgaccctgcacacctggggattctcctctatttttctttttcttttttttttttttggagacagagtctcactctgtcgccaggctggagtgcagtggcacaattttggctcactgcaacctctgcctcccaggttcaagcgattcttctgcctcagcctcccgagtagctgggattacaggtgcccaccaccatgcctggctagtttttgtatttttagtggagactgggttttgccatgttggccaggctggtctcagactcctgaccccaagtgatctgcccacctcggcctcccaaagtgctgggattacaggtgtgagccaccgctttggagccgaggtggccggatcacgaggtcaagagctcaagaccatcctggccaagatggtgaaaccccatctctactaaaaatacaaaaaattagctgggcatggtggtgtgtgcctgtagtcccagctactcaggaggctgaggcaggaggatcacttgaacctggaaggcagaggttgcagtgagccgagatcgagccactgcactgcagcctggcgacagagcaagactccgtctcaaaaaacaaacaaaaagaaaacttgttctaattcttacaaaggtgcctgtagccgaggcaggggcccaggtgaggtggaggagggcgggagtggacgtctcagcccggcccctctcctgcaggtgttgtgactgcagtgcctccctgtcgcaccagtactatgagaaggatgggcagctcttctgcaagaaggactactgggcccgctatggcgagtcctgccatgggtgctctgagcaaatcaccaagggactggttatggtgagcgccccctgccttgcacactcacctggggtgggggtatccaagcagaccccatgctccaggtctctctcccatcattgtctctcctggtctcctttttgctggtctttggagctgctttctgagcctgactgtctgtctgtatccctcagcgcccccatctatggagccagctctgtccaggagctcagcagctggccagccgggtccctgcagttgtttttttggtgacacccttggaagaggcctaggggaggatctgtgggggttgttgggtctgctgagctgggctgttccctcctcacccccgcaccaggtggctggggagctgaagtaccaccccgagtgtttcatctgcctcacgtgtgggacctttatcggtgacggggacacctacacgctggtggagcactccaagctgtactggtgagtgccttggcccctccctgagcctaggaggcccacctgtgtcacagatctgcaagggtgctgactctcccacacccgggcctcctgccctttcccatggggtgaggtttgttggggcaaatgttcatatctcctttcccatcccggcatggaaacaagtgagaaataacacacagaagtcagtgtgaaaaagcctcagacggccaggcatgctggctcacgcctgtaaacccagcactttgggattccgaggtgggtggatcccttgaggctaggagttcaagaccagcctggccaacatggtggaaccccatctctattaaaaatacaaaaattaaccaggtgtggtggcgggtgcctgtaatcccagctactcaggaggctgaggcaggagactctcttgaacctgggaggtggaagttgcagtgagccaagattgcaccactgccctccagcctaggcaacagagcaagactctgtctcaaaacagaaaacctcagacgtcagctttcttactggccatgactgcagcatggtgctggcacaaaccaccagaggtggggtggatgccacaagttaaggacaccatccccagcataactgctccctctttagacaccagccacaagttcaggggtccccaacccactcacacttctgaccgactggctacaaattcagggactcccaagaccctgccaagtttgatcgtttgctaacagactcacagaactcaggaaatcctccatttttatcccagttttattatgaaggacacagctcaggtccgaccaaatgaagaagcatctcccctccctcccctagcacatcaatgtgatgaccaaccaggaagcttcactgagcttcagcagccagagtttttattgggatttcattacatcgtcatgactgattgagtcattggccgtatgatcaagcttagtctctagcccccgttcttggaggtcaggctggatgaaagctgcaaccctcttcaaatcacatgatgtatctttgcggggctgagtcatctcattagtatcaactcaggaatagtctgaggggctcatgaataacaaagataccccattccaaggacttagagtctccctcccaggaatcaggacaaaacccagacagattctttcttatacaacactgatcaagctggattagaggacaacgtggcttgatcccagatgggcttttaatgacttcctcctgaactggatttatcctcaggccttgtcctggccgcttacaggatcacagcgagtagacagacccgaatgactcagagggacgagggctggctgggcacgcacagttcctgctcccagttccataggaagagtgaaagaaaagaaagctggccaggtgcagtggctcacccctataatcccagcactttgggaggccaaggcaggcagatcacctgaggtctggagtttgaggccagcctggccaacatggtgaaaccatctctactaaaaataagaaattagccaggcatggtggtgcttgcccgtaatcccagctctcaggaggctgaggcaggagaatcgcttgaacccaggaggcggaggttacagtgagccaagatcacaccactgcacttttggacaattgctagctttccttttcttttgagacagagtcttgctttgtcacccaggctggggtgcagtgttgtaatcaacagagtgagactccatctcaaaaaaaaaaaaaaaaaggaagggattgggggaagagcctggggctgggggctgcagagatgctgaaattgatgacgcccttgacactcttttcttcccaccccggcggctcttgcagcgggcactgctactaccagactgtggtgacccccgtcatcgagcagatcctgcctgactcccctggctcccacctgccccacaccgtcaccctggtgtccatcccagcctcatctcatggcaagcgtggactttcagtctccattgaccccccgcacggcccaccgggctgtggcaccgagcactcacacaccgtccgcgtccaggggtgagtggccggcctgccgaggctgccgtcggtgtggctatggctgttgatgtgggtggcagagtctggcactgggggccctgaaaatgaatgggcgagtgtttgggtacagatggggcccagttctgacaacctggtttgccagatttctggcccagtcattcctctgaataccattacaaatgccagatacaataaaaagacattttcaaccgggcatggtggcccacacctgtaatctcagcacttcgggaggccgaagtgggtggatcacctgaggtcaggagttcgagaccagcctgggcaatgtggtgaaaccccgtctctactaaaaatacaaacgtagccaggcatggtagtgtgtgcctatagtgccagctgcttgggaggctgaggcaggagaatcacttgaacccaggaggtggaggtttcagtgagccccgactgccattgcactccaggctgggcaacaagagtgtaactctgtatcaaaaaaataaaaataaaaaaaacacactcaaaaaataaaaagacattttctttagtccatgtctgatccaacaagaaagaggaggaaccaagtcaagaatgagtgaagaagctgggcgcagtaactcacacctgtaatctcagcactttgggaggccaaagtgagaggatcacttaaggccagaagtttgagaccagcttgggcaacatagcgagacctgcatgtctacaaaaaaaaaaaaaaaattaaaaattagccaggcatggtgaaatcactgaacacataaaggctgggcatggttgctcacacttataatcgaaacactttgggaggctgagatgggaggatcacttgaggccaggagttcgaaaccagcctgggaaacattgtagtcacagctacttgggaggctgaggcagaaggatctcttgagcccaggaagtggctacagtgagctataattgcacgactgcactctaggctgggcaatggagcaaaaccctgtctcaaaaaaatggggcagggctgataaagattagattactgtgtgactttgagcagctgctttctctctaggctttgggggtctgtttgaacaatgagggagttggataccttggagctttctaagatttctgtggcgcctttattgacaccttgagaagtagcatgcagtgtttctacttttgggcaattggtcacttctttttttttgagacagtctcactctgtcgcccagtctggggtgcagtggtgtgataccagctcactgcaacctccacccacaaggttcaagcaattcttgcacctcagccccctgagtagctgggactacaggtgaccacatgtggctaatttttgtatttttagtaaagacagggtttcaccatgttggccaggctcgtttcaaactcctgggctcaagtgatcctcccttctcggcctcccaaagtgccgggattacaggtgtgagccaccgtgcccggcccaagtgctagctttctctctctctttttttttttttcgagacggagtctcgctctgtcgcccaggctggagtgcagtggtgtggtctcggctcactgcaagccccgcctcctgggttcacgccattctcctgcctcagcctcccgagtagctgggactacaggcacctgccaccatgcccggctaattttttttttatatttagtagagacagggtttcaccatattaggcaggatggtctcgatctcctgacctcgtgatccgcccgtctcggcctcccaaagtgctgcgattacaggcatgagccaccacgcccggccctaccaagtgctagctttcatttgacgcagtgaatgtttcttgtacacctggcaggtgcctggcactgcataggcactgttgagatgtgaaggtggccctggggacagaaaattatactgggcttgactgtgtgtctccatcccttgacatcagccaagccagcagctgctttacatacatgatgagcagacagctgcttgaaagagatgaggaaactcccagaccaacggctcttaccagagggccaagggaggtccccacagagtcagaggctgcagctggtccctgaaatccaggcagaattttagaaatgaagacagtcagctgggtgcagcggctcatgcctgttatctcagccacttcggagggctgaggtgagaggattgcttgagcccaggaggtggaggctgcagcaagctatgatgacaccatgcattccagcttgggcgacagagcgagaccctatctctaaaataaaaatgaagaagacagttaatgacgtctcctccctgtctgcctcactgggtaagcattcgcccagccaacatctggaacatcccagttctgcaaagagccacacccttcccagaaagagcccaacttgccaaagatttacttatttgttttaaactggttttagttgaccgcttttcattttgtgtatagcagcgttttaaggaaggtctaatttatccaggccacctgctgctttagcaaaccaagggagaggatgtgagattctaaggaatttacatatgtatgtcatatatatatatatatatatagacacacaatttttttttgagacagggtcttgctctgtcatacaggctggagtgcagtggcacaatcatagctcactatagcctcagatgcctgtgctcaagcaatccactcacctcggcctcctgagtagtgagactacaggcacacaccaccacacccagctaattttttaattttttgtagagactgagtcttgctgtgtcgcccaggctagtcttgaactcctgggctcaagcaatcctcccacattggcttcccaaagtgctaggattacaagcgtgagccactatgcctggcttatttttaaggttatatgcatgcaaagcctgtatcaatgaaaatattttctttggtttttttcaacttttcatcttcgcattttgcagatttatagaaaatttgctaaaataataagtccattgaatacatacacacccttcaccaaggttcaccaattcgtaactgccatatttgggagttatatgtgtgtctctctatatatacatatatggatacagatacatatacatgtttagtgacttgtttatatttgtacatacatgtacatgttgttatttattgatcgtttgggagtaagttgcagggatcattgactcccccacaattatgctagatattctcaaaagaaggaccttctctttttttttttttttttttttttggagacagggtatcactgtcattgaggctggagtgcagtgatgcgatcacagctcactgcagcctcaacctcccaggctcaagtgatcctcccacctctgcctcccaagtagctgggactacaggcacgggccaccacgcctggctaggcattctgttatgtaattatcaattgtatcttatagttcagtgatcacattttggaaatgtaacattgataccattatctaatacacagaccatattcaaattttgcctattgtctctatactgaactactgagctgtcctttatagcaatctccccctcatccacagtccagtccatgatcaacattgcatttaatcgtcatgtgtcatcagtatcttttttttttttttttttgagacggaattttgctcttgttgcccaggttggagcgcaatggcgcaatcttggcttattgcaacctccgcctttgggcttaagtgattctcctgcctcagcctcctaagtagctgagattacaggcgtgcaccattatgcatgcctaatttttgtatttttattagagacggggttttaccatgttgccctggctggtcttgaactcctgacctcaaatgatccacccacctcagcctcccaaaatgctgggtttacaggcatgagccactgcgtctggccatttcctcagcctttcattgcccttcatgatcttgacatttttgaagtgtacaggccagtcattaaagtaaaatgtttttccttttttttttttttttttttaaaaagagacagggtctcactgtgttgcccaggctggtctcagactcctaggctcaagtgatcctcccgcctcagcttcccaaagtgctgggattacaggcgtgagccatcgtacctgccctcgcatttgggtttgactgatgtttcctcttagggagacaggctctgcaggtttggcctgatactgcataagtgatcctctgtccttccgagtggatcttgccaggagacatatgatgtcagtgtgccctttgctgaggatgttcactttgattacttgttttttctgtactgtaaggatttttttccctttgtcatcaataaaccatttgtgagatttgagtctgtaaatatcctgttcccaaaaacccttccccaaatgatttgagcatctattgatgattcttgcctgtagcgattattactagggtggctaccaaatgctgaatttctaactctgttcttccttctgcatttgttactgtaaggaagagcttctcccccatacgagaatagtctttttgtttgcttggttgtttttttgagatagggtctcactctgttgcccaggctggagtgcagtgacatgatcatagctcactgcagcctcgacctcatgggctcaagcgatcctcctgcctcagcctctcgagtagctgggactacaggcagcaccaccatgcctggctaattttttattttttgtaatggtgaggtctcactattttgctcaggctggtctcgaactcctgacctcaagtgatcttcccacctcagcctcccaaatagctgggattacaggagtgtgccaccatgctcagctaattttctgtaaaaaatgtcatagagatggggtcttgctatgctgcccaggctggtctcaaacccctagtctcaagcaatcctcccaccttggcctcccaaagtgctgggattccaggcatgagccaccacacctggccctgtttttcttaaagttctcagtctcctctctgccttacccccatccccttttccatctccaggacctagggcagagacaaagtgagcattccctaaaaagcttttatgaggcaaaatgaaaaccagctcacgcctataatcccagcactttgggaggccaaggtgggtggattacctgaggtcaggagttcaagaccagcctgaccaacatagagaaaccccatctgtactaaaaatacaaaattagccaggcatggtggcacatgcctgtaatcccagctactcaggagcctgaggcaagagaatcacttgaacctgggaggcggaagttgcaatgagccgagatcactccattgcactccagcctgggcaacaagagcaaaactctgtctcaaaaaaaaaaaagaaaagaaaagaaaaccaggtccctaacaccgaagagttaaaagaaataagtaaatttggcaaattggtctttttgtgagttagcttataggcaactgatcgagggtctctttcccgtcttcaccctgcaattgtggctcagggcaagctgccagctccctcctgccaatgcaggagcaatagagcttggcctcctcttgcagggcgagtttgggagtcagatatgaagccactaatccgggacctttttgggacccaaggcactcatctgccccaagcataccaggcaggccaggtgcaatgactcatgtctgtaatcctagcactttgtttttgcgacggagtctcgctctgtccacccaggctggagtgcagtggcagaatcttgactcactgcaacctccacctcccaggttcaagcaattcctgcctcagcctcccaagtagctaggactacaggcgcccactgccacgctcggctaatttttgtattttcagtagagacggcgtttcaccatgttggccaggctggtctcaaactcctgacttcaagtaatccatccaccttggcctccccaactgttgggattacaggtgtgagccactgcgcccggccagtcctagccctttgggaggctaaggcgggcggattgcatgagctcaggagttcgagaccagcctgggaaatgtggtgtaaccccgtctctactaaaaatacaaaaaaaattagctgggtgtggtggtgtgcacctgtaatcccagctactcaggaggctgaggtacgagaatcgcttgaactcaggaggcagaggctgcagtgagctgagattgtgccattgcactccagcctgggtaacagagtgagattctgtctccaaaaaaaaaaaaaaaaaaaattcgagaccaaacatacctgggatttggaaggatagatctgttcccccagggtggagacaatggtccattgaatgggaacagctgagcatcttgtgtgggtggccagtgcctacaagcgtgccacctttctccagctcacacctgtggcagacatcagtaattgattacagaattcctcccctgaaaccagaactcggtgttctggccatctgctacttcccagtcacacgaagtagaatcctccacctgctcaccctggatctggtgcccttcgccttggtttcctgttggggctctgagggacaggtgggcactggcctgacccctgccttacccacagagtggatccgggctgcatgagcccagatgtgaagaattccatccacgtcggagaccggatcttggaaatcaatggcacgcccatccgaaatgtgcccctggacgaggtacggtcctgagtctgtggggcaggacgggaggtagtgccttcatgcctagccccctccccactccacccccattcacatgcctgctgtccccagattgacctgctgattcaggaaaccagccgcctgctccagctgaccctcgagcatgaccctcacgatacactgggccacgggctggggcctgagaccagccccctgagctctccggcttatactcccagcggggaggcgggcagctctgcccggcagaaacctgtcttgtaagtcagcctgctcctcggttcagctgggtgctttcactcctgctggggctcaggggctgtgggacctaggtcggggagccagccctgcacaaatgcagcccaggcttgagccagggaggtggaggctgcagtaagctgtcatcacaccactgctctccagcttgggtgacaaaacaagacccactctcaaaaaaaaagaggaaacacacattttttaaaaagccggggacggggccaggcgtggtggctcatgcctgtaatcccagcactttgggaggccgaggcaggtggatcacctgaggtcaggagttcaagaccagcctggccaacatgggaaacctcatctttactgaaaatacaaaaattagccgggcttggtggcaggtgcctgtagtcccagctactcaggaggctgaggcagatgaatcacttgaacccaggagatggaggttgcagtgagccaaggtcacgccactatactccagcctgggcaacagtgtgagactctgtctcaaaaaaaaagaggatgacagagcaggatctgaggggttgaggggagctgggggctgccactagagccaggataggccgagacactgggatgggcagcctttggactgtcccaggcgggccctcccaaagcagggggtgattgcatagactggcatggacaggggcatgcaggcaggaggaggaaggggcagggccttggccgggtgctacctgtcccccggtggcacttggcaccatgtgtgccccccaggaggagctgcagcatcgacaggtctccgggcgctggctcactgggctccccggcctcccagcgcaaggacctgggtcgctctgagtccctccgcgtagtctgccggccacaccgcatcttccggccgtcggacctcatccacggggaggtgctgggcaagggctgcttcggccaggctatcaaggtacagagcatgccagggtctcaggggacagtctgggtgggacccctccatcctccttccttcccagtctatggaaacacagtggaaggggtatctggcttccagactccctggccagtgccctctcctcccttggcctcctggagctaattaggaacaggggacctcctacaggtagactgagaccttatgtgcgggaggtcattgaaaggtggctcctagccaggcacagtagtttatccctgtaatcccagcaccatgagaggctaaggctgtaggatcgcttgagcccaggaattcaagaccagccttgacatcatctctacaaaaaatttaaaaattaattgggtatagtggtgcatgcctgtggtcccagctacttgggaggcttaggcaggaggattgtgagccaggagttcaaggctgcagtgagctatgatcatgccacagcactccagcctgggcaatagagcaagaccccatctcaaaaaaaaaaaaaaaagacaagggattaatacatcccatccacttgggtatttgggaacatcccatgcacagcctagagtatgaagccatctgcacatctccctggcagtcctggggtggagatggggcttcctagaaggcgggcttacagcagagcttctgtcttcacacctctgtgtcccacacgcaggtgacacaccgtgagacaggtgaggtgatggtgatgaaggagctgatccggttcgacgaggagacccagaggacgttcctcaaggaggtcagtgagcggaatgccctcttccctccagagggacttccaggtgctcacccctgccccatcaacacaggtcggaaaagggctctgggaaccattgaaagaagagcgagcaggccaggcatagtggctcacgcctgtaatcccaacactttgggaggttaaggagagaggatactttgagaccaacctgggcaacatagcaagaccccgtctctacaaaaaaattttaaattaaccgagcttggcaatgtgcacctgtcatcccagctactcggggggctgaggtgggaggctcgcttgagcccaggagttggaggctgcaatgagccatgatcgcaccactgcactccagcctggggaacaaggcaagaccctgtgtccaaaaaaaataaaagtaactgcattggtcgggcatagtggctcacgcctgtaatcccagcactttgggaggctgagccgggcggatcacctgaggtcaggagttcgagactaccctggccaacatggcaaaaccccgtctctactaaaaatacaaaaattagcccagcatgatggtggtgagtgcctgtcatccaggctactcaggaggctgaggcaggagaatttcttgaactcaggaggcggaggttgcagtgagccaagatcgtgccgctgccctccagcctgggcgacagagtgagactccttctcaaaaaaaaaaaaaagaaaagaaaaaagaaagtaactgcaggcaggggactgggaaaaagagcatcgctgggggtgggggcagctcaagcagagggcacaggacgccagagggtgtggcagaggcaggagaggggagctgggggttccgtatctttgagaccgcctacagcccctggtgggatggaaaagggagaagcagacccaagcacagctgggaccacacagagcccgggcccagcctgtttgtgccccgccaggtgaaggtcatgcgatgcctggaacaccccaacgtgctcaagttcatcggggtgctctacaaggacaagaggctcaacttcatcactgagtacatcaagggcggcacgctccggggcatcatcaagagcatggtgagtcctgggcagagccagccaccccgctgtgcggccccgggcaaagcagctccctctgtgagcctcagtctcatctcttcaatggggggaagccacaggggtctcaaaggccctctgaaccctgattcctaatcaaaaaggggagcgactgactccatctaaagctaggaaaggccaggtacaatggtgcacacctgttattctggcactttgggagcccaaggcaagaggatcactcgaggccaggaattcaaggctgcagtgagctgtgatctcaccactgcactccagcctggaccacacagcaagaccctatctcaaaaactaaaataaaattcagagctttccttaaggatttgaataaaattacaaatccatctttagaaataaagtgctcaggccaggtgcagtggctcatgcctataatctcagcactttcagaggctgaggccagcagatcacctgaggtcaggagtccaagaccagcctggccaacatggtgaaaccccgtctctactaaaaatacaaaaattagctgggcctggtggcaggcacctgtaatcccagcactttgggagactgaggttggcagatcacctgaggtcaggagttcgagaccatcctggtaacccgtctctactaaaaatacaaaaaattagccgggcaaggtggcaggtgcctgtagtcccagctactcgggagactgaagcaggagaatggcgttgaacccagggggcagagcctgcagtgagccaagatcgcaccactgcgctctagcctgggtgacagcgagattccgtctcaaaaaaaaagcacttggaggaagcctcacagagtcctgtgctggaccacaccctggggatccagtcctggcctccagccccatttctgtaccaccctgagaccatgggatcttcctcaggttggattaccttgtatccaaggtgtggaccctatgggctcctgctaggtgtaacttgacacaacgggttccgttgtcaggtgcaatttagaaactctgggctaggccaagcgcagtggctcacacctgaattcccaaactttggaaggccgaggcaggagggtcactagaggtcaggaggtcaagaccagcttggacaacataatgagatcccaatcccatctctacaaaaaaaattaaaaaattagccaaatgtggtgacacatgcctgtggttccagctccacaggaggctgaggcagaaggatcacttgagcacaggaggtcgaggctgcactccagcctgggtgatagagtgagaccctgtctcaataaaaaataaagatctccaaggggatgaggtttgagaatgaggcgtctcccccaaatgatttgagcccaaagccccgttctcctggcatggctcagtgctgccactgcgcaggtgaccttgctgggcccttctacctcttacctgtctgtgaaagtaggttctaattttttaaaaacctagaaagatgagttttttgtttttgtttttgtttttcccgagatggagttttgctcttactgtccagcctgaagtgcaatggcgtgatctcggctcactgcaacctccacctcccaggttcaatcgattctgcctcagcctcccgagtagctgggattacaggagcccaccaccacacccggctaatttttgcgtttttagtagagacagggtttcaccatgttggtcaggctggtctcaaactcctgacctcgtgatccaaccactctgacctcccaaagtgttgggattacaggcgtgagccaccacacctgacagaaagatgagattttatagaaaataaatatagcttgttttctcagaggaggcagattgggagctatagaggaatatccctgcttagagtttgaaatcagttctgttaggaaataatgtttgtaggggccgggtgcggtggctcacgcctgtaatgccagcactttgggaggctgaggcaggtggatcacttgaggttaggagtttgagaacagcctggccaacatggtgaaaccctgtctctactaaaactacaaaaattagctgggtttggtggtggacacctgtaatcccagctacttgggaggctgaggcgagagaattgcttgaggccgggtgcagtggctcatgcctgtaatcccaacactgggaggccaaggtgggcagatcacctgaggtaaggagttcaagaccagcctgaccaacatggtgaaaccccgtctctactaaaaatacaaaaaattagctgggtgtggtggcgcatgccatagtcccagctactcaggaggctgagacacaagaatcacttgagccccggaggcgaaggttgtagggagctgagatggtaccactgcactccaccctgggtgacagagtgagactccatctaaagaaaaaaaaaaaaggaaataatgtctgtgagctgtgttgactcatactccttagaagcagacagttgtgggtgcccgaagaaatcggggtgttggggagcccagggaccctctaggacgcttgcctcttcctgcctctgtctcatgcaaccatccctgccatcggggcccccaccggccccaccctggccattctttctccatcccaggacagccagtacccatggagccagagagtgagctttgccaaggacatcgcatcagggatggtgagtgagccgggtgctctagctccattcataatcccaccaggaatttgcaaacagaacccacaaagaagctttgaaagagggcagagggggtcgatgggagagtgggaagaatcgtcccgactggcctgattggggtgggagcagagggagttcctggggagccaggatgggctggggtccctctgcacagctgccccctgactcccgtgtccccgtccctaggcctacctccactccatgaacatcatccaccgagacctcaactcccacaactgcctggtccgcgaggtgagtaccagggccccacgtggctgggtgtcaggagacagcaggagcccatccaaccccagcctcagggccttcccagaactggaggcccctccatgttgcctccatgacttcaatttgaggtgggggtggggggcagcagcccgtggggaagagcgcagggtcaggaggcagacagacctgggtttgagtcctgtctctgccactgactcatggtggaccatcagagtcccaggctggtaggagggtctcataaatcaatgaaggagaaagtgacatgtaagctacaaaggaccaggaccgtggtcttcatagagcacagcccatggcagagtggccatgggctacaccagacagcaccagcatctgggggccacagagtgggggcataggcgtatgggctggagtggtcagggcaggcttcctgaaagaggaggcttggccagacacagtggctcacacctgtaatcccagcactttgggaggccgaggcaggcggatcacgaggtcaggagatcgagaccgtcctggctaacatgggcactgtggctcacacctacaatcccaacactttgggaggccgaggtgggtggatcacttgaagccaggagttcaagaccagcctggccaacatggctaacacggtgaaaccccatctctactaaaaatataaaaaattagccgggcgtggtggcaggtgcctgtagtcccaactacttgggaggctgaagcaggagaatggtgtgaacccgggaggcggaacttgcagtgagccaagatcgcgccaccgcactccagcctgggtgacagagcgagactccatctcaaaaaaaaaaagaggaggctttaggtggatatttaagcaggggacgggcaggcaaagagcccagtgtctaaggattgtcaagggaggagagcccggttctccaccaaaagcacaggagcgagtaaccatgcccatctggagaggtggtgtattcgtgtcctggggctgccatcatgaagtactgtgaaccagatggctcaaaacaacagaaatgtgctgggcacagtggctcacacctaaaatcccagcaatttgggaggccaaggcaggtggattgcttgagctcaggagtttgagaccagcctgggcaacattacgaaagcccatctctgccaaaaatacaaaacggaatagccagccgtggtggcataagcctatggtcccaactacctgggaggctgaggtgggaggatcacttgagcctgggaggtagaggttgcagtgagccaagattgtgctactctactccagcctgggagacagagccagaccctgtctcaaaaaaacaaaacaaaacaaggccaggcactgtggctcacgcctgtaatcccagcactttgggaggccgaagtgggtggatcacttgaagccaggagttcaagaccagcctggccaacatggcaaaaccctgtttctactaaaaattcaaaaattagcaggcatggtggcgcatgcctgtaatcccagctactcgggaggctgaggcaggagaattgcttgaacccaggaggcagaggttgtagtgagctgagattatgccactgcactccagcctgggtgatagagtcagacaccgtctcaaaaaaaaaaaagcatcacatggcaagaggggctgacaagagacccccaaactgaccattatacagacccactcttgtgataactaacctggtccctcaataacccattaatctgttaattcatacagagccctcatgacccaatcacctcttacaggccctgcctcttaataccgttagagtcaggccaggcatggtgacatgggcctgtagtcccagctagttggaaggctaggtgggaggatcccttgagtccaggaggtaaatgttacagtgagctctgattgtgtcactgcactccagcctgggcaacagagcgagcccctgtttttaaaacagcaacaagccaggcacagtggctcacgcctgtaatcccaacactttgggagactgaggcaggcagatcacttgaggtcaggagttcaagaccagcctcaccaacacagtgagacccctctctactaaaaatacaaaaattagctgggcgtagtggtgggtgcctgtagtctcagctactcatgagactgaggcagaattgcttgaacccgggaggtggaggttgctgtgagccgagatcacgtcactgcactccagcaacagagtgggactccatctcaaaaaaaataaaaaataacagagatctgtgttggcttacacctgtaatcccagcactttgggagtccaaggtgggcagattgcttgagcccaggagtttgagaccagccaggcaacatggcaaaaaaataaaaaaatttgtctctacaaaaaaattaaaaaattagctggcatggtggtgagtatctatagtaccagctactcaggaggtggaggtgggaggatcgcttgagcctgggaagttgaggctgcaatgagctgtgttcgtgccactgcactccagcctgggccacgggagggagactctgcctcaaaaaaaaaaaaaaaaaatcaaacccgaaaagcaaaaaacatagacctcacctgcttattgggaatattcaagataaaattaggccaggcacggtggctcacgcctgtaatcccagcactttgggaggccgacgtgggcggatcacgaggtcaggagatcgagaccatcctggctaacacggtgaaaccccgtctctactaaaaatacaaaaaattagctgggcatggtggcaggcgcctgtagtcccagctacttgggaggctgaggcaggagaatggcgtgaacctgggaggcagagcttgcagtgagctgagatcgtgccactgcacttcaacctgggcaatagagcaagactccaactcaaaaaaaaaaaaaaaaagataaaattgggccaggtatggtggcttactcctgtaatcccagcactttgaaaggctgaggcaggtggaccacttgaggccagaagttgaagaccagtctgggcaacatagcaagaccctatctcaatcagtcaatcaacctaaataaatagtaaatctggtggcatgccaagcacaggacctgggtctataatcaaaattcctgtcttgatgggcacagtggctcacacctgtaatcccagcactttggtaggccacagtgggtggatcacctgagatcaggagttcgaaacctgcctagccaagtatggtgaaacccgtctttactaaaaatacaaaaattagccaggcatggtggcaggcgcctgtaatcccagctactcgggagggtgaggcaggagaatcgcttgaacctgggaggcggaggttgcagtgagccgagatcatgccactgcgctccagcctgggtgacagagcaagactccgtctgaaaaaaaaaacaaaagaattcctgtcttctctccgaaacaaagcagcatcagtgcccccgcaggtgggagggagcgcttgcaggagggagcagtgggtccgccacgacggtctggggagcaggtggggagggggcagagggtgcagcgtgtggtgggagggaggaagccacactgctatcttcaggtgcttcccgcagctccatttgcaaagagcggatgggtttggggaaggaaggggtccccaccctgtgccaatacagcgtatcagaggtatgttctctgggctgtctacgggttggcttggggtcctggggaggggcaggccaagcgggcagtactaggatcgggtcccagcatgacccggcttcaccttcccagaacaagaatgtggtggtggctgacttcgggctggcgcgtctcatggtggacgagaagactcagcctgagggcctgcggagcctcaagaagccagaccgcaagaagcgctacaccgtggtgggcaacccctactggatggcacctgagatgatcaacggtgagtggttcagccctgcccatcatggccctcacgggaagccatgggggagcccaggagagctgtaacctcccaagcccctggcccctcccagcctccttggctcttcagttaccctgtgggtcctgttgctcctataacacacttagtggcagccaggcacggtggctcacgcctgtaatcccagcactttgggaggctgaggtgagtggatcacctgaggtcagtagttggagaccagcctagccaacatggtgaaacccccattctttactaaaaatacaaaaattagctgggcatggtggcgggtgcctgtaatcccagctactagggaagctgaggcaggagaatcgcttgaacctgggaggcagaggttgcagtgagccgagatcgcgccattgcactccagcctgggtgacgagcgaaactccatctcaaaaaataaataaatagaagacacttagtggcttaaataaatgatcatacagttctggagtctgaagtccagcgtcagcctcaccgggctgaaatcaaggcgccggtagggtgagctccttctgcaggctccggggcacctgtttcctgaccttttctggctcgtggaggcttcctcattcctcctgttgctgccccctcctctgtcttcagggctggctgcaaagcatcttctcttctctgatctctgcatccatccccgcatctctttccctggctctaaccttcctcctttttttttttttttttaaagagggtctcgctctgttactcaggctggagtgcagtggtgccaccatagctcactgcagcctcaaccttctgggctcaaactgtcatcccaccccagcctcctgaatagctgggaccacaggcatgcaacaccacacccagctaatttttttattttttattttttatttttttttgagacagagtctcgctgtgtctcccaggctagagtgcagtggcgtgatctcagctcactgcaagctccgcctcctgggttcacgccattctcctgcctcagcctcccgagtagctgggactacaggcgcccgccaacacgcctggctaattttttgtatttttagtagaaacggggtttcaccgtgttagccaagatggtgtcgatctcctgacctcgtgatccgcccgtctcggcctcccaaagtgctgggattacaggcgtgagccaccgcgcctggccaattttttaaatttttaatagagacgggggtatcactatgttgcccaggctggtctcaaactcctggcttcaggcgatcctcctgccttgacctttcaaagtgctgggattccaggcatgagccaccatggccctccatccttctgatagggacccttacggtgacattgggcccacctggataatccaaaagcagccctccatctcaagaccctcaacttaatcccatctgcagagtccgatggaaggtgggacgtatacaagtcccagggatcaggacgcagtcatctttggggatcatagttctgcctcccacagggtctgcttccctcagtccatttctttgctgtcaatggtcctatatatgcccagattataggttataaagtccttctacaagcaggtgacacatgaacacaggttcagggcaggcagaccccagccatcacctcatcatagttaacctagttaaattagcctggcatgtggcgtggtgcctaatgcctgtggtcccagctactcaggaagccaaagcgggagatttacttgagccaaggagatcaaggctgcagtgagctatgatcataccactgccttctagcctgggcaacggagtgagaccctgtctcaagaaaacaaaaaataggccaggcacagtggctcacacctgtaattccagcactttgggaggctgaagcaggcggattgcttgaggccaggagttcgagaccagcctggccaacatggtgaaacgctgtctctactgaaaatacaaaaattacccgggtgtggtggcacagctactagggaggctgaggcaggagaatcacttgaacccaggagcagaggttacattgggccaagattgcaccactgcactccagcctgggcaacagaggaagactgtgtctcaaaaagaaaaaaaaaaaaaccttcctgtaatcccagcactttgggaggctgaggtgggcggatcacgaggtcaagagattgagaccatcctggtcaacatgatgaaaccccatctctactaaaaatacaaaaaaattagctgggcgtggttgcacgcgtctgtagtcccagctacccgggaggctggggcaggagaatgatgtgaacccaggaggcggagcttgcagtgagccgagatcgcaccactgtactccagcctgacgacagagtgggactctgtgtcaaacacacacacacacacacacacacacacacacacacacacacacacacacagagttaacatagcccgcaaagaagactataaaacagtcttagtggccgggcgcagtggttcacgcttgtaatcccagcactttgggaggccgaggcaggtggatcatgaggtcaggagtttgagaccagcctggccaacacagtgaaaccccatctctactaaaaatacaaaaattagctggacatggtttcgggcgcccgtaatcccagctactcaggaggctgaggcaggagagttgcttgaacccaggaggcagaggcaggagagttgcttgaacccaggaggcagaggttgcagtgggcgacagagcaagactctgtctcaaaaaacaaaaaagtcttagtgtttcctatgtttagggattagtgtgaggattaaaggttgtaaactcatttccacctagttggcattcagtaaatgagaattgacatttagtactaattgtttcgggtattttgttttttgttttttgttttttgttttttctgagaccgagtcttgctctgtcatccaggctagaatgcatggtgcgatctcggctcactgcaagctccgcctcccgggttcacaccattctcctgcctcagcctcccacgtagctgggactacaggcgcccgccaccacgcctggctaattttttgtatttttagtagagacggggtttcaccatgatctcgatctcctgacctcgtgatccacccgcctcagcctcccaaagtgctgggattacaggtgtgagccaccgtgcccggccagttttttgtttttgagatggagtcttgcattgtcacccaggctggagtacagtggcgtgatctcggctcactgcaacgtccacctcctgggttcaagtgattctcctgcctcagtttccctagtagctgggattacaggcacctgccaccatgcctggctaatttttctatttttagtagagatggggtttcaccatgttggccaggctgatcttgaactcctgactcaggtgatccacccgcctcggcctcccaaagtgctgggattacaggtgtgaaccactgtgcccggccatgtaccgattatttttaacatcattaagtagctggtatcattcccattttacaataaggaaactgaggctcagagagtctgtgtcagtttcctgaggttgctgtaataaattgttagaaacttgattatttaaaacagcagaaaatggtcaggcacagtggctcacacctgtaatcccagcactttgggaggccgaggcgggcagatcactggaggtcaggagttcgagaccagcctggccaacatggtgaaacaccatctctactaaaagtacaaaaattagctgggcatggtggcaggcgcctgtaatcccagctactcgggaaattgaggcaggagaatcgcttgaacccaggaggcagaggttgcagtgagccacaatcgtaccactgcactcttgcctggacaacaaagcaagactccatctcaagataaaataaacagcagaaatttattccctcttagttttggaagccagaaggttgaaatccaacagggctgcgctccctccagggcgatctaggggagaatgcattccttgcctcttccaccttctggttgttttgcattcctgggcttgtggccgcatcactccagtctccacccctgtcttcacagggccacctcctcctcttctgctgtgtcttctctgtgtctctctcaagagggcatttgcagtggcatttggggcccacccagatcatccagcatcatctcatctccagatccttaacttaatcccatctgcaaaagaccctttttctgacccagtaacattcacagattccagagacctgacatggttcccttttgggaccagcacagagttcatgacttgtgcaaagtcacgcagctgatcggtgcctcgaactccttgtccagggctctgcccttgctcctcagagctcccaaaggcttgctcagacctggtggggttgggggaaagagcctaagcctgggttcccatagaggttgccggcatctgcctcctgggcctggacctcccggccggggcatcctcccagctggcctggtcccctgccttttggcatccctggcacccccatgtgttcatctgctgacagtcggtctctttatccaggccgcagctatgatgagaaggtggatgtgttctcctttgggatcgtcctgtgcgaggtaggtccagggttgggtagcagcggtgttgaggcctgggctcctccccactcacccaggctgcaggctcagcatctgcaggggcctcatgccaggaagcctgcccacagcaaggcatgggctggcccccatggggtactgcagtcaggctgcagccaggcccagtgccacctgccctcaaaccacctggatggcacccagatgcccaggctgagggccccctggagtaactgccgggccttgtactggacagatcatcgggcgggtgaacgcagaccctgactacctgccccgcaccatggactttggcctcaacgtgcgaggattcctggaccgctactgccccccaaactgccccccgagcttctaccccatcaccgtgcgctgttgcgatctggaccccgagaagaggtgagtggggtggggccctggcctgggagacggtggggccgattcccgggacagccagacccaccgttccccacccacctgtcacccaggccatcctttgtgaagctggaacactggctggagaccctccgcatgcacctggccggccacctgccactgggcccacagctggagcagctggacagaggtttctgggagacctaccggcgcggcgagagcggactgcctgcccaccctgaggtccccgactgagccagggccactcagctgcccctgtccccacctctggagaatccacccccaccagattcctccgcgggaggtggccctcagctgggacagtggggacccaggcttctcctcagagccaggccctgacttgccttctcccaccccgtggaccgcttcccctgccttctctctgccgtggcccagagccggcccagctgcacacacacaccatgctctcgccctgctgtaacctctgtcttggcagggctgtcccctcttgcttctccttgcatgagctggagggcctgtgtgagttacgcccctttccacacgccgctgccccagcaaccctgttcacgctccacctgtctggtccatagctccctggaggctgggccaggaggcagcctccgaaccatgccccatataacgcttgggtgcgtgggagggcgcacatcagggcagaggccaagttccaggtgtctgtgttcccaggaaccaaatggggagtctggggcccgttttccccccagggggtgtctaggtagcaacaggtatcgaggactctccaaacccccaaagcagagagagggctgatcccatggggcggaggtccccagtggctgagcaaacagccccttctctcgctttgggtcttttttttgtttctttcttaaagccactttagtgagaagcaggtaccaagcctcagggtgaagggggtcccttgagggagcgtggagctgcggtgccctggccggcgatggggaggagccggctccggcagtgagaggataggcacagtggaccgggcaggtgtccaccagcagctcagcccctgcagtcatctcagagccccttcccgggcctctcccccaaggctccctgcccctcctcatgcccctctgtcctctgcgttttttctgtgtaatctattttttaagaagagtttgtattattttttcatacggctgcagcagcagctgccaggggcttgggattttatttttgtggcgggcgggggtgggagggccattttgtcactttgcctcagttgagcatctaggaagtattaaaactgtgaagctttctcagtgcactttgaacctggaaaacaatcccaacaggcccgtgggaccatgacttagggaggtgggacccacccacccccatccaggaaccgtgacgtccaaggaaccaaacccagacgcagaacaataaaataaattccgtactccccacccaggtcctgcgtggcgatgtgtgtctggggccctggggaaatagtcaaggtaagaggagttagtcttccctgaccagaagacaaggatgagtgtggtggctcatgcctgtgatcccagcactctgggaggctgagacaggacgatcccttaagcccaggagttcaagaccagtctggacaacatagtgagatcctgtctctacaaaaatttttttttaattagttgggcagaggccaggtgtggtggctcatgcctgtaatcccagcactttgggaggcagaggcgggtggatcacctgaagttaggagttcaagaccagtctggccaacatggtgaaaactcgtctctactaaaaatacaaaaattagccgggcgtggtggcacatgcctgtagtcctagctacttgggagactgaggcaggagaatcgcttgaacccgaaaggcagaggttgcagtgagccgaggtggtgccattccactccagcctgggaaagagcgagactttgtctccaaaaaaaaaaaaaaaaaaattggcaggccaggcacagtggctcacacctgtaatcccagccctctgggaggccgaggcaggaggatctcctgaggtcaggagtttgagaacagcctgactgacatagtgaaaccccatctctactaacaatacaaaattagccaggtgtgatggcacatgcctgaaatcccagctacttggggggttgaggcaggagaattgcttgaacccaggaggcagaggttgcagtgagccgagatcgcaccattgcaccccagcctgggcaacaagagcgaaactccatctcaaaaaaaaaaaaaaaaattagttgggcatggtggcatgcacctatagtcccagctactcaggaggctgaggtgggaggatcctttgagcccaagagatcaaggctgcagtgagccatgtttgcaccactgcactccagcctgggcaacaaaacaagactctgtctcaaaaaaaaaaaaaaaaaaaaaaaaaggcagggatggaggggggaagagaacacagcccagttttaggtggagctgaggtggtggcccagccaggacaagtgaagagtcttcagaggctgggtttggagggccgtgcatattccggaggtactgctttcatacttaaatgttttcttgtaaaactcacacctgtaatcccagcactttgggaggccaaggtgggcggatcatctgaggtcgggggttcaagaccaacctgaccaacatggagaaaccccgtctactaaaaatacaaaaaattagccaggtgtggtgacacatgcctgtaatcccagctactcgggaggctgaggtaggagaattgcttgaacctgggaggcggaagttgtggtgagctgagatcgtgccattacacttcagcctgggcaacaagagcaaaactccatctcaaacaaaactaaactaaactaaactaaagggttctatcaagaagatgggctgcacgtgatggctcacacctagactcccagcgcttcaggaggccgaggtggaaggatcacttgaggccaggagttcaagatctgcctgggcaacatagcaagaccctgtttttacccaaaaaataaaaaaattacccagatgctgtggtgtgtgcctgtagtaccagctactgagaggctgaggcaggaggaccgcttgagcctgggaggtcaaggctgcagtgagctgtgatcgtgccactgcactccagcctgggtgacacagcaagaccttgtctcaaaaataaataaaacattttaaaaacacactaggtattgcaaatacagggcatttaatttggttttttgtttctgttttgttgttgttttgagacaggtctcactctgtcacccaggctggacagcagtggcacagtcatggctcactgcagcctcaacatcccagggttgagtaatcctcccacctcagcttctcaggtagctgactatagatacacgccactacaccaagttaatttaaagaaaaaaaatgtgagaggccaggcgcagtgctcacgcctgtaatcctgacactttgggaggccgaggcaggcggatcacctgaggtcaggagttcaagaccagcctggccaacatggtgaaaccccatctctactaaaaatacaaaaattagccaggtgtggtggcaggcacctgtaatcccagctactcgggaggctgtgacagaagaatcatttgaacctgggaggcggaggttgcagttagccgagatcacgccattgcactccagcctgggtgacaagagtgaaactgcctctcaaaaaaaaagtttagaggcaaggtctcactttcttctctaggctggcctcaaactcctgggctcaagcagtctcctgggcctcccaaagtgctgggattacaggcatgagactccatgctcagccacatttaatacgagaatttttttgttttgtttttttggtttttttttttgagatggagtctcgcactgtcacccaggctagagctcagtggcacgatctccgctcactgtaagctctgccttccgggttcacaccattctcctgcctcagcctcccgagtagctgggactacaggcgcccgccaccatgcccggctaatttttttctatttttagtagagacggggtttcaccatgtgaaccaggatagtctcgatctcctgacctcatgatccacccatctcggcttcccaaagtgctgggattacaggcgtgagccactacacccagccaatacaaggaaatttttacatggctgttgaaagacagaggaaaggccaaaagtggacacttaggtaacccagagatgattgcaggagagagctaccaccctcggtggggggattgaaggggagaggtgatcacttgagttatctaatgttgcatagggaagtcacctctcaacttggttgcttaaagtaacagggatcactcattgctcatgatttctggttttttttttttttttttgagacggagtctcgctctgtcgcccaggctggagtgcagtggcacaatcttggctcactgcaagccattctcctgcctcagcctcccaagtagctaggactacaggcgcccgccaccacacctggctaattttttgtatttttagtagatacagggtttcaccgtgttagccaggatggtctcgaactcctgacctcatgatccgcccaccttggcctcccaaagtgttgagattacaggcgtgagccaccgcgcccagcttgatttctgtttgtcaagaatttgggagtcattttggtggggaatttgtatgtgggggtctctcctggggctgcagtcctttgagggtgtaactggggctgaagttcccttccaagaaccctcatatgtggctcactcacatggcgggcaatttggtgctagcagttgattctacagagaaaaacgggcttgagccaatgtgctacaagccaatactatgacaccaggcttttggttttttgtttttatgatttatgtatgtattttttttttttttgagacagaatctcattctatcaccctggctgcagtgcagtggcacaatctcggctcactgcaagctccacctcccaggttaaagggattctcgtgcctcagcctccctagtagctgggactacaggcgtgcaccaccatgcctggctaatttttgtacctttagtagagacagggtttcactatgttggccagactggtctcaaactcccgacctcaagtgatccacctgcctcagcctctcaaagtgctgggattacaggtgcaggcaaccatgactggccgttttttttgtttttaaagttggggtctcactatgttgtcccggctggtcttgaactccaaggctcaagtgatcctcctgcctcgacctcccaaagtgctaggcttacagtcatgagccaccatgcccagctgacaccaggcttttcagaaaagaatagctttattgcaagtcaaccagtaaggagacagaagtctagctcaaatctgtccccctgtgctggctttaaggcggtaattttattaggaaaggtttagggggtggattctgatattaggtgattggcggaagcaaaggggaggcctggaaagtgctcaggcatgcgcagttccctcttcatgttatctcatggggggcatgtgcaaattccgggggtggttagtatgtaacatgcactggaaattcgggctgtgacatcagcaagcttgttctgtgcaaactgcagttggccatattggtcccaatctatttcagccagcgtgttaatcccaccagcagatgaatttcagcatttctgcaagtcgtttctttttttatctgccatcctgcaaactggaaaatttctgctagtcactggtttctttaactctttggggcacggtttcactggtaggaggcctcagtttatcccatgggcctctccatagggctacttcagagtccccacagcagcctccagaatgaatatcccaagaaagaaaagaaaagtgccactaggggccgggtgtggtggctcacgcctgtaatcccagcactttggaagtctgaggcaggaggatcccttgagcccagaagttcaagccagcctgggcaatgtagggagacgccatctctactaaaaaaaaaaaaaaaaaagaagaagaatttaggccgggcgtggtggctcacgcctgtaatcccagcactttgggaggctgaggcaggcggatcacgaggtcaggagtttgagaccagcctggccaagatggtgaaaccctgtctctactaaaaatacaaaaattagccaggcacggtggcgggcgcctgtaatcccagctactcagg

SEQ ID NO: 32006 - DNA, 1559 bp, Homo Sapiens
gtttgagcagcattgttagagcctgtggaaaacactttacaactgtgtaactgtcttcatctttacagaggaatagtctacaaggaagacttgtaacctggagaagagacctgtcatttactacatcctttatagtgatgctacaggacgaagaggaatggataaaaacattggcgagcaactcaataaagcgtatgaagccttccggcaggcatgcatggatagagattctgcagtaaaagaattacagcaaaagactgagaactatgagcagagaatacgtgaacaacaggaacagctgtcacttcaacagactattattgacaagctaaaatctcagttacttcttgtgaattccactcaagataacaattatggctgtgttcctctgcttgaagacagtgaaacaagaaagaataatttgactcttgatcagccacaagataaagtgatttcaggaatagcaagagaaaaactaccaaaggtaagaagacaagaggtttcttctcctagaaaagaaacttcagcaaggagtcttggcagtcctttgctccatgaaaggggtaatatagagaagactttctgggatctgaaagaagaatttcataaaatatgcatgctagcaaaagcacagaaagaccacttaagcaaacttaatataccagacactgcaactgaaacacagtgctctgtgcctatacagtgtacggataaaacagataaacaagaagcgctgtttaagcctcaggctaaagatgatataaatagaggtgcaccatccatcacatctgtcacaccaagaggactgtgcagagatgaggaagacacctcttttgaatcactttctaaattcaatgtcaagtttccacctatggacaatgactcaactttcttacatagcactccagagagacccggcatccttagtcctgccacgtctgaggcagtgtgccaagagaaatttaatatggagttcagagacaacccagggaactttgttaaaacagaagaaactttatttgaaattcagggaattgaccccatagcttcagctatacaaaaccctaaaacaactgacaaaacaaagccctcaaatctcgtaaacacttgtatcaggacaactctggatagagctgcgtgtttgccacctggagaccataatgcattatatgtaaatagcttcccacttctggacccatctgatgcaccttttccctcactcgattccccgggaaaagcaatccgaggaccacagcagcccatttggaagccctttcctaatcaagacagtgactcggtggtactaagtggcacagactcagaactgcatatacctcgagtatgtgaattctgtcaagcagttttcccaccatccattacatccaggggggatttccttcggcatcttaattcacacttcaatggagagacttaagacacatttgaaaacagacatatcaagttctatgtgatgattttgggtttttaatactataaatacttgattgtaaactaaattcaagatcatttattggaaaatctagtttcacagctatttg

SEQ ID NO: 32007 - DNA, 4868 bp, Homo Sapiens
gcggccgcgtctttgttccagacgcagtccaggaatcatgctggagaagttctgcaactctactttttggaattcctcattcctggacagtccggaggcagacctgccactttgttttgagcaaactgttctggtgtggattcccttgggcttcctatggctcctggccccctggcagcttctccacgtgtataaatccaggaccaagagatcctctaccaccaaactctatcttgctaagcaggtattcgttggttttcttcttattctagcagccatagagctggcccttgtactcacagaagactctggacaagccacagtccctgctgttcgatataccaatccaagcctctacctaggcacatggctcctggttttgctgatccaatacagcagacaatggtgtgtacagaaaaactcctggttcctgtccctattctggattctctcgatactctgtggcactttccaatttcagactctgatccggacactcttacagggtgacaattctaatctagcctactcctgcctgttcttcatctcctacggattccagatcctgatcctgatcttttcagcattttcagaaaataatgagtcatcaaataatccatcatccatagcttcattcctgagtagcattacctacagctggtatgacagcatcattctgaaaggctacaagcgtcctctgacactcgaggatgtctgggaagttgatgaagagatgaaaaccaagacattagtgagcaagtttgaaacgcacatgaagagagagctgcagaaagccaggcgggcactccagagacggcaggagaagagctcccagcagaactctggagccaggctgcctggcttgaacaagaatcagagtcaaagccaagatgcccttgtcctggaagatgttgaaaagaaaaaaaagaagtctgggaccaaaaaagatgttccaaaatcctggttgatgaaggctctgttcaaaactttctacatggtgctcctgaaatcattcctactgaagctagtgaatgacatcttcacgtttgtgagtcctcagctgctgaaattgctgatctcctttgcaagtgaccgtgacacatatttgtggattggatatctctgtgcaatcctcttattcactgcggctctcattcagtctttctgccttcagtgttatttccaactgtgcttcaagctgggtgtaaaagtacggacagctatcatggcttctgtatataagaaggcattgaccctatccaacttggccaggaaggagtacaccgttggagaaacagtgaacctgatgtctgtggatgcccagaagctcatggatgtgaccaacttcatgcacatgctgtggtcaagtgttctacagattgtcttatctatcttcttcctatggagagagttgggaccctcagtcttagcaggtgttggggtgatggtgcttgtaatcccaattaatgcgatactgtccaccaagagtaagaccattcaggtcaaaaatatgaagaataaagacaaacgtttaaagatcatgaatgagattcttagtggaatcaagatcctgaaatattttgcctgggaaccttcattcagagaccaagtacaaaacctccggaagaaagagctcaagaacctgctggcctttagtcaactacagtgtgtagtaatattcgtcttccagttaactccagtcctggtatctgtggtcacattttctgtttatgtcctggtggatagcaacaatattttggatgcacaaaaggccttcacctccattaccctcttcaatatcctgcgctttcccctgagcatgcttcccatgatgatctcctccatgctccaggccagtgtttccacagagcggctagagaagtacttgggaggggatgacttggacacatctgccattcgacatgactgcaattttgacaaagccatgcagttttctgaggcctcctttacctgggaacatgattcggaagccacagtccgagatgtgaacctggacattatggcaggccaacttgtggctgtgataggccctgtcggctctgggaaatcctccttgatatcagccatgctgggagaaatggaaaatgtccacgggcacatcaccatcaagggcaccactgcctatgtcccacagcagtcctggattcagaatggcaccataaaggacaacatcctttttggaacagagtttaatgaaaagaggtaccagcaagtactggaggcctgtgctctcctcccagacttggaaatgctgcctggaggagatttggctgagattggagagaagggtataaatcttagtgggggtcagaagcagcggatcagcctggccagagctacctaccaaaatttagacatctatcttctagatgaccccctgtctgcagtggatgctcatgtaggaaaacatatttttaataaggtcttgggccccaatggcctgttgaaaggcaagactcgactcttggttacacatagcatgcactttcttcctcaagtggatgagattgtagttctggggaatggaacaattgtagagaaaggatcctacagtgctctcctggccaaaaaaggagagtttgctaagaatctgaagacatttctaagacatacaggccctgaagaggaagccacagtccatgatggcagtgaagaagaagacgatgactatgggctgatatccagtgtggaagagatccccgaagatgcagcctccataaccatgagaagagagaacagctttcgtcgaacacttagccgcagttctaggtccaatggcaggcatctgaagtccctgagaaactccttgaaaactcggaatgtgaatagcctgaaggaagacgaagaactagtgaaaggacaaaaactaattaagaaggaattcatagaaactggaaaggtgaagttctccatctacctggagtacctacaagcaataggattgttttcgatattcttcatcatccttgcgtttgtgatgaattctgtggcttttattggatccaacctctggctcagtgcttggaccagtgactctaaaatcttcaatagcaccgactatccagcatctcagagggacatgagagttggagtctacggagctctgggattagcccaaggtatatttgtgttcatagcacatttctggagtgcctttggtttcgtccatgcatcaaatatcttgcacaagcaactgctgaacaatatccttcgagcacctatgagattttttgacacaacacccacaggccggattgtgaacaggtttgccggcgatatttccacagtggatgacaccctgcctcagtccttgcgcagctggattacatgcttcctggggataatcagcacccttgtcatgatctgcatggccactcctgtcttcaccatcatcgtcattcctcttggcattatttatgtatctgttcagatgttttatgtgtctacctcccgccagctgaggcgtctggactctgtcaccaggtccccaatctactctcacttcagcgagaccgtatcaggtttgccagttatccgtgcctttgagcaccagcagcgatttctgaaacacaatgaggtgaggattgacaccaaccagaaatgtgtcttttcctggatcacctccaacaggtggcttgcaattcgcctggagctggttgggaacctgactgtcttcttttcagccttgatgatggttatttatagagataccctaagtggggacactgttggctttgttctgtccaatgcactcaatatcacacaaaccctgaactggctggtgaggatgacatcagaaatagagaccaacattgtggctgttgagcgaataactgagtacacaaaagtggaaaatgaggcaccctgggtgactgataagaggcctccgccagattggcccagcaaaggcaagatccagtttaacaactaccaagtgcggtaccgacctgagctggatctggtcctcagagggatcacttgtgacatcggtagcatggagaagattggtgtggtgggcaggacaggagctggaaagtcatccctcacaaactgcctcttcagaatcttagaggctgccggtggtcagattatcattgatggagtagatattgcttccattgggctccacgacctccgagagaagctgaccatcatcccccaggaccccatcctgttctctggaagcctgaggatgaatctcgaccctttcaacaactactcagatgaggagatttggaaggccttggagctggctcacctcaagtcttttgtggccagcctgcaacttgggttatcccacgaagtgacagaggctggtggcaacctgagcataggccagaggcagctgctgtgcctgggcagggctctgcttcggaaatccaagatcctggtcctggatgaggccactgctgcggtggatctagagacagacaacctcattcagacgaccatccaaaacgagttcgcccactgcacagtgatcaccatcgcccacaggctgcacaccatcatggacagtgacaaggtaatggtcctagacaacgggaagattatagagtgcggcagccctgaagaactgctacaaatccctggacccttttactttatggctaaggaagctggcattgagaatgtgaacagcacaaaattctagcagaaggccccatgggttagaaaaggactataagaataatttcttatttaattttattttttataaaatacagaatacatacaaaagtgtgtataaaatgtacgttttaaaaaaggataagtgaacacccatgaacctactacccaggttaagaaaataaatgtcaccaggtacttgagaaacccctcgattg

SEQ ID NO: 32008 - DNA, 4040 bp, Homo Sapiens
tgcagagaacagagaaaggacatctgcgaggaaagttccctgatggctgtcaacaaagtgccacgtctctatggctgtgtacgctgagcacacgattttatcgcgcctatcatatcttggtgcataaacgcacctcacctcggtcaacccttgctccgtcttatgagacaggctttattatccgcattttatatgaggggaatctgacggtggagagagaattatcttgctcaaggcgacacagcagagcccacaggtggcagaatcccacccgagcccgcttcgacccgcggggtggaaaccacgggcgcccgcccggctgcgcttccagagctgaactgagaagcgagtcctctccgccctgcggccaccgcccagccccgacccccgccccggcccgatcctcactcgccgccagctccccgcgcccaccccggagttggtggcgcagaggcgggaggcggaggcgggagggcgggcgctggcaccgggaacgcccgagcgccggcagagagcgcggagagcgcgacacgtgcggcccagagcaccggggccacccggtccccgcaggcccgggaccgcgcccgctggcaggcgacacgtggaagaatacggagttctataccagagttgattgttgatggcacatacttttagaggatgctcattggcatttatgtttataatcacgtggctgttgattaaagcaaaaatagatgcgtgcaagagaggcgatgtgactgtgaagccttcccatgtaattttacttggatccactgtcaatattacatgctctttgaagcccagacaaggctgctttcactattccagacgtaacaagttaatcctgtacaagtttgacagaagaatcaattttcaccatggccactccctcaattctcaagtcacaggtcttccccttggtacaaccttgtttgtctgcaaactggcctgtatcaatagtgatgaaattcaaatatgtggagcagagatcttcgttggtgttgctccagaacagcctcaaaatttatcctgcatacagaagggagaacaggggactgtggcctgcacctgggaaagaggacgagacacccacttatacactgagtatactctacagctaagtggaccaaaaaatttaacctggcagaagcaatgtaaagacatttattgtgactatttggactttggaatcaacctcacccctgaatcacctgaatccaatttcacagccaaggttactgctgtcaatagtcttggaagctcctcttcacttccatccacattcacattcttggacatagtgaggcctcttcctccgtgggacattagaatcaaatttcaaaaggcttccgtgagcagatgtaccctttattggagagatgagggactggtactgcttaatcgactcagatatcggcccagtaacagcaggctctggaatatggttaatgttacaaaggccaaaggaagacatgatttgctggatctgaaaccatttacagaatatgaatttcagatttcctctaagctacatctttataagggaagttggagtgattggagtgaatcattgagagcacaaacaccagaagaagagcctactgggatgttagatgtctggtacatgaaacggcacattgactacagtagacaacagatttctcttttctggaagaatctgagtgtctcagaggcaagaggaaaaattctccactatcaggtgaccttgcaggagctgacaggagggaaagccatgacacagaacatcacaggacacacctcctggaccacagtcattcctagaaccggaaattgggctgtggctgtgtctgcagcaaattcaaaaggcagttctctgcccactcgtattaacataatgaacctgtgtgaggcagggttgctggctcctcgccaggtctctgcaaactcagagggcatggacaacattctggtgacttggcagcctcccaggaaagatccctctgctgttcaggagtacgtggtggaatggagagagctccatccagggggtgacacacaggtccctctaaactggctacggagtcgaccctacaatgtgtctgctctgatttcagagaacataaaatcctacatctgttatgaaatccgtgtgtatgcactctcaggggatcaaggaggatgcagctccatcctgggtaactctaagcacaaagcaccactgagtggcccccacattaatgccatcacagaggaaaaggggagcattttaatttcatggaacagcattccagtccaggagcaaatgggctgcctcctccattataggatatactggaaggaacgggactccaactcccagcctcagctctgtgaaattccctacagagtctcccaaaattcacatccaataaacagcctgcagccccgagtgacatatgtcctgtggatgacagctctgacagctgctggtgaaagttcccacggaaatgagagggaattttgtctgcaaggtaaagccaattggatggcgtttgtggcaccaagcatttgcattgctatcatcatggtgggcattttctcaacgcattacttccagcaaaaggtgtttgttctcctagcagccctcagacctcagtggtgtagcagagaaattccagatccagcaaatagcacttgcgctaagaaatatcccattgcagaggagaagacacagctgcccttggacaggctcctgatagactggcccacgcctgaagatcctgaaccgctggtcatcagtgaagtccttcatcaagtgaccccagttttcagacatcccccctgctccaactggccacaaagggaaaaaggaatccaaggtcatcaggcctctgagaaagacatgatgcacagtgcctcaagcccaccacctccaagagctctccaagctgagagcagacaactggtggatctgtacaaggtgctggagagcaggggctccgacccaaagccagaaaacccagcctgtccctggacggtgctcccagcaggtgaccttcccacccatgatggctacttaccctccaacatagatgacctcccctcacatgaggcacctctcgctgactctctggaagaactggagcctcagcacatctccctttctgttttcccctcaagttctcttcacccactcaccttctcctgtggtgataagctgactctggatcagttaaagatgaggtgtgactccctcatgctctgagtggtgaggcttcaagccttaaagtcagtgtgccctcaaccagcacagcctgccccaattcccccagcccctgctccagcagctgtcatctctgggtgccaccatcggtctggctgcagctagaggacaggcaagccagctctgggggagtcttaggaactgggagttggtcttcactcagatgcctcatcttgcctttcccagggccttaaaattacatccttcactgtgtggacctagagactccaacttgaattcctagtaactttcttggtatgctggccagaaagggaaatgaggaggagagtagaaaccacagctcttagtagtaatggcatacagtctagaggaccattcatgcaatgactatttctaaagcacctgctacacagcaggctgtacacagcagatcagtactgttcaacagaacttcctgagatgatggaaatgttctacctctgcactcactgtccagtacattagacactaggcacattggctgttaatcacttggaatgtgtttagcttgactgaggaattaaattttgattgtaaatttaaatcgccacacatggctagtggctactgtattggagtgcacagctctagatggctcctagattattgagagcctccaaaacaaatcaacctagttctatagatgaagacataaaagacactggtaaacaccaatgtaaaagggcccccaaggtggtcatgactggtctcatttgcagaagtctaagaatgtacctttttctggccgggcgtggtagctcatgcctgtaatcccagcactttgggaggctga

SEQ ID NO: 32009 - DNA, 1899 bp, Homo Sapiens
ggggcggactggagggggtggttcggcgtgggggccgttggctccagacaaataaacatggagtccatcttccacgagaaacaagaaggctcactttgtgctcaacattgcctgaataacttattgcaaggagaatattttagccctgtggaattatcctcaattgcacatcagctggatgaggaggagaggatgagaatggcagaaggaggagttactagtgaagattatcgcacgtttttacagcagccttctggaaatatggatgacagtggttttttctctattcaggttataagcaatgccttgaaagtttggggtttagaactaatcctgttcaacagtccagagtatcagaggctcaggatcgatcctataaatgaaagatcatttatatgcaattataaggaacactggtttacagttagaaaattaggaaaacagtggtttaacttgaattctctcttgacgggtccagaattaatatcagatacatatcttgcacttttcttggctcaattacaacaggaaggttattctatatttgtcgttaagggtgatctgccagattgcgaagctgaccaactcctgcagatgattagggtccaacagatgcatcgaccaaaacttattggagaagaattagcacaactaaaagagcaaagagtccataaaacagacctggaacgagtgttagaagcaaatgatggctcaggaatgttagacgaagatgaggaggatttgcagagggctctggcactaagtcgccaagaaattgacatggaagatgaggaagcagatctccgcaggactattcagctaagtatgcaaggtagttccagaaacatatctcaagatatgacacagacatcaggtacaaatcttacttcagaagagcttcggaagagacgagaagcctactttgaaaaacagcagcaaaagcagcaacagcagcagcagcagcagcagcagggggacctatcaggacagagttcacatccatgtgaaaggccagccaccagttcaggagcacttgggagtgatctaggtgatgctatgagtgaagaagacatgcttcaggcagctgtgaccatgtctttagaaactgtcagaaatgatttgaaaacagaaggaaaaaaataatacctttaaaaaataatttagatattcatactttccaacattatcctgtgtgattacagcatagggtccactttggtaatgtgtcaaagagatgaggaaataagacttttagcggtttgcaaacaaaatgatgggaaagtggaacaatgcgtcggttgtaggactaaataatgatcttccaaatattagccaaagaggcattcagcaattaaagacatttaaaatagttttctaaatgtttctttttcttttttgagtgtgcaatatgtaacatgtctaaagttagggcatttttcttggatctttttgcagactagctaattagctctcgcctcaggctttttccatatagtttgttttctttttctgtcttgtaggtaagttggctcacatcatgtaatagtggctttcatttcttattaaccaaattaacctttcaggaaagtatctctactttcctgatgttgataatagtaatggttctagaaggatgaacagttctcccttcaactgtataccgtgtgctccagtgttttcttgtgttgttttctctgatcacaacttttctgctacctggttttcattattttcccacaattcttttgaaagatggtaatcttttctgaggtttagcgttttaagccctacgatgggatcattatttcatgactggtgcgttcctaaactctgaaatcagccttgcacaagtacttgagaataaatgagcattttttaaaaaaaaaaaaaaaaaaaaaa

SEQ ID NO: 32010 - DNA, 5790 bp, Homo Sapiens
cggcgctgctggaagatggcgagcggccgggacgagcggccgcattggcggctagggcggctcctgttgctcatgtgcctgctgctgctggggagctcggcccgggcggctcacatcaagaaggcggaggcgactaccacaactacgagcgcgggcgccgaggcggccgagggccagttcgaccgctactaccacgaagaggagttggagtcggcgctgagggaggcggcggccgcgggcctccccggcctggcccgcctctttagcatcggccgctcggtggaaggccggccgctgtgggtgcttcgcctcaccgccggcctggggtcgctaatccctgagggcgacgcggggcctgacgctgccgggcccgacgctgcggggccgctgctgcccggccggccccaggtgaagctggtgggcaacatgcatggcgacgagaccgtgtcgcgccaggtgttgatctacttggcccgcgagctggcggccggctaccgccgcggggacccgcgcctggtccgcctgctcaacaccaccgacgtgtacctgctgcccagcctcaaccccgatggcttcgagcgtgcccgcgagggcgactgtggcttcggcgacggcggcccgtccggggccagcggccgcgacaatagtcgcggccgcgacctcaaccgaagctttcccgaccagtttagcaccggcgaaccccccgccctggacgaggtgcccgaggtgcgcgccctcatcgagtggatccgcaggaacaagtttgtgctttctggaaatctgcatggtggctcagtggtagcaagctatccttttgatgattctccagaacataaggccactggaatctatagcaaaacctcagatgatgaagtatttaaatacttggcaaaagcttatgcttcaaaccaccccataatgaaaactggtgagcctcattgtccaggagatgaagacgagactttcaaagatggaatcacaaacggcgcacattggtatgatgtggaaggtggtatgcaagattacaattatgtgtgggccaactgttttgagatcacattagaactgtcttgttgcaagtacccacctgcttcacagcttcgacaggaatgggagaacaatcgtgagtctttgatcacattgattgaaaaggttcacattggagtgaaaggatttgttaaagattccataacaggatctgggttagagaatgcaaccatctcagtggctggtattaatcataatatcacaacaggcagatttggtgatttctaccgattacttgttcctggaacttacaaccttacagtagttttaactgggtatatgccattgactgttactaatgtagtggtgaaagaaggaccagccacagaggtggatttttctcttaggccaactgtaacttcagtaatccctgacacgacagaggctgtatcaactgctagcacagttgctatacctaatattctttctggaacatcatcctcctaccagccaattcagccaaaggactttcaccaccaccatttccctgatatggaaatcttcttgagaaggtttgccaatgaatatcctaacattacccggctttattccttgggaaaatcagtagagtcaagagaactttatgtgatggagatatctgataatccgggtgtccatgaaccaggtgaaccagaatttaagtacattggaaatatgcatggaaatgaagtggttggaagagaactgctgttgaacctcatagaatacctttgtaagaactttggaacagaccctgaagtcacagatttggttcataacactagaattcaccttatgccatccatgaatcctgatgggtatgaaaagtcccaggaaggagattcaataagtgtaattggcagaaacaacagcaacaactttgacctgaaccgaaatttcccagaccagtttgttcagatcacagatcctacgcaaccagaaactattgctgtaatgagctggatgaagtcctatccatttgtactttcagcaaacctgcatggaggttctttggtggttaactacccttttgatgatgatgaacaaggacttgccacatatagtaaatcaccagatgatgctgtgttccaacaaatagcactttcttattccaaggaaaattcccagatgtttcaaggtagaccttgcaagaatatgtatcctaatgaatattttcctcatggaataacaaatggagctagttggtataatgtgccaggaggaatgcaggactggaactatttacaaacaaattgctttgaagtgactattgaactaggttgtgtgaaatatccacttgagaaagagctgccaaacttttgggaacagaatcgaagatcactaatccagtttatgaaacaggttcatcagggcgtcagaggatttgttctagatgccacagatggcaggggtatattaaatgccaccattagtgttgctgagattaatcacccagtgactacttacaaaactggagattactggcgtctcttggttccaggaacttataaaatcacagcatctgctcgagggtataatccagttaccaagaatgtgactgtcaagagtgaaggcgctattcaggtcaacttcacacttgttcgatcctcaacagattcaaacaatgaatcaaagaaaggaaaaggggctagcagcagcaccaatgatgccagtgatccaactactaaagagtttgaaactttaattaaagacctttcagcggagaatggtttggaaagcctcatgttacgctcctcctcaaatctggctctggctctttatcgataccattcctacaaagacttatcagagtttctgagaggacttgtaatgaactatccacatattacaaatcttaccaatttgggacagagcactgaatatcgtcacatttggtcccttgaaatctccaataagcccaatgtatctgagcctgaagaaccaaagattcgttttgttgctggtatccatggaaatgcgccagttggaactgaactgcttttggctctggcagaatttctctgcctgaactacaaaaagaacccagctgttacccaattggttgacaggactaggattgtgattgtcccttctctaaatccagatgggcgagagagagctcaagagaaagactgtacttcaaaaataggacaaacaaatgctcgtggcaaagatttggatacagacttcacaaataatgcctcccaacctgagaccaaagccatcattgaaaatttgattcaaaaacagaactttagtctttctgttgccttagatggtggttccatgctggtcacatatccatatgacaagccagtacagacagtggaaaataaagagactctgaagcatttggcatctctttatgcaaataatcatccatccatgcacatgggtcagcccagttgcccaaataaatcagatgagaatattccaggaggagtaatgcgtggagcagaatggcatagtcacctgggcagcatgaaggattatagtgtcacctatggccattgtccggaaatcacagtatacacaagctgctgttactttcctagtgctgcacgactcccttccttgtgggcagacaataagagatctcttcttagtatgttagtggaggttcacaagggagttcatggatttgttaaagataagactggaaagccaatctctaaagcagtcattgtacttaatgaaggaataaaggtacaaacaaaagagggaggttatttccatgtactcttagcgccaggtgtccataacattattgccatcgctgatgggtaccagcaacaacattcacaggtctttgtgcatcatgatgcagctagttctgtggtgatagtctttgacacagataaccggatatttggtttgccaagggagcttgtggtaactgtatcaggtgctactatgtcggcattgatcctaacagcttgcattatttggtgcatctgctcaatcaagtctaatagacacaaggatggctttcatcggctcaggcagcatcatgatgagtatgaagatgaaattcgcatgatgtctaccggctccaagaagtccctcctaagccatgagttccaggatgaaacagacactgaagaggaaacattatattctagcaaacattgaaaaacacattttgcatatctcccagcataagtaccaagcaaaattacagttcctcttgggagaacactgcattaagaagagagactctcttgcttcttcaaagagctttgggaaattaaattgctaaatttgtattctctgtgaatttcactggcagttttgaacttcccttccttaaagtactctaaacctttaaaaaaaaatctgatttatgcagcagagatgggacagccactttttctttttaatttaagatgagctatttggagcttatgtaataatggcataaagccaactagaggatgttgtattttgcacatcagatgtttactagtggctttagtatttttctttgttttaaatggccaaaagaatccagaaacattaaggcagggacagcagtcagaatcgacataaagctttaaaaactcaaggttttttcaacctactgaggagtacttttctctagttgttaaatagctggagtttttcttattcaggtttaatggaggttgaattgatttttaaacacatataacagtaggaaatgaataaatgggcttctgcatttggctttctacctgttccaaggctagatcggaactggtagactacgctgtaagcaggatttcactacctctcttaaggtttagcaaacttctaaatagcccattttaagggagaacttactaactttattgtgaaaggtctaaatgcccacttgaatgaagctgagagagagatctagcaaaagctaaaactcatgttgtctatctttgaacttggtaaaaacccacaggtgctgctgcttatatctgtgaagcactagcttattctaggaatgcctgattctttaatattgcctaaatcggaacctttttctatgttgcacacatggttttcagatgacccagccatctacaagatctgaattctactgaaaatatctagaaatgtggaagagacctacttgcacattcttaacctgtatttgaacacaaaatatctatacttcatgctccagcccaagcctataccctgtaatagcatactattattgaaatcgcttgaccggtcttgttcacataggcctctgggagtgatttggttctttgccctaatgtttcatttgacggtctctttttgatcaaccaatttttctaaaagttcagtcgaaagcttttaagtatagcttcctcccttgaaaaaaaatgtaaactatgactgctgagtgataaaacactgtggtgtgaaagtgtcatcttcactgccaatcaggcaaagaccggaaagatttgcattttattatgtctgtcttatcatgcaatggaaatgatgctttttgtaagtatgcatcttaccaatgatgtaacggtttaatacctttgaatgttttaataaccaagttgctgctgaacttatactaaatcaggggaccaaaaaacttgctcttatcttctcaaattgtattctatatccattaatgtatcagttatcccaaagccttcaggtggaggggtttaccaccttcctaggtcgttcaaccaggttttgtgaggaatgcattcaaagtggctttataaaagaagattttctttagcaagaaaaaaaaaaaaaaaaaaaaaaaaaaaa

SEQ ID NO: 32011 - DNA, 316 bp, Homo Sapiens
gaacatgcgtgtgggaattcacagcgggcgagtacactgcggtgtccttggtctcaggaagtggcagttcgacgtctggtctaacgatgtcacgctagccaaccacatggaggctggcggcaaggcaggacgcatccacatcaccaaggctacactcaactacctgaatggggactacgaggtggagccaggctgtgggggcgagcgcaacgcctacctcaaggagcacagtatcgagaccttcctcatcctgcgctgcacccagaagcggaaagaagagaaggccatgatcgccaagatgaaccgccagagaacc

SEQ ID NO: 32012 - DNA, 267156 bp, Homo Sapiens
gatcttggctcgctgcaagctccgcctcctgggttcacgccattctcccacctcagcctcccgagtagctgggactacaggcgcccaccaccacgcccggctaattttgttttagtatttttagtagggacagggtttcaccatgttagccaggacggtctcgagctcctgacctcgtgatgcgcccgcctcggcctcccaaaatgctgggattacagtcgtgagccaccgcgcccagcccagcaaaggctacctttttaagatgtatggtaataaaaaggagatgcggtagtagctcgatataaatagaattaggtaaaagtattatcagaacagagtactctggagcataaatgtagcttgaaaaagcagagaaggtatagggaagaatcgatggaataaattctacagaggcagaagtgcttggaatctggagcactgtgggaggatgagctaagagtagggagagaagaatggtgaaggtgaagattgatgacgactttgacgacagtgagcaatcaattttaagcacttattgtgcacaagccgaacattatgtaccttattgccactaactaggtactattatctccattctatagatgataaaatgttaagtaacttgtctgagtttgcacagctattaagtacaagagttgggatttcaacccatgtctacctgacttgggagcctaaattcctaaccactcgcctctgctttatcatcatagtctttaacaccactgctatgtgaactcctatgactacatgcttgctgtctcgcacagaataaccaaacagtagtctccacacttcaggtaatctatcctttgttcaacccagattctcttgcatttgtaaccttctgacctccccggcaaggtacccatttgcatttgcacatccccacactaacatgcagtgaaatagtctcttagccactctcttcagtgctcctcagagaggtgacaatcatcagtaactgtgaccccattgagagtgtggtttctgaccacgctcaagattatttgctgcaattgaagcagttagtagttgcttattcttttcttttccttgtttgcagatacctatgaaaatggaaattattttttggcaaactttatagcagctcaggtaagactaatttactacattttacaaatcttttcccaggtgtctacagattaaacattacagttaactgcgtaaatgtaatatcccacatcttaataggaggttcttcttgcctttacttttataatccaggtctgttgtcattaaagtaaggaagaaacaatccttactttggcagttttccagtatactatctccatgaaaagaaacttggaattcatacaatgctggggaaaaaatggggccttaaatgtgtaacatgttttccaaagatgagaaatttactagctgataaattttgaaagaaaaatgctatataagctacttattatgcaataatgcataaaagacgacctcaaaaccttagtggtatctaacaataagcacttacttagctcatgagcttgcagggctcagaggatgtgggtctggtcttggctgatctttgctagctcacatacatctccagttagtcttgggtctattgggctgtttagataatcttggctgtattcacatatctggggggtcagctgactctcatatgatttatcatggccttgtgggaaggtctaggcacggcttcttcataattatggaagagggctaaaataaaaataaaagtggagatcccttagttctttataatttttttgtatcgagttgactaatttcccattaccaaagcaaaatcacatggtcaagcccagagacagaggagggacagaatgcctcaactggagtgggagggcattgcaaaactgcatggaaaggggtatggatttgtaagggttgaatatttcataacagtgatgcaatcaatgcaccttgcatattaaatatcccattggtaatctacataattttaattagagtatgaggagaatcattctaggtcaaactggattctgcttctctatttttacctagtcactttaaccaagaagtaatatagcacaaatctattttttttctataacagtgattcacatatttgaagatgtctctcagttatttcttttgtcttcttagaattatacatcaccaggctaacttcatattttctctatttcctgcttatagtggtttccaggtctgatcattctgtttagactccagttaacttagatttcttttaaaacatcagaaccgagagcatattttagagctgtctatccagtatgatagccactagccacatgtggctattgaacacttgaaatgtgaccagcctaatttgaaatattcaaaagttagcttaaaaaattcaaaaatgatttgtgggcttcctgggcaagatggccaaataggaacagctctggcctgcagctcccagtgagatcaatgcagaaggcaggtgatttctgcatttccaactgagatacctggttcatctcactgggactgattagacagtgggtgaagtccacagagggcgaggagaagcagggtgtggtgtcacctcccccaggaagcacaaggggtcagggtactccccccgtagccaaaggaagccacgagggacagtgctatctggcccagatactacacttttcccatggtctttgcaacccatagagcaggagattccctcaggtgcctacaccaccaggaccctgggtttcaagcacaaaactgagtggccgtttgggcagataccaaactagcttcaggagtttttttttttcataccctagtggtgcctggaacaccagtgagacagaaccattcactcccctggaaagccagggagccgagtgcccttgctcagcggatcccaaccccacagagcccagcaagctaagatccacaggcttgaaatactcgccgccagcacagctgtctgaagttgacgtgggaagctcgagtttggtggagggaggggcatccgccattactgaggcttgagtaggcggttttcccctcacagtgtaaacaaagccaccaggaagttcgaactgggcagagcccaccacagctccacaaagccgctgtagcaagactgcctttctagattcctcctgtctgggcagggcatctctgaaaaaaaggcagcagccccagttaggggcttgtagataaaactcccatctctctgggacagacacctgggggaaggggctgctgtggatgcagcttcagcagacttaaaccttcctgcctgccagctctgaagagagcagtggatctcccagcacagtgctggagctctgctaagggacagactgcctcctcaagtgggtccctgacccccgtgcctcctgacagggagatacctcccagcaggggtcaacagacacctcatacaggagagctccagctggaatctggtgggtgcccctctgggatgaagcttccagaggaaggagcaggcagcaatcttaactgttctgcagtctccactggtgatacccaggcaaacatggtctggagtggacctccagcaaactccagcagacctgcagaagaggggcctgactattagaaggaaaactaacaaacggaaagcaatagcatcaacatcaacaaaaaggatgaccatgcaaaaaatccatccgaaggtcaccaacagcaaagaccaaaggtagataaatccacgaagatgaggaaaacccagtgcaaaaagcctaaagattccaaaaaccagaatgccccttctcctccaaaggatcacaactcctcaccagcaagggaacaaaactggagagagaacgaatttgatgaactgacagaaataggcttcagaaggtgggtaataacaagctcctccgagctaaaggagcatgttctaacccaatgcaaggaagctaagaaccttgataaaaggttagaggaattgctaactagaataaccagtttagagagaacataaatgacctgatggagctgaaaaatatagcatgagaacttcgtgaagcaaacacaagtatcaatcactgaatagatcaagcaaaagaaaggatatcagagattgaacagcaacttaatgaaataaagcgtgaagacaaaattagagaaaaaagaatgaaaaggaacaaacaaagcctccaagaaatatgggactatgtgaaaagaccaaacctacatttgattggtgtagctgaaagtgacgaggagaatggaaccaagttgtaaagcacacttcaaggtattatccaggagaattttccaacctagcaagacaggccaacattcaaattcaggaaatacagagaacaccacaaaaatattcctcaagaagagcaaccccacgacacataattgtcagattcaccaaggttgaaatgaaggaaaaaatgttaaggtcagccagagaggaaggttgggttacccacaaagggaagcccatcagactaacagcagatctgtctgcagaaacctcacaagccagaagagaatgggggccaatattcaacattcttaaagaaaagaattttcaacccagaatttcaaatccagccaaactaagcttcataagtgaaggggaaataaaatcctttacaagcaatccatttacaagcaaatgctgagggatttggtcaccactaggcctgccttacaagagctcctgaaggaagcactaaatatggaaaaggaaaaatgagtatcagctcctgcaaaaataaaccaaaatgtaaagaccattgacactatgaagaaactgcatcaactaatgggcaaaataaccagctagcatcataatgacaggatcaaattcacaaatagcagtattaaccttaaatgtaaatgggctaaatgctctgattaaaaggcacagactggcaaattggataaagagtcaagacccactggtgtgctgtattcagaagacccatctcatgtgcaaagacacactaggctcaaaataaagggatggaggaagatttgcccatcaaatgggaagtaaaaagaaaaagcaggggttgcaattttcatctctgataaaacagattttaaaccaacaaatatcaaaaaagacaaagaaggccattacataatgttaagagctaactaccataaatatatatgcacccaatacagaagcacccacattcataaggcaagtccttagagacctacaaagagacttagactctcacacaataatagtgggagattttaacacccactgtcaatattagacagaccaacaagacaggaaattagcaaggatattcagaacttgaactcagctctggaccaagcagatgtaatagacatctacagaactctccaccctaaatcaacagaatatacattcttctcagcaccaatagcacttattcgaaaatcaaccacataattggaagtaatacgctcctcagaaaatgaaaaagaacagaaatcataacaaagagtctctcagaccgcagtgcaatcaaattagaactcaggattaagaaactcactcaaaaccacacaactacagggaaactgaacaacctgctcctggatgactactgagtaaataatgaaattaaggcagaaataaataagttctttgaaaccaacaaaaacaaagacacaacatatcaaaatctctgggagttttcagagggaaatttatagcactaaatgcccacaggagaaaacaggaaggatctaaaatcaacaccctaacatcatagttaaaagagctagagaagcaagggcaaaaaagttcaaaagctagcagaagacaaaaaataactaagatcagagcagaactgaaggagagagagacacgaaatacccttcaaaaaaatcagtgactccaggagctggttttttgaaatgattaacagaatagttagaccgctagccagactaataaagaaaaaaagagagaagaatcaaatagacacaataaaaaatggtagagaggagatcaccgctgatcccacagaaatacaaactaccatcagagaatactataaacatataaacacctctatgcaaataaactagaaaatctagaagaaattgataaattcctggacacatacaccctctgaaggtaaaaccagggagaagttgaatccctgagtagaccaataacaaggtctgaaattgaggcactaaattaagagcctaccaaccaaaacagcccaggaccagacagattcacagccgaattctaccagaagtacaaagaggaactggtaccgttcctcctgaaactattccaaacaagagggactctgccctaactcattttatgaggtcagcatcatcctgataccaacacctggcagagacacaataaaaaaagaaaatttcaggccagtatccctgatgaacatcaatgcaaaagtcctccataaaatactggcaaaccgaatccagcagcacatcaaaaagccatgatcaagttggcttcatccttgggatgcaaggctggttcaacatatgcaagtcaataattgcaatccatcacataaacagaaccaatgacaaaaaccacatgattatctcaatagattcagaaaaggcctttgataaaattcaacaccctttcatgctaaaaacactcaataaactgggtattgatggaacaaatataaaaataatatgagctatttatgacaaaccaacagctaatatcatattgaataggaaaaagctggaagctttccctttgaaaaccggcacaagacaaggatgccctctctcaccactcctattcagcatagtattggaagttctggccagggcaatcaggcaagagaaagaaataaagcttattcaaataggaagagaggaagccaaattatctctatttgcagatgatgtgattgtatatttagaaaaccccattgtctcagccgaaaatctcattaaggtgataagcaacttcagcaaagtctcaggatacaaaatcaatgtgcaaaaatcacaagcatttcgatacaccaataatagacagccaaatcatgagcaaactcccactcacaattgctacaaagagaagaagatacctaggaatacaacttacaagggatgtgaaggacctcttcaaggagaactacaaaccactactcaaggatataagagaggacacaagcaaatggaaaaacattccatgctcatggataggaagaatcagtatcgtgaaaatggtcatacttcccaatgcaaatcaaaaccacaatgagatatcatctcatgccagttagaatggccattatcaaaaagtcaggaaacagcagatgctggagaggatgtggagaaataggaatgcttttacactgtcagtgggagtgtaaattagttcaaccattgtggaagacagtgtggtgattcctcaaggatctagaaccagaaataccatttcacccagcaatcccattactgggtatatacccaaagggttataaatcattctgctataaagaaacaggcacaagtctgtttactgcagcactgttcacaatagcaaagacttagaaccaacccaaatgcccatcagtgttagaccagataaagaaaatgtggcacatatataccatggaatagtatgcagccataaaaaagaatgagttcatgcccttttcaggctcatggatgaagctggaaaccatcacactcagcaaactaacacaggaacagaaaaccaaacactgcatgttgtcactcatatgtgggagttgaataatgagaacatatgggcacagagaggggaacttcacacaccagggcctgttgggggtggagggcaaggagacagatagcattaggagaaatccctaatgtagatgacgggttgatgggttgatggatgcagcaaaccaccatggcacatgtatacctatgtaacaaacctgcatgttctgcacatgtatcccagaacttaaagtataattaaaaaaaaaaaaaaacatttggctgagcgtggtggctcatgcctgtaatgccagcactttgggaagccaaggcaggtggatcacctgaggtcgggagtttgagaccagcctgaccaacatggagaaaaccctgtctctactcaaaatccaaaaattaggcgtggtggcgcatgcctgtaatccccactacttgggaggctgaggcgggagaatcgcttgaacctgggaggcagaggttgtggtgagccgagatcgcgccattgcactccagcctgggtagcaagagcgaaactctgtctcaaaaaaaaaaaaaaaaaacctcatgaataactttatattgaaaaatgttgtaataataacattttggctatatcatgtaaataaaatatattttgaaattaatgtaccctttttcttttcactttttaaaaaaatgtgactactagaaaatattcaattacatatatagtttcccttatatttctataagatggcatagacttccatgttgcctactacctctttttagctagagtctatattttttctgctgttattacattgtgttattttttaacacatgtatcagatgtttggcacatataaatctcatggtcagctaagaccttcaaattattctcatagacatgattatcaggtcatattgttccatcctgcatttggcctctctgaaactaactgctagactttgtatactaattaaatttgtgtattctctgcccttaagagtagttgggttgaagactctacatattttttcctctcaaatattattttaatgaatattattttaatgatctggaagtcctgaattttagttctatttctactgctattattcaaattcggagagacactgtttaatctgtgttttttaaaaaattgtaaaacattagattgccctttaataacatctaacttcaaaattccatttttctgataaatgaattcttatttctgtgatgtttgatagattatttccttaagaataaggggcctgaaatgaaagaaagatcgcaactttccttaggggataactattatcagcggtttcctggttggtaaaccagcttgtgggggtgggagatgatttgtaacatttgctaatttctgtagtgtagcttctcccaccatcttaaccaatttcaagcatcagctggcttgcaaaattctaggaaatttaaaaatcaactctctcaaatcaataagaactagctttagtacacccatttattttgagctgtatattttttccttgattctgcctgcccagtagcaaaagtcttgttcatccttcatgatgccaattgaacatgtttcttttttctcttcctactgcagccatcataattgagaaatgcatagcttccctctgctacaactatctccttgattattgcatgtaatcttcaaaatctttccttacatacctaactggcctcacgtctctgtttgctcagcaccagctatggttgtccttgcactcctccatgaatgtggctttgttcaatgtgtccctgtacccctatttcctgtctcataataaatccttcccatgattaccaggagttccgaagttacatgtccttcctaagttctctcttgaccctcttcctcccatgtaatttttcctttctcttcacatccatgaaaaatatccactatgattttcatttgggccttcatcatgtgccacctcataatttatgtcatattattttaacccttgtattgatacttaaacaattcatgatttggttaacttcctatgtttcttgcacactgtcctcagtctagggactgtttgccacacttctttgttcactctaaattaacttgtgcagtactatgtacaggggcaccttgcgcttccaactttacctatgttatctagccttgtcgctttggactactcacttcattttccagagcctcagtttccttatctctaagatagcaataatgatattttcttttcaaaatgattataagaatacttatgatatagggaaaataactttcataatgctggtacaataaacttatttgtggcattacccaatttattatagcaggtactcaggaagtatgtcttcatgaagtgtgtggagagtagaattatagtaaccagaggctgggaaggggtgggggccataaagagaggttggttagtgggaacaaagagacagttaaatagcaggagtgagttcttgtgtttgctaacatactagggtgatgatagttaacaacaatttattgtatatttcaaaatagctagaagagaatatttgaaatgtttccaacacgaagaaatgatgaatgtggcttggtgtggtggctcacacctgtaatcccatcactttgggaggccgaggcaggaggatcacgtggtcagggatttgagaccagcctggccaacatagtgaaaccccgtctctattaaaaatacaaaaattagccgggtatggtggcacacacctatagtcccagctgcttaggaggctgaggcaggagaatcgcttaaacccaggaggcggaggttgcagtgagcccagaccacgccattgcactccagcctgggtgacagagtgagactccatctcaaaacaaacaaacaaacaaacaaatgttgactatttgaggtcatggatatcctaaataccctgatttgatcactacacattgtatacatgtatcaaaatatcacatgttctccataaatatgtataattattatgtatcaataaaaatttaaatacataaatagaaatagcaaactaatataacaaaagtaaatttaggtttgttaatattttaatatggaccatagtctatcaacaatatgttatgtattcttttctctttataaattctttatagaacatcctgcaaatccagaccatacacaataagtatttgagtgactcgaatccactaaaagttgggtatattagaatctggggtgtgaatacctatgtgacacaagtcagtttcacctatgacaaccggcaatttatggagacaaatttcaagagtgaaccttataatcaggtaggtctgaaaggaatattagcatatcacaagtaaattttatcattctgcaaaattatcaccaataattttgctaacaattaaaattatcattgttaaattttcatgtattagatggttataaatacgtgcaatagatatgttcctgaaaagttgcaaatgttgaatcatattgtaaaatatgcaacattaatggtctttccagtatggcctaggggtcagtgatcactggcctgatgagatcctctccatgtatttaccaaagagactgtgctatgttttgataggttagtcttccacattagcaaaataaaacttatttctgctgcagaggctaaaacaaaggaaagggtgattccctaaagctgttgaaggttgcccccatgcttcctgcagttattcatgtccctggtcaaattgatggatcttataggtagacgaaaattggcagtaaactgtggtaatcttcgaatgaatacatcccacctgtggtataggataaaaggttgataaaacagggggacataaatagcaggccctactagaggattctagaatcaactaaaccagaattttggaagatgaaataccaatagttaccaaaggcaaccacaaagaaaaaagtatctcacttttagaacataagacaacataaatacggaaccagcaacccaaaagggatggtttagaaaagtgaaaatggataaccatagttcttgttttctaaaacgtgaaatgagtgccctgatggtatttggactttggaaaatggcccctctgagcactcaaatagatcttctccctctaggctcttctgggtatttaccttaaagcattttacctggactattgagttcaaaaccactctttgcaagtaattgcttctagttaagattgtgcagaaaatccttgaataccttctttttaaaaactctatggcatatctgatgcctattatgtgccagacaccatactgtttgaaatgaggaaaacatgaaaccaacctgctgtcaagaggactaaaacccaatggcaaagcaaagagattttaataaatgttggttttaatcacagctacaaatatttgtaaacaataaggttctgactaaatgaagtgaaaagaaaagatttccagcatagggattatgcacacagagcatctctctgtatttatctgaccaaaatcaacatgacctaacccaaaaaggaatgtttatatcctattactggaaaggaatgaatccatcattttttgttaaattgtaatttaagaggtgagctacatgtgaggtttaagaagttctaaaatacccatttatatctcttcttttctggcagatactaactattcaattgactgacaagactatcaacctggaaaagttaactgaggttacttggattgatggtggtcctgtacttcctactccaactaagacaagtaccatcccaatgagttctcatccttctccatctactaccaatgccaccagttctgagacaatcaccagttctgccagtgcaaatactaccactggcactactgatactgttcctatcacaaccacatctttcccaagtactactagtgttacaactaatactactgttcctgatacaacttctcctttccctacaagtactactaatgctagcactaatgctactgttcctatcacaaccacacctttcccaacaagtactattggtgttacaactaatgctactgttcccaatacaactgcccctttcccaacaaatgctagtactgctagcactaatgctactgttcctatcacaaccacatgttttgcaacaagtactattggtgttacaactaatgctactgttcccgatacaactgcccctttcccaacaaatactactactgctagcactaatgctactattcctatcacaaccacaccttttgcaacaagtactattagtgttacaactagtactactgttcctgatacaactgctcctttccctacaagtactactagtgctagcactaatgctacccctgttcctatcacaaccacactttttgcaacaagtactattggtgttacaactggtactactgttcctgatacaactgctcctttccctacaagtactactagtactagcactagtgctactgttcctattacaaccacaccttcccctacaaatactgctgatgctaacactagtaatactgttcctaataccactatgccttctcctacaagtagtactactgtgagtactattgctaccgttcccatttcagtgactccttctctgacaagtactgctgatgccaccattagtactactgtacttattgccactacttcttctctaacaggtactactgatgttagcactagtactactattaataatataagtactcctgttcaaacaaatactactaatgctagcactagtactaatgttgctaatataactgctacctctcatacaagtactgatgatactgttcctaataatactgttccagttacagctattccttctcttgcaaatactggtgttgacactactagcaacagtttttccattatgaccacttctttctctgaaagtactaatgctatgaacactactgttattatggcaactacttctcctacaagtactgatgttgctagcacaaataatgatgcttctatgacaaattttcttttagctacaatgtctgctggtaatataactagtaatagtatttccataacaactacttcttttggtaatagtgttccttttgtgactactccttctccaagtactgatgctactactacaagtaataatactaatcctggcatgactacttattaccagacttctcctaccattcctacccatactcttacttctattcctagctctattacttctattttgagcatgtttccaacaagtaatacattcactactgataaaattactaattttactacccctacaaatgcaaacaccattattttcaacactcttgatacaaaaagtaccatggtaatagatgctacggtcactactaccagcaccaaagataataccatgagtccagatacaacagttacttccatagacaaattcaccacacacatcacacagttcgctactccccattctgctactactacaacactggccttaagccacacctcattagctcctacaaatctttctaatctaggcaccatggatattactgatgcagataactccagcagtgttacaggtaacacgacacacatttctgtttcaaatctcacaacagcctcagtcacaataacagccactggtctagattcacaaactccccatatggtaataaattctgtggctacttatttacctattactgcaactagtgctaccacagatactacaaatattacaaaatatgctttaaatactaccactcctgatagtacagtacatacctctgctactgcacctacttatattgcaaatgccataaatgctactcaagttccatgattactactcaaggcaggatagttacctcagataacgcctacaaacaactattacagatatagaaaatcagttacgagacactctatctatcttatgctacttaagttttcacggatattagtactctagccataaaagacacagctactccaaacactctcgtcattgcagacatgtttaggaaggtttacaaaccttataggtttcaccaaagaagctgtgggtacttattttgcaaccatagtatgtgctcttattcttttaaattatagttattactcctataacctcatcagttaaactacagatgttttatatatcctatatatccttgctacagatttcacaggtaattttggtatctcagataacaccacattaggctctgtaaatactattgccttagatttagttactgaaatagcccaacttgtttcttgggtcacatgacgtaccataactgagagtactggtgatacccccagcactcaaatggtttctataccaacagttattgatattacaggagagtatgtaattagtaatgctaaaaaaatgcactttattatcctatggacttttccaaatgccatagctaccaatagagtcatttgcattacacatactaatagtattatttcttctgaggagatcctagctgtagctacagatatagaaaattctaccattgaagatcttgtataaccttacttcagccactgaaataatttaaattataaatattacatgtgggtttgactatcacagaaaataaaatgattatagatcctaaaaacataaattcctgaactttgcaaccattaattcataggtactactaatactcttactacagattttataagtacttccacttatagacagaagagcattctcagaaaattagaattaatctaaattatgagatagtcttaaagcctcactgttaccaccaatgactggctctgactctagtataaatcagaaattatccagacagaggtgagaatgtaaatatacagcatgaggaagacagcctccacattggaatcagagttcataatcttatttgcattttcttctattaatacaagcttttcccttataatttcactgttcagactccccttcattgtgttagggttttcagtctattcctggtttttcatatccaaattcatcatccatccttgatccattgttttcttagatcactcaaacccccatgagtagacccatggtcattaccaaatctggtcatttgggtactattgtaggtttaaccctagggcaatattctcgaagtttagttcagggatccatggggttccccaagactttctggagcacacagcttcttcaaatctactttcataatgatgctaagttatttgttttttcagtctcattgtctcattagtatatagtggcactgtccagatgctctatgctgtattgtgtcataaaagatgaatatagaaaaagaaaaaagaatctagctgtattctattaagctagacattaaacagatttacaaaatgtaaaataatgtcattcttctaatttttttttgctttgggaaatacagttatttttcattaaaaacatatttatgttatcacaaagtgaatatgttattttttatgaatgaaaaataaatatttaaaaaatattttacaaatgactcaattttgatttctaatgcagtaaatattagcagatataacccacataaataaagcacagtgccctcaccaattttgaatgtaaaggggttctgagactaaagagtttgagaacaacttcctttaagtgggcagaaacatcgtatttccactctcatgtcctggtcaagtatattatcaacttccccagcatgtaggtactccagcatctgtggcttactcaacatgaatatctttccactgtctacaaacacatctacccagctttttgatctgtcagcccagctgtactattgtccagacaatttgatggtactccagatgaggggcacagattcatcagtcagcaacatttgcttttggaatctgcccacaagctacagtcctctgaacaaagttgatagaccttattcttgtgtatacatgactcttgaccttcccaactcaaaacaaaactcaaaattctatgggcttggtcagactccctcacttgtatctttactgagggagacttagtgcatttgtcttcttggcatcacaaactctgatacaggacaaagtgctctgtgtgatagggcaccatgagattctgctgccaggccaccatacattgctcattcactgaccaacaacttcattaaagcagctgggatttggaaaactgaagatgaatctgcttgaacaagcatagttctgaagccaccaaagtccaacctcttaagtacgtaaatggaacataattgaaagcatggaattttgaaaaggtaagaaatactttgaatatacaaaagtcttgactttggtcagatgtttgaaaagacttgagaattgaaactcaggagtcaatgcacaagtagtggtcctggaaccaggttcagaaaacatgagggcaatgttgacatgctaattctaccattgacaacactagcaaaacctgtgcatggactctgatttataaggtctagagaaacttctaagctccataatgactggccccgctgggtcacccacatgtgtgatattaattctgcactaatgattataacttatgttctaagtataaagaaatttacttttctacacttctggtacttgacacattcctacctttaccattactgtggacatcattatttttacacctaaaatttctagttattaatttaaacttcagtttctagtattccaagcatcgctatgtaaacactattcatgttgactatttaagagatgtcacacatactgcatgattaattttccagtgaggaatatagatgacagatgttttggattaacaggaaactcactgggagtctaaaggtatttaggaatacttcaaggagtaagggaagctgggaggtaccctgtagcacaaaaaagagtcaagaaaagctttcaggtggggaatgcactggacaaagagactgactttacatggtgtgattaggagatataaaatagtccactcttttctacagcaggagcattgtgagaagagacaagatttaaagtttatcaagttccatcaccaaacttccgtgtatatgagattagacattcaaatgagggttgaaagagcattcataccagtaaaggaacttacagggctagagaatgctttggtttccacatccctttccccatgggagagtggagtggtgctctgtgtgaagggcactgcagaagaagtgctcgatggagattaagagtgcctgtgaggagctgggactggcatctcactcccagctgggcactcgctgaactgagaaactcttgcctctcttccccatcagatgatacagtggagcatggagcatgggcaaggtttcagaaacctcatcatgcatctcccagagtgtggaagccaatgaaatcacaaagaatggcgctagagtcttgcccagagaattccaaaagtggcagagattggagaccctgcagtagtggatgcagagccagggaagtagtggtgcatcctggactcaacagtgttcaatggacaaggaagctgaagctcctcaggtgggtgtggggagatggctgggctagggctgtcatgaagcaatctgtccagtggagaagggactctagtgatgagaggtcgtggatggacttccaagagtggaaactaagtttgtagtggggagaggtcaaaataggtcatgcagattgcatctcacctcatgttagatgctgcacaaggggcctctgaaaaactcactaatgtgcccatgggaagaaatcagcactggggtcctctcacactgagggtacctgcggatgccttgccatagcatccatcacatgggaacctttgtcttttcctttaatttccatctggctgtgaaggatacccagaaacagtcaaggaagaggagaaggagaatatggaagtgtaaaagcatagaccgtaatccccttcctcactgctggaggtggtctctgcggaaggagaaaacttgacatggatgtgaaaatgacataccgatttagatgatacaaattcttgaaaacttccaaatgaccagaaagtgatgaggtctgttgacgggataagaaaagaatttcaactcagcattgaggaagaggggctaagattaagaaaaaatgaaaagcttgagaatgctgaaaagacacacactgcctcatttcacattgctcttacctgttagaatgatgggtgaacattcatccttaactttgtaatgctttataaatctcttattccaaggaaaagtggagaatggcttggagtacaaaagttagatctgggccccaaaggacgtttgaggttttctcaccttagccaatctctggtggcttcagagaaggtggctttggaaattttttactatgtaattgagaaaagtttggctcaagagaagaagtaaaggggtctgtacaacctatgggtcttgttacttaaaaacaacttcttatatttgcacaataatccatagtttgcaaagggcctcacataaatgttttattttgttccactcctgctgtgaggcagagagggaagaaatctttacactttttttctcagaggcagaaaggaagacttagaaaggttaaatgacttcttcaagaacacagagtcttaaaacatagtagagcttggccttctgattcacttcctattacccgtctgcttcagggtcccatctcctgaggaaagtccatctttgccatgatgtgatgaactaaaataaaataaacaaaaacccacttctagaaccaaataagtcttgtaaaagagtcctgatattattcctatctatttacgtgacctggatcaacttgcttgaattatctgagccttatttaattccttcattggtaaaatggaaggattgagagagtgcctaggaaaatatctagtgtagcaagaacccataatttggtattctttttggcatatcaaaacatcttgtaaccttgaatatatacaattttcatttgtcaattatacctcaataaagctggaagaaaaaaaaagagctgactactctattccttactgctaatacaccaagatgatacgtctggcttcctaggtcctctctcccaaattcttccctttttgataataattttaaaatgaacaataaatagataagttgtggtgaggttgccaatgtgttagaaacattgagtggaacttacgaaaaggaaccccttatgaaagttgtaagattcaaaatggagtcacttgtgccaaaccctggcaaaatagagttggggaaggtcctgaagagagggctctcacacaatttgtctgataacaggaactatcacaggacatttttccaaactgcagctttttacatgagtcacgccaagacagctagctgcctacacaagaatacttgcctgacacactgtctcacaaacctaatccctgcaagggagctacagtaacttccaggttacaaatcccacctagcaactatagactgttgccaatcacaactcgccagctcttgtaagacactgctagtgccaatgaactttctttcaaaacgacttgcataaccttctctttccccaataaaactctaatgtttttctttgttctctggatatagcagaggccaccctgttgtgcctgtatcccaaattgcagttctgttttcacattttaattccaaataaaagttctgtgctttgggaacatctctacattttttcttggaagttgacaccctttaactctgcctttgctttccttcttaccctcttttgctgggtggaaatgtggagtcagacagtagcaatagtgagttggctctagatgcccacaacaccttggagggggagctggagagcagctctgcatgcagaaagtaggtgtgggcggagtagctctgtcatgtgcctccacacaggagtgaagcttgacatggaacatggtcaccatatgccatttgcgcctccctctaattcaatgacttctcaaaaaaaccaccattttaatatatttattattcatttttaaatttccttttacttaaattactaatgcattggcagtttttgtagatgaagattcttatttattgactgtctacaaaaataaaattgtaatctttcttaataagaggaaaacccaaatttttgagggtgagctatgcaaagagcctcttcagggtgcatgtgtttggacatagaggtcgcagtagagggagaattgacagaccttgtggtcctaaatcttcccctgggaggttaattgctccttagtggtcacttactgataaatggcacctccatatgctgacatcaggcagaagtggagtgctgatgcaggacaggcaagcccccaaattggggctcagccagacagggttcttggctttccccaggaaagaattcaagggcaagtaggtggtgctaaacagaaacttttactgaagtggcagtgcatagcagcagcagaggcagtgcttcctgtggaacagggctatgctgtaggcagtgcacccagagtagcagctcagaggcagttctgcagcctcattaatacctacttttaatcacatgtaaattaaggagcaggttattcagaaatttctagaaaaggggtggtaacttccaggtcattgtcatggaaagggttgtaacttctggctgttaccatggcaatgccatggcaatggtaaactgggaagaggtcgagtgacatggcattggtggatgtgtctcagggagagatgcttttgcctcttcactatttcagctagtcttcaaactggtctggagttcaagccttacctcagtgctgcttccaatactctgtccaatactgattgttatctttctcttattttagagtgcagttgagataaggtggaaccactgaatgttttaggaaagcatactagacaggaaacaagagtataagaattatgatcattttctctgtaaggtaaaatccatcctttcttcctgagttctcagagaaaggatgtctgagctatgtctgcctgtgaattagtccatttttctctttcttaggtcctaactttcttcttcctttccagagggcagtcccaacaagacgacaattagttatttgaataaaagggcagtttcttaaatctactaaagatttaatctactaaatttaatctactgaagaccctgtgctaaacattttaattctataggcatgtgaaatgacagaaaaacaaaactgttgttcagagagttaagcaactggtctgatactgtttatcaggttaagtgttggagaaacgattacaatgagatctgcctgcctgtaaatagcattataatttcaaacttcccctgaggaagaaccttggggttcctaaaagctgctttaggatgagggaaggtcaaactcttccttcccagttgtatcagaattgctttgttttttgtgttttctcttctgtatttttgcataagattttatttgaagaaagggcatcattgcttaaaaaaattgaggaaaaccaattctgaacaatgccatactttcgataatttctgctgtatgagttagacagtattttgtgggctagctcaggaacctaaccaacatgcattctaagtaggaagcatattacctataaatcagctatcagaacacaatctccatgtaatctaaatactttatgtcaggatacaaagatggccaaattgaagaaatccttaaagcaaatgttgggagatgaggagaagtgaatgaaagtctcttcctcatgatggcgggagatacctggttctcaggagagggaagactacagagcttgtctgggacttaggctgccttggcctctaggacttgccccatctgttgtgcaaaggatagactgaagaaacagctctactgtttttgaataacctctttactacgacctgttactctcctgtcatggcaacccagagaagcatgggatttttttttccattacatgatgttttccatttaatgggattataatatgaactatgcatttaaaggtagtattctccattttttccaagtctttgtttttttatttttattcatttatttaaaaatacaatttcaatttcattttagattcagggtgtgcatgtgcaggcttgttaccttcgtatatcatgtgatgctgaggtttggtgtatgactgatcccaccacacaagtagtgagcatagtacccaacagttttccaaatctcatccccctccttccctccccactctagcagtccccattgtttgttgttgccatctttaggcccatgaatagctaatgtttagctcccacttataagtgtgaacatgtggcatttgcttttctgttcctgcattaatttgtttagaattattgccaccagcttcatccatgctgctgcagaggacatgattacatcctttttatggcttagtattccacggtgtatatgtaccaattttctttataacaaggaatttttgaacttgtcatttgtggttgtgtagggaattaatcacattgtatggggaatgatgtcttaggcaaaagtcagcttgatagctatcatttacattattttgtggcattgtactaaatgtattacatgtgttatctaagtaaatatgctgaatacaagtccaggaatcttttcacttgattggacttggcttttacggaattttcccagacataagggaaaactttgtggcatagcatttaataatttctggctctgccatcagatgacaagggttcaaatctcacctctgctacttaggaacttgccatcttgtgataattatttaacttatataagcttcaatgtcctcatttataagatggaaataatgtagtatttctttatatttctagtagtactttttgttttttttgatacagagtttcgctctgtcacccaggctagagtgcagtggcaccatctcggctcactgtagcctctgtctccaaggttcaagcgcttctcctgcctcagcctcccgagtaactgggattacaggcatgcgccacacatccaactaatttttgtatttttagtagagatggggtttcaccaggttggacaggctggtctcgaactcctgacctcagatgatctgcctgcctcggcctcccaaagtgctgggattacaggcatgagccgccgcgcccggccagcagcttgctacttctgagtcctgagttcagctggctcagacgccagatcccaatacatatagcagactccattggacctgcactaagagcaccacctgtaggggctgttgcttcaggtggacactttttttcctttcttgcctcagttcccacatctggaggatgaggcaaacatctgaactacaataaagtacatggaaatgcattttcagtctgtaaaatgctgcacaaaggtttactattatttattattgttattctataattccctgagtgttctgatgtctattgcgggttgttttttaagttttgtttttgtttttgttttttttgtcttcctttttcttccccttggatcttctggaagcagagaagtttctctttagtgctggtgaaacaggagagttccctgattcccccctgcaggacatgtgacaagggtgtggcctgcttggtcgccctgcagctcagccccctgtagggggagcatgcagacaggcaggcgtggaggccagcatgagcgcttctgggctccggccccagggcagtgtctagggaccggtgtctgagactcccgaagcccaagtggacgtgtcttactaagctcttttagatattctgtctgcagatggcttgtgtgttaatcagcttagtggatcctctgccttatcccaagggcagtgggccagagtgacaaccttctgcatcccaagtccttgcccagtgtattggaagaatcagatcacatgtgggctcgaaggatgagtgcaagattttattgagtggtggaggtaaacgttttctctgtttcagtcagtcaacaaccgcatgtaattacttaattttaatacaaaactaggatcagagggtaggagctgcggtgtgaagagaactaagagccccttcaaatatatgggaatctaggttttctggagagctaggtactctgctaaaaagaaataaggaagaaataagaataagagatgaggaaggggggctgtgaccacaagagataaataagattatctctagccaatgactctcccatagtcagaggacgcctaaaagcagagttgaatgttgactctcagtctgctgaatacaaatccagggatcttttcacttgattggacttgatttttatggaattttcccaggcataagggaaaactctgtggcatagcatctcatgagatgaatggggagccagagaggggggatggagagggaaggtggtcttcccctgagttgggccacccatgggtgggagaaagactctcctccaaccgcccccagctgaactcccctagggatccagacctccttcttctctctttctctgcctcttgttctgtcattgctgttctgctggttccaacattcagcagcttgcttgcatgtgcccactaaggtctacggtttatatgggggcaggatggggggcatggcgggccaaaaggcaatttttagggtacaaaaacagaattgcctgtcctcacttagggccatgggtcttcagacttgagggtggggccttttccagggaaccaccctcttctacccagaatttccccctcctgtctgtatcactggtgctttataataaggctgctctgagtccttttttcaaattgaagttttgtgagggaaagctatctccagaggtgtctctagtgtgtctcaaactgtgattctgggtaaaattggctcttatttgagctggaagaaaatgtttcactgctaaattaaataatgctcatctttcctcactttataaaatagttaatggatacagttatcccaattttatgttatttttcaatgattttttttcttaaacctcttatgtttgctgctatttatttgttgccttgtagaagctctagctaagcacaaaatgtatgaacaaataacaggcgggaaagattttgaaacagtcagtagggtttctattgactgtattggtgtggttgaccattactttatatggcaaaactcacattttatacaagtaaaattttctttggtttgtgtgattaaattgaacatagtgtttcatcatgttctttttttttgagacagagtctcgctctgttgcccaggcaggagtgcagtggtgcaatctcagctcactgaaacctctgcctcccgggttcaagcaattctcctgcctcggcctcctgagtagctaggattacaggcatggctaatttttgtgtttttactagagacggggtttcaccatgttggtcaggctggtctcgaactcctgaccttgcaatccacctgccttggcctcccagagtgctgggattacaggcgagtaatcctgtatgattataccgccaccattcccggccatcatattcttctaagaacactgttatttgatggtgatccacagaataaatgtgaacattattgctgagagagactttggcttgtctcctgctctggcagtgagatgttgagttttacagtgtttttccaaagcagacttgtgtccagcctcagctgaggtgtacacaggatgctaattgtccctcaacttgtctgcacatcgttctacttatactcacttatgttttgtcaaaatatgatattaatattaaaatatttgttgaaataagttacaaacattttataatctatacaaataattcacatttgaagtagaatattattaagatataacatcttggtatttttcaatgtattctatttaacattcaatttttaatattcaaattattatcattcactactcaatctaaccccgtttataaagttgtataattttacaactgcagggaatattatggatgactttatacaactacttaattttactgctgtggaaagtgaggttcatagtgattaaatgattaagcaatttgcaaaagtattatggctttgtagtttattgatctttccaccacatggtccccagctctgtttaaaaatatttctgagaacttaaagaagtcagctcctcctctgcaccaggcactgacctgttgccaagagactcttgtccaagccaagtagtggtggccaagagagtcttgtccttggagaatatacattctattagggtaggctatcaataaataggtgaacaattgcataatgatgagatttcaggactctgctgccagtgtgaatgtgtgcatggacactggctacccacacctccccttcactttgccatggccaccagtgtgatcatgcacacagagggcagcaggccctgccacaggtgcaaatgcaagcacagacctcggcaaccctgtccccacctatgactcactgctggcatgagcatgtgcaggaatgtcacagccccgcttctgccagtatccccctgccccagccaacatgcatgcatcctgctgtgctgtgccacggctgccagcacaacccgtcggagtgttgtggccagtggaccaggaatacctcggccccctcagcacagtaggttcctagccttgaggggccagagaagaaagctggggtcctggaaccagctccccagggttagagcacacagctcaggagtgctaagctgagtcttgggacccaaaaatcttccagaaacaaccccagggaactgaacccaccttataccacagtcaaacccccaagggcatcaaagaaaataaaagcaagtaaacaaacaaaaaatcatccaaagtatagtgccttcaaagattgaagaaacatcagcccacacagtgagaaagaaccagtgcaagacgtctggcaactcaaaaagccagagtgtcttcttacctgcaaataactgcactagttcctcagtaatggtttttcgctaggctgaaatggctgaaatgtcagaaatagaattcagaatatgattaggaatgaagaacatcaatatccaggaggaagttgaaacccaatccaaggaatctaaggtatccaataaaacaatataggagataaaagacaaaatggccatgtaaagaaataaccaaactgatctgatagagctgaaaaactcgctttgagaattgcagaataccatcacaagtactaacagcagaactgaccaagctgaggaaagagtctcagagcttgaagaatggatctccaaaatagtcagaaaaaaaggaaaaacaataaagaagagtgaacaaatcctccaagaattatgggattatataaaatatgaaatctatgactcactggtgtccctggaagagaaggagaaaaagcaagcaacttggaaagcatattgagaatattgtccatgaaaatttccccaacctcactagacaggccaacattcaaattcaggaaatgcggagaacctctgtgagatattacacaagacaacaattcccaagacacataatcatcagattctccaacgtcgaaatggaagaaaaaatgttaaaggcagctacagagaagtgacaggtaatctaccaagggaaacccatcatgctaagagcagacatttcagcagaaactctacaaaccagaagatactgggggcctatagtcaagaactcttaaagaaaagaaattccaaccaaggatttcatatccagcaaaactaagctttgtatgcaagggagaaataagttccttttcagacaagcaaatgctaaggaaattacttaccaccagactgccttacaagaggtccttagggaagcgccaaatacagaaaggaaagaccattactggccaagaagaagacttaactatctaaagtatatatacactcaacattgaagcacccagattcataaaacaactacttgcttaatgatttattctttctatgaagcacatgatgatgccatcagctgtgaatcagagatgtagggaggtggttgttggaagcttgagaaagaaggtgaaacagccatcctggaaagcagaaacattaaaagacaagggacctacttacacaaggatcaaaagctgtgttgtaagacagtttgtcacaaacgcacgagtgctgtttcttctgcaacagtcagctacatgggtacaactgaaggaaaaaaaggtaggtagaaaatttggccagaattgagatattactatgcaaatatgacagaaagagagagggagttaataaaggtaagagtgtttgtaaggaagcagttatagttctggcccatggaatctggcctgggaaagaagggaagttagtacaataaaagactgagttcaagaaactgagaggctggtatgctggacagaaccactctgtgaatatcgatatttccaaaaagacacaggaggagtggtggaagaagagacagttgattgtagtcatcaagggatgaatggtgtgacttgcagaggacattggatgacagcagcaagcagctgtgttcttagtacaagcttttcaaaggagctcgggtttgagagaaggagagaaattggagaggggagcagggaggatgtcaatctacctccacttcttacaaagagatggtagaaactttcagagagtttgttgctttctaaaggtcttttattgtggaggggtttgagagaaggtgtgggatggggttagactggggctgtgcagagcagtgtgaggatgagggccttatgatggtgagttaccccagaggattatattgtggatggtgatttagtatatggggtagtgagcaagataggaatggtactctggttggagagtaagcagtgatttcccatggcttgagggttttctagatcacattaggcagaggaaaacctcagaaaaggtgatttcaatccagttgagggttgatttatttgaggaaaagatgcttaaagatctccaggggattactttcacccaatactagatgttttaccatgtgatcattacaagagtaatacaagctattctaatttcagattagactagacattatatttttctttctggcagattataatttatgattacaacaattcctgtgacctgtatgaagacacatatttctaatttcagcttgagagaaatttagtcttttattggatgatttaagtagatgattagtcagagggaaaattggtaatatagaggacagagtgtattataagatgcaacagaaacttttctccaatatatgcccagataaaagtacaccagagtaggaacagagtttagggcatatgtggtttaaaatttccacccataaaagagtttcgtccacaccacatctttccaatctcatcagcatgtgatttatacatcctcaaaaggttgcccattaaatttttgctcattacttattttaaaaacgtttttgtcggtactgagataaattctggcttcccagaggtctacctataagctttaatttttcatgttaaaccatctctctgatactgtttcgctttttagataatggctactattttcttaccagtcatccagattaaaactccttattcctctaaaacatctgtctcatgacatgtagctaaaaaagaatatatataatatatatatttatttgaattctaccatcttgtggttatttaagtagttgtctataaaatcctatatatgtattttgcagccttaagccatgcatgttattactcgttatgccagacagcttgacagctgaaattagtccaagggtccagggctctactatagcttggagatgggaagttctctgctcagagtgaaaattggtcaggaatgcttgcttgggaaaacgtgcaggtgttgtttagaaacaacatttttctaattttttttccaggttactctttctctcccttgtttccattttttctgatttccacatttttaatactgtttttatatagatcctgtgctggtttctttgctttaattaatatttcattttcaaataagctcaaacttggagaaaagttgcaagtatagtaacaaattccagtattctctttatccatttttcccagttatctcctgtaaattacaaattgttcactatatttactttatcacttttctctttttctctcctcctttcccccctctctatctcacaaacattcgacagtttgtatacaatgtgtttcgttatcacaaaaatactttagtatgtatttcctaaaaagacaagaacgtattctcacataactacaacatcatcatccaaaccaggaaattaacatgcatacactaccaccacacaatgcacagacaccaggcacatttcaccaattgcaccaataatgtccaatataggaagcacaaacaacagcaacacaaaagaaattagtctgcgagcacaattgcatgtcgcatttaattgtttcattgttttattttgcttgttttttactcccctctattctggaactattccttggtttctttttttctttcataattttgacatttgaagattactagtcagttatttgtagaatatccctcatacttgagggttacctaatatgtcctcgtgattgcactgaggttatgcatttttgagggaaataacacaggcacgatgttgagcccatctcagtgctccctatcaggagccacacaatgtccatctgtccattatcgctgatgttctgtggggttacttggttgaggtggtgtcttccaggtttctaaagctactattttgtctcaacataaataataaatatactgtgagaagatactttgaagttatgcagcatcccatttgttagttgtggcatccattgatgattcctgcctgaatcaattattactctcaaatttgctaaacagtgattttgtatctccttattccttttgcctttgttattttgcttgggaagaacttgtctttctttgctatttatttattgagtgatgtttggtaatagccacttcctgaggcctctaaacgtgccacttctctgagatcccacatattctcatgatctagcaactaaaattctaactacaggaaatcagggggcttccaggatttgtttccactgatgtccattttgactggtcagtgcctgtgctgtggcttaaatgtgtgatgttagaatgtgattcctgttccatccaggaagtagactggtgaagaacatttgaacttctaattcaggggtcctcagtcttaatagcatattggaaatgcctggagaattcaataacctacgaatgcctgggtggtagctcatcatcaggtgatactaatatgctgtcaagattgacagccactgggttagtgtagttgagagctttcctgttcattgtcagctaactaagtagtagcagggacttagatactgatggaaaccctagcaaacagggagaagaaactaaattattcgactcatgaaggtatggagagggagggaggaagagagaaagaggagaaggagaaggaggaggagaaataagagaaaaggaagagaaagagaaggagagagaaatggagccaaatgtaatcaatggttagatttgggtaaagaatatataagaattactgcccttctttatgaatttgaaattgtatcaaaatattcttaagccactaaagaccaaagtcacagtaaacattagcccatgggtcctcttgtcctcatagaaccacagagaaaagtaaaaataaggaatacatcttttatttatcctccacatttaatatgaagttgtgagtagaggaggtgaagaagaaaaagagttacattctcatagtcactaggagagaatctgacctcagaaacccctgaaggatgagagatgacagagaggcccaagtgacagagtgttcttagaggaagttggggtatctttcttttgcagcatgtaacgcagtcaggaaacttgcatccagaacatatgatctggagaggatcctgaagtcatcgaattcaagctcccaccgcctgtaggaatgtttaaagtactttcccagcggtattcatatgcactgtctgtctaatatgtatgtaatatgaatgcataccttttaactatagaagtgcattattctctgcaggttgacaaaaatgtagtccatttcttgaggcgactggaagaggaaacattaggtggcatggagtaaggctcagaaggggacagtgtgacctcaaggagagaatggctgctgaggggcttgtaggcatgtaactgcagctctgtaagggaagagaaatgcatgtctcatttcctatttatttcagtggcacctgtttttgacctgatgtcaagcacatagacggtgctcaatgaatatgttactgataactaaatgctgagaccagcaatagagagaaaaataaaggaggtagtgggtagggcttcctttcttcctcccccagtcctccccaaggtcccttccacacacacgaggtcctgtatttcaggatgactcactctgatgcctcctcccctagctcgtgggccacgtagataatgtcagggtaccccatgcagctggagatgttattttggggatagtagaagaggaagatgaggcacatctcattaatggtgctggggcctccctggaggaaacagacaaagatggagagacaaagatacaaaggcatgcagagacaggaggacaaagcaaacagaaaatagttgaagtggttatcttaccagtgatgccattctccttttcccttaaggtagagccagctcactgccctatttgctgctctattttcattggtggacaattattgatgttattccaaaaagcattccatatatctgccctgtcctcagcttcactgccactatcctgatttgggctagactatctgcctctcaactattgtcagtcactcatctgttctaattgcaatctgacctctgtagagctaccagacaagttgtttacaatttgtcttgcatcctgccatttgcctgttctgaaacctccagtggcttccagtcactggaatagtcagtcatcactaaaccaattatttgattctatctaataaattccaacccattcattcattccatttacttacctggcaaatatttatagagttagccctgctgtcctggagatataggtgggtcaggatcacccctgcttcaaggactgtttccaactttatctacctcatcctcattccattcctttagatatcttttgccaaccaaacttcttcatgtgcaccccacgctctccttatatatggctttctcagttttttccttctccagaattccccatctctatgtgtctaaagaaggactcattcacctacgtcacatgttcagttcactgtagtaggatctcatgattctttcctgtgaatttccctagtgggttattcccgttcttcttgtatggtatatatcacttactaacttgtgatataatcatttgtagggcggtattttttcctcagttgcctgcaacaccttttgaatcccacaagcactgaaccactcctgatgcacaaaacgggggattttcttgtgatcatagaaacaatagccaactttaattgagaatctactacaagtcaggcaatgatctaggtgttttgcatgtgttaaccaactcccacaacaatcttgtgaggtagaaagtagtattaatcttatgtgaattgggaaactgagatacaaaaaagtcaaataacttgtctaaagttagaaatgtactaaatgattgtgctgatattcaaacccaggcaatgaggccccagaatctctgctcttagtcgctatagcatactatatttccatggtcttggtgggttattggcagataatgtgagaaatccctgttcctatcttagatgcatggggtgtgagaacatgaaaagccccgtgtggatgtgtgatgccattggaggaaggaaggggcttcagtgaaatcacaggggtcactgggtagccaaagccatgagtgggctctccactggggctatggtcatggtgaccatggtggggtgagaggtcacttacaaatgtcatggagtcacggtccagtgtctggtagtgacattctaccagcaattcatctccctgttcagagtgaaacatgaaggctgagagtaagacacagagggactggtacagcttgagaactttcttggttgtcagtaatgaggtatgatgctgctgcccccaactctgcctggcctccctcagactctcaccggcttgatctccactctagagggcaaatctcgagtctcctgcaggttgaagtcataggaatcgtctttacagatttttcgaagttgtgttccattcctagaggaagagaagtcgggaattcagaaataaagagaagatgaaatacagaggggtctgccaataaagatgtagcatgcgggtggggtcattctgtgagtagattatccataaaaataaacaaaacacttcatcttccacagtcttatttcagttatttctactctaaagatagttctacctcttcctttttctcaaccggacataatcgtatgctacagaataaatcactattcttaaaattcattcccacctgcagaagggagagcttcaaggtcttccctcacctgtattgcactgcttgcagagcccgtccagccaagtgggtgtgcagcaggtagccatacacctgtatgtcaggcataggagctccattcatctgtaacagggaagaggtgcacccgatttgttaaggactgtgttcttgacctgctgcttgattttccccccttggtatttgacactttcctctgatgactgacatttaccactgtaattcttattgaacctttctgacccttcttccttctgcacttcccttgttctcaaagccctgactccttcccttccttgcaaaagtcatgttagtgaatctcctgagtaccaggctgtaattattctccaagtctggggttcaggctgtgtgggcttgtggatctgaccagatctgggatgggggacaaggagagtgtgtttcctcctcaggaagggtgcgcctcccagctccacctcctcaaacttctccgtcctacacagcccataggacatgaaggactcagcgcccggggggatgaagtggatgggaaacgtgaagaagcccagctggaggacatccgtgtcgtatttgcacagctgagaagtgtagtacacgcgaatccccgaggaatcatacacacctggtgcagagaggaacagtcaatcacaggaggcaggagagtgggtcacaatgtggagagaaagaggctcaggaaagctggggtggggctttgaccacagggagtcagcacacatcccacaatgcgttcccaataccgaaaaaaacagccagccccaccagcttcccttccttaaatcctctggatgctcaccaggaaggttgttaaaattgctgtaatgaatctccagtcagatccactgagggtccaagggggtcccaatagagacgcctacgtcatctggaaactggtagctctgttggaaggagttagatttggcagcaagaagggctgggaaccagccatagggattcagggctcctggccttgttttctaattgtcatcccagacttcccctatcccctggtcttccaccagcccagtgatctcattacccaaccacatgcacccgcttagccatgtgtttaccccatcacgggactcactgtgcccccgacagccgagcccacgatgacctgtgagcaaagggagaaggcagggtcggccccatagcagtcgctgatgcctgtggggagaacgctagcattgccacaggcgtacaccaggatgtgatgcaccgttgtctcattgtggtagaccaacttaggctcaaactgggcagaaaaggagagcagagcatgatcaagaccttctacatcaaatccatattatcttccttcctgtcaaaactatacccatttccgtcttctctctgtttctctctctccctttttctctgtttttgttccccaagctaccattttcccacccagtcagtttgactctcctctcaactcccccctcctttaagccccttctggagagcagacatgaaatctagccagggacattctgccttcccttagtaacctcctcagttcactgtatctgagcatgtagccatgccttttcaaattatctgtctaaagaaaaaaagtctccacatttgccacatattgtgagatcatacctttatttatttgatcaaaattgaaatcactcaaatatgaaattgggttaccaagtttgagttcattctagctagacttctccaacctcctgacagcccctggccatatcctctccctgcctttacctcctcttgggctaagagagcacaattctggggccaggttgaggctcatactttgttctttgcaaacaattattaattcttaaccttcatcaacatgtctgttgcattgtggggcttaaataaaatagcgctgggagttacatttctgggctcaggaaatgatgtagctgcgacctctaccaagccctgcctgtccccctgttcttgcaactacttccttcttgcttcctccaagaaattttccagacctcatcctccagggttgaccacaccccctgctctgctccagcacccttccctgccttgacaatgtcccccatctggtccaccataccttgtaaatgtgatgcttctcgctcacaatagggagaggaagaaaggtgcaggcatacgtggtgtcatcctctggaatgaggaactgtggaagggtgcacagaagctgagccagatgacagtgaggctctgaaaaagtagggcaagggccaggccagggaagggggttcacattagggtcagattggcagtccttaggagacagagaagagtcagagtaatctccacccaagggatatactgaatactgggggcaagagaagggatctgggttgagtggggtgaggagaagggagctggaggctgctgggtgggatgaaggtgtcttacattagtgatctccaagtcatggatgatggtgtcctcagggacatccagatcgtcagggtggacgacttgtagcagaaagatggacttgacaaaagtacgctcccgatacagcttcagagtgtcatccaggccataggcggccagcaccctcacggtgttgctctgcggggtgccataagcattgaggagctgccacccctgagcagcactctgcatatccctgcacccaaggacctacacaaggcacttgctcatgtctacatggtggaatggaaggaacttcacactgggagtgagaactagttaagttctatttctgcctccgaggctcacttgctggtgatcttgagcaagtcacactccctctcgcatgccctctctaagcttgtgtccacatctgtaaaatgaaaggactgaattaaactcttatatcctaacactctaaaggtcagcgaaactgggcagaattcttcaaaaggagaaccctggggcaggtgggcaggaggtgaatcagtgggaggtcaccctgcggaaggcttgtggatttcagcaggtggcacaattggagcatttcctgggaaggctgagaggaatagaagtcctgggaatgatgactagctgcctgactgggggcaactacctctccagaaggaaaacctgcttgtgaattaaatgcttttctctgctctctattttaccgtaatatccaggtcatgagggtcgcaggagcggaagggcctggaaaagtgcatggtggtgtagacagcatcttccgtcaggcccagcagctcagcatcctggctcccatcctccttcagagtgtcttcctccaccaagtgctgatccttgggtccagtgaaggtcaagaagtaagaactaggagcttcaaatgtcatgctttggagcagtagctgttcctttagctcccctaggatactagagtagcagagcccaggtgttctttattatgtagtttttctccttgggcaaagcatggcatgaagaacatggcagagcacacttttatggataatggagtttcaccacctgtccttgctttacttctcccatttcaaatctcatgtccataaagtctaatattcctgcatccctaatacttgaagtctcacatattatctgaagtatgtatgacattcattctctcatgtggctcttcatgtaactatttctcagacagctttgaattttccccagtgacctgcagttagtgggctttagcaagtaagtggtgcaagactatctcacaatctaatggtttcattctctcagcagtctttagagacttgcagtctggaagacatagatttcaaactctacaatggaccatttctggagggacacaccagcattcagctggcattctgggagtgtgtttagatatcctcggggaatgtgaatcctttctggacagaaaccatcctcaacccaacaaagaccctcatccttggaagcaagtcaccctcacacttaccgagaaatagacattgccattaggcaagactcctccaacaaccagatcacttcccacgttggtgtagcgatttgtgacaccgaagcccacccagccagctgtacggacctggagctcaaaactgatgatttcagcctcaaggtcaaagtcccaacgcaggaaaatgacattagaaggatctaggaacctggaatagcgcaggcgagatgtggggccaaggcggttgctttgtaaggggactcccagggccaaaagtggaaaaagcctgaagagaaggtcatgggccatggctcctgggacctggagcatctcccttgcagatgaacattcgagagcttcagagttttatgtcctacctgggccaggcaccatgccatgggggagggccaggctggggcacttctgatctgattatcctccgggttcagagcgatgccccttacataactctggaggtgagagatgcccagagaggatacagggcaggttgctttcactctgaagcaggggcctggcagaaaattcttaggattgaatcatttagactttccaccctgaccccatgccagcgtcctgccagtggggaccctgcagaatcaagaaagtttagtttctttttctccccctcccttcctgcccacctcttccatcttctatcctgggatgtctttacaggacattctgcctctggactatgcccccaccccactttttgtgggcatttcccattttgtctatgtatagaacttcggtactagcaaggatgtgggactgcttgtaaacctagtctttcaatttcccagtgcagtgcaggaaggagggaagtagctggcaaggaccggagggaaggctgcaatttccatctgctagaggaggctttgctactaatccctagaaggacactgagaggagggatatcagcttctcagatggttgagtcgggcagctttggttttctgcacactcctggggaggagcaggaagagggaggaggtgaggggaagaagatgagaaataaacatgagtttgcctttgggatgctttgtgctttcccttccggccatcaattacctttcagagaaattaacttaatggctgcatggcaggctgagcttgcccgattgagcacattagtattatgcaaacaatggaagcaacacagaaggaaggttagaatattagaacaccagaatagaaaagaactttagagccacttagttttccaaaaatttctatctccttaatttctagatgatgaaatgggagctccaaagggtaacaagagtggtgcttgatgccccgttgagtcaatggtgggtcatggtccctgaccataatttccttaggtcacagacaccctacaggtaccagacccctgccatgcatttccacatggcttgtcctggtggaagaatctagtgacatttgttggctgtttcttagggaagaaaccaaagtctgactctaactccacagtattttccccctggtgactgacacagctgacctagagctagaagtcaactcatctgacccctggttgctggctctccatttgacaatggagaggacatggaccctgagggcctctcccacacagactgggcctcacctctccacagaggaattcagctcaggagtagatgtacagatgccggcacgatctgcttacagcttctcattgcaggcatagtctttttttttttttttttttttggctactgagctcatcaaagctggtgaggacccagctaaggttgtttgctgctgctgtgagctcttgagtagtaattggggtgtggtgagggagaaaacaaatgcctcaagggggcagccacagcccctaactctaggcctgacagagaaggcagggagctcggcagccatctggaagcaagaggcttatcttggcccaggaccagagctgagccaagagaagaggagaggtcggagcctgggaggcactgaccttgaggagcagtaacaccagagagagagagagataacaggtgcgtggagacattctgatcccaatctcacttaaggattaagggagggggcagtagggagacaggatagccagtcttgtaaattgagacaggcccaggatcccttatcctgcaatctgtcctgctggacagagcactgtcctcagcacagaggcaaggtcctcaataaagagctgggagcagtgactgcagactcagagggtctcttctcctggatccttatctggcttccaccccaggaagccaggccattgctacacctgtgtggggctctctagggagatggggctggggctggccctgcttcccttctgcatttatcaagtgcctgtgacagggaagacaccacaagagggtcaccgacccgagggcagtgcagtcccaggtcttgaaatagtgaagttcagtttctaaacccctctgtgcctccttctcgctctctgtaaaatgctgcggttggagagatggtggatacagggccttttaagttgaatttcccagatgattggtttccaagctttctgaaaaatgaggccccttatcaatgttgaaaaataggtaaatctcattcttttttatgactgaacttaaagaatgtgattggattgtttgtaacccaaagtataaaggcttttttttttttttctgagacaaggtctcagtctgtcacctaggctggattgcagtggcataatcacagctcactgcagccttgacctcccaggctcaggcgaccttcctgcctcagcctcctgaatagctgggattataggtgtgcatcactatgcctagttaatttttgtattttttgtagagacggggcttcatcatgttgcccaaatgcttgatgtgcttatttcacattccatgcctgtatcaaaacatctcatgtaccccatacatgtatatacctactatgtacgcataaaaatttttttaaataatttttaaaattaaaaaaattctgagaatttaagcttttaatctcagttgagtactaagtgaatggtaattaaagactaaaattactaccagttgtcatattttaattgaatttaaaatttaccattgcaatcatagaagtcaactcttattgaaagcttagtctgtgccaagctctattctaaaatgtattgaccctaaatacatttagataatgtatacattatctaaaatgtaataaaaaaataataatttttgttattatttccatcctatggatgaagctgctgaaacccaaggtcccactactgggtggtggcaacactatgagctgttgggaaaatataactaaatctattattaagtttaagtaaaataattgaatattatataattatatgaattaatcaaatataattaaatatatttcataaataaatattattagaaataattcaaggagaaaaaaaatcccccaacccagaaaacctctctacaaaggtagatgagaacaaaagtacttttaaaatctttttttttttttttttttgagatggagtcttacttgttgcccaggctggagtgcagtggtgtgatctcaactcactgcaacgtccacctcccgggttcaaacgattctcctctctcagcctcccgagtagctgggattacaattgcccaccatcacgcgtggctaatttttgtacttttagtagagatggggttttaccatattgatcaggctgttctcaaactccttaccttaggtgatccactcacatcggcctcccaaagtgctgggattacaggcgtgagccaccgcacctggcctcattttttttttttttctaacaaagagcatcctgaaatattgagctgcaaacataggtaagaaagctggaaacttgcatggggagatgcctgcagctacaccaaaagaaaaggtgtacctgggggccaggcatgtccaccatagaagcttcatcttcccttttttgttagcacatgtacagtaagaaagaaatgggcaacatggtgcagctcaggccagagggagtagctatttgtcctcactcaaaataacatattctgaatttggattttctttcccctgtcaccgttactgtcctagcatcacattccttggattctctgaatgccttattgcattccacacaaaaatgatgtattctccaacaaaggaggtcacctcacagtgctattggagtcttatggatagtgctaatgcttatggaatccagtggccttgccatgtttcaccacctaggatcagctggccttatacaatatcactacgacctattgaaatcttaggaccagctcaagttgggagacatctttagaggctaaggtgctcctctgaaaaatggtctccaaaccattttcctctccaaactaaaatttcagttaataaaatatgtgcaaatgaagctgtcacagttgcacttaataattcgcactcccaatttagcttctcaatactgcaagctaggcgttactgatttaggggttttagagccctggatagatgaagttttcctactagaacttctgcttcctgagggggttctcttcttccctagctgggctgaaagactccagtagtccacttgtagcagccacaggctgaactctctaaaatctgttcttgtttttgtttttttaaatactcagtcaactggccaaaaaaacacctctccacttaaaactatcaattaaaactctcagggggtaacagactgcagggtgaagtgaagagagaaggaaggaagagaggaaaatactatagagtgagaaagtggagttcctgggcaactagctttatataaaaggcaagtatgtactaggaaaatctgtcattgatttcccgtttatctgctgtgccataaacctcagttaacttttatagtaactcctcatgtctccagtaaacactcagaatcctgcaacatgaatgaccagaatccatcgatggcattgagagttgcatgggcaaggagaagctaagtgtaacacctccctctcacctttgccctcccctcccctctcacctttgcccttctatatagatccctctttattagacttccttttttcaatcagcatagtaatgtgccaaaatcacacattgtctaatttggtgcatgtagtaaagggttttgtaccccaaatggctgtggagtggcctttattttatgtcagttaccaattcgttagagagaacataattcccacttcataaacttcaattatctgaggaattttgggttttccatccttatctagacggcaagaagggttgttatgaataatcacagtgaagatatgtacaagtaaaactgctcaagcacccactctgtttagcagaattgagacaggtatgcatggggcaatgtgaggagttaatttatatttaattctaaaggtgaacgatggggacaagctgtgtcatatggtccacaactgccacagctcagttattttggattacattttcaatccagggtatatagtaaaaaattttggcatagatgccaacatcggctctcaaaacacatccatccgcaaaagacaggattccttgaagcatcccattgcagattgccggggcagcagaaacttcctgccaggaaaacaataataacaacaacaaaaaagcagattatctttctggcaagacagaaggaagaaaatgggaaaattaatggatgaagagtattttaccttgcagggctgcctccttcctggcacaatgcccacacacagcatattttccgtgatgttgtaggttttataggcatcgcgacactgaggcttggagattacagagatgttcacagtttgcagtgaatcgggctctttgtctaaagaaaagatagaagtcaaacttccttaagagttttgttaggtattaaaacttcttttaaaaaacttttcttcttctaccatcagaaattaaaagagatcaaacattcagagaagtcagaactgtggcagttaggacaacgagggtataggagatgatcagattaacaatttcttatgatgcagaatcggtgaccttataaaagtgatcaaattcttgggagttacatgtacatgtgagacactccaggaatgaaatgaaacactttgttttaaacttttctggaaatttggctgggcacagtgctcacgcctgtaatcccagcactttggtaggccaggatgggtggatcacctgaggtcaggagttcgagaccagcttggccaacatggtgaaaccctgtctctactaaaaatagaaaaattagctgggcgtggtgatgagtgcctgtaatgccagctacttgggaggcaggagaattgcttgaactcaagaagcggaggttgctatgagccgagactgcgccactgcactccagcctgggtgacaagagtgagactccatctcaaaaaaacccaaaaacttttctggaaatttaaacattcaaagggtttcttttgagatgtaatttttagagtttgaatgaatttacagatatctggcctactttctcaattgtcaggtcaaaacaaaaccgagtatctgcacaaaaaagtcactgaaaaagcagttttcttaaacatataaagctagtaaatggtaaagctaagatttaaaactggatttcctggttcctaattaaagttcttttctttgtatcaatagtccacaaatactgtgaattgtgcacacttgtaacaaaatttgtccaatctgaaacaaaatgagaaaaacaacaaagtagtatgaacacatgtggcatgtgttctttccacggacgtttctttgggaagaagtactgtattttaagattttggtttttttaataatggaagagtatgtttaatgtttttatttgaaaataatgtattagttcttgaaaataaaatgtataagatccttcactttattttccaagcaataatttcatggctaaacatttcttttgggaatacttctgtaggaaatgcttacttaactacttgatgacccagatcaaaataagatgcattttttttgaagtcatatctcgttttgaaccttatgccataacccagatgaatcaaacatactgctcacagaaggacatttggctctttccaaaaatcaaattgactctcagaggacaaataatttctacttattgatatattcaagaaaatgtgctctaaatctgaaggtatttactaaggattagttttaaaaggcttgaatcatggcaacaatgatagaataagtgtacatctgcccattggtttctataaaaagaaagtagtgatggatagatgaatgtaatctgacaagtttgtttcaaataaatctccttttcatactatggtatctagtgtatgatgtatattatatatactcaaacttactcatgagtaaagttgcattaataattcttcacaagggattatatatcattgttctattttgctaataggtaatcaactccctttcaccactactctcaactctcgtaattagcaactatagacagttaattagggtttgcatagaaatttggagatggagtaatgggcagatggagatgcaacttagaaaacagaaagttgccttaagttgtgggtgttttatggaatatgaaacatgaggcctagaacaaagtttagatagactatctagttcaggagtttcaaattatgtatagaaaacttccattgataaaaataatggtagccctttgtcaattttctgaagaaatgagtgaatgcttagaatgttaccagtttaaaatgtttatttcagaagttctttttaaaactttaactctgtatctttattaaaatcttacataaggaagttctatcgcatttagtaaaatattatatatttatcttacatttaatacactgatatttatttcatgacttttcaaagcttcaagttgctttattgcctgaaatggtttgaaaatatacaacagagtaatctgctttattttagagttaaggaaattgaggctccaaggtaaaatgacctgctgtcacatagaaaattaggattggaatacaaatgttttctttccactaaaaccacttctatcatatatgaaagagaaaatgatagaaagatacagcgggtgaataaaaaaaacccaaaaaccttgaagcactccttcagtgaggtacagagaaaaggaaaggggggaaagaggttagaagaaagcttcactaggccgaattgaagaagccaagagtcgcgaaggtgtagaagcatgtctaattctgagagaagaacattgtcttgaactcacagatatcacacacattgtagctccaggtagagacagagcacatggtattttcagagatagtttggtagggcaggttggctaatttcacatagtcattgagttcagcctctgttttcagcttgattagcatgatgtcatgatcaatagaagtgactgagaagtgtggatgatgaatcatcttctcatagccaatcacttgcagatgcttttcattagagtctgctgggattgtaacccccaatatcacccgaagctttctggaacaatatagacgtttatgagaggacttaacagagatggcttctccatcattatgagcctctattatccctccccacagacctttttctgtaccctcgtatgtctcccaaaggcctttctaatcccatttaattgggagatggtctcagacaggggtgagagtctgtgcccaacctgagaacccaaagaatggagtgcctttgaaggcttatcactcacggtaaattgcagtgtgcagctgtgatcacccaaagcgggtggatcaggactccagcgcagggcaagtagtcagatttcaaatagaccaagtaagggggagtggagctgactgtgtaatctggattaaaggccaaagcaactggaaagagaagcatagacaagaaattccaagatttctcagtcatcaccagaaaaacttcaggaaagtcatttaataggctccaagttcccctatccttttctctagcaactttatctgtaaaatgacttactttgttctaaaacacgaagaaaagacaaatggtagaaacatatctcttttgaaaaataaaaagtgtttggctttttcactgtcaataaaatctttcaaattaaatgttcaactttcttaaataccttccacaatttagtgggttgtatgctaaatcaacgaatttttttcactatttttaccaattttagaatgcttcaataagtcttaaggcattcttatttagaatgctttaataagtcttatctctttttcccaacaacaactcaagacagaattatataagtatcatgacaagaacagaccaaatgctaagagtctgaggaggggaaaaataatgtattgttttaccaaatatacattgagcacctagtatatgtcaagctctgttttaggggcttgggctatatagtgaacaaagtagatattcctgctctcatatattacaattaatgaagatattcagtaataataaacacaacacacaaataaactatgtaggatgttaaatggtgattagtgctatggaaaaacacacaagtaaactatatatgatgttaaatggtgattagtgctatggaaataaaagtaggacagggaaagagagaaaggtattaccaattgtgtgttgcgggagaaggaggggtttcaggcagtatttgtttgttgtttgtttgagacaggatctcactctgttgctcagattggagtgcagtggcaagatcaggctcactgcagcctcaacctcctgggctcaagcaaaccctcctgagtagcttggactacaggtgtgtgccaccatatctggttaatttttaaattttttaattttttaaatagagatggagtcttgatatgttgcccaggctggtctcaaactcttgggctcaagtgatcctcccacctcagcttcccaaagtgctgggattataggcatgagccattactccagtctcaggtaatattaaaccagtcatcagagtataacttcatgggcaatgttgaacaataacatgaaaacgggggaagttgctagtcaaatatctgggtgaagggactccaggcagaggcaacagctgcagcatgggtcctgaggcttgtgtcagttacatcacagaggccatggctgctgacccagagtgaatgaaggggagcagaggaggaaaggggctcaaagaagaatggagggttttgtagaccatcgtaagaactcggccttgtttcctgagtacaaatggaaccactcaaggatttgtgcaaaggagtgatgacagtctcctcatggagaacctgtagagtgtagaagtatagaggtagaggggtctgttaggagaataatttgctaatccaggcaagaggtggtggcttagatcattgtgagcagtggagatggtgagatgtgattgaatttaggatacatttagaagataaagccaacatttttctaagagatcaaacgtggggtatgagagaaagagaggatttatgaataagcctgggtttatgcctgagtaactggaactgtgccaggagatatctgattcttcaatgttctgctgtgccctctgtggtgcagaacatcaatcctgttgcagacaggtccagagtcaggtcttaggagtgggtctggtatttgagtgacaatgtccacgcctcccacaaaagcacacaagcaaacctcctgcggcaggcaggcaggcactatcacaggaggaaacttgatgggaacggggcagtggagagggacagaggaccatcctacacttgaattctggaatgatgcctctcgctgttacccgtctttcatgcttttcccaggatttctctttggtgggtaaagagacaaatatgcacacactcaccagtcagattcaagagggcccagaggaggataaacttcatgatgatgttgaaagcccagtttagctccagtctctggaaaactgggaagagagagagaaaacaactaaataaaacaaagcaagattgtagaattggaaaaatatatcatctgaattattttagtagcaggattcagttttagaaatggtgtccattattcagaggagagtgtagcgtcatctgtcagagagacaagaatagagtcaagtgattggtccccaatacagttgaaaatggttctggaactcagagttctgccctctgtcttcagggaagaaagtaccaaagctaagttgaagttcatgatatctctacagacgcctcctgtctggtctcctttttgccagccttggtaggcaggttcccctctaaactatgtgtgggctgctgcccctcctgtctgtgtgatgctatcccccactgtgtgatgctatttttctccagtggacataatgtagccctctggagctgacattgcttcctctgcctgacattaaactcctctttgaaatacattaaccttttccttcatgtcactgtttatccatttattctgtgaaccaacctgctaattatttatcttatgtatctaacttgtgctaggatctgtgcttgctgttggggttgcctcaactgaaggatttctttcctaccttccaagagcttacagactagtgggaatgatacttaagttgatggttatgaaacaaagtattcagggctaaaaattgagatatgccacagactagataaaaatatttgcaaaacacatatctgctaaataattcatgtataaggaaatagtaaaattcgacattaagaaaacaaacaacacaacctaaaagtgggccaaagatccttaccaaatgttttagtctgcttggactgccataaaaaaaaccacagtctaggtgtcttacacgacagacacttactttcttatagttctgaaggtcagaagtccatgatcaaggtgttgtcaaattcagtttctggtgaggcctctctccctggcttgtggatgatcaccttcttactgcttcctcacatggcctttcctctgtgcacacagagataaagagggaaagaaagctctctggtgactctttttataaggacataaatcctattggatcagggctccacccttctaacctaatttagccttaattgcttccttttaggccctatcttcaatacagttgcattgaggtttaggccttcaaacagatatattttgcagtgatggggaagataacaccagagaatatatacagatggtaaatggcatatgaaaaaattcttaacataatatgtcattagggaattacaacaacaatgggataccactacataccctgtggaagggctaaaattcaaacactgacaacaacagatgctagtgaggatatgaagtatcaagaactgatgctggtgagaatttattgctgatgagagtgcaaaatggtacagtcactttagaaaatagcttggaagtttcttattaagctcaacataaccttactatatgatacagcaattacacttcttgatacaccaaaagatttgaaaacttgtgttcacaaaaatcctacacataaatgtttatagcagctttgttcaaagttgccaaatcttggaagcaaccaacatgtccttcaatagataaatggataaacaaagtgtgattcatccatataatgaaatgttattcagagattttatgatttaaaaaacttaactctcaagccatgaaaagacatggagtaaacctatatgcatattgctaagtgaaaagagctagtctgaaaagattatataccatataattccaattatatgacattctgggaaaggcaaagctatggagacatatgtatgtgcaagaacttttttcctataatgacttcttttcctccggatagattccaaggagtgggattgctggatcaaatggtagatctactttcagttctctaaggaatctccacactgttttctatagtggttgtactagtttacaatcccaccaacagtgtaaaagtgttcccttttcaccacatccattccaacatctatttttttttttgattatggccattcttgcaggagtaaggtggtatcacattgtggttttgatttttttttcatatgttttttggccagttgtaagtatttttttaagaattatctattcatgtccttagcccactttttgatgggattgtttttttttttcttgctgatttgtttgagtaccttgtagattctgaatgttagcgctttggcagctatacagattgcaaagattttctcagggttgtctgtttactctgcagattatttcttttgttgtgcagaagatttctcatttaattaagtaccatctatttatctttttgttgcatttgcttttgggttcttggtcataaagtcttcgtctaagccaatgtctagaagggtttttcctatgtaatcttctagaaattacatggattcaggtctcagatttaagtctttggtctatcttgagttgatttttgtgtagagtgagagatgaaaccagtttcattcttctacatgtggtttaccaattatcgcagcaccattgttgaattggctgtcctttccccactttatgtttttgtttactttgtcgaagatcagttgattataagtatttggctttatttctggattctctattctgttccattgggctatgtgcctatttttataccaggaccattctgttttggtgactatggccttgtagtatagtttgaagtcaggtaatgtgatacctccagatttgttctttttgcttagtcttcctttggctatgtggactcttttttggttccacatgaattttaggattatttttctagttctgtgaagaatgatggtggtattttggtgggaattgaattgaatttgtagattgcttttagcagtatgatcattttcacaatatttattctacccatccatgggcacggaatgtgttttcatttgtttgtgtcttctatgatttctcagcagtgttttgtagttttctctgtagaggtatttcacctccttgattaactatattcctttttttgtgtggttattgtaaaagggattgagctcttgatttgattctcagcttggttgctgttggtgcatagcagtgctacttatttgtgtacattagttttgtgtcctgaaactttgctgaattcatattccagttctaggagctttttggatgagtctttagggttttataggtatacgatcatgtcatcagcaagcaatgagagtttgaccttctcattactaatttgggtgccatttatttctttctcttgtctgattgctctggctaggactttcagtactatgttgaatagaagtgatcaaagtgggcatccttgtcttgttccagttcttagaaggaatgctttcaagttttccccattcagtataatgttggatgtgggtttgttatagatggcttttattaccttaggatatgtcccttctatgccacattttgccgattttgctaagggtgttaatcataaagagatgttggattttttcaaatgctttttctgcatctactgagataatcatatgatttttgttttaattctttttatatagtatatcacatttgttgacttgcagatgttaaacaatccctgcatccttagtatgaaacccacttgatcatggtggattacctttttgatatgctgttggattctgttagctagtattttgttgaagatttttgcatccatattcatcagggatattggcctgtagttttcttttttgttatgttctttcctggttttgatattagggtgatactgccttcatagaatgatttagggaggattccctttttggaatagtgtcaatatcttttggaataatgtcagcaggattggtaccaattcttctttgaatgtctgatagaattcagctgtgaatctgtctgatcctggacttttttttattggcaactttttaattaccatttcaatcttgctgcttgttataggtctgtacagagtttctatttcttcctggtttaatctgggagggttttatatttccaggaatttatccatctcctctagattttctagcttatgcatgtgaaggtgttcattgtagccttgaatgatcttttgtatttctgtggtattggttgtaatgtctcccatttcatttctgcttgagcttatctgattcttcccttttcttttcttggttaagctcattaatggtctatcaattctatttatcttttcaaagaactaggtttttgtttcatgtatgttttgtattttcttttgttgttatttccatttcatttagttttgctctaatcttgattatttcttttcttcttctaggtttgggttttgttggttcttgtttctctagttccttgaggtgtaaccttagattgtctatttgtgcaatttcacactttttgatgtagacatttaattctgtgagctttcctcttagcacctcttttgctgtatcccagaggttttgataggttttgtcactattattgttcagttcaaagaatttttaaattttcttcttggtttcattattcctgcagtagttcttggagaaaaagttgacgatgtgggtatccacatgctgctctgtccctccaagtgggagctgcaacctagtcctgctcctatccactaattttttcttgaactcctcctaaatgtgtatttttattaagccattaaatttgtgatgtttttacacagcattagaaaactaatacaaatgcatactggatgctggcatcatattctataatgatgattccatggcaagggagataagaagcttgctctcatacatcataatgcttaatgagggggagacagatgtaacaagaacaatcatcgtgaatgtcaaaggaaaagggaggtagagaagcatgtcgcaggaccctaatataaggtcagaagaagaccttctttgggaagtgaagtttgaaacttgaaggatgagtagaagttagccaaatgaagagatggggaagaaatctccaggtggatgaaccagagctccaaggagaacaaggaatgtaaaaaagagaatgaagagagagacaggcaaggagacacagataggagaatcatatgaaacagactttgcaggatttgtcgagtaagaactgcctgcaaaggaaatagaggaggcaatcagagagtaggtcaaagaaacatgtcctcgggttctgtattttagatgagtgaggctttattttccttaaatgataacaggaagaaggtgatagatagggaaaattggagataatcaatacagcaagtccatgaggaagtcagacaagatggggtccatttcacaggtagagatagaggctgtaaataataaggtcttacctccactatagcaggaagaatgaaaaagaaaaaaggtgggggaaagcaagtatgtttgcagttttagtggtggcaatttcagagaggtatcttctgctggtttcagtttttctctactcccacactagaggtcatctgctaaaagtgagcattaaaagtttgaggagagaggagagggtttgaaattgctactgcggagaattatacaaacaatttattggagaagataggattgccaataagtgctaaagatgtaattcaagggttacaagaagtaattagttgagctctataatcctaagtgaattaacacgggaacagaaaaccaaatatcgcatgttctcacttataagtgggagctaaatattgagcacacatggacataaacatgagaacaatagacactgcagattactagaagttggagggagggagaggggcatggtttgaaaaactacctaccaggtactatgctcactacgtgggtgatgggatccataccccaaacctcagcataacacaatatacccacgtaacatacctacgcgtgtcccccccgcatctaaaataaaatttgaaattaaaaaaaaactctggcacaaatacagacatgattcattaagggtgctttgggcagtgagtcagagacaggaaactggggaaaatgtgagagaagactggcaaactgaggacgtgtcatttggatggggccagaaattaaagaaaaaaataatcatatagtgaatgaaatggctttagtatctagattttagaacaaagaaaatttctgtgaatggaccagaacaagctattggtcttagatgcacctaagctctctggttttggttttttgttgttgttgttttagagacagggtcttgctctgtcactcaggctggaattcaatggcacagtaatagctcattgcagccgtgacctcctcccctgtcagcctcccatgtagttaggagcttttttttttattactattttatgtagaggcaaaggtttctctgtgttaccaaggctggtcttaaattcctggtgtcaaacaatcctcccacctcagcctccaaaagtgctgggattatagacctgagtcaccccatgtgggttttgttttgttttgttttgttttgttttgttttgttttaggagaagagaaaacacattcaggcatccaggttcagggtccaaaaaccaactcacctctgcagactttatagatgccctagattcactgcgcccctcaagggaagaaacctcaaacctctttacgcctcccacagtgggtttctcctatggtgtggttctctgttcccatcttcactggcctcctctgcccatcttttcttttttaacataagatccctatgtcatattgacccttttctctctgttgctctttggtctctcatatgtcactcaaacccctaactttggggggccactcagaatccccttaactctgtctctgtttttagatgatttggacagtggctatgggatgctgcacatctccccaacatatgccagtgtgagagaagggctgagcacccatcacagctcttctccataggagagagccctcccaaaccccgcagctcccacccaccaatgtaggactcctgtttgttagtcactcctcaggaagcatctggatttcagatcaatgtctccaactgcctgctggaaataaccacctctacatccttaaaggatctcaatatagcaggccacctgtctcctcatgcaggaccatgctcttgataccttgcacacaaatgcacttgttatcctcatattatctttgagaatcaccatcttacctgttgtccaagtcaaaaacttgggagagttatccctgacatctcccttgcctttcttcttacagtaagtatgtccaaatcttacagatgttacttccttagtatctctcaaatcagaaattggatggtgttttgtttactgtaaaagcttcaatgacaccccctccaatgcctacaaggtaaaaatctaagttcctttatagagcaggtcaggcccttcatctctcaacatttgcctgcctataatagaataatattttatggcattatttttccttttctacaatttattttctaccttcaaggtttgcttatttacatatattttccagcctataccacactttcatatgcttttttgccttttaataaactatgtgctcagttttacaatatcctcccctaatttgtccacctctctggtgttacttctcctggcactaccactcagaatgttttattttatgttttcgtggagcttactgctcatctctgttatagcagttatcaaaaggtattgtagttagctaactgatggccaaggtcatgtcatagtcactcaggcatccttagcaaaggccgtgcctactaaacagctagtggttaatatttgaatgaataaatgaatgaacaaacacaaggtgaagaggttgctaaatttctcattatcctcaaagtttacatgacaaagacagcaggagtcatggcacaggttctcagctactcattttttttttttaatcagatgtttcctctttggattttgttccaaaataacaaagatgaagagagttgtagatccagtgtagaaattatgaagaggtggtactgaggggatatgggaacagaggcgcctcagtgggtatccataattttcaagatccatcttgcatagctatgaacacctgtgaagaatccttcacttcctagggtgacacttccttctgcccaggacaagattccatgcaacctcccattgcagatggctggggcagccgaaacatccttatagagagaaggaacagaaggtcaatgtgtccttgtccttatggaacaagagtaaatgccagctgggcgcggtggctcatgcctgtaatcccagcactttgggaggcagaggtgggtggatcacaaggtcaggagatcaagaccatgctggccaaatggtgaaaccctgtctctactaaaatacaaaaattagccgggcgtgatggtgcgtgcctataatcccagctactcagcaggctgagaatcacttgaacctgggagacggaggttgtggtgagccaagatcatgccactgcactccaggctgggtgacagagtgagactacatctccaaaaaaaaaaaaaaaatagtaaattccaaaaagcggcacataacagtagcaaaaccatctaagagaatgggcttatttttcttgagaggtggcagacttctctttacatccacataagtcttacttctaaggttcaagcttgacccaacccaagtgcaagacaaaggacaaatagttctaccccaaatctctcccactctgaaagatgagaagggcaatggttagaaacccagaggtgagtagggagaggagagggactccagctctctgcttctctctcttaggaggccttttggatgagtgctctttgattctgcattatcatcactcctcccatgggactcttgctatcttccagtatagagaagggagaaataccttgtttttagataggatccttagagggtgtcctacacaaatgatgtttcctgcctgttcttctttgagtctatcctgacagtcacggaatggaagagaatattggttgatccatgtcaggatgtcaggatcactgactgtgggaaagagaaaacaaactccagagtgactcttcttatcacaagggctcttctaaccagatcctgttttgtaaataaattcagtcctgagaatattcaatgcaggtagcagcagacactccattctccgtaggattccttgttcagtaatctccatgttagagaagtaggtttataagtcccctttgtcagatatcaaatccataggtctttctgtgctatgcatcatttataaaattttgaaaaaactgtgagttattagtgaccacaaggagaaagagacagtaacgaaaccattgtctcaaagattttccccctacacacacacctttattgggcatctacttgatccttttcacgtttagttataaagggagaaactatttttagtgcatataaaactgctttttgagttacacagattatttataagtgtttatagtatgtgtattgatataaatatacatatatatttcccccaagaagttgtcatgttgttcatctccataatagcaattgctattatactgtcaaattcaggatacagggactttaacgaaggtatcatgtaatttaaatttctggtagagaatagcaaagagaaaggaaacaaaaacgctgaccaggccgggcgcggtggctcacgcctgtaatcccagcactttgggaggccgaggcaggcggatcacgaggtcaggagatcgagaccatcccggctaaaacggtgaaaccccgtctctactaaaaatacaaaaaattagccgggcgtagtggcgggcgcctatagtcccagctacttgggaggctgaggcaggagaatggcgtgaacccgggaggcggagcttgcagtgagccgagatcccgccactgcactccagcctgggcgacagagcgagactccgtctcaaaaaaaaaaaaaaaaaaaaaaaaaaaaaaaccgctgaccagagattgctcaagctaagtccagtgttgtttaaggagcaggattttttctgatagagtgtatccaatcaaatgccctaaagcagattaggccagaagttgtcaggtcagagaagaaagagaaattatgttcagttttatgtttttatgggaactaaattaaaatatgtgtaaaaaactaggtgaaagtaacttaagttacttgaaataatgaatttctaataaatattggaagccctgcaccagaaagcttatagaggtagagtttgtcactgtgattttgacatgcagagcctatatacctctgaatagttttgttttgttttcaaattgtacgtaataaattacttctgtaagttgtaattcaattactttgaataagacttacaaaatcaaggacaaaaatcatacaagctgtaactgttcagaaaacatgttcacttagattcccaagtacttgcttctaagtggaaaaatgaatctgcaaaatactgagaatataatagtttctgctttttatttctgttttttaccaaagactgacttctaaaattccacttttatttgcttttacagagcacgtgcattgttctgtagccaccagagagagatttaaacctgattaatagatccaggacaacttgcttgagtgaacataacttttgcagtataatcaatgtcagccttcacttcttaaaaccagctgatcaggatcagaggtcctctgaaaaacacgcctcagagcaccaatcaatcaacagcaatccccctgaagtagccaggcctcaacagatgatggaacccattcatacctctgaaagtcctccaatccctcaactccaagcttcccacaaaccccttatgctaatcagcactccattctgcttagtgggatggtgcctggtcagcattgctctgacttgctgtaataagcaatagatttacatttgtcatttcatttcagatatcaagtggtggtatcctcatcctcaacaatacctaaggagagaataatggagtaacagccaacaaggaccaacaaacttattagaaagtagttttcttcacaggtgttctttattagacagactcctgctgagaccggatctttctgctcatcccaatttcagctcacaggggagatggatgtgtgcttacaacatgggctgccactgtttttcttgtgaggcatgtcagaccagggagataacaactgattatgtcataataatcaatttccctacgaaccaccaaagtctccacccctaaatgggaactctgggaagaagcagtgggtatgagtagcactctgtgcagggaaccagctctggtgacaggacaggtactccctcaaccattctcttctctcccagggttctctgcacataactgggttctctgcggaaggtgtaggaagcatcttctgctgcttcaccgcatcacatatattttatgttcatttcccccactgttcttccattgtgtgatgggctttcagcaactatcaatgggtgtcaccctcccgcaggctgccttcatactgtctttgtgcacgaggactcctatttctcccacctgtatttcaatccagttctctggactcttgtcttcaatattctagagatatgaaaattactgtctgctccatttgttggtgtcagagtggctgccctttatcagtctctttgaattttatctttgacctccagtgatggtggtttgggtccctggcaggaatccctctatggtggacaacattgtctcatagcagcgatttccattagggacatccctctacattttctcccagctccaacctcctcagcataaagaacacagcatccaacacatacggtttttatattcattccaggtccaggttggaataaagcaggattcattaaatggaatgggttccaaggctatggctatagtccccacatgggggttgagtgaagcaggtgttgatagcttgatcatcattaggtcatcgttcaaggattttgcatcaaagtcagggtaggtcacaatcgatgaatagtttcatatctgttgtttcttgtttgtgatgctaggttgagaaactcccagtcgaatttcaacactttggaagaaagagggcagagagatgagaagaaagagagtcataagataatggattacaagaaatcctacgggccaccctctttaattattttaactttatttcttaacctgagaactgacatggccttcttttgtctataaaacaatagcagtaatttacagaattgttgtattagagacataaatttgtaaaatgtctgacatcgtgtctggcaactaaaacacaagtcagtggagccttgttattaagatttttatcatctgaattagcagctaatagagaggcagcacacatccagttcatgtgttaagtatggatgtaagaaagaacatctgccttttcaatttttattctggaaggatgtgaactgtgtatttcctttgtatttcccatataccacagagcagaggttagtctgcgttaaactaaactgccttgaacagccagatggctaagatttctgaatttgaaagaaccgttctatactcatgaaactgagtaggtcttgatcacacagcacattctcacacacaacagaaacactgagatttgcaaggaattgctttattttgtatcgtgctcccttgccctctactgtcactgcatgatatggcttctgcctaagtctttgacctcatcctatgagcgatccccctgctcattacccttaattcctgccgatttctcagcttaatatctttgttacttcagggagtatatgaatattgttcccttggcctggaatatcccccaggatttattcatttggctggctccttctcttcctatggatctcacctcttcagagatgatggacatgaccacattaactaaagcagatttcttatttcatgcccatatattagagcttgccattaaaaaaaatactttgtttttggccatttatttgtggtggctactccctctaccaaaatgtaagctccatgagggaacacttattttcatcttgttccttcactgtttcatcagtgattaagtagcccttgctagataataaatgtttaacaagtattgttgatgaatgaatattatttactacccatgagagggaatcctctgacatcttcctactgatctcctcctaaactgcccaaatttgtgttctgtttcccaatgggaacaagagtctctctttttccgtgtcttctgattttactaaaaattttctgggatgcttcaccagatctacatttgtttgaacagattcctcccagctcgcaagagaaagggatacttacggtaaggggcagtgggcagctgtcaatacccagtcaaggtgaatgagagaccccacgcagggttctgggaaggactgaagatagaccatgtaaggaatagtaaaattatatgtcagctcctgattatctttagagtctttagccagagcagctcctggagaatcaaggggccataggtggaaagggaaaaagaagttaaaaggccagaactggctagggtagttttccctaacctaaggttttcaaatgtaatgtaaaggtcttcaatttacctttcatattttaatcaaggaaaattatgcatgtcctctaagttatacacaataagaaaattgacacatggttttgctgagatgaaattacattaaaattctgtgaaacttacttacatgctgatcagaagctcctattggcagtgctgtgtgttacaaagatgaaaaaaataatgactacttgaaatttttttttaattcacttttgccataaatgggggtaaaaaagtatggcgtgatttaaatttttttaaattcacttttgccataaattggggtaaaaaattactgcctgactttggtgatgaaagaaatagaaaagcttagggcttccagagcccctgacccagctcaccccccttttccaggcccatgttctctaatgtggttccttttgttttcttcaacggttgttttatttaaatgtcctccgcttcctagctgtttagttgtgcccagctactcctctttccaatctttcatagactatcctgggtgtcacaataggcagaaacaaagccccaaactctcaccagctgcactcaagagagcgacgatgagaaaacccttcgtggcagacagatctcgccaggaacagacaagttgatcaagctgtaaactgtcccaatctttagtccaagtgtccttgccaagaacagctgtggagattatgggcagaagacagatgagaggagagcagtcttcacatgagtccttatcaagacccaaatatatacggcattgctgggagccgtctctgatgtgggtgaaagagagtggcacagaccaagccgaggtcctggtgcctcctttcctatcctacaaatcttgcctggagttattatgtacctgctgattttccttctcctctctatgacacaacctttctttgttgtctccttctccctctgtgacttaaaccgctctccctgcccatcttgctgccatctcacctcttccagagacttccagaggattggggtatgaaatgcacttaataaatcattgcttttttcattccttgtaattttagtgatgaggaagctatggttctcttggaagttagtggcaaagtcaggactcagaactcagtctccatattctctgtgtcaaggctgaactctatcttagcctgtgttcccagaaaagagcaatggttaagaaatccctccatcgttttgtgttcttagaaatgaattaccacaaagagctacctttcctatatgacttaaataagactctctgccccttctttctcccagctcccagaaaattttgcatggttctcttgcttacctgtgatgcatcaaatacagacctttcctcttttgcccggacttgctgacatggccagacatggaccatccaactccccattttttgtttcaaaaatgattagctgagattagaatggtttgtctcttcgaaactagctacattaaaaaataaacatttcctattcagccaactaactgaggcttccccctgattgtaaaacaacccccactataaatctccccacctcaaacttatctttttctccctataaaaattccagggcaaaaccaccctgccaagatacttcataatcttcagatcttggatgctctcctattggatgatctgaatgcaaccaatctccttactagttcactttttgtcttctatgctgattactctcaaaatgcatcccattttttctttttattagctacccgtatatggtaacttccagcctgtcccacagagacgggtaataacagtaggttcaatcccacattttatatagagtagactggaaaaatgcaaactatatagtatcaaactgatctttatcagagtaattaaggagctgatcagttataaaagtccataaacataacattcctatatctgtaaaaattataggcagacttagttctcctaaaatttaattattaacttaaaacctcatcagtatgttcccatgtactctaaacttttggggacaatatttctttagtacccaaaggttttaaaataataattattaaaataataaagtcagtatttgttttgtaccatgtgacaaatactgtgctatatgcccagcatgtgtgacctaatttatcctttatcacaggcctatacattaaatatcgttattatccattttcaagctgaagctctgtatggttaaaaaccttgctcacaaccatactgttgaagcccacgacccccaacattttaggaaatccagcatccctctacttgttccaattatttatctggtaggactgggccttatttctgctaagttctttgcttatctccagacttctttgtcccagcacatgaaaacagctgtcttcattttatttcttaattcaccactaacctaattctagggtgggtttcagacttttactgaagctttggagatattacaggaaattttggcaccagcctgaaaacatctttaaatagtatatcagaaatcactttgtgaatgtttatgaatcacctacagtccacggagtctgttaacctataacctggtttctgccacattgctggaacctaccctgaattccttttttattttcttgttttcttcatgtctttagtcagctcacatttctgctgcccagaagccccaagtagagagagacaaacatctacccttttaagctatcggaggagaactgaaaatttttgttactatcttacattgagaaatccatattttctctctctattctcaatctctgcctccctcccacaaagcctcaccaatgagaatatgaaggcgactattgttagtttcctttcttttaaaatgtctttttcttttcttttctcatggaaagaataggctaaatacaactatttgctttgtaaagaagtgagacgatacaatttatttaatggatataagagattatagtcactatcttctttataatttctcgtataatattctaataaaggtcactcaattgtgacctcggcaagcataattcactgcagaggcagtggcctagagctgtcagtttcccctggaggctcagtccagggagttgctgagttggtactggcatgacagctctggtgaggggtggctggaggcccaggcctggaggacctgcccagtgaggagatatgggaataggcacctacgtaccagtctggccacttttctgtagggttgctgcaatatgcttggggcctgctccagtctctagtcaccttggattttctagaacctggaggtgtcaccaatgaaggctgcaaaacagcaaagatggtagcctgtccctgcctctgggagctttgtcccagggaggtgcagacatattggcagcccaaaagcacctgtaggatgtggctggagaaaccttacaaaccagaagagattgcaggtctacattcaacacaattaaagaaaaaaatcttcaaccaagtgtttcatatccagccaaactaagtttcctaagtgaaggagaaataagatctttttcagataagcaaatgttgagagactttattatcaccagacttgccttacaagggatcttgaaaggagcactaaatatagaaaggaatgattgctatcagctgatacaaaaacacacttaaacacacagcccagcatcactgtaaagcaaccacacaaacaagccaacataataaccagctaacagcacaatgacaggatcaaattcacacgtcaaaactaacctttaaaactaaacaggctaaatactctacttaaaaggcacagagtgacaagctggataaaaacacatgacccaatggtatgctgtcttcaagagatccgtctcacatgtaatgacactcatagcctctaaataaagggatggagaaaaatctaccaaccgattagaaaacagaaaaatgcaagggttgcaattccaatttcagacaaaacaaagatcaacaaaagacaaggaagggcatgacataatggtaaagggttcagttcaacaagaagacctaactctcctaaatatatattcatccaacacaggagcatccagatccataaagcaagttcttagagacctacaaagagacatagatccctacactatgatagtgggatacttcaacattccactgacagtattatatcattgaggcagaaaattaacaaagatatttaggacctaatctcagcattggaccaaatggttctgataaaccttcacagaagtctccaccccacaacaagagaatatacatttttctcattatcacatggcacatgctctaaaattgaccatgtaattagacataaaataatcctcaacaaaagaatcaaaatcataccaatcacactcttgggccacagtgaaataaaaacagaagtcaacacaatgaaaattcctcaaaacaacacaattacatggaaattaacatgctgctgaatgagttttgggtgaacaatgcaattaaggtggaaatcaagaagttctttgaaaataatgagaacaaagatacaacaaaccagaatctctgggacacagctaaggcagtgttaagaggaaaattcatagcactaaatgttcacatcaaaaagttagaaagatctcaaattaacaacctaacttcccaatgaaagaattagagaggcaagaacaaatcaaccccaaaagaggataagaaataacacaaataagagctgaaatgaaggaaattaagacacaagtaaaccattcaaaagaccaaagaatccaggagttggttttttgaaaaaaaaaaaaaaaaaaaaaaacaaagccactagttagctatttaggaggaaaaaagagagggtccaaacagacacaatcagaaatgatgacgggaatgttactactgaacccacagaaataaaaacaaccatcagaaaccaatatgtacacctctacacacacaaactagaaaacctagaggagatgaatacatttttggatacatacaccctctctagactgatccagagagaaactgaatccctgaacagacctataacaagctccaaaatttaatcagcaataaatagcctaccaatcaataaaagtgcaggatctgatggatccacagctgaattccactgtatgtacaaagaaaaacttgtaccattcctacagaaacaattccaaaaaattgaggaggaaggacttctccccaactcattctatgaggccagcatcatcttgataccaaaacctggcagaaagacaggaaaaaagaacacttcaggccaatatctttgatgaacaaagatgtaaaagccctatacaaaaatacttacaaactgaatccagaagcgtatcataaagctaatccaccatgatcaaataggcttcatccttgggatgcaaggttggttcaacatacaaaaatcaataaatgtgactcatctcataaacagaactaaggataaaaatcacatgattatctcaataaatgcagaaaaggcttttgataatattcaacattacttcatgttaaaacgcttaataaaccaggtattgaaggaacacacctcaaaataataagagccatctatgacaaaaccacaaccaacattatactaaatgggcaaaagctggaagcattccccttgaaaactggcacaaaacaaagatgccctgtctcaccacttctattcaacatagtattagaagtcctagccagagcaatcaagcaagagaaagaaataaaagacaaccaaatgggaagagaggaagtcaaactatctctctttgcagatgacatgattctatgtcaagaaaaccccatagtgttggcccccaagctccttcagctgataaacagcttcatcaaaactgcaggatacaaaatcaatgtacaaaaatcactagcattcctatacaccaacaacaaactgagagccaattggaaagttagtcccattcacaattgccatgcacaaacaaaaaaacccccaaaacctaggaatacagctaatcaggggggtgaaagatctccacactgtgaattacaaaacactgctgaaagaattcagacaagacacaaacaaatggagaaacatcccatgctcacagataggaagaatcaatatcattaaaatggctatacttcccaaaacaatttatagattccatgctattcctatcaaactaccagtgacattcttcacagaactagaaaaaatattttaaaatttatatggaaccaaaaaaacaagcccaaatagccaaggcaatgctaagcaaaaagaacaaagctgaaggaagcaagttacctgacttcaaactgtactacaagagctacagtgactaaaacagcatggtactggtacaaaaacaggcacatagaccaatggaacagaatagacagcctagaaataaggctgcacttctatgacatctcatctttgacaaagctggcacaaacaagcaatgggacagagcctctctattcaataaatggtgctgggataactggctagccaatggagattgaaactggaccccttctttacaccatgtacaaaaatcaactcaatatggattaaagactaaaatgtaaaacccaaaactataaaaaccctggaagacaacctaggcaataccatcctgtacctaggaatgggcaaagatttcatgactgtattagtcagtttgcatgctgctgatgaagccatacccaagacttggcaatttacaaaagaaagatatttaactggacttacagttccatgtggctggggaagcctcacaatcatggcagaaggcaaggaagagcaagtcacatcttacatgacggcagcaggcaaacagagagagcttgtgcaggggaactcctctttttaaagccatcagatcttctgagacttattcactatcacagaaatagcatgagaaagacttgctgccatgattcagttacctgccaccgggtccgtcccacaacacatgggaattccagatgagatttgggtggggacatagtcaaaccatattaatgaaaaagacaccaaaagcaatcacaacaaaagcaaaagttgacaagtgggatccaattaaacttaagagtttctgcacagaaaaagaaactatcaacagagtaaacagacaaccttcagaatgggagaaaatgtttacaaactgacaaatgtctaatatccagcatctataaggaacttaagcaaacttacaaaaggaaaacaaaggaccctattaaaaagtgggcaaaggacatgaacaaacacatctcaaaagaagacatacataaggccaacaagcatatgaaaaaaagctcaatatctctgatcataagataaatgcaaatcaaaaccacaaggagatatcatctcacgtcactgagaatggctattattaagtcaaaaagtaacagaggctggcaaggttgcagagaaaagggaacacttatacactgttggtgggaatgtaaattagttcaaccattgttgaaagcagcacaacaatccctcaaagagccaaaagctgaactaccattcgacccagcaatctcattactgggtatatacccagaggaatataaagcattctaccataaagagacatttccagaaatgttcattgcagcactgctcacaatagcaaagacatggaatcaacctcagtgcccatcagtgacacactggataaaataaatctggtacatataccccatgaaatataacgcatccatagaaaagaatgagatcatgccttttgcaggaacatgaatggagctagaggctatcatcaaattagcaaactaacccaggaaaggaaaaccaaataccacatgatctcacatataagtgagagctgaatgataagagctgatgaacacaagaaggaaacaagagacactgaggtctacttgagggggatggtcggagaagggagaggagcagaaaagataactattgggtactgagcttaatacctgggtgatataataatatgtacaacaaaccccatgacacgtgtttatctatgtaacaaacctttacatgtacctcaaaacctaaaataaaacttataaaaaagcataattcagttcccaagagatttttcctggatgtgagatgatgtgtggcttagaaagtattcctttattgtttggctctcttccctacaaaatgtaaattctaatttcgttcctcttaaatatgaactggcataattttggagaacagtttctaaaagtcaataaatttccatctggctctcttcttcaaatattcttagagtacatctgctttgctataagtaagctgaagccatcccatctggaggcaaatagagaagccatgcacaggtgctgtggccaaaaatcaagctgaagtcccagctgacagacagtatcagccaccagacctatgagtgaggaagtctttgagatggctccaagcccagccaccagctgcctgcaaagcatgagagattcccagcaatgactgcctataggagcccggtcaaatcctaaagccatgagaaatagtgataacaagtgattgacattgctatattctgctaaatttgaagtggttttctatgcagtaatcaataaccaggactggagtcaaatcatttccaactctactccgttttctaatggtgataggtgaagcaagtatgccaagagggtgattctgcctgagtggttccggggtccctgttgtgtcctcccaatcctgaaggactggaaagcaatttatctgggtccattagtttgctctaatttcacgtttaagcctcaattctggggagtggtggcttgatggacggagggatcaagatcatccagagaagggtttggcagggcagtttaaagtgagcatgaggtgtgattctttccacctttagaactaaaatagaaaaaggattagacaacgctcctatgagagaagatgttggaatctacagtagaaaagataagagtatgagtgttcataatacactacctgtaattctcatggtagcctctgaagcttgatcataatgagctctgattatgacacattttgtagccatacgcccttgggcaagtttcttatctctggctttatcagtttcctttcttgtaaaatgaaaagcccattacatcgattgtttttaggaaaatgaaaagagttagtgtttttaaagtggctttggacactgcctaacaaatagtaaatgctagttaaatgttggttaaataaaataaaataactgtaactttaggattcccatattttccaggctttcagggacagtaatttatcttatgtcaaaatattgttgtgaagttcttaaatctttatgatattttcttgtttctttctttgtttttttttttttttttttttttttttttttggttaacatggtgaagagcgtggagaaggacgtttaactaccttaagcctcagtattctaagctataaaatggaaagaagattagtacttacctcataagatagtcatgaggattaaatattatttaaaaacacttaagcaccgtatatgacacacagaagataataaatgtgagttatcatcactattacctttttcacctctgcaaaactcctgagtactagaaaggagaaaaccttctggatgctcctggttcacaggattgtgtgatttggctccagcaatgtcttggaactgggtccctcctgaggtcagtgattcagaattactggacttcttaggtttcagctcttcctagctcaatacccctctctctaaagagaaaaagtattaccccctccaattctactcatgtttcactagggacatctcgtgactagcatgaggctcagaaaagatgtggagggatgagagggtggagcaggtcagtgctgggaagcctcccaacctgaatgggttgcactcattgtcagctggctttcttcctgcagattagggtggattaagggatttttgtaaggtgagaaagattaatactacattttataagccagacatcctggaaatttcattaaagacaaatgttatctttgttttataaaacccaacacctgtttatcaagaaaaatgcagaaaaggaacaacataaatatgaaacaacaataaaaacctgcaactccttttagagttgctcgcattgacatgtcaggcaccacaaaatgatctttttcctttaccccattctttatattttttccctcgccaaaaaagtaaataattcttttttctctagtgattctcctgcctcagcctcctgagtacctggacctgcaagcatgcaccaccacaccccgcttattattattattattattattattatagatacaaagccttgctatgttgtccaggctggtctcaaactcctggcttcaagagatcctcctgcctcagcctcccaaagtgctgggattgcagacataagccattgcacccggccaaaatttaatagttgtttatactaaaatttcttctctttatattgctgatgtggtttgtatttcctgaatgaatctggagtaatacaatgtctgaggaaaaacctttggtggaacccacagctatgggaagataaattttctatggtgtgaagacactttatttctaatatttggtaatgtcaatatatgattgacaaagaaatataccttccccatcctgcctcattcttgttacccagatgtgggtcatcttttgcccaaagccagtgtttaaagctcatctaactactattttattccattctccaaatcagattcaaaactaaaatacagtagcaaaaataaaaattgttctggacactacacaggaaactaaagaaaataatttgtattatattaccacacagcataattttctaaagacctattttagttatttttattcttttttgaaatttcttcctaagtctatcctaccttacctcttttcttcttctacatctctaatgtctctctctctctcttttttaaaagattattgtcttctccattagatccagccttcagtttgcatatctcactcagtagaacatggcaggtagccatcctgtgggagggtgtaactctcccatcccatgtggcttatgaagttattgattgaacaaaaatgtagctgatttgggttgaaagaagggggttaaattacatagctaaaaaaaagaataaaatattttgttatgcctctttctcaaatgaaatgagagattttgtccttttttttttggtaaacacatgtaaaacaatgtaataatgtggagaacatgctaagctacagtgaagaaaatttatttttcctagacatggcagtaaatggaaatttctttatcaagggcaaaataatcctagtagttaaacaggaagaagaaaatgaaaaggacttcaggggattaaggagggagttactgatttcaaaactgcagtttcggagttcaaagtgttgatcatcaaaaacggaaaatgtgattttgaagtgaggaaaccccaaaagaaagttaaatgataattcagtggtgagagtcacatcggagcagtgtctataattcttatgagtgctccttggaaaagaaaatggaggaagaggtcctgtgggagaggcagttatgtgtaaagaaactttagaggcttggagaggcgtttctcagaaatctgcccagcctttccattctacatgcaatagagagaaatgcagtggggtgatgagggaggcttctaacacgccaggacaacaatccagtgactcccagggaagcataatcttttgtcttataattttttaaactgcagatatagtacatgagtggtatgagaaattaccacaacacaaagttgtgtgaactgtgaaagttccccttacgaatgaagacaaaactaactttccaacagttcttcagaacatatggccttatattttctgtttggaaaacagtgtactctactgctatcagatctttgagccagaagctggccttggaggaaacctgtggcctttcactgcatgggtccctccaagtctaataagagtctcagaggcagagctggcaagggctaagaacactgcaaatagaaatggaccacaaaaataggaaagtcatttaaaaaatgaagttggattatgcacacggacgtgtccttaaaaataaactctgttaagtaatgaaggctttgcatggggactgtgtacataaaatcacagtagactgttgaggtcatgttagagcgcttatataactctcgggtaagttttgatgaagggatttgtgccttgcagtgagaagatgagatcagttagtaaaggagaaaatgaattgatttattctgtagaagtagggaacttgttaaaaaaatggagaaactaagaaattattgaaaactatgatttcttcaagatgtctggaaatcctatagtttagatggcatacaaatagaaagtggttagactgagctagtcagaataaatgagtatctctaggactaagacttttgtatttgtgccccatcaacaaattgacattttaaattgacttttaaaagtgagactaaataatatgaagatagaaaatattttattttttaaagacattttaaaatttgatttcaaaactaaagtcactttccatgaaagataaatagtggtgttacagcaaaataataaattaaataagatttataggggaaaagagataatttatttatagagataaatttagcaatttatcttattaagacaaatgttcttatataaatattcttgaagccctccctactcctaagcttccatttgtgaattttttaaagactttattagtcagatattctgttccttgcaacttcctaagagatgtgttcacatttataccttttttttttaacttaaacgcttattttattagggtgaatttataaaagctaagttgttgtttaaaatggcatatgacatatacagtttaataaaaattcacaaattgtaaagcattaaacaaaataagagactgaaactggcaagaataagtactaaacaaacactattggataacataaaggattaataatttgtttgcctttttcttttctctggacctgccctgatctctcatcttctgtgtatctcacacttcctgttaagtcttggaaccttccctctatctggggtgggaagctgaataggtaggtattgatggtggtaattaagtggagcagaaaagtatttcagagggaacagggaaaacttaatctcattttgttcaaggcggaagcccaagatgttttagttggggtagatataaggctacctatttacacaaagagagctatatatgaaattaatttagattatacacaaacataaaaacaattcaatgagaacaaaggaaataagacagaaaaggttagttgtgatcaaatatttgagaatgttgaatgcaaggctaagaaattttggctgcattttaggggcagtgataaggcagtattaagagctcagcttttctctacaaacatgccatccatacttacaaaaggatagaaaattgctaatgggcacgtatacctttcagtactctcctcctctgaaatatttattatggactgcatgtttgtgccccacttcccaaattcgtatattaaaaatttaacctccaatgggatggtgttgaggtggagtctttgggaggtaattaggtttagataaggtctagagggtggcccccatgatgggattaatgtaccaatttgtaagaagagaaaaaggactagaactggctctcttggccatgagtggatgcaactagaagatggccattaggaaacgtggaagctatcctcaccagacaccagactacctggtgtcttgatcttggacttcacaggctccactgcaagaaataagtgtctgttgtgcaagccacccagtctgcgatatttttgttatagctgactgagctgcctaagacagtacccttccttcaccttatcactgaaccacaaataaactcccatttccaactgcctccacctgtaccgttctgttttctgatcccagtgtgtcttttcctttgtctcattccagataaccatgagagtcacgtgcagggtcttctgctccaagccctcctttcaatgccacacagaacaatgaagatttgagggacgactcgtggaagaactaaagccagagtctgtgatgcactcttcaaacaggactgaagagaatagataatatatctgtagccatttatgacctcaaggcacaatatctattttctgcaaacttatctgaatttgtacctttttgtttctgtttgtagtttaaattagtacatcatgtgggctgggatttgggggaacttgtggtgaaaaagggacacagattgtctccagagaccaggcctgctatagcaaatttctagttggaaaacaagaaagatcttggaggaaaggaatatacaggtaggtgaaaccttggaaaacacaggaaacctgtgaattttaaatatttctgcatctacaggtttctgctacctagcttcccagagtttcagacagattgaagaaaaaggaaagaaagaccattctgttctatcagcagcaatccactgggaatgcccacttgggctttatcttagctttactgtgaatcttttgaatgattttgggcaattaagtttaattttctgcattttagtgtcattatatcttgtaaggtatgaatgcatgatgtaccataaaagttcatgttttcaattaattgatttttatttttagagatagggacttgtgtctcctaggctgaagtgcagtggcacaatcaaagctcactgcagcctcaaactcctgggctcaagtaatcttctcaccttagtctttcaagtagctggaactacaggcatgcaccaccatgcccagataattttttaattttttgtagaggcagtgttgtccaggctgatctcttaactgttgcccaggctgatctcaaactcctgacctcaagtgatcctcccaacctggcttctcaaggagtttggattacaggcatgagccaccacacctggccccagaaatgcaagttaaaatacatactgtggccaaatcttaaaacaaaatttatctgacatatttttagagttcttgattttgtaaaaaaacaaaatgtggtggtaacagtgacctctaagcttgttcacctttttattctcaatgtatcacatagagtttggcatatagttggtgatcagtaaacttatattgattaggttgaattaatgactaaataactgcattagtccattctcacactgctataaagacatgcctgcaactgagtaatttataaagaaaagaagtttaggcagctcatgattctgcaggctgtacaggcttctgcttcttgggaggcctcaggaaacttataatcatggtagaagggaaagcaaacacatcttcatgtggatggcaggattaggggggtgcacccacttgaaacaagctggttttgggagaactctatcacaagaacagcaagggggaagcctgcccccacgattcaatcacctcccaccaggccccacctccaatactgggaattacaattcgacatgagacttgggtggggacacacagccaaaccacatcaataacctttcacattttctcaatataatagtttggccctatgtccaccttcttaacagctagtttcaagagaaagttaatcaatgccgacagggaccattcttgaaaagacgtggtacaagacagtatatttttatttagatactgtgttttggcatagaaagaaggtaaagttgatgaataggatatggaacatgaagagataaaggtgtttagttggcagcaatggtctgctgaatccatttcacgtagttgcaaactttagtgtagactccaggtttgttcttctgaggacaaccatagccccaggagacaatgccctggagttctccgttgcagaccacaggaacaccagagtcaccctgggcaaaaaggaagggatattcagagatcttatttatgcccagatgggagaatgggccgtaagatgttcttccattgtgctggagccattgtcccacactgctgatccagcatgaagcactttctcttcctcttgaaaccctccaaccctcaatctacttactatatcagtagttagtcttccttataccttatttgagccccttctctttccttggtaggccaagtgggccaagaggaggtttcatgctgcttaactagctctgctccttccgctagagttcctttccacagtttacctcctcagaagggcacttagaaatactatttgcacaccatcttctgtgcatcttttaactcttaaacctagacattaatacaataaaaataaaatatttaatttgtcccaaggctatccctcacctctcacaatcagttatagggactgttttacaatcttctgtgtttctgaaaaggggaattatggtggagaagactaagaataagctggaattgagaagcagtacaaagaaactaacctggcaagagtcctttcaaccctccaggaatcccagacatatcatgtttgtagtaatcttgcctgggtaggctgtgcggcaagcagtgttagagagaatgggagccttcagacactgcaggagatcagggtagttggccgtggagtggaagagtgaaaaatgcaagattactcatgaggtttccaaaattttctttctcaatacatctcccctcttccccaatactctcactttttctttcaattagccaacggcttctcatttgagagaacaatactttcttttctagaagctttcccaaatagttctaatcaatgaattgttccaattcattccaattgaatgctccaagcaagaccaaatccctgagtctttgttttgtttacctcctcagtttatagttctctgcccatcactaatcacacttcagttaaataccctgatatcttcatagtacttcattattatgtcttctgcatggttccagcaaaggaatcttcttcatttcaattattaatagtatatttctgagattccatgtatccaaaaactatgctctgggaacttaaccttaagtgagtttggactagctgactttccacatgtctttcagctctaaaattgtcacacttggtacttctgtttcaggcgacactaaagccactgctcagggtgttgtcccagccagagatgaggcactgagtaccagccgctgcacaggatcttggcagagagatggtggccacttgagagttgatggtggcgactgagctcagcttaatcagcatgatgtcattatcaatggtggctgagttatacttggggtggcaaataatcttggctgcatttatgaattgttcattgccttcatagaccttaatgttgtattctccaagatgcacatggattcggctggattaaaagatataagaggttcctaagtatctagcttgagttatttccactcctcctgaccccccatttatgagcataaacacagacaccatccttttcaagcaatcggtcatacagtaattgtgcacttaaggtagcattctgcaccaccacatggtacaggttagagttttccttagagaagtgtcactgcaagtgcagactcactgcccgccatcttgttagaatagtaaggaatgggaatgagaactcaaggacttgaataaaacagttggagataaaaaggaagttggtggagattgatcagcatttgccatttctctctggttgggatcaccagttatcacagggaatgaagcaggagtcagagaaatggcagaatgttaagggaacagaatgaatcatgcatatttttaatgtgcactgtaaattctctgtattttattacttccatatacagtttatactggctgagctacagtaattagcactatgtactgattcatgtcataagctatttctagggatagttcatcactcactatttcccttccatatcttgaataccatcatttgggaagacatcagggaaccctgaagggtacctctccatgcaaatccccctttatacatcagataatgcctgagaaaataagaagtctctggaggtctgaatgcctcaccctcaagcacaactctgcagtttactctggattgtgttttgtcagggatagaggattaattaatcttagtgcataagaaaatgagtatcaatgaattacgacttatagcagtgagccgtggacacctcccatttgttattgatgagggagccaccacagaagtgatagccagcattcagggaccctgataggggacagcattcgtctgacaggtgtagccccccaacgatcttgtcatcatcatcactagtggggaaagtggctgacagaggaaagttgggaactatcagttaaacagattcatcttaaagtttctacaataccatgaaaagttttctcagatttaccaaaagagcagaacgttctcttgtctcacataatcaggaaatggtggctttaaggtaatttgggggggaaatttattatcccatacctttaaattgtaccccacttataacattataactatctattttttaatttatgctttaactttgataaatgcattctttttttaatatatgtactattcagacacacacacacacgagcgcgcgcacacacacactcaaagatcagaaactcttgacacagtaaatgtcctgaatatcacttcctgaagacacaaggaaacttttttcacagaactctgctccgcgccatacaattaggtgtaatgcttttcagtagtcatgctgatgttggtttgtggtcgttggtaggatgttggtatgggagagagagccccatacagtaacagaaaggaagctttaaaaaggcacctgaggctggttgcggtggcttatgcctgtaatcccagcactttgggaggccgaggcaggcggatcacgaggtcaggagatcgagaccatcctggctaacacggtgaaaccccgtctctactaaaaatacaaaaaattagctgggcgtggtggcgggcgcctgtagtcccagctactcgggaggctgaggcggagcatggcatgaacctgggaggcggagcttgcagtgagccaagatggcaccactgactccggcctgggcgacagggcgagactctgtctcataaaaaaacaaaaaaaaaactaaggcacctgagaattttctcgtctggaaggaaattagagatttatatttttgctctcctaatttctcttcttgattccagtctagaatttttattaaaatcattttacagagtattataggatgaccctcttcagcctttcctcttatcccaattatctttccaacacttacgaatttattcagcttttaaagtctagcccactttatatcttgtagctccaaaagtttgtgattatattttatgagccccattgttcagatatttttgatagttttaggaaagaagttagcaggtgtgtagacagatgaattgaatttatacctgcctaacttgagaaaatttagtattaagttttagtcttataaaatttagtagtataaaaggaaaactcatcatttttctattatattcatgatgaaatgacatgttactttacaccagagagatatccatggcaaaaatatcgtaaaacacagcccatagcttttattcatgagaaagaaaattgcttttccctttggctttatatcactagccctttagtgtggagaagatgcaggctctgacacctgcagcctctttaagagcacacgattagtttcaattattaactccaaattcttggaaaggtcaggataagcgcctccttaatctgggctatcttttccttctctctccttcttccttaatattacccagaagttgagagcaagtcctgtgtctttatatcttctaccctgatcacttttgctcactgtgaacttcctccaacaagtgaaatttaattatccacaaacatatgtattttgcactgttgtttcaatattttaagcttcttgaatacagagaacagattcaacattcattgttgtcttccagagtataaagtacaaacttaagtttatgttcgacatccgctgattcactcattaaaagatactcaccagcagctcccaggagagcaggaagatgaaggtcttcgtggttgctcacttcacctggacttggaaataggatgacacttttcttccacagccatttataccaacggacttgtcttgacattctggccacaggggccagaaaagtgatttcactggaaactcacaaatctaaatctaaattctgtgacagatgcaagataactcaacataaattctaaacattaacatttgcctacttttctagagggtcatgggactgaaagtaataagcccacctggtagaaactgtaccccataataggtaagtaaggcggagtaaggtcacaggacagagttacaggtgtccagattcccagataaaaaatcttaagtagttgggcatctcaactgtatatgtttattctaagaacgactgcacttttgaagtttcataatgtagactcttttacaattatatactttgtcttttgactgctctggtcttatatatccatgttagcttttctctttttaaaatttcaactcttattacaaattaaagggtacatatgcaggttttttgcataagtaaattacgtgacacccaggcttggggtcccaacaacctcatcacccaggcagtaagcatagtacccaacaggtggtacttcaccttctcattgttaaaggaacagcttgtttcccttagaaaaagaagattgctattaattgaacttataatagagaaaaggaggaaagttaaaaaatgctaataacttataattttcttgagcttataattatcttgagcttactgtacttattctaagtacttattgaataagtcagtaagtatgtagaatactgacatacacgtatgtcagggatattttaagtatttgcccatattaatttagtaatcttcacaacaaccatataagatacctattataattcccactttacagatgtggaaactaaggcacacaaaactgtaggggatttgaccaaaatcacatagcaaatacacggtaacatcagcattccaacccagaaaaatcttccttcagagtctgtggtcctgaccactatgaaacacttctctcagtaagttcaccaaaatctggatgccaagataatgcaaaattcttggacaatgataacatagctgaaatttttaaagtatttactatgtgtccagcactgtggaagtggattacgtgcatcaactcattcagtcttcacaagcagcatcgtaagtgttaaactacaaatttcaccatttaagagatgtggagaaagaggctaaaagaagtcaagtgagtatatcaaagtttcatagctgttaagtggccaatctatggttaaaacttaagcagcctcacttcagggttcatgccctcaacagtgatgccgtgaatataataagagagaacagggctgggcgcagtggctcaagcctataatcccagcactttgggaggccgaggtgggcagatcacgaggtcaggagatcaagaccatcctggccaacatggtgaaaccccgtctctactaaaatacaaaaaaaaatagccaggcatggtggcgggcacctgtagtcccagctaatcagaaggctgaggcagcagaatcgcttgaacctggggagtggaggttgcagtgagccgagatcacaccaaccaactttatcgatattccaagacctctgggaaacagcaagagtatgataggagacatccagacattcatcaggaggattcttcatttttcaagtatggcaaatattgttgctgaagttattcataaacatgccttcagagggaagtatgggatttacagacctcatctggttaaggactactcttgactttcttgatttaatagagttttactgtgatgacacaaagcactgttaaacagagctgcgttactcgaagaatgaaatactttcaatacaaccaatggataaattcttctctcactgtgcacattacctctcttggcctttttataatctaatttcttatcattcataatcagtccctcaaatactgactctcacctgagctcttctcagatccaacttctactgaacatgtctgctcccatacctagggtcagctagtctagcgctgaattcatcatagctttctctttctatattttctgtcagtgcaatgaagctacacacatatggttagccaaacttgaaacacagaagtcacccttaacttttttttttttttgactgagtttcactcttatcacccaggctggagtgcaaatgatgcgatctcggcccactgcaacctcctcctcctgggttcaagcgattctcctgccttagcctcccaagtaactgggattacaggcgtgtgccaccatgccgggttatttttgtatttttagtagagatgggattttgccatgttggccaggctggtctcgaactcctgacctcaggtgatccacctgccttgggcttccaaagtgctgggattataggcctaagctaccacacctggcccacccttaacttctttatccaccttgcttactacctgtattcaaagtcttgacgattttacctgtcttaaagatccttgacttttctttgaagatccttgattttcctttcaagtcaaccacctatgacttggttcagtatcacattttctctcctgaattattgaaatcgtgctaaaaccacttccttgtttgtggctttattctccttcaactcactctccacatcagagtaatctttctaaaatgcacatggatcattacattttccgcttaaaatgctttggtggctccacattgacatcaggataagtttaaattccagcaccaaagttcatgttcttggacactgtatgctgttttaaacctctgtgccttcccacacaccttacctggttaactcccatcattcttcaactctaatcgtggagaactctgaactccacctgcattctccaactaaagtcaggccttcctgaactttctaggcagctttactttcattacatttacttccagtcacatattacttgtataaatatctgcttaatgtctattttttccaggttgtttaaaattcctgagggcataaatgatgtctgatttgctcactattacacttcaaagccggtatgtacgtggcacatagtaattgctcagtgaataactgctgaatgaatgaatgaggttactttccctctttgctggtgaacttctagtcatccattaaatttacctgaagtatcatctctatctataattaatctctgacattaacctatgacctcccctaactctactgccataatgccccaattggttagatgctaatccgttctatttcttatcggtgccattttgaaaccctgtgcatgttgctattataacttttgaattttgttgcaggctttgatttccttttctcttcaactagaatatgagcttctgaagaaaatattgtatgttaaaatttccagtttatgacactgtctctggcatagagtagatgcttaagttcttctgttcttctttgccccattgggcacttaagccttgtccaaaacatcttcaccaacagtcatccagcctctattctggacaggaaaccacaggaccttctggaaacttcttccttctgtcgagctggaaaatcgtcttgttagagctttgactctttttctctctgtcctatagcttggggacataggatcaggagagagatagtaagaagataagtagacaacaaagcgaaaagaagattgtaggttctaaaatagttaaagatgagtcagataagtgaaaactccagcccagcaaatatacatttttctctttaggtagcagttacaaattgtgaaaggaaatcaaaaaagtgtctccctgttactgggaaatagcatgccaggtagtagtagtcaaagctaatgctggcttctttgtagacaattcagcagaaatagtttcttagaaaaaaaatacttggaacaggattagatagattgccctaacatctggcttagagtactctccttcaaaaaaccttctccaattgcatcaatccccaactgataattggttttctatatagtctatgaatgctgatgagaatagtttgggcccgattatttgatggtcagtcaaatatcatatagtgattttaaaaagttatttcttctcaatattggctcagtcacaccatctagaatattcacacacactgaaaaccaagatgaataacctgtagtttttttttatttgtatggatttatttccccctttcacatggtacccattgcaatcagggtccttctatatatttgtaaacccggacaaatcaagtacaaacaagctcattagctgcaaccaccaccctgtacactaagaagatcttcctgaaaggtcctgaggtcttccctgatcatcgcccatgtcagatgcctcaagttatgcaataaacacacagcgacatgaaatacagaggactaacgtgcatttctttgtatctgtgtagaagggaggcctgttggaaggtgacagagaccatgcagcatgtggaaggtgtctccccaaaagtggggtggagtcaaaaggggatgaggaaagcagcctcctgcagattgtggaagccccagcagactgcaaagggcacccgtggggcaaggcatccctcgtgtggtgtgtcagaaattggactgaggtgaggagagtttcaacatgggtggtctccatggcacaggaagtcagaacttgaacggagagaggtggccatttacaaaggagagatgatggcagccacagcacacatttagttacctgtaaagggactaatcaaatatgtaaatctataaggataacagaaccatgtttctcagttattggataagagagttgcaaatatggaaagagaaaacactagaacacaagaacataagaataaaccttataatacgggattggaactagtgtgaactcatcgcttctcaatatgtatagacaggaattaaagatatctgtaaatatatgtgtactgtgaaaacatatgtgtatgtacagctctgtccactgtgatacctaagagtagttccccccaaaagcaccccaaaagatctagtatccatattctgttttctaaataccactgtccactagaaggaaccaggactttttggacatatagtagatacaaagacaggcaggaaaagcctagaaccccttgtgccataaagtaaggaaatgctgaaagaatgatggggaccctgacaggaaggagaatttaagaattaacaacccctctatttccgtatcatctttgcacaatgcttcatcaacattgaaagattattattcataaataaaacctttgaaataaaaattgtttttatcagttacattccagccttacatactgagactatgacccgatttctgtagatttgcagatacaaatataccaatgccaaccatagcagattagaaatacaatttttaagtgcttagacctaccttttacatatgatttttactgttttccattccatctatctattcattgaccaactaagcaaatatgtattaagcacccgcactctgtaaagtattttgacagtggccatgaaccatgtaagcttctggcacagcagcctagtgaagtctaccctgcttggcttacattgtttcggagctgggtagacagttggggaaaattatttcagcctctccccacaaccagatttcaagattgaggcaataagaaggtcagtagatgaaatgatttaggcacctaaaaccctttaaccctcctaaagcataccctgtaaaactttccaaattagatgttatctctaaacatgtcaaacatgtctttctttttttaagatggagtctcagtctgtcatccaggatggagtgcagtggcacaatcttggctcactgcaacctctgcctcccgagttcaagcgattctcctgcctctgcctcctgagtagctgggacttcaggtgcacgccaccacccctggctaatttttttgtatttttagtagagatgaggtttcaccatattggctaggctggtctgaaactcctgacctcgtgatccgcccacctcggcctcccagagtgctaggattacaggcgtgagccaccatgcccagcccacgtcaaacatgtcttatagctcctgtaatccctgaagcactttgagaatgtgaatattattcacaaaagctgtttgaacaaattaaaatggcccatgtgcccatgagagttggttttattcactgttatattcctggtcctcaaacagtgcctgacatatagttatgtgttccataaatacctattggataatattattttgatatcttaagtgtgtatatggaggttgttggaggcatttcaccagtaggtggtagttagagttgctaaacctttacttcggcgtttcaaatgccttcttgttttgtgcattccctgcggaatccctttgtattctattctctcaatgctgtatcaggaggactgagggcagatggctgacatgagggcaatgtgcctctttcacctccaggaggagctacgactttagtgaaattcctgagtcatgtggagggagaagagaggcaggagggaggaaaggactaacgaaggaatcaaatgctctggtatcagggtttgctccttgttgtagttgagagaccatgtgtggacaacttgaagacactaaagtccattccacctggacctgcatctctgcagtccctctgctcatgcccttagggcctcctgttattctagtctgtgttcaggtcctgcatcctaagtaggtgagatgctccctgggggtaggggtcgcagattatttctctcatgtcccctcgagcacccactgaaaggtgcttcctccctagttggcattaccttactgggtcttaaaatgatgcacagctggctccagggaagggctccactgagctaggtgaggtgtcctcctggaattcactgagatgagggaggggagctggagtgtgctcatcctgggtccaagacaggcatcgggaaggcatctgcccaaagggaaggggtctgtgtgttagggaggaggggagccataagtagaaagaggaaggggagacccattcattcgttgtgggaagggcaggcagctgctaagaaaaaagcaactgtctaaagaacccgccctgcacacctggccctgagaagctagtctaaacccacctcttgaggtgccagtgccaagcttggaaaggaaagaggaagtgtgagctgtagacactaatagtgacaccaacaggagcagagacttcccaagcagcccctgtctcagggccagggaagcacacccagacgacaaggacacagagcagggagacacagggtccccctgcctgtgccccgggtgaccctgccatgggctgaagtctccactgtggtgtggtccattgtctcaggtgagtcctgggcacaggtgggacatttctgtccttaaattttttgcttttttcatggaactgcttcagaagattctgtcctaggcttagtctgaatttggcttcttattttcataggctccatggatactggaattacccagacaccaaaatacctggtcacagcaatggggagtaaaaggacaatgaaacgtgagcatctgggacatgattctatgtattggtacagacagaaagctaagaaatccctggagttcatgttttactacaactgtaaggaattcattgaaaacaagactgtgccaaatcacttcacacctgaatgccctgacagctctcgcttataccttcatgtggtcgcactgcagcaagaagactcagctgcgtatctctgcaccagcagccaagacacagccctgcagagtcaccgcctccctgtgcacaaacctcctggatctaatcagaaaaccgtgggggcaacgcatccagctgagcctcagcactcggttcagcattctgtaagacctcagcagacatctcagatcataatactgtcatttattggatgtggcaatgctaaattgcccagactcctgcagcctgtggcctgagtttgtcttgaatgagactgtgcctgaacttgaatgtaggacagatgccgtcaagtttaagtttttccaagtatctttcagtcggtttgtgcctctgggaaatgttgtgtgaggtatttaacactctggcctcaccaatccaccttccaatatggactgttttttgactttcttttgactcaagttagacccggatctcagccctcatcccagctccaaatatgtatggtcagaccttttcttttcttttcctttctttttttttttttttcttttctttccctcccttcctccctccctccctcctttctttctctctctctctctctttctttctttctttctttctttctttctttctttctttgtttctttgtttctttctttccttctttcttttttgagacagagtctcactgtctggagtgcagtggcgcgatcttggctcacttccacctccatcttccagattcaagcgattctcctgcctcagcctcccgggtagctggaactacaggcgcccagcaccacgactggctaatttttgtatttttagtagagacagggtttcaccatgttggccaggatggtctcaatctcttaacttcttgatttgcccccctcgggctcccaaagtgctgggattacaggcgtgagccaccgcgcccggcaggtccttttctttttctttctttcttttttttttgaaaaactaaagaatacccaatcccctcctcaggtggctctatcactgcctcaccctgaggacagtatttccccatggggtttggatcactgttctctagttccctctccctggggcatgtgcagagtttcaacttcttgttggctgctctcttccactcaggatttaaaacattcacacttgattctttttccttctatctctgtaatcctaataccaagttttcttggcattcattatcagccgtggaatctgttgtacctgaattgttactcacagcaggtaataagagaacaagacctcctggaatttctgagccagactttgtactcagggttaccttgctgacccccatattttccagcattgctcttattaattaatggccctcagtcctgcacacaccatcagatcccaggggctgagcacagcctgcattgtcaggttctgcaacaacacaaaggctccctcctctctcctatagagggcgctccagggatggtgggtgttgccagagacaccagtaattctgccagaccttgcctgtggggccatgggagctcaaaatgcccctcctttcctccacaggaccagatgcctgagctaggaaaggcctcattcctgctgtgatcctgccatggatacctggctcgtatgctgggcaatttttagtctcttgaaagcaggtcgatgcttagactctaggaaattcttgctttgaacttacctaagacaattctaaaccattctcttaatcttcttcttttctcacaggactcacagaacctgaagtcacccagactcccagccatcaggtcacacagatgggacaggaagtgatcttgcgctgtgtccccatctctaatcacttatacttctattggtacagacaaatcttggggcagaaagtcgagtttctggtttccttttataataatgaaatctcagagaagtctgaaatattcgatgatcaattctcagttgaaaggcctgatggatcaaatttcactctgaagatccggtccacaaagctggaggactcagccatgtacttctgtgccagcagtgaagccacagccttgcaaagacaactccagcctgtgcaaaatccctcacagagctgcctccctcccagccgccagctcccacttcctgcctaagaaaaggaagtctctggttgggtttgttcttgcagctgtctccaaatagacagatatctgaaattaaattaccaaaggtatcttgggcagaaatgaccagacactgtaggatttgaagaatgtttacagatactacagagtgtgagtgtgatggtgggctctgaatatgagagaattgtacacaaccaagtaacttatatcttctcctcattcccatttggccatctttattagaattgttttgttttagttgcttaggaaaacatattttaacttctagggtggcgagatgattcctgagtgggagttcaggtatttccatgagaatatagagggtgctcacagaaatcttcagaagaaggggcttggtacaaagaactcaattatcaatgactcttgctcagcatgtggtcaagagcagaactatctgatgaccctgtgaacctggtgtgatgcatttgggctaatgatgctagctcacaaaataacaagttaagagagtagaaaacatggagtctaatatttcacaccatttcaaggtcaacagagttctagaccagcatgagaatcgccagaataaagcaaggcagtgcaggaacagaattcagcagcaaaagtcaagagacacctagaggcagaggcaggaatgaatttgtcactttcaacttaacctgaagcagccagattaacttcttgagtttcatttaagaaattattcctcttttaaacatacctattgaagtctaaattttaggtattttatatatttcagttctggaatttccatttaaatcttgctacaatttccagttgtttgctaaaattgcacattttgtcatttactttgttgactatattaacatctgtcattttaaagccactttttgataactttaacatctgaatctgtttgggtctatttcttttgtctgttttctctgttcagtttctgggcacgtgattttgttttctcatacaactagtaatttacttgaatgccggatattgtatataaaaactatagagataatttgaggctctgaatgatttcatcttcctcaaatgattcacttttgcttctgctgggattgtagcaggggcggatcaccttaattgagctgatgaatgagctggatcagacctgagcttcagcctgcatgatggctgctcgcctttgctcttagccatgtaagttccaactagatgtctgaagtttaacagctaaatcaaattgtaaattacataacataatatttgcccattgcaagcatgcaattcaatgaattttgataaatttgtggagttgtgcaacaatcaccatgatccagctctaaaacatttcatctttccccacccggaaagttccttcgtgctcattttcagtcaatccctgcttctacccccagcaccaaggactggggtctttgccaggctcctctcctattcagtagtcactgaacgtaaatgttctccagaccagaaaggtggtggatgctcctcaaagcctgctacactctcagtcttcccttttcttctcagctacttagccaacgatataaaactggcaaatgacttaaggcgaaagtggtctgttagatctctcctttctcgttgagatcccaatcccttaagttcttactgcctcagtagctccaagtgccttcaaacgtttatttttatattttgttaagtttttctagttgtttttggtgggagtgttgttctgcaaaaaatcagtctattaactctgaaagccagtttctatatttattaaaggtgaggtgcaatgttttatgtttttattttaggtagaagtatcttgaagaaaggaaggagtgaacctctctgccttcccttttttttttctttttgagacagattctcactctgtcacccaggctggagtgcagtggggcgatctcagctcactgtaacctctgcctccggggttcaagcgattctcctgcctcagcctccggagtagctgggattacaggcgtgcaccaccacacccagctaatttttgtatttttagtagagatggggtttcaccatgttggccaggatagtcttggcctcttgacctcatgattcgcccgcctcggcctcccaaagtgttgggattacaggcatgagcctccattcccggccagattatctctatttctaagagttctattagccttctgcctttggtccaccatgggacagagtcttgacacgtttgaccttttaccacaaggaggagctgtgactctactgagattaagggaactcagaggaagggcagagcattctcaggatgggagacagttaaaagaaatattgggtttatttacaacaggggaaaatgtggtctgcagaagctgtgttaatgctgaaatgtgagaggataaatatagactattcatttgccttgctgtgcaggtgcttttgatctagcaaagagcctagactgccagatttgttgcatgtgaacctgcatgggatgagaaagggagagaatttgagctgggaaagagcagagctcacaagcagatgccagtggaggaactcttcctgagaggaataagagaggctctggatgctgggcctcttctccagttcaatcctgccatgaaatgacttcctggaacctgggcagtgagcctgacaaatcagggcttccttgagggatcttgcaaagagagtaattaccaagggaaatctacctatcagaccaaagaatacctggagcaccattctcctgactctaaatgatgaaaaacctaagctagaaagggtttttttttttctttttcctcttctgaatgttcctctaagttcttggagtgagggcttcttcgaaggataggaaacctgtctcctgggtctgagctaatggttctatcaaaacagcctcaccagactcccttccagcttccagcttcaatatctatccctgtctaccaagacccatggaagctagacttgtccagatatcaaaagatgatgccaaacacctggagatgggaaagaaggtggcgtggacagacctccaggatgcacatctgaaacaggctcttcattttgttttgactacagcctcctgtttcgccttttcaaaaagcatttggaatttcccttacttcttggaaatccaaaaatacagcaaagatacattttctataggctctagttattcagtaggagggagcttcagaatatctctatactctactatgcatattctagcatgctgcccggaagtgaaagtctagccaaacagtttaacaggaaaaccgttagctgtcctgtggaggttaattttgcagtttattttggaatggaacaaaagaaggtattgaagataggaatctcatttctatatgctagaatctaaatttcttaactttctgtagtatgggccattttcaaatcagctaaagtcctaaaaccagactatgggaaacacacacttctaagctcaatattaaatatctaaagtgactaactaacgtagggttggagaggcagggtccccctggacttttcaaactcctaccctcacaaaaaatctagaacttcttctcagtaacaaaaataagatgacgtataatcatttttcattgttaataaataatctctatccatcatggcattgcattgaatttgtgttaattgttgctaaaaaatgactgtgggttaaacatttgtgattcatataataatagaaataataaatgtaaatgttttaagtgaacaagtgagattttaatagctcaacaggcaaatagcatgaactgatgctctgcaaaggtgagggacacctggcctgagacaggatgtcttatctgattttggtctgaatttcatttggaaaactggcagctgctggtcaacctgcagggatatgatcccatgagctgatatgcaatgttgacttttgtatttttgtcagcatgaaataatttttttttttttaaatcagggtcagagtctcgagtaactagcagccagctgatagaatggaagtgaaaccatggccctcgtccccttgcaaacctggaaacccagtgttgagcatgtgtgaagagagaaacagaatcaggtgaaatgaaatcttcctaagaccctgctcaggaaactaaatttgacgtaattggacacaagaagttgttcatccattctattccgccagaggagacaggacagatttcccgtgcgttcttgggaagctggaagagggagacagctctgccaggtggagtgatattctcatgagaagtgaaaaagaagaggcagagatggagagtttggttctagaagggtggaaggttttgcttataaacatatcaacacacttgcttttcccgccaagatgcaaactttggggaattgctcaaatataagatggggtttaaatattggacagccaaaaatatgacccatgttcaaaatatgcatcctggtatcattcagttcgacgtgttctagttcttctgcagctttctgtctcattccttttgcccctacaactctccacctttttgtggattaagttatctccatgataaaattattatgttgtcttccctctttgactttcttgtcggcagcctggctcttcccagggatcccagcgtctatcctctctcctttctgtagcttttttccgcttctccagtatggcgggccctgtcagaaaatacgtacataatcaatttatttgtccttcttatcctttggacaattcttttgtttgtttgtttgtttgtttttggttgagaccaagtctcgctctgtagtccaggctggagtgcagaggcaggatctcggctcactgcaagctccgcctcccggcttcaggcctgcctccgccttcctagtagctgggactacaggcgcccgctccacgcccagctaattttttttttttttgtatttttagtagagacgggtttccccgttttagccaggatggtctcgatctcctgacctcgtgatccgcccaccttggcctcccaaagtgttgggtttacaggcgtgagccactgcacccggtctagacaattcttgatggacaatcaaacacttttgcttttcatatctcctgtaaaacacaaaacaaaacaacaaccagaactaacattgcctcatatgaggcgagtttctttctatcagtttcattccagtgcctctcccagacgctgtccgtctgatttggtaaaaagtcttgcgtaaaatagtgaaatacatatttatttaaagtctactctttaagaatggttacatctttacatagttatgatcatcaccattgaatgtagcctcttgtcatttcactatcttccctccccacccgttccttctttgaaaaggttcccatgtcagctgtgtggtgcaatgtggtaggtactgaataagacccacaactacgggggtacctggttatgttcacagaattgtagagctagacagagtgttgaaaattatttatttctgcccattgtttcatagatcaggaaatgggatgctttaaaaaaagtatttaaatgtaaatagtaactattttgctggcctccatgtaatatgtatttcatattcttagtctacaagtaatgtgtgaatgtgtttttgctcctattggattataagcatcatgagagtgagaatattgtttactcatgctttgcactaagtagccattcagtgactataaacaaataaagcatgcttgaagttccaagaaggatggtggtcatttttcttttgtttagttcaagttctgtgtttagtaaatcacaaatgaaccatcaaggtctgtctttgcaggggattcaccagtagatgacaacactaccaaagtgtgtgtgtgtgtgtgtgtgtgtgtgtgtgtgtgtgtgtgatacctttctggcagtgctggtctctggttttcctcctggaggttcctgccctggggccattgactgaggcactgaggtctgagtgctggaccttgctgacaagagcaggaggagctgcagccctgccacacccccgaggttgggtggttgatggctggcagaggagaggagtaccatgggcaagaataaaggggactgtggtcctcaacattagataattcacaaaacgcgaaggcattttctgtcgtcacattgccatcaggtgggtagggcccaaggatgccgccaagcatcctccctacacaggacagctccccacaacaaacaatcacctgatccaacatggcagtagtgctgaaattgagaaaccccgcaataagcttcggttgtaaactttgtaccaagaaggagaattctctgcagacaactcaaggggcaataccgtcaactacttttgttttctctgactgccgtgttgttgaccttcatcgccattctttcccagcacatggtgtctgcatattttccagcagcctcctgtttcctcataaatctgccccttggacagataagaacatcacagggagcagggctgcagttcactcccaataataacgcctcagcagggtttgctctgcagtagcatcacagtcatgtggagtaggtggctatggctggtattcaggtgaaatctcaggccaatctctcctgaatcaaggggaccactgatcattaatgagaccttcaagtgagcaaagattcaagagagcaaattaatgtcctgcgctattgtgaagggacgcaaaggatccagagaggaaaccagctgactctgagagaagggcctgaaaaggagaggaagggaggaggtggtcagatccccgggaaggagcagggagggagggggctgctggcccaggaatgactgtcagagacacatcctggaggtcacaattccaccctctcaattattcccagaaattccaaaaactcctttaaaggagcaagtgcagggcatgaaagggaggagccatgctagaggagaccctgggaatgggggaatgattacaggctgtgacctcactggcgcagcacctctcagcggcagtggaaaccacagcctagtcctctcaccactgcagaccagaatcctgccctgggccttgcctggtctgcctcactctgccatgggctgcaggctcctctgctgtgtggtcttctgcctcctccaagcaggtgagtcccgggcccaggtgacatgatcctattggagtccctaagccttttcaccatgacaacaacagcaggccgtctcctaggatttgcctgaattctgcttctttcctttgcaggtcccttggacacagctgtttcccagactccaaaatacctggtcacacagatgggaaacgacaagtccattaaatgtgaacaaaatctgggccatgatactatgtattggtataaacaggactctaagaaatttctgaagataatgtttagctacaataataaggagctcattataaatgaaacagttccaaatcgcttctcacctaaatctccagacaaagctcacttaaatcttcacatcaattccctggagcttggtgactctgctgtgtatttctgtgccagcagccaagacacagccctgcaaagtcactgcatccctgtgcacaaacctcccggctcagccaggaagctgcagggcagcgtgtgcacctgcacccagggctccagtctccattccctgatggcctctgatggagtttcagtctgtagtacagccagctagtgcacccagtggagaagtcctccatcttatgcacacaaaagtctcacagaattgtttatcagctagagcagggcttcacaacaaagccactaaagtattagggctccacaaacaaaaaagagcctgtcctatgcactgatgatcttaactgatgggggaagctctttcttttctttctgtgtggcacatattggtacgtattttatataacattatgaaaaaaacacgattgctgaaaatggttgatgagcacaagcataaaggagggggaaggaaatatttccaagatcaagagacaattctgatgatcagtgagtactttattcaacagaaaaatatttggagaggcatgaaattccatggcaataggtaaactggaaagtgttgaggagatgccggtggaggtagccttgtgcgttgtgggctccttctcttcaagaagggtgaccagcaagtgtctctcccaattctgatgaatatcatcttgaactgtcctcaacagcaggcaatagccagatgactggggatattgggagacctgaaaggactttggacacaaatctctaggcagtggtgagccattggtcctactccaagtgaaacaacatgatgaaactgatattttggtagaggaacactggtagtagtatggatcagaaaggagatagatttttgggtggcatgaatgattaggagacttctaaatatcctacatgaaagattagaaagggttgatgtgaagcattgtggacaatataggcttgaggctctgcattatgttatttcttggaaatgtattgggttttattctgggagggttgaatgtaggacttgctagggtctatttcagccttgccctccctcttagggagccccagcatgtggtcatcattgctagtgcatggcctttccagggtcttagtgggaatcacagtcacccaccacgactctccactctcactgggtctgaatgccattgccttcctgccctgggtatcctctgaaatccctgcccgtgtctacagccttccagagtttgttctctgctgggccttcgggagtgccaccctctgcatacacaacttaggacctggcccagaaagaaaaataaaaaatgaaaaaagattttcttacacaggttctcagggctccttggtagtactctgtgtcctaaatcccagctgtcttggagtcagttatgtcctcttatcttcaatcacatatactacttctattttatataaatatgtttacttggcttttcttcatatttaccattccactcttcactcttcttgcaattcacatggtcctgagatcattttccttcttagatccatccctaattcagaccacttgaactcgctggtcaccaccccttgttgtgggaaatgcttatgttagctgttgtcctcaggacaattaaacctttcgctttcaccattattcaagttttcagtttaaattctattgctttttttaaattgtctttgcaatttggtttacttattgagagccaaacaatgcaataaaattttattcgttcaaatttgttctactttgtagaagggccaaagtgttttcttgctgaagtagataccaatggaaacaattttaatggtaataatactagtgtttaaaataaggctaattttaggtttttatctagtgaatagaatatctccaactgtagcaggatagagatcgatcctatatgtaacctgttgagggggagaatactcaaccccattaaattctaatctacatgctttacattttttgtttgtttgttttatgggccacattgaaaatctgatgaaatttttgcattagaagaatgctacaattttcctcctgactgagaacatccccaggttaaaacaaatctaaattataaatccttgacttaaatcatggataagtatcttccctcagccccatgtagatttacatataacatagatttacgaccctaatctcatgcctacaattataattatcatcatgaaaaggtaacactgatgtaatacaacaataaatagatggtaaaaatcactttgaaagtatgaatcatctcatttttgtgtttatttgtgttcatttgtatctccaaatgctctagaatgaaaagccaatattggcataaaagtaccttttaagaaaattgatgatattccaattcttaactggtcacaaagcataaatagcttatgcagtgaagtacagaagacccataggaagtcatccagctggttcctagttggaaagttctccacagaactgatgaactaatgtggtttctaacatcttagaaatggcagggctttagagatcatctcatttcagttctcctgatttaatatatgaggaaatatggcatcacatatatgaagtgattgaacaatgacatactgattacatttctcaaactttatgtaagatatatttttattctctagttgttttctgaatatgttgaattgccttacacaaatagaattctgggggtgaaaatgttggtgattttctgcttgctcctagctgttgctcaaggagtatttgttgaacaagtcagactggcccaagaactcaagagggctgggatactgtctgttctgcacattactagagatccaggcatagacaattttctgttcttttttcttttctttatttcatttcatttcatttcttttccttttttttttttcttttgaggtgtgtggtgggagcagggtcttgctctgtctggagtgcattgacacaatcatggctcactacagccttgacttccatggctcaagcaatcctcccacttcagcctcttgaatagctgggactacacacaggcaccactacattccgctaatttttgtagagataaggtgttgccatggtgcccagacacagacatagacaatttctgttgagtaaaaatttagaatgtcttatgtgtgtggatacctggcgttctggctgctgactctctgtgttgttgccaacacctccttcgtcttcattctcccctggcctttcaaacccttctctgctgctcagggttgtgagatgtggaacccatctggatgctgacactgggtcggtgagtggccaaatactgttttggccacaggcaggagctgtgctctggtgaaacctctaaggcagggacctggggaagggatagagaataagaggagagatgggccaggagggatcttgcccatggggagccaaccgtgcctcaactgagagcatggctgtactcagcccaagcacactaacatcagcttcaagctgatttccctttcctttgctccacacaccttgtgttgttctttttcagcatcctgtgtatgttagctctaagcccagccaagccccatgccctccacttcagggacagagggtggctcatcccttttgtgctccctcagctccctccccagtgcctggtggctggttggcaacacagtcatgcccttgaatgatgggagctggtgcacactgcatccgtgttcatgcagtcaccctccctccacagagccgggcagaaagggctccaccacacttagacattgagggaagggacgttttgaatggcactgttttatgtgatcccgcaggacagaaggagatttcttgaatgggagtggtctgttgttgagagggatcctgaaagacagggagacaaagatagagggaggatccacataattaggaagcagctgagagcaaaggagcccctgccagaggaatatccttggggggtaaaaagccagctctgccctttctccccagccgattcatcctagcccagcaaattcaaatctaccttctatcagaacttagaaaggatgtaaagcagtcaggaagaaacatcccctgggtctggggaaactatcaggagcagtgacatcacaagaaaaaccaccaaccagggccaaggagaccagagcccagcacctcgcccaaaggaccccagtcagaggccccatctcagacccgaggctagcatgggctgcaggctgctctgctgtgcggttctctgtctcctgggagcaggtgagttaggttgaaattgtctgtccttggactccaacccttttccttgtggctgcaggaacaaccctcttcctgggctctgcctgaattttgtccctttcctcctacagttcccatagacactgaagttacccagacaccaaaacacctggtcatgggaatgacaaataagaagtctttgaaatgtgaacaacatatggggcacagggctatgtattggtacaagcagaaagctaagaagccaccggagctcatgtttgtctacagctatgagaaactctctataaatgaaagtgtgccaagtcgcttctcacctgaatgccccaacagctctctcttaaaccttcacctacacgccctgcagccagaagactcagccctgtatctctgcgccagcagccaagacacagccttgcagagtcaccgctttcctgtgcagaaaccttcggggcctgccaggaagccgtgggggccacggagggctcgggtgaacatttcctccaagagccccgaagaagcttcagaacatcatagcacctgctaattcatccatgtggcaactttacatcctatgacatatttagagtgtgggtttccttttgcctgagtgtgactctgccccgtcaactgatttgaaaaaagagaaacatattcagatctagtttaaaaaaaaaaaattttttaatcatgaaataggccgggcatggcggctcatgcttgtaatcccagcactttgggaggccaagacgagcggatcatgaggtcaggagtttgagaccagcctggccaacatggtgaaaccccgtctctactaaaaatacaaaaatcagctgggtgtggtggcatatgcctgtaatcccagctactcaggaggcaggagaatcacttgaactcgggaggtggaggttgcggtgagccgagaccgtgacattgcactccagcctgggcgacagagtgagattctgtctcaaaaaaaaaaaaaattcctgaaataaagcaagcatgctgtaaggattgtgtagcttaaaattttataagaaccctctaaacaatcacctgtgtcaccacagaggcacaccctgcactgggtcagacactgtcctgtgaggagctgtgttctcctgacacttcatgtccagtggtttccatgactcttctttggggccaagggttccctttcatcataggttgttgtcatgcagagtcaagcaacactgagcactgggaaatcagagaaggaacttccaggcaagggtcccagtgcagaagccagctagagaggacagtagtagactcaccctttgggaaatatgtttgagaaatatgtatctattttcaccagttctattactctatattacagcttgtctattctctaatttctcatttgtacactgaaagctagactgtgaattctagccctgatcaaagctccacatatacacagacaccttctctgaaccctgcaggcagcaaacttgcctctgtctgctccccttgctgcagagtccatggatcatggtctagaagtttcctgactcatccactctccttctcttggctggaagcctccttgttggtttcagatctcagcgcctccctggattgcctctccagactgacacttgaaggattatttttccccctttggtctctttattcccaatgtgttcaatcatcaggctcagagcctgatgcctccagagcgcagctctacattagcttttagagaggagagtgggtcctggctgttctgtttatctgttttcattcactaattcattcattcatttattatagagacaaaagattccctatcccaagatatatggtcatctgtgctgtatcaaaagagaagatattcttctcacagttttatgaaatgaggtagcttcgcaacttgcggggagcagcctcttaagttagttgtcaaaattaggcttttgcctaagtaaagttaggatcctaaattaggctcctactctcccacaaaaactgggagacagggcctctatcttccttgacgattgtatctcaaaaagatggttcctagagtcttgggaaagacattcctgggtcataaagctggctagaggtttacagagattttaataggattgtcaaaaagccttttctgtgtttattgagatgatcatctgggtttgtttttagttctgtctatgtggtgaatcacatttgttgatttgtgtatgttgaaccaaccttgcatcccaggaatgaagcctacttgattgcagtagataaactttctgatgtgctgctggatacagcttgccagtattttgttaaaaatttttgcatcgaattaaataatttttaaataaggtgacttacattaattgctttttaaatataaaaccaattatgcattcctggggcaaatctcatctactgattagatattaacctttttatacattgtgagttaaatttactttatttttgttaaggatttttgcttctatgttaatattagtactatttattcttcacaatttgtaaattgataaacttgctcaatttcatcaataaagtaagctgggcctggagttttctttctggaaatgcttttaattattatgagttcaatttttaaaaccacttctacatgtattttttaatatccctatggacattcaagttatccactttttgagtgggtaattgtgttttttggggaatttgtttattttgtctgcttttgaatttattggcataatattaatctttcattggagttctaatttgcatttctctaaggattaatgatgttgaggacattttaatgtttttattaccatttgcagatatgtctttttcatatacctattaatgcttttgcccagttttaaaggttaaattatatatcttttatattgatttataggaatcctttataaaatataaaggatttttatattatatagaatcctttatataatctggatacaatattctagtctgatatatgtattgtgaaactttttcctcagtctgaaaattttcctttccactttcttggtagtacctgggcacaacccctatgaaatgagagtacccttctgtctcctttaattttgtctctctaccttcacccttatcagtatttggcaggcaattaattcagtcagattgagagagtgcaaaggcttctagctagccctcacaacactggcttgggtacacctctaatctccaatcacacgaaacaatttgccagcccagaagctacccctgctatgtattctaccatgagtagaccttaaatgtgcacctcccactctctccatagtacatatggtagaatggtgatggatccttcttttggcagactttccacaatgcatggagctatgcctatccaagcacatctctgcatggacaaaggaaggggtggataattgagtcagtgtttctgcttcttgcttgtgagttttccccagtaaatcttgttttatgtgtatattgcacagggctagtgctgtctacatgtcccttcatatgatggtgctctcacagaattctgaggctggaaggaacaaacaaaagttctcataaagagaaatttaatcacctctagaaagaagtccgtgcttaatggctttggagtttctgtgaagaaagggtttcctcctgccttagaaggtgggcaaagtgagcaacatcttcaccaagtcaggaacacttgatttcagccagaggcagaagtggggttctatgataatgcccgattgtggttacagagggactacatgagcaaggccatggaggtgaaaatggattcatttgggctgaaatcctgtaaatgaagtaagcgggaaaacccagcgcacattccaatggaagatgcagcttcctaatattgtgctttcaacttagattctgtcatctgtaattactccacacactttctcaaatcattagcacaactgtgggccaggtaatcatttagcccctttgcttggtacaaggtagccatgctctctacttagctccctatttttctctgggaagcttttgctgagacctgcagtgaccatgcttctcagacttctctctttcttattgtcatttccatttatattttaactttaattgtagtttatttgattaacatctgacatgtttatgtttctcttttgcttatttgacctcacttaatgataacccaggtaactggtcagctgctgctaatcaagttatattttctggggttacattggttattttttcctctaaagtttctatctgtgtaagaattgaggtagcagaaccttctctctcttttttttttttgagacagagtcttgctctgttgcccaggctggagtgcagtggtgcgatctcgactcactgcaagcttcgcctcccgggttcacaccattctcctgcctcagcctcctgagtagctgggaaccttctcttttttggaaacagggtctcactctgtcacccaagctggagtacagtgatgcaatcatggctcactgcagcctcaacctctgagattcaagcaatcctcccacctcagcctcccaagtagctgtgactacaggcacacaccaccaccactggctaacttttttgtttacatttttggtagagatgaggtcttgctatgttgccaggtttctctcaaactcttgagctctggtgatcctcccgcctttacctcccaaagttctgagaatacaggtatgagccaccgcgcttagctcctcctattgatttctgaaatttaaatggagatcagactgtctccacgcaaggaggaagtcagacagggcagagcttaaccaatgtccacggtttgttttctcactgcagtcttggacttaccactcatctcttcattctctggctcaaaatagcttcagtcttcccagaagattctcatgattttcagtttgtttctggtttcttagttatttcttgtctcatcaggctcccctgaggaaggagccaggagatgctacaagtctgcaattttagggggagtcagatggagtgcactggtcttttgcacttctttataatattatctaagcctcctcttctttgaaatataatggctattcatcatgggatatgaggcatctcagaagcaatctaaatatctgtttgtttctttttctagtaaagaattgaccagtattctagcaattttattttaggtattcctttaaaagtaaaaaatacatagtttttcttaacgtgacttctattgatagtttatatttttatgattttgtgtagtagctttaccttccctaggatcagaaaccacatcagataatcagcttctattatgaaagaagctgattcttctatttggagagtgaggtatgcagaaaatccataaaaggtattaagttatagaacaccaccatctgatccaccatctgatcttgagagaattttaactggtttatatccatgaatactccctcagtagggtatttttgttctctggatggcatcttggaagaggtactggtcattgatcatatctcactggcacattggctagtgaccgctaatgtcacatgcagctggattggaatctcttctcattgctttctcatggggtcatttgcctttggacttaaaaatcaagaaatttcataatgacaatatctagatttactgtatatatgtaactattcttaaaatttgataacagatatgtcaaatgtagatatttaaagaaatttggattggaaatacactaaatcagaagtagcaagtgaaggatagcggttctgtaatggaatctttctcagattctgttttccctagtctcatgtttcttttttaaacccagtctggcctctccttcttagcttactaagtatagaaccacaaatagaaacttagaaatttaatcattttctgcacatatctttactcatatatgggaaaatgggcaagaggatattgtcagtgaactcaggcaaaaagaggatttctaaaagagagagtatagatgggaaagaaacaaattccccagcagcatgggaacagtgggtactgttttgtttatttttggataagctgattagttggcatgtagcacagagtggtctgaaaggtcttcttggagcaagctggctggagtcatcacagaaaaaagaactttaataataaatcatccacaaatccctgagagtctgcctgccgcaagggagacgggatgacttgatgtgattctggcacagttcttcctgcagcacacctacctgagctaggccaggtttgcatcatctccttcatcagcattttctcaaaggcaacatttcttttctatcacttttttcccttttacagtgcaaaaagtgatcttgaagaacataaattttaaaatgtgggggtttcttttagttcccctagagaaacagtataatagtcaagatggtgaaattgttcctaatttaaatatgtcccatgtctcttgcaccatgttagaaaggctgtatccatcagctcagacagccacagcaaatagcacagactgcatgggttaaatacaaatctttttttttcacaactccagagcatgaaatggggatgccagcatgtggggctctggtgagggccctcctcttggcttgcagagcaccctcttccagttgaatcctcacatggtggagagagaacaagctagccatcaagtgtctcatctcagagggcattaatcatactggatcagggctccacttttataaactcatgtaaacataattttctctataaagaccctattgtcaaatattgtctccctgggggttgtattttggagggacatcaatattcagtccactaacaatggcaaaatcttggttactgcacagtgggccacatgggggtgctgtggaaccactgagctccaaatgtctctggggcatgcacagagccaggagcctgggacagggagggttaaggagcagccttgcttgatgtttgtgctcactaaaaaatgtgatgacggatacataaaactgcaggtgtgcctctcatcagggagccatgcacttcagctatgcctgggttaggaagcctctgtgagccgaagagggagaatgaagatgggatgtcccatgctgggatgggacaacctgcatgtccagggcagggacagatagaggaacaactgcctggaaggaaaagcaaaggaactgtgggggggacatgcagcctaacctcagtccagccccacatggtatgtgagagtattaacagcacaaagcagaggtcctggatcgggtaagccaggggcctaacaaggaaggcaggatgcatgggaacccgcagagatgacatcagagtagtgatatcacagcctaacatccgatcagagatgcaatgcccaaaaccccagctctcagaggaccagtatccctcacagggtgacacctgaccagctctgtcccacctggccatgggctccaggtacctctgatgggaagacctttgtctcttgggaacaagtgaatccttggcacaggtgggatgtctctgaagcacgcctcatccaaggcaccctcaggctccctcctgtgttcttgccctagcctctgtctccctccctcacaggcccagtggattctgctgtgcagaacagagagcagtggacctcaggaggcctgcaaggggaggacataggacagtgacatcacagtatgcccctcccaccaggaaaagcaaggctgagaatttagctctttcccaggaggaccaagccctgagcacagacacagtgctgcctgcccctttgtgccatgggctccaggctgctctgttgggtgctgctttgtctcctgggagcaggtgagtccctgcagacaggatagcgccccattctgagcctgtcctcacccctgtgtcttccactttaccatggggaggcaccaccaggctgtctccggtgctcattctccatctgcttttcccacaggcccagtaaaggctggagtcactcaaactccaagatatctgatcaaaacgagaggacagcaagtgacactgagctgctcccctatctctgggcataggagtgtatcctggtaccaacagaccccaggacagggccttcagttcctctttgaatacttcagtgagacacagagaaacaaaggaaacttccctggtcgattctcagggcgccagttctctaactctcgctctgagatgaatgtgagcaccttggagctgggggactcggccctttatctttgcgccagcagcttggcacagccctacaaagccaaccacattctgtgcacaaacctccctggcccaatgtggagcaacctcagccctgacatatctgtgagaacctggggactgcagggagaaagaaaggcaatttagaatgctaggatccacagcctggggctttctgcaactcagggctggggaaaacaaggccaagagagcctgctcagaggatggtgctgcttccgtaggttgactgcagcattaccttctttgccgacactgtgaactacaggagtagaggaaatgtgtgtaatttaacagctggcgcactctttctcaggacaagagatttaattttgtggtcaagattgttgataacagtgtagtgtagaagggagaatcacagggtttgctttatacaacttggggagaagaaattgaggttttgggaaagtcaaggagagagaaaacgaaagatgattgaaaacagagatagagcagaaggtgatgaaaagtggtgttctgtgcaccatgaactctctttcccccacccgaaagttttcaacacctagaaaaaaataaggaaaggtcttatagccaccggaatcacctggtagccggtcccagtcggaggcatcaccaaattgccgcttggccattgtgagagccctggagttgcttctgctgtcttccttcttccagccctgatcttgactcctcaggccacagtcaggtacttcccaaaacacagaggaaggtaaagtcacccttcttcctaaaggggcaaatactttccagtttccccccaaataaattctgcaaccctgggattcctttctgacactcacctcccaaatccaattaccttctatgaccaaatgctctttgaacattttctaaaactcagcagtctctacatcctctgcgtttgtccttacagtttccatggcctgggaggacctttgttctcctaagacggggccacatactgatcatctgtcaaggacaggctcacacctgccttcctcttcacttcttactgtgacattccctgggactgtactgtatcactctctttcctttattttaaagccaagcatacaattgatactctttgatgtttgcaaaactaataagttattgccctctcatacagaatcctggagtgtgattaattactgtcttctctttacaagggactctacatgaaatatcatggagaatgattatgaatagtcttagtatttcatgtaacttctgtaatattcctagcaattgtgtcttcacagtcaggattgatgaccagtgctgtcaagttcccaaagggtatctaatgctggaatttgcaaatgttcttttggagtgaagaaaattatgttatttaggctgactgaagaatcactaaagaaagaaaattatggtacagtaatatttataaagactcataatcctgtaaaaaacttcctcaccataaccacactttccacagccacatttttagagatttggtgagggtggaatatagtcaaaggtgcttcttaatcatccttgatgaaatcaaccaaaatcaacctacaacattgaaaaaaaaaactagctttgctcagtaatggaatcttatcatccttgacaatgaaaagatattatgtgtttgtgagtgtgaatgtgtgtgtgtgttttcttgtggatactcactcacatagaagtttctcccctggtggcattttatgaggtgctggatcactggcagagctcctaggcacttctaggtaaggatagaaaatagcagacctaacggaatctgcctaagttatagctgataagatagtttatttcaagattttatacattcagaaataaatttgtaaaatcaaaaaatcctttttataaaatgtgcttgctaaaatttgtgaataattaaactaaatgcaatgtgtgaaaagatatgagtctgactaatcaaagggagctctgcaatgtagtattttcagcccagattggcttgatattgtcacactttcatcctgtggcctgtataattctggctcctttcttccatcttatgatgctcattgcaataatgtaacagcaatttcttgtgcaatcaagatgtgtccttttgtctccactggtcaagggtgagtttgaagttccaccctaaatcaacccttccgggaaagcaatagacagggtgtgtgaaagaatgggggctgcaggggttggagtgggggcaaccgtgttcctgacttggactatcctgagctcatcaggtcagaaggtgtgaatccatgggactgtggaatgttggccacttgggggcgctgtggccccactatgctgcagggaaccctggggaggggtgggagggtggccaggaagggagggcggaagggaatgcctggctgcctgctgacatcaggagattaggtggaaattagagtaggtcctggcctgggactgcccagggaaaggtagggccagggttggcaccaagcagggagtgtttctgcctctgcatgggcagaggagggtgtaggggctggggtggcaagggctgggaatcagtgtcaggacagggatagggtgggcagaggaaagtgaggtgtgatgtgggcatgcggggactgtgaccagccacctcccctttagttgaggggctgtgcgggacaggaaggctgcatggagctgctgagcctgagtctttcaatgggtgaacaaggcaggagtggcctgcagaaagagtacctggaaaaggactgtacccgaagaattgggtgacactttcttagctccactcagggagtgaccctgaggagggtgctgccagccagaggggctcaggtcctggtgagctgacaggcttttcctccagacacttcctgttgtttctgtatgtgatctggttttatgctcactgaaatcatgtaaggtaggtatgatttcacctgtttatacatctgaaggaaagcagctgttccgggtctcatattaagtaattggctgaggtgttttcctccaacatctctgcaccagccccgtcccccgactctatatctgtcccttcatctggcttcccctttccaggtccaattagcaggagcacaaggtcatgcctcatatgtgaccattgtaacctcttccctgacaagtccaaggaacacgtgacttccaggccaagcatatccattcacctttcactgaagcaaaacagaaggatgaaattatctgcactgtacacttcctgtaactgatataatctaccttgaggaaaagtaacaagaaaaattgttattcattagttattattttatttaatatatgtttggagatcctttctttgtatagatattttatgacataaaaagcaaaataaaaaagaacaaatgaaaataaaaaagaaaagcttgaaagaataataagtgtttcttactttttagagtattaaggtttgcattaatttttttaacttattcaaagacgtttgctcagtttctgaattatacagatttcctttttttcttctctttttctctttagccacctacagctttttctgccagcttttttagtttaataacctaaggctatcttttaaacagatttttaaatgtacaatatagtatcgtaatctacagacacaaggttggacagcagatctctaaagcttcctgattcttctttactgaaattttgtagccactggcggcagctgcccatttccccctcttcctagcccttggaaatcaccattttcatcttcacttacatcagtttgacttttaggttgcctcatataagcacaatcatgtagtatttgtctttctgtgcctgactttttcaactcagcataatgtcctccaggtttagccacattgtcatgtatggccagaatttcttctttttaatacttaatgatattccattgtatgcatacaccacatttaaggtctgaatattaaatgtatagtatcttattgtttctgcgaaaccatctgtcacaggagtggcagggtcatttgcagaacagtaagcactgagtatatgaatgcacattcattcgaagttcaattctgcttcatagagaagacttcaaaaaaataataatttcactatttattgttattttactatacacaaatagaatttcttttttcttttttttttttttttgatacagagtctcgctttgtcgcctgggctggaatgcagtggtgtgatcttggcccactgcaacctctgcctcccgggttcaagtgattctcctgcctcagcctcccgagtagctgggattacaggtgtgcaccaccatgcctggctgattttttgtatttttagtagagatgagatttcacagtgttagcctggattgtcttgatctcctgacctcgtgatctgcccacctcggcctcccaaagtgctggtattacaggtgtgagccaccgcacccagccaataccccaataccataaaatatttagcatatagtagaaatctagctatttttatttcctttgctagtctcgggcagcctcttccactgcgccaatgcccaaaggcagttaaagacacattttgcctggaaatcttagggtgaggactcaggaagccacagaaatggaaatacatatgcgtgatgattactttgaaagtatgaactagagaatgtagcatatatccctcctcaggcatttaaaactcagtattattgatatataagttatataagcattacacattttaaataaacagatcggttatacgtaaccaaataattaacagaatgaggagctcctgaaaagttttatggttttaaaaggggttgaagccaggtgagctaccagatccacattagggacaattctatctggagatggatattgtgatgaaacaacctcagaaggtcttctaacctggtacagactgattttacgaagtttatttattcattttctttcatttcttttcttatctgctcattcactccaattattttgtaatgatattttggcgaaaattaatcatctttaagggaaatattttgagtttcatcagacacacatgcagctgagctttgtgttcacacactgagtgccctggggccaaacaaaatacggtaatagtgaccttgttgagagatgacgtcacattgggagaaaggttctctttgtgttgacactaagtgtccaattcataaaacctaagccttgagctaggaaatgcccttttctgccctgggaagcaggctcctacattgtgtgtttttctgtctcctggtctagcctggacacagacagtgtacccactcacgaacttgttatatcctggctgtgaatttcagcaccaggtggccctttgctctgacttcaatttctgtgtccttctctcctaaacaccatggatgctgagtgactcagactccagtcatgtgcttttgccaaaaggaaactagcacaagaggaggtgagcagaatatgaaacaaaaccatgtactcaggaccggcaatgtgacttactggcagctctttgctcaaatattgtaaggaagttgaagatcatgacaatgttacagtaacagggatctctttaagtgtggggctctgtgcactaaaatacgggtttttttttttcttttctttttttttttttttttttttgagacggagtcttgctctgttgcccaggctggagtgcagtggtgcaatcttggctcactgcaaccttgcctcctgggttcacgtgattctcctgcctcagcctcctgaagtagctgggattacaggtgcgcaccaccatgaccagctattttttttttttttttttttatttttagtagagacggggtttcaccatgtttgtcagactggtcttgaactcctgacctcatgatccgcccacctcagccttccaatgtgttgggattacaggcgtgatccactgcgcctggcctttttttttttttttttaattgttactgaattagtggtgagaatcctgaccaagggaatattccctatgaaatatgacacttcaaataaaatgagagcgctttttcttatcctggagcctgcctcttctctcctctccccacatccctcacatgtcaagacacctttgtgcccacagatcatgggcagcgttgggctgccactatcatccacacagagagggcagtcagcagcgtgaggtggttctgcctgctgcggtctcaccccaggcacagaaagcaagagccctgggtggagctgaaggtgctcagctgggcttgtcaggagtcccatctgtcggtgaattgaaaagaaacagagcaaaatgactcctccaatggtgatgagcctgcccctgggatttggaaacttggtaacagagaaaaccaatatagacaaaggattttaaacaggattatggtcaattaagcaaattagaaaaggatacttgaagggggatttgggacacaggagtcaaaaacaccgggaagacatgagaagtttccctaagagtctaaattagagaaatatttagataactgacaccagtgtatgaatgaggaattatatcatcacagggataagagttccattgagttacaaactgcttccaaaaaggttaagaaaaactcgtaaggctgtgtcaattcagacaaaggcattcttcccattcaaacggttcaccggtgcatgaatcttgaatttgaccatctggggaaggggcgtggcctctcctgacaggaaggctctggggcccaggcagggagaatgaagtctcagaatgacccccttgagagtcctgttcccctatcaccgatgcacagacccagaagacccctccatcctgtagcacctgccatgagcatcgggctcctgtgctgtgtggccttttctctcctgtgggcaagtaagtcctgggcagggccccatgtgtggatttcaaggcccagcctgtttccattgtggctgcagcatcagctttgttcttctctgcaggtccagtgaatgctggtgtcactcagaccccaaaattccaggtcctgaagacaggacagagcatgacactgcagtgtgcccaggatatgaaccataactccatgtactggtatcgacaagacccaggcatgggactgaggctgatttattactcagcttctgagggtaccactgacaaaggagaagtccccaatggctacaatgtctccagattaaacaaacgggagttctcgctcaggctggagtcggctgctccctcccagacatctgtgtacttctgtgccagcagtgaagccacagcgctgcatggccgtctcctctctgcacataaaggcagggaggctctgcctcctccctcaccccagactcagtgatgccctgggcagagttctctgcaccaggaaacttgaaaccccatcatcatgggtctgaggcccccaggatgaaacaggatttgtatttcagatccatctagactctcgtctctccctggggaccatgttgcttcttctctctagggttccccccagcccccaccctcatgttgtctctccctggggaccatgttgcttcttctctctagggtttcccccagcccccaccctcatgttgtctctcctgtggcccacctttcccatctgggcagtcaccctccaaggccttgctgggtctctcctcccctcacttccccacacctctccacagcagccatgaggggagcccctcttctgtgcctccttccttcccatcacagagacttcaaagtccattttctctgccctgggctggaggcttcctttctgcagtggccaactcctacctgtgcttcacatctcagcatgatcagccctcctgtgggaagcatgcccttgcctcccagctgagatcaatttttctgttataagcactgatggtaaaatgtgcttgttagtcaacagagttgagcacagttggagttttccagttacttgtctggatatttttctgctcatgtcgattttaaactccataaaggggaaggctgtgcttgttacatttaccaacagctgttcctggaatgaagggagacctgtttcacagataatggatgagttaatgaatgacaggctgattgagtgatgagcgggtggatgaaccaataacaggaacactccaggtccgctgtaccctggcagaaatctagagttaactgtgcctgagatgctctgctatgagctcttcaaagggcactcgcttgttgaacaagcgttggaccattcattgtgcaagccagtttgtcagttcatctaggagtttccaattttaaatatcatatgttcttcaaactcaatgagggtaaagtctacattatacaattctaagttattttttaaagttttgggttaggaaccaaaaaggaaagaagagggaatatctttagactttggagtttttttattgaaaatgtatttatataaatttttcttggaagaacaggtagggaaagtcatgactacacagccttataggtgctaatttctggagaaggtgtcatgaaaaataacaaaaatgagaactgtgttctggagggaacattgtgactgtcctgagagcgtgttctgatcccaggaaccaaacccaggagtgtgtttggcaactcagagtgcagcagacaattctttgccccgtgcatttgggataagactggagacagctggaaaagctatggactggacgttctgcactctcaatgcaggactctctgaaatcccacagattaatgtcaggtaaatatattcccactattaagacaactaaagcaagaaccaatgaagaaaagtgagtagaaacagtaagcaattgaaatgtatgaagacaaggaattttgccataaaaagatataaaagttaaagagctatatttaaaggaatacaaaagcgaattgatatgtgaacatgaaaaagaagactgtcagaaataatcaaggaaacattaaaaaataatcaaagagaatacactaacgattaagattatcattgaaaacaaaatggaaatgaagaaaagatgacatgcttcaaaagagattgttacaggaggtcaaagacagatctgaagaagttacctagaatgcagcacagaaaattaaacaggaaacaagaaaaggtaagggataaggaataaaacacttgtgggttctagtgtattagtgtatatataatattttgttggaacttcccatttttcttacacatgattgaagtgtcacaaagagaaagtagagagaatgataggtgataattatgagacattagctgagaattttcaagacgtgtttcaggacctaaatcctctgtttcaacaagttaaatgaatatgaagtagatgaatacatatgttatggtgaaattgcggaacacaaatgacaaagagaagattttaaaagtagcccaaaagataactatctcccagcagaatagactgaaaggaacagtgaaagtcaagaaaggagattaaaaataagcatcaagtcagaattataattctcattcattaaatattgagattgaggtaaatatatttatagatagagaaagaaaaaacacggtgagtttgtcaccaaggtatcctttctgaattatagttaacaaagatgggaagtggtcccagaagaggggcatgaggtgccgctcgtgagggaacccatgtgatgggacagccccattgggcacgtgtgactggggggatggaggaggctggggcatcaatggggatggcacaggggactctgacttgcaggaaagacaatgagctcaccttttggtgctttgtgttggcggagctgttgacacatcctagagaacatgcccagcagacagaggagcggctgtgggatgaggagataaactcagagatgcagcgtgaggcctccgggtccagacagcatgagagcccaaagcgatgatacatgcattgatgttgttaaaaaggattttttttttttttttgagacagattctcgctctgtcgcccaggctggagtacagtggcgcaatctcggctcactgcaagctccgcctcccgggttcaagccattctcctgcctcagcctcccaagtagcttggactagaggcgcccgccacaacgcctggctcattttttgtatttttagaagagacagagtttcaccatattagccaggatggtctcgatctcctgacctcatgatccacctgcctccgcctcccaaagtgctgggctcacgcctgtaatcccagcactttgggagaccaaggtgggcggatcacttgaggtcaggagtttgagaccagccggggcaatgtggtgaaaccccgtctctactaaaaatacaaaaattagcctggtatggtggtgtgagtctgtaatcccagctactcaggaggctgaggcaggagaatcacttgaacttgggaggcagagtttgcagtgagccgagatcacactgctgcactccattctgggcaatggagcaaggctctgtctcaaagaacaaacaagcaaaaagcaaggaactcataaatatttaaaggagtcatttaagtaggtcctaaaataaatcctttgttcctgtcattgcgtggattgagagaggatgtgatgtcactatgggaccttctgtgtgggaacaaggacatccctcctcctctgctcctactcacagtgactctgatctggtaaagctcccatcctgccctgaccctgccatgggcacaaggctcctctgctgggcagccatatgtctcctgggggcaggtgattcctcagatgccaagcagtctcctgtgtgtgtgtgtgtgtgtgtgtgtatgtgtgtgagatgtgtgtgtgagagagagagagagagagctgactatagttgtttttctcattcagttcccaatttctgtctccacagatcacacaggtgctggagtctcccagtccctgagacacaaggtagcaaagaagggaaaggatgtagctctcagatatgatccaatttcaggtcataatgccctttattggtaccgacagagcctggggcagggcctggagtttccaatttacttccaaggcaaggatgcagcagacaaatcggggcttccccgtgatcggttctctgcacagaggtctgagggatccatctccactctgaagttccagcgcacacagcagggggacttggctgtgtatctctgtgccagcagctcagccacagcactactgctccagtgtcagcttggttccctaggaaatggggtttctagaacctgaatgctgacaaataagagttgtatatgtgtataccatgcaacctgcgtttaaaaatgtatgtacatagtgcaatgactaaatctagctagttaacatatgcagtacctcaatccttatcctttccagtggtgagaatacttaaaatgtactctgttagcattttcccagaatacaaaccactgttgctaactctagtcatttgttgtataatagatctttgtaacatcttcgtcttatctgagtgagattttgtatctgttgaccaacatcttcccaacagtccatctctactccagcctttgctaattactgctctagtctttgaatttgaagtaatttccctgaggtctttagctcaacaagatgggggaattttctctataatgatgcttacgttatttttgctttgtttttgtttcgttattttatgtcttgcaatatagtgtttattgtaaatataaataagtatattgtaataaaaatccttcacctctctttgggtaaagctacagttcacatattctaaatttcatgctgtgaccaacgctgacataattatggatcatgggtttctgggagtcctcagagacagccccatacaccaagtttaagatagaatattccagacccagccaggacagaagtgcatggtcctgcatagctccttggaaaattatagttccccaaattcagttattggatattgtggtgccgcagacaccaaacgtctttctctagcaaatgatggtccttggcagggattgttctgaacccattacaattttgccatcatcaaatcactccttgctgttaccttgtgtctcctgggagtgaggacgccccgggcacagatggaaattccctgaccttcggatgctatttcaaggacttcctaagaccttgtgtccatctttttccacctttatccacatgactcctgagacccacgctcacaatagtggaccagctctgattcttaggcttgaacagaattcagaccacagctgtaaacactgttgctgaaaaaagatgtaaaaaaggtgggcagggcttcctacctacactgagggtgaacatacaagggcataaagggaatattttattaatagctaaaaaaagaagaaatacaagccctgctctaatgaaatgagaactgtagcttcacccacagagaggtggaagattttattacaatatacttatttatattcataacaaataatatatttgaaaaaataaagaaaacaaaaagtaatataagcattattataaagaaaatacccctgtcttcttgagttaaagacctcagggaaattaagacacatcaaaagactagagcagtaattaccagaggctggggtggagatggggtgctggggagatgctggtcaaaggatacaaaatttcactcagataggaggaagaagtttaaaaaatcttttatacaacaaagtgactagagttaataacactggactacattctgggaacatgctaacagagttgaattttttagttgaaccaaagcagaatgtccataaaattattttgaatcaaagtctagaagctttcaaaccagttggcatagccttgtgttctgtgatctcagcagcttcagaggacttggcaatcctttctctgcacaaacacccctttgtccactctaagaactagggacacacactcttatcctatcacgaaaacaacaggctgtgctacagttgctggtaactcgttttaagggtgttgagtatggaggattgaacaagattgaaagctatgctcctgagtctgggaatgtgctggaaccagcttgcatgattcagaagagccaaataggcaaacccttcccaaatcctcattgaatgaagccatgatgacagcttgaaatctgccatagtggctatgctgataccataggaactgacaaatgctactaggcatggccccaccctcacagatatccagtttacaaggacatcactggaatgttttctgatacaatgatgatcctattagggcatgtcttatggggccaaaaaggctcagaatccactgtccatctgtttctgctcctagaagccatagtctaagggaatctcaagtgatcctacttctctccaatctccaaattcccttgctctgtgggtctgtgtctcttatgagcatgccaatctgaaacaagacaactatttggaatgtagctaaaggaaacagggaaccagtccattattttcaaattatccttccttgcatgaagtatgcagatgctgcaatcactgaaaacagagatggggcaagcagcagctctgggctgtgagtcactttatactatagtgccccgctattcctctgtggcactgacagaccctgcagcatggactaatttgcataggaaactaagcagcccctgaccatcaggtatgaccctggattcattttgggctgagaggtcagaaggatcatactcaccttaaatattatcctctccaagctgcaatactcccactgtccatcttagtcccaggatgttgtccagagctccagagaatcccttctcttggggcagaatcaccaagcttgctccctccagatttccacagtctccagtgggtatggggcacaggtgccattctgtgtctcaggtagagagaggcatcatgtcaaatgatatttgtagaagagggattcaaattctgaggctcctctccaatatttgacataattttctttgcttcttgtttcattctacaatctcacaatttaggagagtaattcttttgcggttgcattgttgacagcatttgggaaagtttttgtggttaaattaatttaaacaatcattttaatggtgtatttcttctgttcacgatagaacagtgaaagcagtcatttacacatcctgttgatgaaggtgttgtttaaggttcatgatccacacctaactctcaatctagttgaaatgaaaaggtgcagaattaggtggcacgtgagcaagctatgagagaggctcatgccaattactgtgggatttggagggagggagagatgacctctgctctagaccatgctccacgaagaaggagtgggagtttgtccatgggagactgcagaggaataaataccagcagcttctaactggggtggagtgagggctgcgggagcaaatccttggaacagaaaatggtgcatttgagctctcacagaggacagtggaaagaaaagtcatataggccacagtcccccggcaggttctgtttgctaatgatactattttgcaccagtgtgtccttatctcacaccactcctctgcctcttccagaataatctcttccctctccgctgctcagatcagcagatgtgccttgtgcaagttactcatttcacatagcaggccttttgctggtcttaattatatccgtcgttactttccacattagatactgtgtattgccttgcaaatgatcctactttttatattcctatttttcacttgttaatgcatatttgaccccttcttgaaggtcaagatgaccttggaaatataaggctatctcattatctggtcagtcttttactaatctttatttttatcgtaacattgactgtcattttgggggacatgtttgtttatcttgaatttcattgagtttcctcaaagcacgattttgagttctttgtcttaaaggtcgcatatctctgtctgtctagggttggtccctgttttattttttttttgagaaattaccgacttcaccagatgctgtaagctaccgggatagaggaagtttttgtgatttcatagcttgggtcttctttattcagggcagggaattttattttggggtcaagattgttgaaaatggcatagtgaagaaggtagagtcacaggagtttgctttatatacttgaggaagaagaaactgagatttgggaaaagtcaagaaaagagaacctgatcaaagatgactgaaaatagtaatagagcagaaaatgatgaaaagtcgtgttctgtgcaccacgaacgttcttctccccactccaaaagttttcgacacctagaaaatataaagaaaggactgatagcaactggcatcacgttgaggccagtctcagttgggaaaaacaccaaacagccgcttgtctcctgtaagaaccctgaagttggtcctgatgtcttctttctggactctggccctgatcttaactcctcagggaagtcaggtacttcccaaaatacagagaatgtcagattgcccttggttttgaaggagaaaatgctctgtgcttctccccaagataaattctgctttcctaggaatgctttctaacactcgtcatccagatctgattaccttctgtgaccaaacggtttccgaagattttgtaaaactcagcagcctttcacatcctctgcgtttgcactcactgtttccatggcccagaaggacatttattttcccacgacagggccagacactgctcatctgccaaggacgggctccctcccacctgtcttcctcttcacttctcatcccagcattctctggcactctatgatatcactctcttcactccacaggccaaaccaagaatataattggaactgcctgatgtttataacatgaatcaattcaagtccacttacatagacccctggaatacatgaattactatctcctctttacaagagacttctactacatgaaacatactggagagtctttagggataggctcagttttctacacaaattctgcaatatcctaaacaattctgtcttcacagtcataattgatgacttgttctctaaagtacccgaactgtgtttaaagtcagaatttgcaaatgttcttctgagaaaaaagaaaatcattacatcttagtgacatttatccagtctcacaatcttgctgaaaaatatttgtcatcataaccacactttccatgaccacatctttagatatttggtgagactggaaacatcaacaatggtccttctcagaaatcaacttaaaacactgaaagaaaaagtagctgtgctcagtaattgaacctcatcagccttgccaattaaaacacgttgtgtgcatgtgcttgtgagtgtgagtatgttttcttgtggagatgcaaatagtttctgtgggtggcatttactaagcatcactggatcactggtggagttcataggcactttcctaaccccagggagtgatgggaaatgtcacagccactgaatcggcctaagttatagctgatagggttgtttattttaaaattttacaaattcagaaataaatttgtaaactcaaaaaatggggccgggtgcagtggctcatgcctgtaatcctagcactttaggaggctgagggaggtggatcacgaggtcaggagtttgagaccagcctggccaacatggtgaaaccccatctctgccaaaaatacaaaaatttagctaggcgtggtggtgcacccctgtaatcccagctactcgggaggctgtggcaggagaatcacttgaacctgggaggtggaggttgcactgagccgagatcgcaccactgcactccagcctgcgtgatagagcgaagctccgtctcaaaaaaaaaaaaaaagaaaatcaggaaatcctctcttataaaacacatgatgtaaaatttactgatattaatttaaatacaaaataggaaaagattgggcctgattaagcaaagggagccagggaacaatgcagtgtttctgggctaggtgggcttgacatcctcacactgtttaattaagggtctgtgtaattttggctgctctctaagtgcaacaacggtttattttgtaataaaaagattggttcatgtgtccttttgcctcacttggcccagggtgaatttgaagatcaaccctaaattggccttttggggaaagcatagagggtgtgaggatgagggttgcaagggtgggagtggggcatctttgttcctgatttggacaatcttgaactcatcaggtcaggtgtgaatccatgagactgtggaatgttggccacttggtgacgctgtggctccacaatgctgcagggaaccctggagaggggtgggaaggtggccaagagaggagctgaagcctatgcttggctgcctgctggcttcaggggagtggtttgattcagagtggatccagagttaaacacaaactccccactaccagagaagagtagaggtgctggaggcctcagtttgcaccaaagagtagagtgtccctgtgtctgcttgggcagtggatggtgaaggagcttcagccacaagggctgggaatcagtgtcagggcagggacagggcaggtagaggaaagtaaggtgtgatgtgggcatgtggggcctgctctccacccaccaaacctttagtttcagggctgtgcgggacagatgcatggagcagctgagcctgggacctgccaaagcgtgcaaggggcagtggtggcctgcagggagagaaactcgcaaaggccagttcccgcaggaagctccagaaacattcctgcccccactcaggaagtgaccgtgagagacatgctgtcagccagaagggttcaggccctggagagctgataggcttttcccaggcactttctgctgcttctacatgtgatctgctttaatattcacataaattatgcaggataagtattattttacctgtttatgtatctgaaggaaatcagctgtccggggtctcatacttaataactggctgaagactgggtgcagtggctcacacctgtgaccctagcactttgggaggccaaggtgggcaaatctcctgagctcaggagttcgagaccagcctgggaaaatcggtgaaaccctatctctactaaaaatataaaaatttggccaggtgtggtggtgcacacctgtaatcccagctactcaggtggccgatgcaggagaatcgcttgaaccctggaggcagaggttgcagtgagccgagatcatgccattgcactccatcctgagcaacagagtgagactctgtctcaaaataaaacaaaataaaataaaataaaataaaataaaataaaataaaataaaagtctcaagcctgttgtgccaacacctctccttaaccccttctttgtagctctatcctttcacctgctttcccctttacaggtccccatcaacaggttgtgaagttcatgcctcatacgtaatcagtatagtctcttccctgagaagtccaaggaacatgtgacttccaggccaagcatatacattcatccttcattgagacaaaaaaaaaagtgtaattttctggccagccatgatgcttcacagctgtaatcccagcactttgggaggctgaggaggtgaattgtttgagcccaggagttcgagaccagcctgccaacatggagaaaccacgtctctactaaaaataaaataaatcagccaggcatactggtgggtgcctgtaatcccagctactcaggaggctgaggaatgggaattgtttgaactcaggaggtggaggttgcagtgagctgagattgtgccattgcaatccaggctggacaacagagctagactcccgaaagaaggaaagaaagaaagagagagagagaggaaggaaggaaggaaggaaggaaggaaggaaggaagaaaagaaaaagaaaaagaaaaaaaaaggggtggtaattttctgaactgtagacttcctgtaacggatgcaacatatcttgagaaaaaggaacactagtaattgttattcactagttaatttattttattcttttattcaataaacttttttgggggacctactgtgtataagataccctatgtcgtcaaatagaaaatgaaaaagaaaagtatctgcagatgatggcagattttaaaaaataaaaaaagaaaataaataaagaaagaaagaatattttaaaataaaaaatattttttggctatttataacactaaggtctgcatttattttcatttttcaattgttttatgtttattttcaattgttttatgtttagtgtacttagtttttgaatttatatatttcctttcttcttctcattctctctttggtttctccttctctcttctttgccagcttgtatttcttttttatttaaacttttggtaaggacatttaacatgagacctatcctctgaacagatttttaagtgtacaaaacagtatcatagtctacaggcacaaggttgtacagaagatctctaaaacttcctcatcctgcttaactgaaattttatacctgttgacagcaactccgcattttccccaactcccagctcttggaaagaaacattctcatctttgcttccatgagtttgacatggttgcctcatataaacagaaacatgcagtgtttgcgtttctgtgcttgacttgttcacttagaacaatgtcctccaggttcatctatgacacatatggaaggattgtttttcttttctaacccttaataatattccatgtttcagatctgcaggattaaatggatataacatttggctatttctatgaaactctctgtcatgtgagtggcagagtcatttgcagagctgcgagcactgagtttattcaggcacattcacagataaattctgctccatggagaacattcagaaaaaaataataatgccaacttttatttgtcaattcactatatgccaaataaaaatctttcatttgaaaaagttcaattaattagaaattcagctatcagaaaaaaaccttaagatgcaaatgctattctcattttacagatgagggaattggctcataggttaaaaaacttgaccaaattgaagagctattaggatacagtattgggacttcaacctgatctgtccaatttttgcatttataactctgtgctatagtgcatttcatagagagagatgcctaccttcaaaaatcagaatattggatcctacatccctttcagatcaactggctctaacaacatggaaagagatcagtttaccctggagacagtgatgtaaggagagatctctggctagatgccatgacactcagccctgactcccattctaacaccaacttgtaaagacctgaggccattcttgacatgctgcgtttagtttgtgttttgggtttttatttttttctgtaaaatgagatgactactgcccttatgaagagttgtacaaagatttaatatgacaaagtatctagcatatagtagattctagctattttgatttcctttgctaatctcaaacagcctcttccactgtgccaatgagcaaagacaaatatgaacacattctgcccaggaatcttaggttgaggactcagaactcacagaagtggaaatatatatgcttgatgattcatttgatgaaattacctgcagaacatagcgtacatgccttctcagacattttaaaatcagcacaattgatatataaattgtacaatataaacattacacatgttaaataaacagatcaatggttttatatatatatatatatatatatatagacatatatatgggttataaggatatatatgtatatccttataaccactatccctataaaaaggtctctatcacccagaaatctctctcatacccctttgccatgactctctccatctctgacaaccaatgatgtgatttctatcactggagaatacatttttttcaaaaaatctattagtaacattttaaaacctgtattgattaatccttttcaaatacatacatttaagagtgcaaggtgctcctcgaaagttttatggttttaaaagaggctaaatttctgtgagctacctgatccatgttagggacaatcctatctggagataggtaagaggatgaaatagcctcaaaattactttccagctggtggaagctcattctccaaaattatttattcatttttatttatttcttttatcatctacccactcattcaaattatttattttataatggtattgtgacaacaattaatcattttaatggaattattttgagttcccatatcacacatatttaattggccttcaagttcacacactgaatgcaacggcaccaaacaaaccatggtaacagtgactttgttgagagatggtgtcatatgtggaaaagggttctctttgcttttaccgcaagtatccaacccataaaacctgaactttgagctaggaaatctccctttttgttctggccctaccctgggcaccaggctccagcaccatgtctccttctgggttctggcccagagaagttcttggcacagttgtagcacccactcatgggcttgctggatcccagctgtgaatgacagtagcagggccccctttgctctgactttaatttctgtgtccttctcaaataagccctatagatgctgagtggcctgggcccctgccatgtgcttgggctgaaagaaagacagcacgtggggaggtgagcaggagcgaagttgaagcaaatctagaattgacatggaaaggactttggacataaatccctaggcagtggtgagccactggtcctactccaagtgaaacaacatgatgaaactgatattgtgttacagtaacattggtagtagtacggatctgaaaggagatagatttttgggtggcatgaatgattaggagacttctaaatatcctccatgaaagattagaaagggtttatgtaaagcattgtggaagacataggcttgaggctctggattatgttatctcttggaaagagtgttgggttttattctggaagggttaaatgtaggacttgctaggttctatttgagctttgcccttcctcttagggagccccagcctgtggtcatcattgctagtgcatggccttcccagggtcttagtgggaatcacagtgtattcgccacatcactccactgcaactgggtctgaatgccctggctcttctgaaatctctgcccatgtcttcagccttccagaacttgttctctgctcagccttctggtctgccaccctctgcatacacaatttaggatctggctcaggaaaaaaaaaaggggggtttcttacatataatttttgggttcctttttactaccctgtgtcttaaatcccagctgtcttggagtcagttatgtcctatcttcaatcacataaactaacgatatttggtacagacatgtttactgactttacttcacgttaccattccactcttcactcttctttcttgcaattcagacagtcctgaggtcattctccttcttcagatccatctggaattcagatgacttcaactcacctgtcacccaccctatgctttgagacatgtttatgttagctactgacctcagggtagtcaagcctctcattgtcattgttattcaaggtaggttgaatcccactaaaaaacaaaaatccttgaaatttggtttccttattgagagccacacaatgcaatcaaattctttttaattcaatttttttttcttttttggtggaagggccaagaactgtttccttgctgaagcagactcctattataataatttgaatactaacaacattaacctttaaatcaggttgatgttaggttcttatctaagaatgaagtatatccaactgtagcaggttgaaggtctctcatatatgtaacctgttcaggacgagacaattcaaccacttttcttaaattctgatctacatgcctttacattctttgctttaagggccacataaaaatactctgaaacaatttacacatcagaaaaatgctaacactttcctcctggcccagcacatctccaagttaaaaaaatctctaaattatcaacccatagtttaatcatggtaactcccttctacccccaacatagatttttatgtaactgatttgtaactacaaccttaaccgtacaatcacaattgtcattataaaatactaacaaacatgtgctattaacaatggatggttaaaatcacttagggattatgaatcatttcatttttgtgtttatttattatgtcagtttcaacctgatttccctttcccttgttccacacaccttgggttgttctttttcagcatcctgtgtatgttagctctaagcccagccaaggctcatgtccctccacttcagggacagagggtggctcatccctttcgtgctccctcagctccctccccggtgcctggttgctggttggcatcacagccatgcccttgaaagatgggcgctggtccacactgcatccgtggtcatgtagccaccctccctccacagaaccgagcaaaaagggctccaccgcgcttaggcattgagggaatggacattttgaatggtgctgtcttgtgtgatccctcagaggagaaggagatttcttgaatgggagtggtctgttgctgagagggatcctgaaagacacggggacagagacaggggtaggatccacataatgaggaagcagctgagaacaaaggagcccctgccagaggaatatccttggggggtaaaaagctggctctgccctttctccccagcccattcatcccagcccagacaattcaaatctgccttctatcaggacctagaaaggatgtaaaacggccgggtataaatatcccctgggtctggggaaactgtcaggagcagtgacatcacaggaaaaaccaccaaccaaggccaaggagaccagagcccagcacctcacccagaggaccccagtcagaggccccatctcagacccgaggctagcatgggctgcaggctgctctgctgtgcggttctctgtctcctgggagcgggtgagttgggttcacatcagctgtccttgaattcgaaactttttccttgtgatttcagcaacaagcctcctcctgggctctgcctgaattttgtccctttccccccgcagtccccatggaaacgggagttacgcagacaccaagacacctggtcatgggaatgacaaataagaagtctttgaaatgtgaacaacatctggggcataacgctatgtattggtacaagcaaagtgctaagaagccactggagctcatgtttgtctacaactttaaagaacagactgaaaacaacagtgtgccaagtcgcttctcacctgaatgccccaacagctctcacttattccttcacctacacaccctgcagccagaagactcggccctgtatctctgtgccagcagccaagacacagccttgcagagtcaccgctttcctgtgtagaaaccttaggggccctccaggaagctttgggggccaccaaagccttcgatgaacatttcctacaagagccccgacagaagattcagaacatcatagcacctttaatggcataaaatatctagcatatagtagaagcctagctattttgatttcctttgctgatctcagacaacctcttccaccacaccaatgtgcaaagacagatatggacacattctgccaagaaatcttaggttgaggactcagaagtcacagaaatggaaatatatatgcctgataattcatctgataaaattaactagaggatgtagcatacatatctcctcaggcatttaaaaatcaacattattgatctttaaagtatatgaagttaacaggacaccttttaaatgaacatatctgtgatttttgagcaacatatatctatatatgcaaccccacctctatgaagatgtatctgcatcacccagaaagtccctcactcccctctgcaatgcctctgtctgtcccagcaaccaatgatgtgacttctatcactggagagtcgttttgttggcaaatatttttaatgcaaatgtcaaacctcttctgaataatcctcttgaatacatagctaaatcatcaaggcagggaggagttcctggaggttttatggttttagaagtggttgaagccaggtgagctacctgacccatggtagggacaattctatctggagatggatattgtgccaaaataacctcaaaaggtcttttcggctggtagaagctgattctacaaaatttattcattttcattcgtttattttctcgtcaattcattcaatcaaacaattttatgttacgttttgacaaaagttaatcatctttaaggaaattattttgagttcccatcagacacacaagcagctgggctttgtgttcacacagtgagcatgctggggtcaagcaaaccatgatcacagtgacttcattgacagatgatgtcttattgggagaagggttctctttgacttgaccccatgtgtccaacccataaaacctgagccttaggctaaaatccatcttccttttctcaccctgccttgggcaccaggccactgtgctgtgtgtttctctgtctcctgaagcagagtcctgggcgcagatttggaacctattcgtgggcttgtttgatcccagctgtgactttcagtaccagggggtcctttgctgtgacttgaatttgtgttttctttactcttaagttccacagatgctgagtgacccagaccctggtcatgctcttgtgctgaaaggaaaccagcacatggggaggtgagcagtatatgaaacaaaatcatgtatttacaaccagtggcaagacttactggcaggtgctttgttcaaacactgttaggaatttgaagatcatggcagtagaatgtgaaaccaagtgcagggtccttccaaatgcaggcctctgtgcaccaaagatagacttttggagctcattttttttaaacaaaaacggaaacaacactctatgttcatggctgtaggccatgcgagaatatttttttaaattttaatttaatttttatttttccatatattattggggtacaggtggtatttggttatatgagtaagtttttagtgatgacttgcaagactttggtgaacccaccagctgagcagtatacactgcaccatatttgtagtctgttatccctcaccccctcctgctgtttccccaacacttccccaaagtccgttgtatcattcttatgcctttgtgacctcatagcttcgctcccaaatatcggtgagaacatgctatgtttggttttacatttctgagttacttcacttagaataatagtctcccatctcatccaggtagatcattccaaatgctgtttattcattcctttttatggctgtgtagtatttcatcatacatatatgatatatatatgatatatatgatatatatgtgatatatatgatatatatcatatatatgatatgtatatgatatatatcatatatatgatatatagatgatatatatatcatatatatgatatatagatgatatatagatgatatatatatcatatatatgacatatatatgatatatatatatcacagtttctttatccactcgttgattgatgggcatttgggttggttcctttttctttatcactaaattaatggcagcaataaatccagaacattcctcattaccctaaagtcagccctgtctcccaaactcccttacacatcaggacacctttgtgcccatagatcatgggcagtgcttggcagccaccactgtccacacagagagggtagtcagtagcgttaggtggttctgcttgctggggtctcaccccaggcacagaaagcaggagccctgggtggagctgaaagtgctcatctgggtttgtcaggagtcccatctgtcagtgaattcacaagaaacagaacaaaacaactccttcaatgttgatgagactgcccctgggatttggaaagctaataacagagaaaaccaatatagacaaaggattttaaacaggactatcggattatgatcaattaagcaaattagaaaaggatacttgaaggagtatttgggacacaggaatcaaaaacaccaggaagacatgaggagtttttccaagattgtagactatagcaatacttagataaccaataccagtgtattaatgagtaattattagtattattattttgagatggagtcgcactctgtcatcaaggctagaatgcagtggcatgatctcggcttactgcaacctccgcctccctggttcaagaattctggtgcctccgtctcccgagtagctgggactataggtgcacgtcaggatgcctggataatttctatatttttagtacaggtgggatttcaccatgttggtcaggctggtctccaactcctggcctgaagtgatctgctctcttcagcctcccaaagggctaggattacaggcatgggccactatgcacagccaagtaatttgtatcatcatgggaataaaaaatatacattgagttacaaactaattaccaaaagatatttaaaaaatggtagacttgcatcgattcagacaaaggcattcttcccatccaaactgttcactggtgcattgatcttgaatttgaccatctggggaaggggcgtggcctctcctgacagcaaggctctggggcccaggcagggagaatgaggtctcagaatgacgcccttgaaagacgtgttcccttttcaccaatgcacagacccagaggacccctccatcctgcagttcctgccatgagcctcgggctcctgtgctgtggggccttttctctcctgtgggcaggtgggtcctgggcggggccccttgtgtggatttcaaggcccatcccctttccactggagcagtagcatcagctttgtccttctctgcaggtccagtgaatgctggtgtcactcagaccccaaaattccgggtcctgaagacaggacagagcatgacactgctgtgtgcccaggatatgaaccatgaatacatgtactggtatcgacaagacccaggcatggggctgaggctgattcattactcagttggtgagggtacaactgccaaaggagaggtccctgatggctacaatgtctccagattaaaaaaacagaatttcctgctggggttggagtcggctgctccctcccaaacatctgtgtacttctgtgccagcagttactccacagtgctgcacggctgtctcctctctgcacagaaaggcaagggaaggtgctgccctcctccgcagcacagattcagcgatgcccttggtcctagcaccgaaaactttggagccccaatgggcccgggcggtgcgagccttcatctgtgccaggtgcctctgcagtcggtctcggccaggcctggatcggtcccaggacctcagatgtcttccttgttgccctccggtctttcctctgaggtgtccttttgggctagtgccaggggtttcccagctctgactttcctagtcattcacctgagtctgaggcctcctaggtgaaataggatttgtatttcagatccatctagactcccgtctctacctgggtaccacgtgctttcctctctctatgatttttcctcatgttgaaccctacggtggtctcagctgcagcctgcatttcctatattcacagtcgccctccaaggccttgctgggtttctcctccccgacctccctgcccttctctactccagccatgttgagagactccaaagtccatttcctgtgccctgggctggagccttcctttctgtagtggtcaacacctacctgtgcttcagatctcagcatcatcagccctagtgataatcaccattatgcttcccttggctcccagctgaggtcagtttccctctcataatctctcatggtatcatgtgtctgttaatcagtagaatttagcacagttggaatcttccaagtactttaaaccccatgaaggccaaggctatgcctgggttataaatcagcagctgagcctggcacaaggggagatgcatttcagagaatggatgagtcagtgatggagtgagtgatgagtggatggatgaatccataacaggagcaccctagatccattttacccttgcggagatctggctgtaagtacaagaactcttacccttttgattgctgggctacgggaggtccttgaaattaatggggagtcgctatcatgggcggccccaccttggtcaaagattcctcctgagtctgcagcaccagacctcctccaggtctctgtgctctccttcagactctttcccacaacaactctacacagatcagagatccctttccagaaacccatgcatagagttgtgttattttggaaccacttctggtaccaaaaactccattaggtttacatcaataaaacagaatcactaaaagtactatggagaggaggatttatgacaggagttagaccttatataaatgtagggggagctgaggaagagaaggtctggaggggagatatagctaggcagatttaattcatgattaatgtgaccgtgacctcttattctactcaaaggagagcatatgatttcaacaaaaaaatattgattttcctttgtaaaagtttgatccaaatagtgagctatttttgtcccataattgtcttaagttggctaatggtggaacaaatccgactttgatttccttgaaagaacaggaaaaaaaccgtcattcatatacagtcttacaggctctattttatggaggaagcataataaataggaaagagaaaatcagaattctcttctggaacctacattgggactgtcctcagagcaggttgtgatgtgaggaatcaaatctacaggggtatttcgcagcttggagcgcagcagactgttcccgaccccatgcatttgggggtgagaccagagacagttgaaaaactatggaatcttgacattctgcactctcaagcctggcctctccctgaatttcacagattaacatcagaccaatttattccgactattaaaagtattagaacaaaaaccaaggaggaccagtgagcagaagcaataaaccattaaaatggacatcctaaagatttaaaattttgccatcataagatgtgaacgtttgaagagctgcatttaaatgaatacaagaagggactgaaacaagaatacacacaaaaaagagacggcccgaaaccatcaaaaaacattaaagaaataatcaaatagaatgtctagaaatcattacgattactccacaaaacaaaatggaagctaaacagcagattcaatgcttctaaagagattgttagcaatatcaaaggaggatctcaagaaatcacctagaatgcagcacagaaaattaaatgtaaaatataaaaaaagtgaaggaacaaggaaaaaatgaagtttctagaatattagaaagcatataatgttttattgaaacttttcttactttcttgtatataactgacgtttcagaaagagaaaataaggcaaatgatctgaggtgattgtgtatgtgatgctagctgagaatgttcctgagatgtttgaggaccgaaatcctcgttcaagaattcagatgaattgcaagacaagtaggcaggtccctgtgaaactgcagaccataaatgacaaagagaagattttaacagcagtcaaaagggaaagataaataacttccagtggaatagaatgaaagaaataatcaaagtcaagaaagaggattaaaaataaccattcaataagaattgtagtcctcatttattgaagattgagattgatttaaaaaaatctataggacaggaaagaaaatatggaaaaccaaaagaattctgtgagtttgccaccaaggtatgttttctgaattatagttaacatgggtgggaaatgatcccagaagaaaggcatgagggcagtttgtgggggaacccatgtgatgggacaatcccattgggcacgtgtgagtgtgggaatggaggaggctggggcatgaatgggtatggcagagggcaccctgacttgcaggaaagacaatgagctcactccttggtgcctggtgttgggggcactgttggtgcatcctacagtacgtacccagcagacagaggagcgtctctgggatgagaaggtgaacttggagatgcagtgaggcctctgggtccagacagcataggtcaaaaaaagagaacctgatcaaagatgactgaaaatagaaatagagcaaaaaatgatatatgtgcctgatgattcatttgatgaaattaactagagaacatagtgtacatgcctccacagacattttaaaatcagcattatttatctataaattatacaatataaacattacacatgttaaataaacaaatcagtgagctatatatatatatatatatatatatatatatatatatatagagagagagagagagagagagagagacatatatatatgggttataaggttatatatgtatatccttataaccactatccctatacaaatgtctctatcacccagaaagttctctcacaccccttggcaatgactgtttccatctctgacaaccaaatgatatgatttctatcactggagaatacatttttctcaaaaaatctattagtaacattttaaaacctgtatcgactaatccttttttaatacatacatttaagagtgcaaggtggtcctggaaagttttatggtttaaaagtaaagttctgtgagctacctgatccatgttagggacaatcctatctggagatagataagatgatgaaatagcctccaaattactctccagctggtggaagctcattctccaaaattatttattcatttttattgatttctttactcatttactcactcattcaaattatttattttataatgatattgtgacaacaattcatcattttaatgaaattattttgagttcccatctgacacatacttaactggccttcaggttcacacactgaatgcaatgggactaaacaaaccatggtaatagtgactttgttaagagatgatgtcacatgtggaaaagggttctatttgcttttaccccaagtatccaacccataaaacctgagctttgagctagaaaatctccctttttgttctggccctaccctgggcaccaggctcctgcaccatgtctccttctgggttctggcccagagaagttcttggcacagttgtagcacccactcatgggcttgctggatcccagctgtgagtgacagtagcaggcccccctttgctctgactttaatttctgtgtccttctcaaataagccctatagatgctgagtggcctggacccctgccatgtgcttgggctgaaagaaaaacagcacctggggaggtgagcgggagcaaagttgaaggaaatctagaattgacagtggaaggaggagatgaggaatatcaattatggcattaagtaccagtgatagtagcaggactgtatcttatttccttaaacctctgatacttgtacagatagcagctgaccacaaccttgaagacctatttggactcaatggaaataatgcatgagtggactgtatcagttgcctctattaccacctcatactctcttggttccacctttgattccagccacagctatgatgaacagttctatgcagacactgacctgctccacagttaccgcacctcaccttcaatgtggccacgtgttcccaaaacacgctgttgctgaggcatgagacacattggtggtctgcatggcgcttgttcatgcacaatgaagtgtgagtgagttaatgtcctatggggcaattctcaaccactggagaatgagaactggtggataaaagccttggcattagtctcaggctcctagaaaggcctagtttgatagccagccacctatctatagagatggcccgattaatatgttttcctttgtattttctctgctttttgtttctctgattcagtatggatattttcacctgacctatcttccagtttatctagtcttttcagctttatctatccttctttaaaatatatatatatatatttttttttcctaaattttatgtatttcatatatttcagttctggaatttccacttcaatcttgactacagtattcagttgtctgctaaaattctccattttgtcatttcctttttgattatattaacatcagttattttaaaggcagtgtctgataacacatctctgttggtgtctatttcttttgtccgctttcttttttttaatttttggtcatgcaatgttgttttctcacacaatcaacaattcatttgaatgctaggtattgcatataaaaattacagagataatgaggctctgaatgatttcatcttcctcagaaaggattcatgtttgcttctgctggaaattgtagcagagacaggtcaccttaattgagttgatgactgagctggatcagagctgggattcagccttcctgatggcttctcaactttgctattagccattaaacttccaactagatttctggagtattttaccagcttattaaagtgtaaattacataacataatatttgcctactggaagtgtgtaatttaatgagttttgataaatttgtggagttgtgcaacaatcaccatgatctagctctaaaatatttcatcctccctacccagaaagttccttcgtgctcattttcagtcaatctctgcttctacccccagcaccaaggcctggggtctttgccaggctcctctcctactcagtagtcactgaacgtaaatgttctccaggccagaaaggtggtggatgctcctcaaagcctttggcccatcagtcctccctttcttcttagcttctcagccatcaaatgaaattgacaaatgaatttaagggaaaagtaggtttttttttttttttagatttatccgttttctatgatatccctatcttttacgctcttactgccccagtagctccaagtgccttcaaacatttatgttttatattttgttaagcttttctagttgtttttggtggaagtgttgttctgccactatccagtctattaactctgaaagtcagtttttatatttattaaagatgaagtgcaattgagttggtaggtttgtatgtttgtattatggtggaaacttcctgaagagagtgaggagtgaagcccctctagtctcccgtcacgtgtccctaataagacctctaccaccctgctgcctttgttccactactggactgagccttgacacgtttgaccctttggccacaaggaggagctgtgactctgctgagattcagagaacttggaggaaggagagacaattctctggatggcagagggttaatagaaagattgagtttatttacaacaagggaaaatgtggtctgcaaagaatgctagtcaaggctctaagtgtgagggttaaatacagactattcattttgctttgatatgcaggcgcttttgtgctatggaagagcctggactgtcagacttccactggagcgtgcatgggattagaaaggacaaggcatgagctggggagagtgggagcccacaagcagacacagatggaggaccccttcccaagaggaataagagaggctctgggtgctgggccgttgctccagctcagcccagtacagctgagccctgccatgaagtgagtctggccggccaggggtcccttggggatcttgcagagaataataactcagggaaatcttcttatgagaccaaaggtgacctacagccctgttctcctcactctaaattatcggggaattaagctagaaagaagttttttcttgttcctcttctggatggtcctctgagtttttggagcaggagctccccacagtgataggaaacccctctcctaggcctgagcaaatgtttctatcaaaacagcatcaccagactcccttccagcttccatttccaagttctttccctatctacgaagaaccgtggaagctagacttgtccagacgtcaaaggatctgatgatgccaaaacacctggagataggaaagaaggtggcattgacagactgccaggatgcacacctgaaacgcactttgttttcactacaggctcgtgtttcacattttaaaaaagcatttggaacttccctgacttcttggaaatccaaaaatacaacaaagttacattttagtagactctagtcagtcatctggcaggaaaaagcttcaggatataaataaaagtataaatagtagtatatacatatatatactaattatttatatataaccttacatgtatatatactacatacatgtatgattatgtatacatatactatacataatatagtgtatacgatacatgtactatatacaatatatactatattatatatattctgtattacatatagtatatgtatatgcatgtattaccatatatgtatatatacatgtatgtatacgcatatattactatatatgtatatatacatgtatgtatatgcatacattaccatatatgtatatatacatgtatgtatatatgtaggctggatgactagagcctacatcaaatgtaactttgttgtattcttgaatttccaagaatcaagggaaatttgaaacgtatatatccaagtatgtagtgtgtgtgtatatatatatatacatacatgtatggtaatgtatatacatgtatataatatatactacatgtaatatacatgcatatattatatatacatgtatatatatacatgtgtatattatatatacatgtatatatatacatgtgtatattatatatactacgtgtaatatacatttatatatacatgtatttatatataccactaccaaatacatgtgtatatatatactaccatacatgtgtatatatatacactatttttatatataatatatactacgatacatgttctagcatattgcctgaagtaaaagtccagccaaatagtttaaaaggaaaaccatgagccttcctgtgaagattaattttgcatttcatcttgaaatggaacaaagaaatctactgaagatagtcaattcacttctatatacggaagtctacatttatcagctttctacagtatgagcgactttcaaatctcctaaaagttacacaaatcagaatatgcagaacacacatttctaagctcaatattaaatatgtaaagtgactaacttgaacgtaagagttggacgttcagggtcctcctgtgatttcttcattcccaccatcacaaaacatctacaccttcttctcagtaacaaaaatgagatgacataaaatcatttttcatagttaataaataatacctatgcatcatgacattgcattgattttttgttaatggttgttttcaaatgactataaattaaacatttataatctatacaatagaaataataaatgtaaatattttaagtggatacatgagattttagtagccaaacaggctcacacctgtaattccagcactttgggaggccaaagtgggaggatcacttgggcccaggagttcaagaccagcctgggcaatatagggagatcctgtctctgtattttaaaaaatagttatacagaaaagtaacatgaaatagtctgcaacaggatgtcctatctgggtttgatctgaatttccatttagaaaacagacaggcactggtccatctgcgggcataggttctcatgaattgatgtgcatgttgacttttgtattttgtcaaagttaaaggagatattttgatcagagtcagagccacaagtaactagcaggaaactgagtgggatggaggttatgccatggtccttgcttccttgcagagctaagaaaccagttgtgagcaccagcgaaaagagacaaagtcagatgaaactgaaatcttcatgggactctgtgcccaagaaaaccagcttgacaggattgggcacaagagctattccttccatcctacgctgccagagcacacagcacagtttcccccatgagctcttggggagctggaggagggagatagctgtgctgggcggagtcgtattcccatgggaagtccaaaaagtagaggcagggatggaggttttccttctagaaagagtggaagattttgtttacaaacgtacccatacacatgcctttctcccgaagacccaaactttggggaattgcttaaatataacaaggaggttaaatattggacagccaaaaataggaccgaagccaatctcttctgaagtaggtgtagtcactgtgcattagtcagatattcaaatgagcaaagattcaagaggaaaaaaaaaagcattattggaaaaggaagcaaaagatcaagagaagaaaaccagcctgactctgagaggagagcccaaaagggagaggaagggaggaggtcctcagatcccgggtagggagcagggagggaggggtacaggcacaggaatgactgtcagagacacatcctggaggccacaagtccactctctcaactattcccagaaattccaaaaactcctttaaagaagccagtgcagggcatgaaagggaggagccatgctagaggagatcctgggaatgggggaatgattacaggctgtgacctcaatggcacagcacctctcagaggcagtggaaaccacagcctagtcttctcaccactgcagaccagaatcctgccctgggccttgcctggtctgcctgactcggccatgggctgcaggctcctctgctatgtggccctctgcctcctgcaagcaggtgagtcctgggcccaagtgacaagatcctgttggagtccccgagccttttcaccatgacaacaacaggaggctacctcctgggatttgcctgaattctgcttctttcctttacagatccactggacacagccgtttcccagactccaaaatacctggtcacacagatgggaaaaaaggagtctcttaaatgagaacaaaatctgggccataatgctatgtattggtataaacaggactctaagaaatttctgaagacaatgtttatctacagtaacaaggagccaattttaaatgaaacagttccaaatcgcttctcacctgactctccagacaaagctcatttaaatcttcacatcaattccctggagcttggtgactctgctgtgtatttctgtgccagcagccaagacacagccttacagagccactgcatccctgtgcacaaacctcccggctcagccaggaagctgtgggccgtgtgtgcacctgcacccaaggctccagtctccattccctgatggcctctgatggagtttcagtctgtagtacagcctctgccagtgcacctgatgtggcaattctccattttatgtacacagaactctcagaattctgtttatcagctaaagcaggggttcacaacaaagtcagcaaagtatcagagctcaactaacaaaacaggagcctgtcccatgcactgaaggtctttactgatgggagaagccatttcttgtctttgtctgctgcacatatgggtccatattttactaatgttatgattataaacacactgtaggcaaaaatggttgatgagcctaagcataaagaagaggggaaggaaagtatttctaagatcaagagacaatttggattatcagtgagtattttgtttgacagagaaatattttgagaggcgtgaaattccatggcaataggtaaactggaaagtgttgaggagaagtcagtggaggcagccttgtgcattgtcggctccttctcttcaagaagggtgaccagcaagagtttctcccaattctgatgagtgtcatcttgaactctcctcaagagcaggtgacagctggatgacaggggatattgggagacatggaaaggaatttggacacaaatccctaggcagtggtgagccactggtcctactccaagtgaaacaacatgatgaaactgatattttggtacaggaacactggtagtagtatggatcagaaaagagatagatttttgggtggcatgaatgattaggagacttctaaataccctccatgaaagactagaaatcgtttatgtaaagcattgtggacgacataggcttgaggctctggattatgttatctcttggaaagagtgttgggttttattctgggacggttgaatgtaggacttgctaagttctatttcagctttgcccttcctcttagggagccccagcctgtggtcatcattgctagtgcatggccttcccagggtcttagtgggaatcacagtgtattcgccacatcactccactgcaactgggtctgaatgccctggctcttctgaaatctctgcccatgtcttcagccttccagaacttgttctctgctcagccttctggtctcccacccttctgcatacacaatttaggatctgactcaggaaaaaaaagggggttttcttacatataatttttgggttcctttttagtactctgtgtcctaaatcccacgtgtcttggagtcagttatgtcctatcttcagtcacatatactactgctatttggtacagacatgtttacttgactttacttcacgtttgccattccactcttcactcttctttcttgcaattcagacagtcctgaggtcattttccttcttcagatccatcccatattcagatgacttaaaatcacctgtcacccatgctgtgctttgagaaatgtttatgttagctactgacatcagggcagtcaagcctctcattgtcattgttattcaaggtaggttgaattccattaaaaaataaaaatccttgaaatttggtttacttattgggaaccacacaatgatatcaaattctttttaattcaattttttttcttttgtggtggaagggccaagaattgtttccttgctgaagcagactcctatcataataatttgaatactaacaacgttattttaatactaacaacgttaacctttaaatcagattgatgttaggttcttatctaagaatgaaatatatccaaccgtagcaggttgaaggtctctcatatatgtaacctgttcaggacgagataattcaaccactttccttaaactctgatctaaatgcctttacattctttgttttaagggccacataaaaatactctgaaacaatttacacatcagaaaaatgctaatactttcctcctggcccagcacatctccaagttaaaaaaatctctaaattctcaacccatagtttaatcatggtaactcccttctacccccaacatagatttttatgtaactgatttgtaactacaaccctaaccctacaatcacaattgtcattacaaaatactaacaaacatgtgctattaccaatagatggttaaaatcacttagggattatgaatcatgtcattcttgtatttatttgtacttattctttgtgtttatttattatgtcagcttcaagctgatttccctttcccttgctccccacaccttttgttgttccttttcagcatcctgtgtatgttagctctaagcccagccaagccccatgccctccacttcagggacagagggtggctcatccctttcgtgctccctcagctccctccccagtgcctggtggctggttggcatcacagccatgcccttgaataatgggcgctggtccacactgcttctgtggtcatgcagtcatcctccctccacagagctgggccaaaaagggctccactgcccttaggcattgagggaatggacattctgagtggcactgtcttgtgtgatcccacaggacagaaggagattccatcaatgggagtagtctgttgctgagagggatcctgaaagatagggggacagagacacactgggaggatccacataaagaggaagcagctgagaacaaaggagcccctgccagaggaatatccttggggagtaaaaagctgactctgccctttctccccagcccattcatcccagcccagacaattcaaatctaccttctatcaggacctagaaaggatgtaaaacggctgggtataaatatcccctgggtctggggaaactgtcaggagcagtgacatcacaggaaaaaccaccaaccaaggccaaggagaccagagcccagcacctcacccagaggaccccagtcagaggccccatctcagacccgaggctagcatgggctgcaggctgctctgctgtgcggttctctgtctcctgggagcgggtgagttgggttcacatcagctgtccttgaattccaagctttttccttgtgatttcagcaacaagcctcctcctgggctctgcctgaattttgtccctttccccccacagtccccatggaaacgggagttacgcagacaccaagacacctggtcatgggaatgacaaataagaagtctttgaaatgtgaacaacatctgggtcataacgctatgtattggtacaagcaaagtgctaagaagccactggagctcatgtttgtctacagtcttgaagaacgggttgaaaacaacagtgtgccaagtcgcttctcacctgaatgccccaacagctctcacttattccttcacctacacaccctgcagccagaagactcggccctgtatctctgcgccagcagccaagacacagccttgcagagtcaccgctttcctgtgcagaaaccttaggggccctccaggaagctgtgggggccaccaaagccttcggtgaacatttcctgcaagagccccgacagaagattcagaacatcatagcacctgctcattcatccatgtggcaacgttacatcctatgctcatatttagagtgtgggttttctttagcgtgtgactctgccctgttaactgatttgaaaaatgataaacacattcagatctagtctttttaaaatccctttttaaattgtaaaataaagcaagcatgctataaggggattgtttggtttaagatgttataagaccctctcaacaaccacctgcgtcactacagagtcataccctgcactggaccacagagtgtcctgtgaggagccaagttcttctgacactttatgcctggtggtctccatgcctctctttctcagtaaccaggggtccattctgtcataggttgctgacacccaaggtcaagcagcactgggtttgggggaatcatagaggcaacttccaggcaagggtcccagggcgggagccagctggagagaacagtagacaactgagcttttggggaatgggtttgagaaatatctgtcaacccaattctattattctatcttccatcttgtctcttctctattgttcttatttaaactccaagctagagcgtaaattccagccctgatcaaagctccatatccctcacagacaccttctctgaaccccgcaggcagcaaatgtgcctctgtccactcccatttgtgtgggcggtaagccacccaagtcctgaggcaagagaccgagggcacgagctgttccagtataataaagaaaatatataaaataagaatagttatactagtaatagattatagatatgatggtatacaaatattatgaataatcagtttgtagcattactcttcattccaatattataataatccttgctctacaattataacctaggaaaaaccaggccatacagagataggagctgaaggggcacggtgagaagtgatcagaagacaagagtgtgagccctctgtcatgcccagacagggcccctagagggctccttggccttgtggtaaccccagagcctgggaggaagccccttgcctagaggaccttggtctagccttagcgtcagtgcctagaaaaagcacccattacttagccgaccaggaaagggagtctccctttccccgggggagttagagaagatattgcgtgtggctaggcttggtgctcacgcctgtaatcccaacactttggaaggctgaggtgggtggatcacgaggtcaggaggtcaagacgagtctggccaacatagtgaaaccctatctctactaaaaatacaaacaattagcgggttgtggtggtgtgtgcctgtaatcccagctacttgggaggctgaggcaggagaatcacgtgaacccgggaggcagaggttgctgtgagctgagatcttgtcattgcactccagtctgggtgacagcgtgagactccacctcaggaaaaaaaaaaaaaaaaacgataccgtatgtgtgaatgtgtgtgtgcctatgtgtgtgagtgcgtgcatgtgtgtgcatggatgtgtgtgtgcatgtgcatgtgtgtggatggtgtggatgtgtgtgtgtgtgtgtacgtgtacatgtgtgtgtgttcttgtggaaactcacccacatggacccaggttctctgggtggcattactgagaggtgctgggtcactggtagagctcataggcagttctggggagtgacaggaaatgtcacagccaattgaatctgcctaagttacagctgatagggttgtttatttcaagattttgtaagttcagaaatagatttataaaaaatccaagaattttctttctaaaatgcactacctaaaacttgctgataattcatttaaatacaaaatatgagaacatgggtctgattaatcaaaaggaacgattgaatacagtttccaggatagggctgtttgatatcttcacactgtttaaatctgtggcctgtatttttcaggctcctctcgtccatcctagcatactaattgcaatgctgtaacattgtttattttgcaatcaaaatgttggttaatgcttgcttttgctagctaaaggtgaactttcagatcaaccctatattggcccttctgggcaagtatacagagggtgtgtgtgagagggtggggattgcaggagtgagggcagggcatctctcttccttctctggacaatcttgagttcatcaggccaggtgtgaatccgtgagactgtggatctttggccacttggaggcgctgtagctccacgatgctgtaagaaaccctgggcagggctggagagtggccaggagaagagggttgaaggggatgcctggctgcctgctgccatcaggggccctttgggattccctgagtgggcctggacatgtggaattaagcacagacccctcactgccaaagaagggtagggatgctagagtcctcagtttgtaccaaggagggagggtgtctgcctctgcgtgggcagtggagggtgaaggggctggggtggcaagggctgggaataagtgtcaggcctgggacagggaggacacaggaaaggcaggtgtgatggggcatgtgggggctgtgctccacccgctccacctttagtttcagggctgtgtaagacaggaagatctcatggagtagcaaagcctgggccctgccaatggttgcagagtgcaggggtggccggcagagggagtaactgggaaaggccagttccccaaggaaatgccagaaactttcctgccccattcagaaagtgactgtgaggcgggtgcttccagccagaggggctcaggccctgctgagctgacagcgttttctttcccagacattctctgctgcttctatatgtgatctgttttaatgctcactgaaatcacaagtatttattattttgactgtttttgtatctgagggaaggcagctgtccctggtctcatatttaataactggctgtcgtgtgctctccaacacctctccaccctccctactcagtacatctgtcccgtcatctggcttcctctctccaggtcccattagcaggaggggaaggtcatgcctcctatgtgaccattagaacctcttccttgacaagtccaagaaacacgtgacttccgggccaagcatatccattcattcttcattgcagccaaaagaaagatgaaattttctaccctgtagactttctgtcactaatgcaatgtaccttgaggaaaagtaacatgaataactgttattcattagttaatttcttttatatcctttattcaataaagtctttgagaccctttctttgtatattttatgacataaaataaaaaatgggaaaaattgtttaataacaaatatttcttactttttagagtattaaggcttaaatttattttgttttattttagttttatattcaaagtactttactcagtttctgaattacaaaaatttccctttctttctctgtctctctttagctacctccctcattttttttgccagcattttaatttaatgtggtaggaacatgtaacatgagatctgtattttaaatagatttttaagtgtacaatacagtattgtaatctacaggtacaaggttgtacagaagctctctagctcttacttatcttgctgaactgaaattttatacctgctgacagcaactccccattttctccattcccagcccatggatatcaccatttttatctttgctttcatgagtttggcttttaggtagcctgctataagcagaatcagggagtatttgtctttctgtgccaggcttagtcacttatcacagtgtcctgcagctttatccatgttgtcacgagtgacggggttttcttctttttaatgcttaataatataccattgtatgaatataccacatttatggactttgactgtttctatgaaactgtctgtcacataagtgggagagtcatttgcagaactgaaagcttggattacatgaatgggcattcacatttcaattctactccatgggcaagacggagaataaaataatgattccatcatttactcttactttgctatacacaaaatagaagtcctgcttttgggaagtttcagttatttagaaattcgactgtcagaagaaaaccctaagacacaaatgcttttctcattgtacacgtgagagaattggctcattggttaaataacctgaccaaattaaatagctattaggatgcagtactgatcctccaaccctgcccagtctaagttccatgtttatagctctatgctataaaatatttcataaagctgccaacctagaaaacattggaaagttttcccctacatcccctttaggcctgctggctctaatagcatcatagtcagagatcagtttaccctggagatggtggagtagggaaagaagtctgaagaggcaccatgactccccgccctgactcccactctaacaccagctcatcaagacctgaggccagttcttaacgggttaacttaagtttttcagtttttttttacctataaaatgagactactactgtccatcagcagagttctagataacctttaatggcataaaatatctagcatatagtagaagcctagctattttgatttcctttgctgatctcagacaacctcgtccaccacaccaatgtgcaaagacagatatggacacattctgccaagaaatcttaggttgagggctcagaagtcacagaaatggaaatatatatgcctgataattcatctgataaaattaactagaggatgtagcatacatatctcctcaggcatttaaaaatcaacattattgatctataaagtatatgaagttaacaggacaccttttaaatgaacatatctgtgatttttgagcaacatatatctatatatgcaaccccacctctatgaagatgtatctgcatcacccagaaagtccctcactcccctctgcaatgcctctgtctgtcccagcaaccaatgatgtgacttctatcactggagagtcgttttgttggcaaatatttttaatgcaaatgtcaaacctcttctgaatagtcctgttgaatacatagctaaatcatcaaggcagggaggagttcctgggaggttttatggttttagaagtggttgaagctaggtgagctacctgacccatggtagggacaattctatctggagatggatgttgtgccgaaataacctcaaaaggtcttttcggctggtagaagctgattctacaaaatttattcattttcattcgtttattttctcgtcaattcattcaatcaaacaattttatgttacgttttgacaaaagttaatcatctttaaggaaattattttgagttcccatcagacacacatgcagctgggctttgtgttcacacagtgagcatgctggggtcaagcaaaccatgatcacagtgacttcattgacagatgatgtcttattgggagaagggttctctttgacttgaccccatgtgtccaacccataaaacctgagccttaggctaaaatccatcttccttttcttaccctgccttgggcaccaggccactgtgctgtgtgtttctctgtctcctgaagcagagtcctgggcgcagatttggaacctattcgtgggcttgtttgatcccagctgtgactttcagtaccagggggtcctttgctgtgacttgaatttgtgttttctttactcttaagttccacagatgctgagtgacccagaccctggtcatgctcttgtgctgaaaggaaaccagcacacggggaggtgagcagtatatgaaacaaaatcatgtatttacaaccagtggcaagacttactggcaggtgctttgttcaaacactgttaggaatttgaagatcatggcagtagaatgtgaaaccaagtgcagggtccttccaaatgcaggcctctgtgcaccaaagatagacttttggagctcattttttttaaacaaaaacggaaacaacactctatgttcatggctgtaggccatgcgagaatatttttttaaattttaatttaatttttatttttccatatattattggggtacaggtggtatttggttatatgagtaagtttttagtgatgacttgcaagactttggtgaacccaccatctgagcagtatacactgcaccatatttgtagtcttttatccctcaccccctcctgctgtttccccaacacttccccaaagtccgttgtatcattcttatgcctttgtgacctcatagcttcgctcccaaatatcggtgagaacatgctatgtttggttttacatttctgagttacttcacttagaataatagtctcccatctcatccaggtagatcattccaaatgctgtttattcattcctttttatggctgtgtagtatttcatcatacatatatgatatatatatatgatatatatatgatatatatatcatatatatcatatatatatgatatatatatatatcacagtttctttatccactcgttgattgatgggcatttgggttggttcctttttctttatcactaaattaatggcagcaataaatccagaacattccttattaccctaaagtcagccctgtctcccaaactcccttacacatcaggacacctttgtgcccatagatcatgggcagtgcttggcagccaccactgtgcacacagagagggtagtcagtagcgttaggtggttctgcctgctggggtctcaccccaggaacagaaagcaggagccctgggtggagctgaaagtgctcatctgggtttgtcaggagtcccatctgtcagtgaattcacaagaaacagaacaaaacaactcttccaatgttgatgagcctgcccctgggatttggaaagctaataacagagaaaaccaatatagacaaaagattttaaacaggactatcggattatggtcatttaagcaaattagaaaaggatacttgaaggagtatttgggacacaggaatcaaaaacaccaggaagacatgaggagtttttccaagattgtagactatagcaatacttagataaccaataccagtgtattaatgagtaattattagtattattattttgagatggagtcgcactctatcatccaggctggaatgcagtggcatgatctcggcttactgcaacctccgcctccctggttcaagaattctggtgcctccgcctcccgagtagctgggactataggtgcacgtcaggatgcctggataatttctatatttttagtacagatgggatttcaccatgttggtcaggctggtctccaactcctggcctgaagtgatctgctctcttcagcctcccaaagggctaggattacaggcatgggccactatgcacagccaagtaatttgtatcatcatgggaataaaaaatatacattgagttacaaactaattaccaaaagatatttaaaaaatggtagacttgcatcgattcagacaaaggcattcttcccatccaaactgttcactggtgcattgatcttgaatttgaccatctggggaaggggcgtggcctctcctgacagcaaggctctggggcccaggcagggagaatgaggtctcagaatgacgcccttgaaagacgtgttcccttttcaccaatgcacagacccagaggacccctccatcctgcagttcctgccatgagcctcgggctcctgtgctgtggggtcttttctctcctgtgggcaggtgggtcctgggcggggccccttgtgtggatttcaaggcccatcccctttccactggagctgtagcatcagctttgtccttctctgcaggtccagtgaatgctggtgtcactcagaccccaaaattccgggtcctgaagacaggacagagcatgacactgctgtgtgcccaggatatgaaccatgaatacatgtactggtatcgacaagacccaggcatggggctgaggctgattcattactcagttggtgagggtacaactgccaaaggagaggtccctgatggctacaatgtctccagattaaaaaaacagaatttcctgctggggttggagtcggctgctccctcccaaacatctgtgtacttctgtgccagcagttactccacagtgctgcacggctgtctcctctctgcacagaaaggcaagggaaggtgctgccctcctccgcagcacagattcagcgatgcccttggtcctagcaccgaaaactttggagccccaatgggcccgggcggtgcgagccttcatctgtgccaggtgcctctgcagtcggtctcggccaggcctggatcggtcccaggacctcagatgtcttccttgttgccctccggtctttcctctgaggtgtccttttgggctagtgccaggggtttcccagctctgactttcctagtcattcacctgagtctgaggcctcctaggtgaaataggatttgtatttcagatccatctagactcccgtctctacctgggtaccacgtgctttcctctctctatgatttttcctcatgttgaaccctacggtggtctcagctgcagcctgcatttcctatattcacagtcgccctccaaggccttgctgggtttctcctccccgacctccctgcccttctctactccagccatgttgagagactccaaagtccatttcctgtgccctgggctggagccttcctttctgtagtggtcaacacctacctgtgcttcagatctcagcatcatcagccctagtgataatcaccattatgcttcccttggctcccagctgaggtcagtttccctctcataatctctcatggtatcatgtgtctgttaatcagtagaatttagcacagttggaatcttccaagtactttaaaccccatgaaggccaaggctatgcctgggttataaatcagcagctgagcctggcacaaggggagatgcatttcagagaatggatgagtcagtgatggagtgagtgatgagtggatggatgaatccataacaggagcaccctagatccattttacccttgcggagatctggctgtaagtacaagaactcttacccttttgattgctgggctacgggaggtccttgaaattaatggggagtcgctatcatgggcggccccaccttggtcaaagattcctcctgagtctgcagcaccagacctcctccaggtctctgtgctctccttcagactctttcccacaacaactctacacagatcagagatccctttccagaaacccatgcatagagttgtgttattttggaaccacttctggtaccaaaaactccattaggtttacatcaataaaacagaatcactaaaagtactatggagaggaggatttatgacaggagttagaccttatataaatgtagggggagctgaggaagagaaggtctggaggggagatatagctaggcagatttaattcatgattaatgtgaccgtgacctcttattctactcaaaggagagcatatgatttcaacaaaaaaatattgattttcctttgtaaaagtttgatccaaatagtgagctatttttgtcccataattgtcttaagttggctaatggtggaacaaatccgactttgatttccttgaaagaacaggaaaaaaaccgtcattcatatacagtcttacaggctctattttatggaggaagcataataaataggaaagagaaaatcagaattctcttctggaacctacattgggactgtcctcagagcaggttgtgatgtgaggaatcaaatctacaggggtatttcgcagcttggagcgcagcagactgttcccgaccccatgcatttgggggtgagaccagagacagttgaaaaactatggaatcttgacattctgcactctcaagcctggcctctccctgaatttcacagattaacatcagaccaatttattccgactattaaaagtattagaacaaaaaccaaggaggaccagtgagcagaagcaataaaccattaaaatggacatcctaaagatttaaaattttgccatcataagatgtgaacgtttgaagagctgcatttaaatgaatacaagaagggactgaaacaagaatacacacaaaaaagagacggcccgaaaccatcaaaaaacattaaagaaataatcaaatagaatgtctagaaatcattacgattactccacaaaacaaaatggaagctaaacagcagattcaatgcttctaaagagattgttagcaatatcaaaggaggatctcaagaaatcacctagaatgcagcacagaaaattaaatgtaaaatataaaaaaagtgaaggaacaaggaaaaaatgaagtttctagaatattagaaagcatataatgttttattgaaacttttcttactttcttgtatataactgacgtttcagaaagagaaaataaggcaaatgatctgaggtgattgtgtatgtgatgctagctgagaatgttcctgagatgtttgaggaccgaaatcctcgttcaagaattcagatgaattgcaagacaagtaggcaggtccctgtgaaactgcagaccacaaatgacaaagaaaagattttaacagcagtcaaaagggaaagataaatatcctccaggggaatagaaagaaagaaataatcaaagtcaagaaagaggattaaaaataactgttaaatcagaattgagattgataaaaaatacctacaggacaggacaagaaaatatggaaaaccaaaataattctgtgagtttgccaccaaagtatcttttcagagttatagttaacaagggtgggaaatgatcccagaagaaatgtatgagggcagtttgtgagggaacccatgtgatgggacaatcccgttgggcacatgtgagtgggggaatggaggaggctggggcatgaatggggatggcagaggggaccctgacttggaggaaagacaatgagctcatcccatggtgcctggtgttgggggcactgttggcacatcctacagaacgtgctcagcagacagaggagcggctgtgggatgagaaggtgaactcggagatgcagcgtgaggcctccaagtccagacagcatgggagcccaaagcgatgtcccatgcaataacgttgtttacaaggagcttataaatatttaaagtagtcacccaagtgtggtctaatataaatcctgtgttcctgaggtcatgcagattgagagaggaagtgatgtcactgtgggaacttccgtgtaaggacggggcgtccctcctcctctgctcctgctcacagtgatcctgatctggtaaagctcccatcctgccctgaccctgccatgggcaccaggctcctcttctgggtggccttctgtctcctgggggcaggtgagtcctcagacaccaaccattctcattgtgtgtgtgtgtgtgtgtgtgtgtgtgtgtgtgtgtgtgtgtgtgtaggggtgggctgtgtgcattcgtgtgatgactaaaattattttcctcattctgttcccaactttgtctccacagatcacacaggagctggagtctcccagtcccccagtaacaaggtcacagagaagggaaaggatgtagagctcaggtgtgatccaatttcaggtcatactgccctttactggtaccgacagagcctggggcagggcctggagtttttaatttacttccaaggcaacagtgcaccagacaaatcagggctgcccagtgatcgcttctctgcagagaggactgggggatccgtctccactctgacgatccagcgcacacagcaggaggactcggccgtgtatctctgtgccagcagcttagccacagcatggcacagtcgcctccttcctgctcataaacctcatccttctctctccttgcagctcctagacacccttaacagaggcttctctttgcttctccctccccatgggaaacaagtagatttggacctcagcttgtcctttgggtagaaagagaccacagatttacccttaagacacagtaactgtaaatgtgggtggtggaagcaatcgtggcccaccgggctattggagtcctcagagccagctcattgctctaaggcaagcactgggtgtcttagccttggccttcagggctgggacacacagtcttctttggggcctgggaggttgctgcccacatagagaagcttcgggcatggctgaggaacaggtgtcttcccctacatgtgttggggcatctgcaaggtctgaagcttcatccacaagaacattctttcttctgaagcctcttctgttacattggaagttttctgcaatacaagagcaaaccattcttcctgtttgatttaaaagtctttgtggcttttgtggccattacttggtgaatacagccaagataacaataagacttcgtttcttctgcctagtgtaagcaatgcgagttctttattttgttttcatttaccactgctcctgtcctgagagactgaagcatgcgtccactactgctccagtatcaacttggttccctaggaaatcgggtttctagaacctgaatgctgacaaataagagttgtgtacatgtataccatgcaacctgcgtttaaaaatgtatgtacatggtgaagtgactaaatctagctaattaacatatgcagtacctcaatccttatcctttcctgtggtgagaatacttgaaatgtactctgttagcaatattccagaatacaatccactgttactaactttagtcactgtgttgtacaatagatcttttgaacttcttcctcctatttgagtgaaattttgtatcctttaaccaacatctccccagcaccccatctccatcccaacctctggtaattgctgctctagtcttttgatttgaaataatttccctgaggtctttaacttgagaagatggagttttaaaaacaataatgcttatattacttttgttttgtttgttattttacatattgcaatatagtgtttgttgcaaatataaatgagtatactgtaataaaaattcttcacctctctttgagtgaagctacatttcacatatatgaaatttcaagctgtggtcagagctgacatgattatggatcatgggtttctgggagtcctcagagacagccctatacacaaaggttaagatagattatcccagacccagccaggacagaggtgccctgagtcctgcagagctggttggggaattatagttccctaaattcacttatcagaaattgtggtagctcagataccaaatttctttctctagcaaatgatgatcgttggcagggattgttctgaatccattctaattgttctatcaacagatcattccttttttagttgccctgtgtgtcctgggagtgaataagtcccaggcacagatgggaatttcctgaccttaggatgctgttccaaggacttccttgctagaccctgtctccagcttttcccacctttatcctcatgacccctaagacaaatggtcctaataatggaccagctctgaaacttaagattgaacagaacacaaaccacaactgtaaacactgatgctgaaagaagtggtaaaaaaaggtgagcagggtttcccacctgcactgagagttaacatacaaggacagcaaagggaaggttttattaataagcaaacaagaagcaataaaggccctgctccattgaatgtaactaatctctttgagttaaaaaaggagcacgtcaataaaagtatttcaaatcaaagtctagaagtttccaaaccagccagcacaaccctgagagctctgtgctctcagcaacttcagagaactcatcaatcctttctgggctcaaacttccctttgtccactcgaagacccagggtcacactctcatcctattacaaaaacaatgggctttgctatcgttgctgatgcctcatttctaggagttgagtattaagcactgaagagctttgaaagttgggcttctgagtcaattgatgtgctggagccaacttttctgactcacgagagacaaataggcacactcttcccagctccccattcagtgaagccatgttgacagcttgaaatccaccatagtgcctgtgttgatacaacagaaattggtaagtactactaggcatgtgcccacctccacagacactcagtgtaccagcacatcactggaatgttttctgagacagtgatgtccctgttatgtcgtcatgtcttgtggggccaaaaggactccgaattcacctcctctctgttcttgcttttagaaaccataatctaaaataacctcacctgacactatttctattcaatctccaaattccctcactttgtgggtctgtgtctcctgtaagcatgtcagtccacaacttgacaactattttgaatgtagctaaaggatacagtgaaccagtttattattttcaaattatccttccttgcatggaatatgtagatgctgcagtcattgggaacagagatggggcaagcagcagctctgggccgtgaaccactttagagtcagacaattcttcagtggcacagacacacccttgggcatggactaatttgctttggaaactaagcagttccacaccagtcaccaatgaccttggatctatttccagctgagaggtcaaaaagatcacactacctaaatgtcctcctctccaatatatagtacagcccccatccatctcagtccctggaggtcatccagagctcccagagaatctctgctctggggcagaatcaccacgtctcctcctcgccagctccccacaggctccagcaaggctttcctgccaggtgcagggcatgggtgtggctctgctgtctctcaggtagagggaggccatacgatgatgtttgtataagaaggattgggtttcagaggttcctctcaaatacttgacataattttatttgctttttgtttcactctacaatgtcaccatttaggagagcaattattttggttgcattatttatggaactttgaaagatttttgtggttaaattaatttaagaaatcattcccattgtgcatcttttctgttcagatataatctgaggcagtgaaagaaacagcaatgattctgaaagcagtcacttacatgccctctgataaaggcattgttcaaggttcattactcacacctaactttcagtctactggaaatgaaaggcacagagttgggggcctgtgatcaagccacaagagaggactataccagctactctgggacttcagggcacgaagagatgacctcccctttagactctgctcaacgacgaaggaatgagttggtccatgggaacctgaggagcagaaattccgggagcctttaactgggacggagcaaggactgtagagcaagtcattggaaagggaaatggttcatctggtctgtcacagaagatagtggatagaaaggtcatataatccccagttccctggctgatttgcttccttatgatactattttgcagcagcgtaccgtcatctcacaccactcctctacctcttccagaatcatctcctccctctctgctgctcagatcagcacatgtgcattgcacaagctattcttttactgtagcagaccttttgctggtcttaattatatccatccttattttcccattagatactgctccctccatgattgcttattgccttgcaagggatcctttaccccgcgcccccagacagagtctcactctgtcgcccaggctggagtgcagtggcgcaatctcggctcactacaagctctgccttccgggttcacgccattctcctgcctcagcctcccgagtagcgagtagctgggactacaggcgcccgccaccacgcccggatgattttctgtattttttagtatagagacggggtttcaccgtgttagccaggatggtctctatctcctgacctcgtgatccgcccgccttggcctcccaaagtgctgggattgcaggcagaagccactacgcctgaccaagggatcctattttttatatcccagttttactttttattaacacatatctgaccccatcttgaaggtaatcacattatctgcctagacttttgctaatctttatttttatggtaccattgtcatttggggggacatatttgtttatctttggtaatggaaatgaaattacgttacacttcactttctgtgttttcttcctactttagggtaaatattatttccttctattcttcctattctattcctctctctttagatagttttaagggagaaaatgtcagtgagactgtaactgcagctatggggtaagaattatttagaatgagggtgggatattaagcttgataactcaaaggaacagtcagggttaaaactaatgttgggatcggggttcagagaagttgcttgtaaaacctgcaggatggcacttctggaatagtctcccggctccctctgcagacacttcccagcatcccttgggccatttcccttgcaaaagcaatgatgaaatttcacttattggccacaagatggcactgtggtccactgggctctaagagactctggggagagcctgggagagcagcctaggaaggaaagggttaagaaaaatcagggctggcatccaatatcatgcagatgttgcagcagttttcagttattgctagactacctacagttatacaacatacaggaaatacctctaatctttaatgagatccacagttgaagaagtttggcctggcagccttggtgtcaagggcaggtgcagacagaggagcaactatctcagaggaaaatgggaaagtgaggggtgggctgtggcttaagcccagtgcgtctctgctgcaccccgtcttccctgcagctcttaccaggcaacagcctccatgagagtaggtggatcctgcctgagcccagtcagaatgccccggactaggtgaactctgtaggcatggggagtaacacaacaggcccacctttcacacgttttttttttttttttttttttttttttttttttttttttttttttttttgagacggagtctcgctctgtcgcccaggctggagtgcagtggcgcgatctcggctcactgcaagctccgcctcccgggttcacgccattctcctgcctcagcctcccgagtagctgggactacaggcgcccgccaccacgcccggctaattttttgtatttttagtagagacggggtttcaccgtgttagccaggatggtctcgatctcctgacctcgtgatccgcccgcctcggcctcccaaagtgctgggattacaggcgtgagccaccgcgcccggcctcacacgtttccaaagtctgggctccaagcctttttttcccctttcctctgcagagtcctgccacttctgaagccttgtcctcactttctgcctgcctctcccacagcccccatggaggcagggatcagccagataccaagatatcacagacacacagggaaaaagatcatcctgaaatatgctcagattaggaaccattattcagtgttctgttatcaataagaccaagaataggggctgaggctgatccattattcaggtagtattggcagcatgaccaaaggcggtgccaaggaagggtacaatgtctctggaaacaagctcaagcattttccctcaaccctggagtctactagcaccagccagacctctgtacctctgtggcagtgcatccgcagccctgcacagccaactgctctctgcacaaaaaagggcagccacaggctggaggtgggcactccttcccaaggcctctatctcaaccaggagataaagatgccttttttgaagctcttctcagatgtcccagcaatgggctcccagtctgtgcatcctcctgcagcaggaacttcagtgtgagctgaggtccatcactgtgatgtggatgcacgaatgcaaacaacacttaatgttattttactcaattcagaatattctggcagttgcgtaaaataggaatagtagctcccaaaatgaaatttgtgtctcattttctttatgagagaaaagaaaaaaaaacagaaagcagctgggcagctttaacctgcttgagtgatctgggattctacaagtctacaagtggtacaaagaacatcaccttggcctggattccaatggataccaaacactacaaaaagtattgaaaacaatttataaaagacctaagtaaacaatctacttataggaaatgttagtagatccatcgcatagtgccattatacctgacgatgatcaactagtgaaattattatgtagagattatcagctaagcctctacttattacctctgagcatagagcagtgtttgagccttctgagggtatcttaaggaaggaacttaattcttaccattactttggcttggattaaaatccatgagcttgtcgtttttattgtaaaatattacagaataataatgatcaaacgttttattttcctctagcgtttattcctctttagaacgtgcaggttgaagctcacacacatgagcagggttccttaagatgagatccattaactccaggactgggaggtacacagctggccttcacaggaagtgcaaaccccaaatgcagtgacccctcctgtgtctacgctgtgcccaatacccctctgtgaggctgccataaaggcgggcaggctccttgcttggcaaaaaaatcagttcaccaattggccactttgctgaagaccagaataaaaggctaaattgtgagaatgatgaatgcccaattcccaaattgtgaaatgtgtaacagttcacgattcttggaataatttcaaccatgtgtggtttgttttttttttaagtttttctttgtcgacagctttctttcggccactgatcctcagttgtttcccagccgccttgtcagctgatctcattttgatgctaatttttttttttttttgctagctttgggattatttgttcttgttttactatgtcctctaagtgtggtggtaggttgctaatgtgagatctctctaacttgtttatgtgggtgtttcgttctgtaaacaatactcctaacactgctatagctgtgtcccagagattctagtatatttaatcttggttttcattagtgccaaagaatgtcttgttttctaccttcattttatggcttacccaagtcattcactagcagattgtttaatttccatgtaattgtatgattttgagagatcttataactcttgatttctattttttttgtgctgtggtccaagagtatggttgacatgatttcagttttttttataatttgtttacaattagtctgtgtccaatcatgtggttgatttcagagtatgtgccatgtgtagatgagaagaatgtgtattatgctgttattgggtggagtgttctgtagatgtctgttaggaccacttagtcaaatgttgagtttagtttatgaatatctttgttagttttctgccttgacaatctaatactgagtgttgaactcttccagtattgttgtgtggttttctacgtgtctgtaggtctctaagaacttgttttatgaatccagctgaaccagtgttgggtacctatatatttaggatagtgaggtcttcttgttgaattgggccctttatcattatgcaatgcccttctttgtcatttctgataattgttggtttaaagtttgtattgcctgaaattagaatagcaacttctgctcttttttgtttcccattggcttggtcatttttctccatcgctttatgttgagcctatgggagttgcatatgagatgggtctcccgaagacagcatacagttcagtgtttcacttgtctatacaactggacgctctttttttttttttttttttttttttttgagatggagtctcgctctgtcgcccaggctggagtgcagtggcgcgatcttggctcactgcaagctccgcctcctgggttcacgccattctccggcttcagcctcccgagtagctgggactacaagtgcccgccaccacgcccagctaattttttgtattttagtagagacggggtttcaccgtgttagcccggatggtcttgatctcctgacctggtgatccgcccgccttggcctcccacagtgctgggattacaggcgtgagccacggcgcccggcagctcttttaataataaacgacttttatgtgctgtgtttagcctgtttacattcaaggttaatattaatacgtgtagatatgatcctgccattgtgttcttgcttggttgttatgcagacttgattgtgtagttgctttataatgtcaatggtctatgtacttgagtgtgttttttggtggctgttagtgatctttcatttctatgtttaggactcccttcaggacctcttgtaaggcaggtctggtagtaacaaattccttgaacatttgcttgtctgaagggatcttatttctcctttccttatgaagcttagtttggctggatatgaaatatatagggatactggttggaatttcatgtctttaagaatgttgaatattggctcccaattgtttctgccttgtaaagtttctcctgaaaaacctgctgttagtctgatgggattccctttgtaggtgacctgccttttctttctagctgactttaatattttttctttcatgttgaccttggagaatctgatgactatgtgtcttgggggtggttgtcttttatggtatctcataagaattctccgtgtttcctgaatttgaatattaaactctctagcaaggttagggaattttttgtgctcaatatcctccaatatgttttcaatgttgcttactctctctccctctctttcagggacatcaatgagtcataggtttggtctttttacataatcccatatttctcagaggtttacttcattcatttttcttttttttccattctttttttgtctgactgaattgattcaaaaataagtgttcaagctctgagattattttctcattgattatgctgttaatacttctgattacattatgacattgttgaggttagtttttcagctctatcagatcaattttgttctttcataaaatagctatttcatttttcagctaatgtgtcattttattggattcatcagattccttagattgactttcagctttcttccgaatcttgatagtgtttgtttctaacctgtttctgaattctatgtctatcatttcagccgcttcagcctggttaagaatcattgttgggaagctagtgtgttcatttggtgctaagaaggcactctgactttttaagttgccagagttctttcactggttctttctcatctctgtggtctgaggtttctttaatcttttaagctgatgtcttttggaagggttttttgcttttatattctatgcccttgagggtttcactgttacataagctgggttcaggagactggcttcatttatggaatatttcagggggctaagattcagctcagtatgtctgggctgcgtgttgtaggcctgtggtgctggaattaagcccagagctttggtttttgaccccttaaggttaaagcacctgctacaccagaggggctgaggcgttcccaattccactggcaacaacactgcaatggggaatgccagccaaagtactttttccaaatggtggcattggggtacatgctcagaagcatgtgccaataatggcaatgtggcagtttccatacatatgtttgtgctagcttttttattattatatagtaaacttctttgcctctttttatagttattgtcttgaaatatattttatctgatatagatatagctactcctgatcttttctggttttcacgtgcatgaaacatctttttgttatctcttcactttcaatctatatgtctttttaggggaggtgtgtttcttgtaagtgacagatcattgggtcttatttttatattcattcagctactctatgtcctttgattggtgagtttagatcatttacattcaatgttattgttgataactaagtactggctcctgccatgtatttgttttctggttgttttgtggtcttctcttcatttgtttcttctttcctgtcttctttttagtaaaggtgattttccctgataacgtgttttcatttcttgtttgttatttttgtgtatctgttgtatgtgtttgtatttaaagttactacgttgcatatgtttgtatttaaaattactatgcatgaggcttgcaaataatatcttatactgatgacaacataacactgattgcctaagcaaacaaaccaaaaaaaaacagagaaaactagtaaaaatcttatattttaacattgtccacctacctttcaactttgtgtcatttctatttatatcttaggcactgtctatgtcttgaaaagctgtagtttttttttttaattggttcatcttttagtctttataagtagtttacacgccgtaatcacagtattataatattgtgtttttcttcgcactattatcagttagttttgcacctgcagataatttcttatttctcattaatgttcttttctttcacgctgaaaaattatcttttgcatttcttctaggacaggtctggtgttgaggaagtccctcatattttgtttgtctggggaagtcattatttccctttcatgtttgaagggtattttcactgagtacactattctagtattaacgtttttttttttttagcattttaaatatgtcatgctgctctctcatgacctgtaagatttgcactgaaaaagtctgctgctagactatattggtggtccatggtatgttatctgtttcttttgctgcttttagaatcctttctttatccttgaaattttgatttatccttgaagtttgattattgtcttgatgtagtcttctttgacttaaatatgcttggtattctataatcttcttttacttgaatattgatatctttctctaagtttgggaatttctctattatcatagctttgaataaactttcagccctatctctctctctacctcctctttaaggtcaataactcttaaagttgcccttttgaggctatattctagatcttgtatttgtgcttcattaatttttatccttttgtctcctctggtggtgtattttcaaatagcctgtcttcaagctcactgattcttctgcctcatcaattgtgaggttgaaaccctgatgcattcgtcagaatgtcaattgtattttcagctccaaaatttctgcttgattgtttttaattatttagctctcttccggattctgaatttcttggctgtgttgtcttgaattttgttgagtttcttcaaaacagatattttgagttctgtgtctgaaatgtcacacatctctctctctctctctgggattggcctctggtgctttatttggttcatttggtgaggtcatgttttcctgaatggtcttgagacttgtggatgtttgcctgtgtctgggcattgaagacttaagtatttattgtagtctttgcagtctgggcttgtttgtactcgcccttggaaagcttttcaggtatttgaatgtacttgggtgttgtaatctaagttttctatctctgaaaccttatctgcattagggagcaccccaagtccagtaattctgtggtccttgtggactcacagatatactgccttggtggtcttggataagatctgaaagaattctctggattatcaggcagagactcttgttctcttccttcactttcactcaaacaaacatctctgtctctctctctgctgaactacctggaactgaggagtagtggtacaagctccctgtggctgccatcactgagaccctaggtcagaaaaagccagcatgataatgggtctcacccaaggtccacagtaaccactgccttgcttgttgcctatgttcaaggccccagggatctacaatcagcatgtggaaaagtcagccagtcttatacccttcccttcagggtcacgaggccccctgaccccaggcacatccagagatgttatccaggagccagggcctggagtcagaaaccttggggatctaactggtgctctattctgctgcaactgagctggcattcaagtcacaagataaagttatttccactcttccctgccctttcacaaccagaggagtctctccctatggctaccaccgccccaggcccacagcaagaattgcctgactattgccaatgttcactcaaggcccaaggactctttagccagcttgtggtaaatgctgccaggcctgagactcttctttcagggcaatgggctctcctctggcccaggactggtccagaaatgcaatccaacagcaaagtcctggaatccgggaccccaggagcctactttgtgctctactccactgtggccaaggtggtagctaatctgcaagacaaaggctcctttattattccctctccttttatcaagcagaaggagcctctcctcatattcatcacagctgggaatgtgctgcatcacacctgaaaccagcatgtctcagattctcacctaagctctatggcaagtactacctgggcattgctgctgattattcagggcccaagtgctctttattcagcagatgatgaatctttctgggccttgttccttccccacaaggcagcaggttcccttctggcccatggtgtgtttagaaatgtcatccaggagctagggcctagaattggggcctcagtactctgctcattgccctatctgactatggctgagctggtgtctgattttcaagaaaaagtcctctttactcttccctctcctgtctttaagtggagagaaggtatattaggccattctagcattgctataaagaatacctgagactgggtaatttataagaaaagaggtttaattggctcatggttctgcaggctgtacaagaggcataacactggcatctgtttctgggaaggctccaaaagcttataagtatgcagaaggccaagggagagcaggcgcatcacatcgcaaaatcaggagcaagagatagagagtggagggtgtattagtctgttcttatcctgctaataaagacatacccaagacggggtaatttatttaaaaaaaaaaaaaaagaggtttaatagactcacagttccacatgtctggggaagccacgcaatcatgacagaaggtgaaggaagaccaaaggcatgtcttacatggcagcaggcaagagagctttcacaagggaactcccatttataaaatcatcagaactcctgagacttatttactatcatgagaacagtatggagaaaaccaccctcatgactcaattatctccacctggccctcgccttgatacatgatgattattacaattcaaggtgaaattgggtggggacacagagccaaaccatatctgagggggagctgccacacacttttaaatgacaagatcttgcaaaaactcactcactatcgtgaagacagcactaagccatgagggatctgcccccatgacccaaataccacccaccaggccccacctccatcactggggatgacaattcaacatgagacatgggtggggacaaatattcaatctctgtcattctgccttttttctctctcaaatctcacatccttctcacattgcaaaatacaatcatgcctttccaacagtctcccaaagtcttaactctttccagcattaactcaaaagtccaaagtctaatgcctcatttaagacaaagcacatctcttccaccttactagcctgtaaaattaaaaatatatatatttactcttaagatacaacaagagtataggcatggggtaaacattcttcttccaaaagggagaaattgggcaaaagaaaggtgctacaggcgccatgcaactttgaagcccatcaggagagtcattaaatctttttgtttgtttgtttgtttgtttgtttgtttttgagacagagtcttgctctgtcacccagactggagtgcagtggtgcgatctcagctcactgaaacctctgcctcctgggttcaagtgattctcctgcctcagcctcctgaatagctgggattacaggcacgtgccatcatgcctggttaatttccatagttttagtagagatgggatttcgccatgttggccaggctgttctcgaactcctgacctcaggtgatcttcctgtcttggccgcccaaagtgctgaaatgataggcatgagccactgcacccagccaaagtcattaaatcttaaatctccaatagttcttgactccatgttccacattcagggcacacactggtgcaaagggggactaccaaggtcttgggagttcttcgtctgtggctttccagagttcagcccccagggttgctttcacatgttgttgggtgttttggcttgtccaggcacagggtgcaagctgtcagtgacaatatcgatctggggtctggagggcagttgtcccctttccaaaactccactaggcaatgccccagtgggattctgtatggggcctccaacctctaatttcctctctgcatttccctaatagagattctctgtaaggtttccacccttgcagcaggcttctgcctgatcaccaaagattttccataattctctgaaatctagatgaaggctgccaagctttcttgattcttgcattatgtacacctgtaggcttaacaccacatggaagccaccaaggctatagcttgcattctccaaagtggcaactcaagctgtatctgggcccctttgagccacagctggagctggagcagctgggatgcaggccgatgtgttctgaggctgggcagagcagcaggaccctgggcctggcacacaaaactattcactcctcctaggcttcagggctggtgatgggaggtactgcctggaagatttctgaattgtcttcaggcaattttcccaaagtctttgctattagcacttggctcttttttaactatgttaatatctctaacaagtggtagctccacagcctgcttgaattcttctcccacaacattttctttatttgccacatggttaggctgcaaattttccaaacttttacactctgcttcctgtttaaatatacattccagctttcagtgttttctttgctctcacatctgagtgtaggctgttagaagcagccaggccacatcttcaacactttgctgcttataaatttcttccaccagatacactaggtcatcactcgcaagttcaaacttccacagattcctagggcagaggcaaaatgcacccaagttctttgctaaggcataacatgtgtgacctttgccccagttcccaataagtttctcatttccatctaagacctcaacagcctggacttcactttccatatcactatcagcattttggtcacaaccatttaaccagtctctcagaaattccaaactttccatcatattcctgtcttcttctgagccctctaaactcttccaacttttgcccattacccagttccaaagctgcttacacattttcagttatttttataacaatacccaacttcttgtatcaattttctgaattaggccattcttgcattgctgtaaagaaatacctgagactaggtcatttacaagaaaaatggtttaataggctcatggtttttcaggccgtacagaaggcataacaccagcatctgcttctggtgtagtctcaaaagcttacaatcatggaagaaagaaaaggggaggcaggcacattacatggtgaaaacaggaacaagagagagaaagagagtgtgtgggggagggagggaaggtcatttaaaacatacttttaaatgaccagatctcacaataattcattctctattctgaggacagcatcaagccataagggatctgcccccgtgatacaaacacccctcaccagcatggggattacaattcaacatgagatttgggtggggacaaatatccaaactatatccgaaggagtctcacctggagctgtgggctgtgctgcctgaggttggggatggggtggcataagcaatttcttggccaccccagctggtatctcactaggtcatgtgtccccaagtccactgactctgagttcagcacagcaccaagacttgcccaggaattgtagtccttgtggcctggactgtgtttcaagtttatttaggaccctaaggcactttagcccatggtagcgaggctagccagaactcaggttctgactgctgggataagtgattcccctctgactagggctggtctaaatgttcttccatgagtgctggctgagtcctgcctgctgttgctatccactgtgtgaggacagcaacgacttccaacacaaagtcccacagtcactgcactctccctaacccaaatgcacagactgtctctccaagccatatggccactgccaggggatgggggaggcatggtattggcaattcaagagtgtcttttctacctctttagtgcctctttcagtgatatgaagttaaaaccaggtactgtggtcacttagttgatttttggttcttatgaaggtgctattttgtgtggatagttgttcagtttgatgttcttgtttggaggaacagttaacgaaggcttctatttggccatcatgttctaccttcttcttaatcattctattgggtctgtagtgatatctctatgcatttttctataagtaattatatttacatttttttctgttttcattagtaatttctatctccttttttcaagtgtctgcttttaaatttgcctgttttaaaatcttacgttgtttgttcttatattactaatacgtataatatgtttgtattttttatataaaccttttgaccattaaatatattgagttagtcttctcccagagtggcctgcctttgtactttctgaatagtgtcttctcatgaactgaaattttctattttttgaagtttaattcatatatatttttccttttacagtgactactctttgcatttcaaggatatcttgcctataacagaattatgagttgttccattctgttacttactctactcctcctcattagtagccccatccctttttctttgtcatcacttgaaaatgctaaatctccaaaatcacaaattaaatattccactatctgcctacagcttcttatcctatcatacctgttctttgatattattgacatctcctctccactggtaaatattctttctatttcctagggtccctacagaatttctttactcattctagagcagatatgaggatgctacgtgttaaaaatcctagcttgcaaatagttattattttatattgatactcttaggcttccctttcatttacaaaaataaacaagaataaatgcactgatctctttggcatggcagaagctgaatgctgtcagagtaagtcacaccggcacaaactgttatcatgataaatacatagtcactaagcttacctgcctttatatccctgctttgagattatagtatggtccttttactagctcagtctttcaccctcctcaaatattgtttcaaatatttaagacttttttccagtccctaattcttctcttcttgcctcttaagccaaaggcacatcttgttaggacatgctggaccttgcatctctgcaattaacacagtttttctactgtgtgaaggtgtcaccttgagtgaagatggttcttgcggacgggaacccagtgtggggctcaactctaaagggatgtggcaatgggtctgaaaatgggttctcaatgaagcatcacagtgtccactatgtttatgaagtagatccaccctgccacagacttctaggtaagagtaggtgatcatgcatcatgattctctactagaacctctttagattccatgtactcaagtcatactatttattttcatactgcatattttaatgcttctcccaactcttttggtaatgctaattgcatgtgatagaattttcgttactgctatttgcaaagagtgagaaattgtattatttctaattgcagaatgttagaacttgtattattttgttaaagcaaaataagatctccaagactcacttttccattgctatgtctattaaccatggtcctggaggtattgaggagggatgaaaagacaatttacaaaactgtggcaaggttaaggaacccagtaagagaagagaaaggattatggggatagtatagtgagtgctcttattcacattggcctaaaagaagtaggagagtgtgtggatctcggggcttttgacattttacatttggggtaaggatgtttgtagggtgctgtgacctttggtagagaaaagcaatcaatatgaaatagtccagcaaggaggcagccaggagacacacaaaccgggacagttggttaccctctctctctctctctcctgccattgtctctcataagacaaactcactctggagtacacaaaaagagatgcagttactataatccattggcatcaacctctgaaggcaggatggatctggagggataaacataacctgcccagaggatgactcatagggtggccttgtgggtgctgaatcccaagtggttaggtctgtgctgtgagctgataaagccccagaattatttatggggaatctatactcctaataatttacagacaacacagatccactttggacttgatcagatggacaaaatcttggggacttgacatcactgcgcacacaggggaggagctgggattgttgtccaggaaaggaaaatataaggagaaaccttggtttgaatttggtgtcagacatatgatgagaggacagccaggaagatctggaacatgaagatttaattacaggccactaactctcagctgacgggcaggtctgtgagttccagaatggagcactgcagcagtaggtggggaggaggctgagagggcgatgaggcagtctgagtgctgagggcagtgcagtcagagaagcaactgcctcatcacagaagcttctgcccttactcagcccccttgctctgcaggatgaggagggagttccatgggtagggaccactggacctaaggaagcctgaaggggaaggaccacaggacagtgacatcacaggatatccttcctatcaggaaaagtgaggctcagaactcagctcttcctgggaggaccaagccctgagcacaggtgcagtgctgcctgctccgctgtgccatgggctccggactcctctgctggacgctgctttgtttcctgggagcaggtgaatcctgtggacaggacagcacccctattctcagcttgcccacccctgtgtcccccacttcaccatggggaggcacaagttcattctccacctattttttcctcaggcccagtggaggctggaatcacccaagctccaagacacctgatcaaaacaagagaccagcaagtgacactgagatgctcccctgcctctgggcataactgtgtgtcctggtacctacgaactccaagtcagcccctctagttattgttacaatattgtaataggttacaaagagcaaaaggaaacttgcctaattgattctcagctcaccacgtccataactattactgagtcaaacacggagctaggggactcagccctgtatctctgtgccagcaacttgatgcaggcctgcagagccaagaacattctgtgtacaaacatccctgccccagtgtggagaacttcagccctaacatatctgtgagaacttgaggactgtagtgggaaagaaaagcagtttcaggaagctggatcctaaaacctggggttttctgccagttaggagtggggataacaaagccaagagggtctgctcaggaggtggtgaaaactaccttcttcgccaaacgctgtacactatagggatagtggaagtgtttgtaatttaatagctggtgccctctttacagggcagcagatttaatttcagggtcaagattcttgataatagtgtggaagggaaaatcatagggtttgctttatataattcagggagaagaaagtgagatttggggaaattctatgaaagagaaaatgatcaaagatagttgaaaacagagatagagcagaaggtaatgaaacatggtgatctgtgcaccatgagctcccttctcctcccacagtttttgatatccagaaaatacaaagaaaggtcttatagcaactgacatcacctggggactggtcctagttggggatatcacaaatagcagcctgcctgatgtgagggccttggggttggttctgacatcttctttctcgacttctggatctagtcttgcctgctcgaggcacagtcaaatacttcccaaaacacaaaggaggtcaggtcagtcttggtcctaaaggtgcaaatgctgtccgttttctcccaagataaaattctgcatccctgggattcctctctgagactcagtgcccagattcaattaccttctgtaattaaacagttctttgaacattttctaaaactcatcagccttggtatcatctgcatttctgctatttccttggcctggaaacttttgttctctccagacacatccagcccctgctcatctgtcaaggatggtctcacatctgccttactctttgcttcttaccctgacattccctggaactggactgtatcaatttatttatttacttttttaagacaagagtctcactctgttgcctgggctggagtgcagtggcatgatcttggctcactgcaacctccatccccccggttcaagctattctcatgcctcagccttgagagtagctggaattacaggcacatgccatcatgcatggctaatttgttttgtattattagtagagacacggtttcaccatgatggccaagctagtctcaagctcctgacctcaagtgatccccacgcctcagcctcccaagtgctgggattacaggcatgagtcactgcgcccagccctggactgtatcactttcttttctttattttcataagaaaagccaagtttataattaatagtatctgaagtttgtaaaatgaaaaagttaatgcatacttatatagaatcctggaatatcattaatcaccatcttcccttcaatgggactcctctttcttaaaatgtaatgaagattcttagagacagtgtcagtttttcatataatttctgcaatattctaagcaattgtgtcttcatagtcagaattgataaccaatgctataaagtatcctaactctaaggctggaatttgcaaatactcttttggagcaaataaaattgtgttgtagtaatattcatccagtctcatgatcctgaaaaaacaaattattcagcataaccacactttccacagccacatttttagagatttgatgagactggaacatcatcaaagatgcttctcagaaatcaacctaaaaaactgaaataaaaattagttaagctcagtaatggaatcttatcatcctttctgagtaaaagatattgtgtgtgcaggaacagaaaaccaaacaccacatgttctcattcataagtgggagttgaacaatgagaacacatggacatagggaggggaacatcacacaccggggcctgtcggggggttgggggaaggggagggagagcattaggacaaatccctaatgcacgcggggcttaaagcctagatgacaggttgatgggtacagcaaaccaccgaggcacatgtatacttatgtaacaaacctgcacgttctgcacatgtatcccagaacttaaagtaaaataaaaaaaaaaaaacccaagatattgtgtgtgtgtgtgtgtgtgtgtgtgtgtgtttgtgtgtgtgtttgtgtgtgttttctgtggagactcagccgcatggaaatagtttctcagggtggcattactaagaggtgttgggtcattggcagagctcctaggtacttctgggtaaagaaaggaaatatcagacccaattgaatctgcctaagttatatacagctcatagggtcgtttatttcaagattttttaaaattcagaaataaatttgtaaaattgaaaaatcctctttatagaatgtgctatctaaaatctgggaataataaatctaaatataggccagacgcggtggtttacacctgtaatcccagcactttgggaggccgaggcgggtggatcacgagatcgagagatcgagaccatcctggccaacatggtgaaactccgtctctactaaaaatacaaaaattagctgggcatggtgacaggcacctgtagtcccagctgctcaggaggctgaggcaggagaatggcttgaacccaggaggtggaggttgcagtgagctgagattgcgccactgcactccagcctgggtgacagagcaaaacagcgtctcaaaaaaaaaaaaaaaaaaaaaaaaaaaagtctaaatacaaagtgtgaaaaggtgtggctctgattattcaaagggagctctggaatgtcgtgtttccagtctggatctgcttgatatcctcacactgtttcaccctgtggcctgtataattctggctcctctcttccatcttaggatactcattgcaatgatgtagcagcagtttattgtgcaatcaagatgtgcccttttgttttcactggccaagggtgaatttgaagttccaccctaagtcaacccttctgggaaagcaatagagagtgtgtgtgtgagagggtgtgggttgcaggggttggtgtaggggcatctctgctcctgacttagacaatgctgagctcatcaggtcagaaggtgtgaatccatgagactggaactttggccacttggaggtgctgtggctccacaaagctgtggggaaccctggggaggggtggagggtgacccaggagaggacggctgaagggaatgcttggctgcgtgctggcatcaggaggcggttggaattcagagtaggtcctgggactgcccagggcaaggtaggcacaccagggacctcagtttgcatcaaggagagaatgtctttgcctctgcatgggcagtggagggtgaagaggctggggcagcaagggctgggagtcagtgccaggaaagtgacaggggttgtcagagaaaaataaggtgggatatgggcatgtggagactgtgttccacctgccccacttttaatttcagggttgtgtaggacaggaatggtgcaggaagcagcagagcctggggtctgacaatgggtagagcaggcaggggtggcctgcagggagagttactgggaaaggccggtttcccaaggaaatgcctgaaacattcctgccccactcaggaaatgaccatgaggtgggtgctgccagacagaggggttcaggccctgcagagctgacaggcctttcccaggcactccctgctgcttctacatgtgatctgctttaatgcccactgatatcaggcagggtaaatatgattttacctgtttatacatatgggggaagcagctgtccctgttctcatgtttagtaactggctatagtcagttcctccaacacctctgcacgccgccctgctctgtacatgtgtcctctcctctggcttcctcatttcagatccccgttagcaggagggaaagatcatgtctcatatgtggtcattaaaacctcttccccgacaagcccaaggaacttccaggtcaagcatctacattcatccttcactgtaggaaagaaaaagaaataaaattttctgcactgtggactttctgtaactgatgtaatataccttgaggaaaatgagcataaatagttgctattcattaattaattaatcttattcttttactcaataaactttttgaggatccttctttgtataaggtattctgtgacataaaattgaaaagaaaaaatattaagtggaaaaaatgtttcttgctttttacagtgttaaggtttgcatttattttttaaattgttttctttattaaaaatagtttactgatttctaaattatacaaatttacttttttctctttttttggctaactagtcccattttagacagccatttaatttaactgtggtaggaatatgtaatatgaaatatatctttttaacagatttttgtatgtacaatacggtattgtaatctacgggcaaaaggttgtacggcaatctctagatcttattcatcctccttaactgaaattgtataccattgacagcaactctccatttactccaatccccagcccttggaaattaccttcacctttgcttccgatacttcgattatttacgttccatcatataagcagaatcatgtggtatttgcctttctgtgcctggcttattcacttagtgtaatgtcctgtgggtttatccacattgtcatatatggctggattttcctctttttaaatgtttaaaatacttctttgtatgcatctaacatgtttaagttctgaagtataaaatgtgtcatatctgactgtttctatgaaacagtctgtcacatgactggcagtcatttgcagaactgcaagcactgagtacactgatgcacattcacagttcaattctgcttcatggagaagacttagagaaaatattaatctaatcattcattatcattttatgatgcacaaaatagaaagccttcattaggaaaatttcaattaattagaaattcaactatacgaaaacatcttaacgtgtaaacgctattctcattttacaggtagaggaattggcccatagtttaaattacttgaccaaattaagtaggaattaggatgcagtactggggttctaaccctggtctatcaaagccctgttttttatagctatatactataatctatttcataacaaatgatgcttatcttcacaaaaattcaaatgttatctcctaggtccctttcagacctgctggctctaataacatcatagacagaaatcagtttaccctggagaggggggggtgggaaacaactatgaatgggtgccatgacatcaagcctgactcccattctagcaccagctcctcaagacgtgaggccagttcttgacagatttggcttagtttgttttctgtttttttgtttttgtttttgttgttgtttttgtttgtttgttttaatctatgaaatgagactgctactgtccatccgcaggctgtgtacaaaattaaatagcataaagtatctagcatgtagcagaaatctagatattaggttggtgcaaaactaattgaggtttttgccgttacttttagttacttttaatggtaagaactgcaatacttttgtaccaacataatattttaatttcctttgataatctcagatagcctctttcaccatgccaatgtgcaaaggcagatgcggacatatgatacctagaaatcttaggttgaggattcagaagtcacagaaatggaaatgtacatttcctctgatgatttatttgatgaaattaactaattaactaaagaatgcagtatggatccctcttgaggtatttaaaaaatcaatgttgttgacatataaattatacaatgtaaacattatacatcttaaatgaacagatcagtgatttttgagcaatatatatgtatatgcccttataatccccacccctcttaaaatgtaaaatatccccacccctattaaaatgtagactatctccagaaagttccctcgaacacctctgcaatgcctatcttggtcccagaaaaccaatgatgtaacttctatcactggagagtagttttgttcacaaatatttttaatgtcaatttaaaacccatactgattaatcctcttgaatacatagctaaataatcaaggcaaggaagagtttctgggaggttttatggttttagaagggattgaaaccatgagagctaccttgatccatggtaggaacgattctatctggagatggatgttgtgccgaaataacctcaaaaggtcttttcagctggtagaagctgattcgacaacatttatttattcattttcattcatttctttgcttctccattcattaactcaaattgtttagtaatgatatcctgataacagttaattatctccaaggaaattattttgagttcccataggacacacatgcagctggttttgtgttcacacactgagaacgctggcgtcaagcaaaccatggtaacagagacttcattgaaagatgatgttacattgggagaagcattctttttgccttaaccccaagtgtttaactcataaatcctgagccttcagctagaattcatcttcctgttctggccctgtcctgggcaccaggatcctgagctgtgtgttcctgtctcttgaaccacaggagtcctgggcacgcacatgaaacccactaatgggcttgttggatcccagctgtgactttcagcaccaggtggcccttagctgtgactttaatttctgtgtccttcactgctaagtgaagccccatagacgctgaatgaccagatcttggtgatgcattgtgctgaaaggaaaccagcacagggggaggtgagcagaatatgaaacaaaatcatgtatttacaaccagcgacatgacttactggcagatcctttgttcaaacactattaagaatttaaaaatcatgacagcagagtgataaagcaagcgtgggatccttctgaatgcagggctctgtacaccgaagatacagtttttgagctccttttcatttattactaaattaatggcaggaatcctgaacgaagggatattccctatgagacatgacacctcaaataaaacgagagcatttttccttatcttgaagtctgctccctctcgccaagtccctcactcatcaggacacctttgtgctcacaagtcttcagcagcgctgggtggccaccattgtccacacagagagggcagtcagcagcatgaggtggttctgcctgctgtggtctcaccccaggaacagaaagcaagactcctggatggagctgaaggtgctcagctggacttgtcaggagtcccatctgtcagtgaattgacaagaaacagagcaaaactactcctgcaatgttgatgagcctgcccctgggatttggaaacctgataacagagaaaaccaatatagacacaggactttaacaggattatggtcaattaagcagattggaaaaggatacttgaaggagtgtttgggacacaggaatcaaaaacaccagggagacaagaggatttttcctaagattctagactacagcaatacatagataactaacaccagaatattaatgaggaattatatcattgcaggaataaaatttatattgaattacaaactgtttgcacaaaagtcaagaaaaacttgaaagccttatatcaagaagcattcttcccatccaaacttcagtggtgcatttattttggatttgaccctctggggaaggggcatggcctctctcgacaagaaggttctggggaccaggcagagagaatgaggtctcaggatgacttccttgacagccctgttcgcctttcatcaacacacagacccagaagacctctctgtcttgtagcatctgccatgagaatcaggctcctgtgctgtgtggccttttctctcctgtgggcaggtaagtcctgggcagggcccatgtgtagatttcaagacccagagccttcccattgaggctgcagcattggctttgttctccttctctgtaggtccagtgattgctgggatcacccaggcaccaacatctcagatcctggcagcaggacggcgcatgacactgagatgtacccaggatatgagacataatgccatgtactggtatagacaagatctaggactggggctaaggctcatccattattcaaatactgcaggtaccactggcaaaggagaagtccctgatggttatagtgtctccagagcaaacacagatgatttccccctcacgttggcgtctgctgtaccctctcagacatctgtgtacttctgtgccagcagtgactccacagtgctgcacagccatctcctctctgtacataaatgcaggggaggctctgccctcctccccgaccccagactcaaccatgtccttggcagagttctcagcactgggaatcttggaagcccaatgggtgccgggcagtgtgagcctcagtctgtgccaggtgcctctgcaggcagtcccagccaggcctggactggtcccagagcctcagaggtctcttttgttgctctctggtctttcttccaagctatctttttgggatgggaccagggctttcccagctcttacttttctactcatcatcctgagtctgaggtccacaggatggaacaggatttgtatttcaaatctgtctagactcctgtttctctctgggggccacgttgcttcctctctccagggtttcctccagtacccactctcatgtggtctcacctgtggcccgcctttcccatctgagcagtcacccccgaaggccttgctgggcctctgcacaccacctcccctcgcctttctactgcagccatgaggctgcctcttctgtgcctccttcctttccaacacagagacctcaaaggccatttcctccgccctgggctagtgccttcctttctgcagtggtcagcttctacctgcacttctgatctcagcatgatcagcctctcctgctggaagcactccctcaactctcagctgaggtcaaatttcagtttccctctcataagctcacagaatcatgtgcctcttagtaaagttcagcaccgttgcaatttttccaacacttgttttattccttttgtgctccacttaattttaaactcatgaagctgaaggctgagcttgttacattcaccaccagcagtgcctggcaggcagggagtcctcattcatttcacagagaatggatgagtgagtgacaggtgagtgagtgatgagtgggtgaatgaaccagtaacaggaacacactagattcattgtaccctggcagaggtctagagttaactttgcctgagatgctctgttatgagctcatcaaggagcactcacttgttgaacaagcataggaccatgcatggtgcaagccagtttgtcagtctgggaatttccaatttaaaatatgatgtgttcttcaagctgaatgagggtaaactttctgtatataattataatatctaagccatttcttaaagttttgggttaggaacaaaaaacccctgaagagggaacatttgtagatttaggatttttaaaatatatttatattattttcccttggaagaacaggatgggaacagccttatagttgctaatttgtggagaaggcatcatataaaagtaagagaaaatcagaattgtgttctagagggtaaattgtggctgtcctgagagcatgttccccaggaacctaaaccgtgagcatgttcaggaacccagagtgcaacagacaattcttggccccatgaatttggtggtaagactggagacagttggaaaaaccatggagtcttgaagttcttcactctcaatgcaggcctctcttgaacaccacagactaatgtcagataaatatgcttccactattaagactattaaaacaagaaccaatgaagagaagtgagcagaaacaataagcaattgaagtgtttgaagacaagaaatttttaccattaaaaggtatgaaagtttgtagaactatgtttaaaggaaattgaaatgtgaacaagaaaaaaagactgacagaaaccatcaagataacattaaaaaataatcaaattcaatacagaaatgattaagattatcactgaaaacaaaatggaaatgaagaaagatgaaatgcttctaagagattattagtgatgtcaaggacagagctgaagaagttacatagaatgcagcaccgaaaattaaatatgtaactttagaaagagcttaagggtggtttccagcatagtagaatatataatttttaattatatatatttatttatataaagttatttatatttatatatttaattatatatttattatataaaaatatataatataataatatagaatatagaatatatattctataatatagaatatagaatatatattatataatatagaatatagaatatatattatataatatagaatatagaatatattatatagaatatataaatatatatatttcccatttttcttatagataattgaagtttcagaaaaagaaagtagagggaataagtgattgtgatgagacattagctgagaattttccagaggtgtttcaggacctaaattctcaatttcaagaattcaaatgaatatgaaataagataaatgtttatattataatgagattgtggaacataagtgacaaatagatgattctaaaagctgtcaaaaagaaaagataaatctctcctagtggaatagactgaaaaaatcaatgaaagaaagaggatcagaaataaccatttagtcggaattataatccccattcattaaacactgagatggaggaaaatatatttacaagtggaaaaattaaaaaaaaagactatgagttttccaataaggtatcttttctgaattatagtcaacaaaggtgggaagtggtcccagaagaaaggcatgaggtgcagcttgtgagggaacccatgtgttgggacagccccgttgggcacgtgtgactgggggatggaggaggctggggcatcaatggggatggcataggggaccctgacttgcagaaaagacaatgagctcatcccttggtgccttgtgttgggggcgctgttggcacatcctagagaacatgcccagcagacagaggagcgcctgtgtggtgaggagataaactcagaaatgcagcatgaggcctgtagctccagacagctctagagcacaaagtgaagaccgatgcattgatgttgtttaaaaggagctaataaatatctaaagcagtcatccaagtgtgttctaatataaatcctgtgttcctgaggttgtggggattgagagaggaagtgatgtcactgtgggtactgttctgtgtcaggacaaggacgtccctcctcctctgctcctgctcacagtgaccctgatctggtaaagctcccatcctgccctgactctgtcatgggcaccaggctcctctgctgggcagccctgtgcctcctgggggcaggtgagtcctcagacaccaaccagtctcattctgtgtgtctgtatgtgtgtgtgtgtgtgtgatgagtacaactgttttcctcatcctgttctcaacttgtgtctccgcagatcacacaggtgctggagtctcccagacccccagtaacaaggtcacagagaagggaaaatatgtagagctcaggtgtgatccaatttcaggtcatactgccctttactggtaccgacaaagcctggggcagggcccagagtttctaatttacttccaaggcacgggtgcggcagatgactcagggctgcccaacgatcggttctttgcagtcaggcctgagggatccgtctctactctgaagatccagcgcacagagcggggggactcagccgtgtatctctgtgccagcagcttaaccacagcatgacacaatcgcctccttcctgctcataaacctcctcctctctctccttgcttccttatgatactattttgcaccaggggatcctcatctcacaccactccactgcctcttccagaatcattgcttgcatgtccgctgctcagatcagcagatgtgcgttgtatatgttaatcattttctgtggaaggctcgttgctggtcttcattatccatccttattttccacattggatactgctcccttcaagattacttgttgcctacaagggatcctactttttacattcaaattttactttttattaatacgtatttgatgccatcttgaaggcaatctcattatcatcctaatcttttgctaatctttatgtttacggtaacattgattgttattttgggggacatgtatttcatctttggtaatgaaatgaaataactatgcacttcaattcctgtatgttctgcctacttaagagtaaatccaattttcttccattcctcccattctatcccactccctttatatgatagttttaagggagaaaatattaattagactctaactgcagctatgtgataagagttatttagaatgagggtgggatattaagctttgagtaaagcaatagtcagggttagaactagtgttggaatcagggtttagggaagttgctcataaaacctgcaggatgacacttctagaatagtctctcactcactctgcagacacttcccagcatcccttgggccattgcaaaagcaatgatgaaacttcacgtgttggccacaagatggcactgtggtccactgggatctaagggactctggggagagcctgggagagcagcctaggaagggaagggttaagaaaaattagggctggcatccaatattatgcagatgttgcagcagttttcagtcattgctaggctacctacagctatgcaagatgcaggaaatacctctaatctttaatgagatccacagttgaagaattttggcctggcagccttggtgtcaagcgcaggtgcaagcagaggagcaactgcctcaaaggaacgtgggaaagctaggggcgggctgtgccctaagctcagtatgtctctgctgcaccccatcttccctgcagacctcgccgggcaacagccttcatgagaggaggtggatcctgcctgagaccagtcagaaggccctggaccagctggactccgtaggcatggggggtgacaccacaggcccaccagactattccctagggagcagcctccaagccccagctcacagtcctgaggatcactgcacttagttgggccagcccctcctcactctgaccctaccatgaaccccaaactcttctgtgtgaccctttgtctcctgggagcagataagttctggaaacagctgcaaaaccctgtaatgggtttgcaatgtctgggctacaagccttttttgtcctttcctctgcagagtccccttatttcttaagtcttgtcttcactttctgtctgcctctccagcaggctctattgatgctgggatcacccagatgccaagatatcacattgtacagaagaaagagatgatcctggaatgtgctcaggttaggaacagtgttctgatatcgacaggacccaagacgggggctgaagcttatccactattcaggcagtggtcacagcaggaccaaagttgatgtcacagaggggtactgtgtttcttgaaacaagcttgagcatttccccaatcctggcatccaccagcaccagccagacctatctgtaccactgtggcagcacatccgcagccctgcacagccagctgccctctgcacaaaaagggcagtcacaggctggaggtgggcactccttatggaagcccgtgtctcaaccagaagaaaaagctgccctttctgaagctcttcccagacttcccagcaatgagatctcattctatgtgtgctcctgcagcataaaacttagagtgagctgggtctgtcactgtagtgcggatgtgtaaatgcaaacaacgtaatgttattttgctcaatttggaatattctggtaattgtgcaaaggaatggtagcttctaacaagaaattcatatttcactttcttttcaggagagaagaaaaaagcagaaagcagctgggaagctttagcctgcttgagtgatctgggattctcaagtagcatacataacatcaccttggctttggttcctttagataccaagcatgtgttctgtggaggacaagaaaatccatttttttttgttataaagttataaacacacaagagaacaatccagttagggagaatgttaataaatacaacaaactctgccattagacctgaagataatcagctagtagaattatcaaagagattgtaagactcttactgagtacctgtttgaggtcctctgaggatagatgaaggaaggaacttaattcttaccatcactgtggcttggattagaatccatgagttccttaacttgtttttcttgtaaaatattataaaataatatagaacacacattttattttcctgtagcctgtagtcctctttagcacctaaagggagaagcgcatatcccggtgcaaaagggagctggttgcttgcttggcaaaaaaatgaattcaccaattggccaatctgctgaaagtcaaaatgaaaggctaatatatgagactgatgacagttcatggttcttggtataacttcaacagcgagtgaacatttttttctttgtctatagctttctttcagccatcgatcctcagttgtgtcttagcctcttatcagtccagctcactttgatactaaatttgattgttgtgtatctcagcaagaagcacgtctcacattctctgtattttatgtggtcatgagtgtgttcctgtcttattcttattttatgtggtgcatttttaaataggactgtacagaatacaagcatctatttgtatatgactctcatcttttatggggagaggtcagagtaggtgagcgtgcactttgattctctgctggaatctctttggattctatgtcccctgtcacatggtttattttcatatgcatatttctcatggttctcctgactcttttagcaatgctcattgcaggatattagaaattgtattacttctaatggcagaatgttagaaattgtgttgactcttaaggcaaaataaaatacccggactcacctttccattgctgtgtctattagtcgtggtcctggagatatcaaggagggacaaaaggagtatttgcaaaggtgtggcagggttaagggaacccagtaagagaagtagaagtagcctaagaacagcagaatctgtggctcttattcacattggcctgaaataagtaggagaggatgtggatcccaaagcatcaggtactgtagctctaaggcaaggctgcctataaggtgctgtggactttggtagggaaaagtaacctatataaaataatgaagcaagaggagagccagggcatagatgaatcagaacaagtggtgcccctacctccctctactctcctgccattgtctcccattagccaaactcactctggagttagagaagaagagagccagttaacataatacactgaggtcagcctctgaaggcagggtggatctggagaaattaacgtaaattatccagatcactacgcataagatggccttgagggtgctgaatcccaaactgtctggctaggtctgtgctgtgagctgataaagccctagtgttatttctggggaatctgtactcttaataatttacagacaaccaaggtctgctttggatctgatcagatagactaaatcttggggactttgcaccactggccactcaagggaggggctggaaatattttctgaggacaaaaaaatagaattagaaaatttggttgaatctagcgtcagagagatgacattaggacagccagggagagctggaacaagaaggtttaatcacaggctcctcaccctctgctgatgggcaggtgtgtgagctccagcatggagcacgacagcactaggtgggaggagggtgagagggtgatggggcagcctgggagctggagcagtgtaggcagaggagcaactgtctcatcacagaagcttctgccctcacccaacccttctgctggacagggagggagttcaggttgtggggagtactggacctcaggaagcatttatagggaggacacaggacagtgacatcacaggatatcccacccatcaggaaaatcaaggcccagaactcacttggcccttccccaggaggaccaagccctgaatcagatgcagtgctgcctgccccactgtgccatgggccccgggctcctctgctgggaactgctttatctcctgggagcagatgagtcctgtgcacagaacagcagccccattctcagatttcccacccctgtgtcctccactttacactggggaggacctccaggctgtctgctgtgctcatcctccatctgcttttcccacaggcccagtggaggctggagtcacccaaagtcccacacacctgatcaaaacgagaggacagcaagtgactctgagatgctctcctatctctgggcacagcagtgtgtcctggtaccaacaggccccgggtcaggggccccagtttatctttgaatatgctaatgagttaaggagatcagaaggaaacttccctaatcgattctcagggcgccagttccatgactgttgctctgagatgaatgtgagtgccttggagctgggggactcggccctgtatctctgtgccagaagcttggcacagccctgcagagtcactggaactctgtgcactaatctctctgcttccgtgtacagcagtctcagaccagacagctgtgagaacctggggccttcagggggaaagataaacaatttcaggactctgaacaaggctggcggaaacaaggccaggaggatatgctcagaggatggtgctgcttcaggaggttcacggcaaaattactttctttgtcggatgctgtacactatagtgatagagtagctggcactctcctttttagaaaaagaaattcattttggtgtcaggattgttcgacagatgtgtagtatagaaggtaaaatctcaagggtttgctttatataattaagggagaagaaattgagatttggtttggagaaacttgaggagagagaacatgattaaagattattaaataaatagaagtagagctaccagatgataaaaaattgtgttctctgcaacataacctgtcaaagttttcaattgctagaaaatacgcagcaaggccttgtagcaactggcatcaccccgaggccactctatgatggtcatcaccacgtagccagttgccctgtgggagggccctggagctggttccaatgtcttccttctggacttatatctcaattctcaaaacagaggaattcatttcactgctgatggtaaacagataaaggctctcccatttccccaaagatacattctgcttcccttgtatctctttctgacacttaccgcccagatccattaccttctgtgatcaaacacctcttcgaatatttcctaaaactctgcagcctttacattctctgcatttgtgctcagtatttccatggcctggaaggaccttctgtctcccaagaaacagccagaccctgcttatcggtcaaggatgggctcacacctgcttcctctttgcttcttaccatgacattccccagcattgtactataccaccatctttattattttcataggaaaagccaagtattaattaaatatataatgaatattatttgatgttgtgaaatctatgttaattcctgcttatatagagttctggaatattattacttttattcatgtgagggatattattaaccactaactatttcctggttagagatcaaagtcacttctgtgtaatgatagcaaatgtgagaaccagctgaatctgtttgaattacagctggcagtattattcatttcaaaatttttataatttagaagtaaatttttaaaatctagaaatccttttgtgaaatgcactgtctaaaatttagtaataatgaacctaaatacaaaatatgaaaacatatgggtgtaattaactgggattagctgtggaatatagggtttccaggctgggtttccttgatagcatcacactgtttaattgtatggcctttataattctggctggtctctaccatcttaacatattatttgcaattatgtaacaattgtttattttgtaatcaaaatgttggttcatgtgtcctttgactccattggctaagggtagatttgaaaatcaaccctaaattgactcttctgggaaagcatggacggggtgtgtaagagggtgggagtggcaggagtgggggcatctctctttctgatttggacaatttgagcatatcacgtcagagggtatgaatccatgagactgtagactgttggccacttggaggcgctgtggctccacagtgctgcagagaactcagcggaggggtgggagagtggccaagagaggaggactgaaggggatgccctggctgcctgctggcatcagtagagtggatggaattccctgagtggggcctggccatgtagagttaagcacagactatcattgccttgaaagagttggggtgccagaggcctcagtttgcatcaaggagggagtgtctctgctgctgcacgggcagtggagggtgaaggggctggggtggcaagggctggggaatcagtgtcagggcagggacagggcgggcagaggaaagtaaggtgtgatgtgggtatgttggtactgtgttcagtcctcctcacctttagcttctggcctgtgcaagacaggaatagtacatggagtagcagaacctgaggcctgccaaagagtacagtgggctggagtggcctgcaggggaaagtatgtcagtgtggtgacatcacaggtcaatgctcctatcaggaagaagggagcttaggaacttcagaatgcttactacagagacaccagccccaagctaggagatcctgccatgggcttcaggctcctctgctgtgtggccttttgtctcctgggagcaggtgagtcctgggcacaacttgaaagtctccgatcttcatttcttgtccctgaaatgcatgtgggccaacgatggcttcagcaggaggctttcttctgtgccttatggttaacttttgtcttctgacacacaggcccagtggattctggagtcacacaaaccccaaagcacctgatcacagcaactggacagcgagtgacgctgagatgctcccctaggtctggagacctctctgtgtactggtaccaacagagcctggaccagggcctccagttcctcattcagtattataatggagaagagagagcaaaaggaaacattcttgaacgattctccgcacaacagttccctgacttgcactctgaactaaacctgagctctctggagctgggggactcagctttgtatttctgtgccagcagcgtagcacagccctgcatgagcatcagccttctgtgcaataacattcctgccccactcaggaagtgacggtgaggggagggctgccagccagaggggctcaggccctggagagtggacaggcctttcccaggcactctctggtgcttctgtatgtgatctggtttactgctcactgaagctgtgtaagcgaaatattattttacctgtttatatatctgagggacagcagatgtcctggggctcatatttagtagctagctgaagtctattgtttcaacacctctgcactgtccctcctcactccggagatctgtccttttacctggtgtcccctttttgtgtccccaagagcaggatgctaaggtcatatatgaaactgtgatcatgataacttgttccctgacaagtccaatggacacatgatttccaggcaaaacatatccatctattctttattgtgatttaaaaaaaaaagaaagaaaagaaaggtgcagttttctgctctgtagccctcctatgggcaaggccaggtcatctcttttatggagactgtatgaggagggagctttcctaggttcacagcaaatagcaggaaacgttttttatggggcgtgtagtcttcctgtggcggatgcaatctgccatcagtgaaaggacatgaaaaattgttattcattagttaatattttttattcttttttttttttgagacagagtttcactcttgttgcccaggctggagtgcagtggtgctatcttggctcactgcaacctccacctcttgggttcaagagattctcctgccttagcctcccaggtggcctccaccacacctggccagttttgtgtttttagtagaggtggggtttctctttggtggccaggctggtctcaaactcccaatctcaggtgatcacctgccttggcttcccaacgtgctgggattatagagccattgcactaggccaattttttattctttatcaataaatcttttggggcatcctactttgtacaagggattatatcacatgaaatatacaatgaaaaaagataattggaaaaaagggaaattttttaaaaatgaagaaaagggtgtttcttgcatttgagggtatcaaagtctgtaatttttggtatattctaattagtttactcagtttctgatttatacgaatttcctctttcttctctttctctctttggctacctacacacttttgccagattttttaaagtttttagtaacaatatttaacatgagatctaccctttttatagacttataagcacacaatacagttttatactctgtagtcataacgttgtacagcagatctctagatcttattcatcttgcatgattgaaattttatacccattggcagcaactccccatttaccccattccccagaccctgaccgctaccattctagtctttgcttccatgagttggactattttagataactcatgtaaatgacattatgcagatttttgtctttttgtgattggcttatctcatttagcctaatgtcctaccaagtatagtggtgacagttttacttctatcttccacagttcactcgaatagctccttgaccaactgtaacccagaatcataaagataaaggcattcttagaaatataacttcttgtcctggctaagttaacttaacacaacccggtacgggatggattctcccaggttgaggcatctggtcacatacgagtttcaacctatcatggtctccaggatccatttttggcggcaccactgctgcccaggtgactgtggacacaacttagatgtctctgtcctagattttccaggccccagctactggcttttcttttaacctgtgccggcagtctccctccactcagacgcagggatctgcctcctgctcccatctccttcctgaacttccgccctgctggagttgcatggatatcagggcccctggtcaatgtgcggcagcccacggaggcactgggagggaagctcacctctagctgccttctggggcccagttctgttataccccaagcaagtgctctgttctccctttgggctccacagtatgagaaatgcacttcatggattcatagctgacccctagctcagtaatctgatgacaaactttgagtttcactcaaagtgaaactctcagagctgagggactagctctgcatttctctgatgagggtaagaatacagtgctgtagagatgccttcttccctgtgtagacctggcactaaacaggaaaaaccagacagggtaaaagtgcccaaatatgtctgagaagactgaaagaaaatttcctaagaaaatccttctcctgacttcattcagttcctagtaagacacacctcaccctctgacccccatatcagctggtccccccaggatatcacacgtcctagtatctaaccccacagcaactaattcagatactggcctctttccaacctccagaaacggtcttgccaatagagttttgttggccgggcgtggtggctcacgcctgtaatcccagcactttgggagcccgaggtctggtctggtcacctgaggtcaggagttccagaccagcctggccaacatattgtgaaactccgttccttccaaaaaaaaaaaattacaaaaattagctggtcatggtggcacatacctgtgggaagctgaggcaggagaattgcttaaacccaggaggcagaggttgctgtgagctgagatctcatcactgcacactccagcctgggcaacagagcaagactccatctcttaaaaaaaaaaaaaaaagagttttgtcctctgaccaccaggtctatctagatatctaggcagatttaatttacgattaatttgacctcttaatcccattaaagggagaatgaagagcgtatggtttcaatgtaaagtatattcattttattttgaatgagttggaactaagtagtaaactgaggatatcactccattatagtcttaaaacaacccatggtaaaacaaatctctttactaggactttctttttcacattttagttcctagttacccagagtccagaatagttaagagttgaagagtcatgactgagatggtctgtgggggtttataaatgagcattcacttgttgaacaagcctagggccactctctatggaagcagtttgtcagctggtttgggaatttttaatttaaaatatggtacgttctttatcttgtataagtataaagtctacaaatataatttgcatatataggctagtgcctgaagatttgggtaggacaaaaaggaaagaagagataatatttgcagatttaggaagtttcattatataaaacttcaagggctcaggggctctaatttgtgaagatagtataatgaagaagaattagaaaatcagaactctcttctggagcctacactggggttgtcctgagaaaagattatgatatgaggaacataatccatggtgtgcttagcagcccagagtgtagcagacagttcttgactcatgcagttgggggggtgagactggagacacttgtggaaggtactggctgttgaggctgtgctatagcctctccaaaaccccatagatgaatgtcagacaaatatactgccactatgaagaatattaaaagttagcagaattcataaacactcgcaataggcagcctgaaggtttaaattttagcatcatgacatatgacagtttgaagagctgtagttaaatgcacacaaaagagaattgaaacctgaacaagaaaaaagagactctcagaaatcattagataacttttttaaaagcattgaatgggatgtctagaaatgatccctaaaatgactgaaagaaagcagataaattgaagagcagattaaatgctcattgaagagattattattgacttcaaagacaaatcttaagaagttacccaaaacaacacaaaaaattaaatgtataatatgaaacagagaggaagcaacagagaagaaacaatggaggtttcagttatattcgaatatatgtaacatttcataagaattttccatttattcttatgtcattgaagtgtcagagaaagaaaataaggagaatgatatgaggtgatattgtgtgtgatgctagctgagaaatttccagagacatctaaagacctaaaacgtgagtttcaagaattcagataaatcccaggttaaatagttacctcagtgttaaaatagaagaatatgaatgatgaagacacaatttttcaagcagtccaagaaagacaaatatctcgcaaaggaatagactgagaccgacaggaacagtgaagaaagggagttaaaaatatctataaatgcagattatagtcctcattcatcaaagagacaaggagacctcggcagttcatattctgaccccttgggctggtgacctgaaatatatttggctgagtgttctcatttgtaaaccgaattcaatttgcagagatttttttttttttttttggaaatagagtctcgctctgtcgccaggctggaattcagtggcgcgatctcagctcactgcaacctccgcctcctgggttcaagcaattctcctgccttagcctcccgagtagctgggactaaaggcacacacaaccaagcccagctaatgtttgtatttttagtagagatggggtttcaccatgttggccagtctggcagagatttgagagaggtaactttaaaaattagagtcatataaagtgtaggttcaagaaatcttaggtccctataaattctctgacaaatctccaatctagcacagttatttactctctgaaattctggtaacaaagacaagcacagattacttttgcctgattcaatcatgtttcagacacaaagtcatctaaaatgcaaatatagtagtctgatagttcattatgtaaaattaacataaagagttgccgtttaaggaaatatgcaaatgttacctcttatgaacttcctgcttgataactgagtctgatgtgcatgaaggtgtggtgctcctagaaagatatggcttcagtgcaattgtccatcacacaagagagctgatagaagaaggcacagctttattggaaagaagaccacagaggagcctctagtggcttccatgacatcctctccgcccacctctgatttcagccttgctgctgtggacggtgccagttcccattcacctcttgctgacagtgcccttctgcagtgcctgcttggaatgttgctgcttcctgctctggggtcttctctggtatctgaatccacttgggctgtattcaaagacagccagaggtcctgatgctcctggtggaacaggacagggggacaaaagctccaacctgcccattcatgcagatactccagagagcaccctatgctcttggaggtcctgatggattccgtctcctgttgccccagcacaaatacaatattgcacctttatcctggtttctcccttccctattttgttttccttgctctcttacttcttcctggaatcatttcccaaataagctacatgcacccaagtctccccatcacagactttgtcttcagagacagactaaactgtggcagtgatggaatgaagcgaccatcaaaagaccctaccttttgaaggagacaactgtttatcttttattcatatggctacccattcatttaaaaagtcttatgatgatgtatataaactaatcttttccaaatccatttggattcatctggaattcccagcgttctcaggatggctctctgctcccttaaaacttcaaacctattttgaactgaataaacttggattctgtttacagaagtagaatctgcctggactcagataatcattcattcctttcttcattcaataaatatttaatgaattataggtgaagattagattcaagttttgtggcgcacaaagctgatacattttaggtagctctttgcaaaagagagtgcaaaatagcaaagagttgaaaagaccctgtgcaagtgagaaggcctgaggttattcttcatcggcttcatggcaaatacacaggtactgtccaggtacttgggaaacaccagtgcaaaaaacagacaaagcttcaagttgaggtagacaattttaacacataattgttataatttattatacttaataataaattaatttaaaagtagaaggatatattcctggtagatgcttatctccccggagaagttagagtgtcattgagaatatcaacattcttggtaaatcatacctgatttagggaatgatccttggagctctggaattctacatgccttaccttgcaaaatgaaggtcctgatctgaaaagttttttttttttttttttttttttttatgccctggcccaaccatgaggattggcttctttgctgtgtggctcttggtctcccaggatcaggtgagttctgggcatagatgagaaagtccttcctgggcttgtcgggccccaaccacggcctcctatgggggtgctcatgggcctcctccctgtctccacttctgattctgtgtcctctctcactggagcatgattgtgggaattacccatccaggttgcatcaagatgtgcaatagatagcctattgtatctgaaataactattgcagtgttatggactacatgtgagttttgcaccatagcacgtttacaaatccatcaaccttctcccatttggtgaatataagatctgctggatgggaatagaggattttcctgtgaccctagagactccaggtaggtgtagttcttggtgaacatttcatccatattcctaatgagcctcctcttttcttcacaggaagtacagtcactcaggggacttagatggggcagtgtttgtggcttcacctgaagcaaagggagaaaacacccccatgagaatacacagcagcctgagcttggatggtgacattcccatcaggtgtaatgaggtgctacagcatgtaacaagtcttcaagcggtcatgaccttgaacctggaacttggaacttggagacatttctggatgtcatttaaccgagggtatccctgtatgctggcatacaagtgtccagaggttaaacgaagaggaaaataattcaacttggagttgaattttgtgcaggaagtcataaaagtcaccaggactgctatgacaatgttctttagcctacagaaatattcataaaagtgaaaatagtattcaaataaagaatttctcatgatggaaataaaatatacatagaagaacaaattcccctattaaaatcagggaaagagcttaggagtttattagatttctttcaaaacagacctaaaaattattcaactctgttataaataatttgttcctgcggggaagagaaggggcatggcaggttagctccgcagttcaagcattcagcaggaacagtgacatcatcaagtcactgagagcccaacttcagtctgcccacagcagggctgggagacacaagatcctgccctggagctgaaatgggcacgaggctcttcttctatgtggccctttgtctgctgtgggcaggtgagggctggtcacaggagggcctccttccctggaattcccaaggcctcagtgcaggcttttctgttgggatgacagcatcagcatctgttgttctctattacaggacacagggatgctgaaatcacccagagcccaagacacaagatcacagagacaggaaggcaggtgaccttggcgtgtcaccagacttggaaccacaacaatatgttctggtatcgacaagacctgggacatgggctgaggctgatccattactcatatggtgttcaagacactaacaaaggagaagtctcagatggctacagtgtctctagatcaaacacagaggacctccccctcactctggagtctgctgcctcctcccagacatctgtatatttctgcgccagcagtgagtccacagtgctgcacagctgcctcctctctgcacataaagggcagttagaatgactgaggttgcctgtgctcccaagtcccagccttcacaggagtcggagagccctggctagcctgggggccatagagcaggggccatataaaccttgatgttgaggtccattcctaccccagtctcagaccaactggaggtcaccccaacacccttagcttctgcagttccctctttccttttgtaaaatggaaaaggcatctttagtcgagattcctaatttcgttgaaaatttgaaacccaccatattcttctctaccctaagggctgggtgacttttccacataccctttcccctaccctctactgcctttcaactcccaatcataaatctttgcccatgtggtctctgctcctgggggccctttattctaagggcaatagacccacgaggtcctatatcattagccatttacgtacctcttcatcatcattttgcaccatgttttccctggctctctgctccagccacactcccttacatgcagttatttcttcatatgtgtctgttgttttccaccctggggattgtttatataaattctttcttctgcactgagcatacataccacccacttagtcctacatctctacttcatttcttaaattaaagtgtatttcaggcacacttgctcttaattgtaaaaagcaaaaaagaaagtttactagaaaaatttaagaaaagcattttatgcattcagttgagggatgacatttttagaggagacaaaaagccacaagccaaaagaacaacattcataacgctagttgcattaaattgtttcaagccaaaacacaccataaaaaataaagttaagctacagcctgggaaaggcatgaggaatgcatacaaatgatgaaaaatcagtgtgacagagaacattcagtgtaacagagaacattcagaacatcactgaatacctgtagctcctccatggtttctggtctcccttgcagttggaggggtgggaacatgtcaccaggttctgaatagtgggataaaatgatgtcagctcatttcaagcctggcccttaaaaatattctgtggcaccatgttgagggtctctaaatgtactcccatgtttagagtgttggtatatggcatagagttgtactcatggctaagatttattaaagtgtcatagtaaatactctgcagcagaacatgtggagaaaacacacaggcagaatctggaggaattcacaggcaggcttccttatgctctcttcctctcaggaggggtcacacagagctctctctcctcccagcagcaaaaatgcattaacacacgtgcagtgtatctgccaagggagcccattacagacttagcacccaagaggttttagtagaagctggtcacacaggcacctactttttagcatgaaccaaaagtctagatcccaaaagaaaatctgatgttcagcataatattatttgcaacaccagcctaggaacgatgagccacccctgtcagtcaggagaaactttgcatcagttcagggcaccgttcaccagccaagctcccagatgtctgccagagtccaatcttgcaagcaggactttctaagcaccgcagtctccagcctcctgtcaactcttgtgcacagacactcttcaactctcttttgccatgtcctgaactcgggagctacacggtacagattgcctaatgataatatggaagcagcctggctcactgagtcagaatttggtggacaatcacagaagaaagctgctcatgccacactgggctttgtggtcatgggaagtaagacttcatagagctatgccagtgagattttaggatttgttttgtttgttttgttttctgtagcacagctgttcttgtctaagagaattagtatctagaatgagtaaaatattcttattacttagtattaagaagacagctcaataaaaatagcaatactgaggctgagtaggcaattcacacaagagtgaacataagttaccactaaacatgagaataacttcgcaaccttacttacaatcagaatattgcaacctgaaacagtaagttatgatttcaaaattactagattggatacttttccaaggaatgacagtcctacatttgagtagacatatgggctggtgaaaattgtttgtatatttattacaaaagataattacaactacatcagaaaacccactgtgggatatattgtgacaaaccacatttctggaaaatttatcaacgtatttaaatcacttgggttcctttcattgtctttaagttcaataatggagaatgcaactgtcagtgtttttcctattttgaaggtagtctttccatcttttaaaaagtatgataaaatgcacgtaacatataatttcatcactttattttttaaatgtacaattcaatgacattaagtacattcaccttgttgtggaattatcagcattatccatttccaaaattattttcatcaccccaaacagaaaccctgtacccattaagaaataacttcacattctccctcctctggcaaactctaatctattttgtatatgaacgaatttgcctattttagataatgaatttacatgaaaccaggcactatttttccttttgtttctggcttctttcacttagcataacgctttccaggtgtatccacattgtagcatttattagaacttcattctttttcattctcaataatattccattgtgtgtatataacacatttgtttattcattcattagtcaattgacatttgggtggtttccaccttgtagatattgagaacaatggtgcagtcaagactggcctggaaatatctgtttgattccttgttttcaattcttttgggtctatacctaggagtggaacttctgggtcctttggtaattctgtttctcgttttgagtaactaccaaaatatttctttgttgcagctgcacgattttggatttccaccagcagtgtccagtttcttcacaacatttccagaacttgttatttccttttctttttcttttttcttttcaaaaatatgatgatgatgattactgtttttatagccatcctagtaagtgtgaatgatatctcattgcggttttgatttgcatttccctaatgactaaagatgttaagtgtcttttcttgtgcctatgggcaatttgcataccttctttgaaggtaatatttattttatttgattgtgtttttagagtcgctattgactttagatttaagctggtgtacctgtgatgatactaaaggaaattgagattgagattaaacttctcttgggcgatttgttgttggctaagtgtttttaggtgcagtacttctgagacattttgggatactgtagagagagaaataagtaatttattgatatttctgggaattagattttttttacaaagagaagagagatataaataagaaacgggaagatgaggaagaaatctgtggtgctgacttgaattggagttattaatgcaaacttaaggttttaaagattatatatttcctaactttatccagagaagggtctaaaaaacaatacaaagtaaataaacgaatggctatatttgcttttttttgtgctccccagtaacaataggtacattattttattccaaatgttattccttataaaaggctgcttccatatcaagggaaggaaaagtgttagaacatcttttggtagaaatcaagaaaaaggtcagaaccaagaagacatgtccaaaatccacagaagcaatttcaaggggctccattagccaaatccgggtcaatgcaagctttaaagaagaataatgaggatactgaattgtaacaagttataaaaatctataaggctataatgacaatcaaaagagatagataagaatctcttcattacggaagaatgctagttgatatatctaatgagaaaatcaatgcaaccatccacataattatagacaaattccattagtagatgcctaaactaacagtttttgtttccttcaatactttgagttatactgttctactctctcctggcctgttgggtttctgctgagaaatctgctgaaggccatactggggctcctttaaatgtgatatgtttctcactgcatgctgcttttagtattctttctttgtctttgatttttggtaatttgattatattgtgtcttggtgaactcctttttgggttgaatttgattggcagcctccaagcttcctgcacctggatgttgctgtctttcctcagatttgggaaattttcaaccattatttccttatatatgtttttggggcctaacagcatatgtaccttgtttcaaagcatcaatacacagattattacttaattacaaagggtaaagggcacattcacaatggagagatcttggatcagtcatctcaaattaagcattgccaaaatgcataaaaatgacattccatattcttgtgattgaccagatgcaatgggaaatagacatcatctatggtgtatattttccaagtaattaacctctaataatatgaaaatttttatcgtgagctgttttacaagtaagctgaccaggacacttcaaaaatctatggtcatgaaaaacagaaaatataataagtgggtggaggagatgtatcattgaaaagtaactaaagagatccgacaacttcctgaaatacatgatctttgatattgtcccagaggaaaaagtaaatcaaaaccaagggacatggttttggtggggacaaaccacggccaaaccgcaggcggggctctggcaagacagtaggaatagatggagttgggaggaactccccccagtgccgcgcaaacactgtccaatattagccctgattctactgaggacagtgtagacatggccccagtatttctgacccatgaatggagggcctgagcctggtaactctgaaccattcattgaccagcaggcggcactagggtttgctggggttggcttgcttttaaatcagggctcagtgctgtctgaggagttaagtttaaaggaaaagtgtgacttcatcccagcatccagaatctagtttgcagatgtttgagtgtcctgtggaatgtgagccattaaacagaaactcttcatcttccagcaatgccagtatcctctgttcagcagggaaaccccaactgtagcaaatcattgagtgaataatgttctgggcttgcatcagggatagatggaggagagccaggagccagcctgcatgctcacagacccatataaagggagaaccacttcctcctcaggagaactcagagaaaccttagcaattcacctgtaccccacacctaacccattccagttgtgccctggatggtggacaggaggatgtaaagggaacataggagaggggagtggacaattccagacctctccagataggcttagctcaaataaccttgcaaatattctgaataagagccagatttcccagggctctggccttttcttccctgagcagcatgatgatgctccattcctgtcttgacaaggattctgtcatggatttcttggttgtgctgcccaggaagcaggtgaggcccaggaacaatgaggaatgtcgtccctggacttggcatgcctcactcgcaagcacaccatatgtgggtcctgtgattgataggtttgatagatggatacgtcctgtttccagccaccagcctctatcccctgaatgctgttgtcaactcagagccacaactctggtcacaaagatggagcaggtagtggcaccttaatgtgaagaaagtttccatcatgcaattgttacctggtgcctacatgagttagactcaaaccagcagctgtttacctcagtgatagaggatttatgacagaaacagagggctcttgtaattctatacccacaggtattcacctgataaccttcacatgtgtcccctaggttttggggactttgagcctgcctcactgaacacatatatcctcgttcccagctctctggacatgcatctccttgtattattgtcttatgccaactctcaggtgcttcatcccctaactcttcccatcctttaccccttaggcaatgaataaaagtatatttgtgactaatgttgccccattagaaaaaaaatgccagatactagccactgctgttcaattgtaacttatactaaatctgtaaggtttttttttttttaagatttcaacaaatctgattttagatttcttttttcttttgttttgttttttgagacggagtcttgctctgtcgcccaggctggagtgcagtggcgcgatctcggctcactgcaagctccacctcccgggttcacgccattctcctgcctcagtctccagagtagctgggactataggcatgtgccgccatgcccggctaattttttgtatttttagtagagacggggtttcaccgtgttacccaggatggtctcgatctcctgacctcgtgatccacccaccttggcctcccaaagtgctgggactacaggcgtgagccaccatacccggccgattttggatctcttactgtattcacaatgatattttcagggataagagagtccccacccatcttataagatatcagaactttcattacattgatgaccaagaaccataggcagaaccatgatgaagacttggtacacaatgcatcatgaagcttgataacagaaaagagaaagctggccattgaccttcaccaaaaatgaacccttccaactctctctcagggtattattttacccctttagcttagagcatgtcagctggttcaacatgcttctaggataaacctgtgtcaactaccccagctcccactctgtctaagctcatagcaatgagaaaatggagaacctggtaagacagaaatgcccagagagaaggatatacagataagacatagaggttactaattgttgtctgtattttgagttgcctttgacacattcaagtagaaacatgcagcagaagatggccctggagatgcagtgggtgatccaatcccccaagccctagagatgtgagtaaagacacttggatgaacttacacacagtccatgaatacgctaaagcaacttctagctctgttttagttcataacaactggtttctaagaacttaggcacttgtggagacaatgatgttactgtaggaactaccgtataaggacaggatgtcccacctcctctgctcctgttcacaaggaccctgaactggcaaagctcccatcctgccctgaccctgccatgagcaccaggcttctctgctggatggccctctgtctcctgggggcaggtgtgtcctaagaacaccatgatcatcccattggaaattccagtgatttcttcaatcatttctgtctttctgttttcaaattctgtctttttccccaacagaactctcagaagctgaagttgcccagtcccccagatataagattacagagaaaagccaggctgtggctttttggtgtgatcctatttctggccatgctaccctttactggtaccggcagatcctgggacagggcccggagcttctggttcaatttcaggatgagagtgtagtagatgattcacagttgcctaaggatcgattttctgcagagaggctcaaaggagtagactccactctcaagatccagcctgcagagcttggggactcggccatgtatctctgtgccagcagcttagccacagcgttgcagagactttctctcctgtgcacaaaactccagggctctctccgctctactcagctcacagcagcctttccttattcctcatcctctcagggaagaagtgagttttcagatatagctagggttcatatagtgggaggaaatgaactattttcttaaaacatgagcgctatagttgttggttgaaaacatgtcttagggatttgaaacacttctgggtgggaattcaagaaaccaaaactgaaagtgatttatcccagacctagtcctcaggggcagtgatggttgttcttctataaaaaatgcacacaatgttgtacgttaattaagaaaataaataaataaacttgaaaaataaaaacatttaatcaccaaaacgtgtgttaaactttaataatatagatattgattacatgcaagtgacaaacagcaggccctccttctgccgttgtcagcatctgaatgatgtgaatcttatctggctctggagcctcttcttgacctctcactggatgtttcatgcagtcaaatctcaacagacactgtgtgtttggaaatcttttccctctgtttttgtggaaatatgacaataataataatattgtaatgatgatgatgttgatcatttcagctatttcattcagcacactttaaacttcaaagaaatgcacacaaatggttatcctggaaacaattcccaaatcttaactcaaaatgaattttgcttctctggagtgctttaacttttcagtgtaacagacacagcccaacactataattaggcctgggccagctagttcagaggctggtgaagacacttccacctgcctgcctacttccttgtctgcccactaaaatagctccttagtgcattagatattcctgccagaacttcagaagcaatgaactgcccctggtccagttgtctcctctgataatgcactgtgtgtgtccaactctagtctctaccctaacttctgcccagattctcctgtactagaactcattctgaagtactggttagaatgtttgggaaggcagcttcctgggaatcctccgaaggaccatggctgtcagtgattccctcgtaacacttcttgagagcatcttgtatttcattgaacgtaggactcccatttatttcagtctgtctgctcctgttcacctctgagatctctgtggcttgtttgtgttgatttccttttgtgctgcttcttggtcatttgttcgtatttttccttataaacctgattatttttgacatcgtgccagacactatggttgtagaaataatttttggtctaggatggacatatctttctccagagataattttattgtgttttgtaaagtgcatggatacataaacaatccaggactccctgaaaaagaattaaaggcttgaggtgtcctggagcccctggagaacaggtttcctactagttccttgtttcaattcaagttcctcagtggtcaccctcagtaagttctggtcttagccattaccccccagcctgtgaatcagcttcctgagagctgggctgggatcagcaaatgcccctaagggcagtgactgctgtgttcactcccccaggctcctgccttctccaagattctggaccagttgtccctcataatgtttttgggatattaattagtttcagtttttgttagtgtggtaatttacccaactatttaaataataacagaagggttaattttgttacaagaaaggggtcctgatccaaccgccaagagagggttcttggatctcatgcaagaaagaattcagggtgattccacagtgaaaagccaaagcaagtttattaagaaagtaacatggtgaaagaacagctactccacagacagagtagggctttcccaaaagtaacaggaggagcgcatctaccctacgtacaatacttgtttatatataggataagaaaagatcgttgagagatgtgctctgctacaagggtttgtgataaaggattaactttcttaattactatgttttgcaagaatcagtattattatctttaaagagaaattaggaatgtttctgttctcaagatattggggtatcatgacactcccaagtctgggtctgtttagtaaacattattaatctgttgctttaaccataaacatctagaggttagggatacctgattttctgggaatgcagcccagcaaggcccagcctcattttttcacttaagatggagtcactctggtttgaacgcctctgacaatttgagtttcctcttctgtaattactcagatgaaggtcaaagaatttcatttaaagttttaattttctttgaatttcaatgtctgattcttagtctgtgatttgcttgatatttaacttaaatagcatagagaaatgttttactaaaactttaatttcgaggaaaggacttttttaaaaacttgaaggggatttataatcaaattgggacactcacttggttttgacattttatcatttagagtattattatgttgttaattacataaccttcgatgcttcattcgaacagggtaatgagaatagagagtaaatatttaaacttcatcagatctttgacacacctgacaaaaacaagcaatggggaaaggattccctatttaataaatggtgctgggaaaactggctagctatatgcggaaaactgaaactggaccctttcgttacaccttacacaaaaattaactcaagatggattaaatacttaaaagtaagacctaaaaccataaaaaccctagaagaaaacctaggcaataccattcaggacatagacatgggcaaagacttcatgactaaaacaccaaaagcaattgcaacaaaagccaaaatggacaaatgggatctaattaaactgaagagcttctgcacagcaaaagaaactatcatcagagtgaacaggcaacctacagaatgggagaaaatttttgcaatctatccatctgacaaagggctaatatccagaatctacaaggaacttaaacaaatttacaagaaaaaacaaagaaccccataaaaagggggcgaaggatatgaacagacgcttctcaaaggaagacatttatgctgccaacaaacatatgaaaaaaagctcatcatcactggtcattagagaaaggcaaatcaaaatcacaattagataccatcctatgccagttagaatggcgatcattaaaaagtcaggaaacaacagatgctggagaggatgtggagaaataggaacgcttttacactgatggtgggagtgtaaattagttcaaccattgtggaagacagtgcgacgattcctcagggacctagaaccagaaataccatttgacccagcaatcccattactgggtgtatatacccaaaagattataaatcattctactataaagacacatgcacatgtatgtttattgcagcactcttcacaatagcaaagactcgaaaccaacccaaatgcctatcaatgatagcctggataaaggaaatatggtacatatacaccatggaatactatgcagccataaaaaagaatgagttcatgtcctttgcagggacatggatgaagctggaaatcatcactctcagcaaactaacacaggagcagaaaaccaaacaccgcatgttctcattcatacggaggagctgaacaatgagagcatatgggcacagggaggggaacatcacacaccagggcctgttggggcgggggggtcaaggggagggatagcataaggagaaatacctaatgcagatgacgggttgatgggtgcagcaaaccaccatggcacatgtatacctatataacaaacctgcatgttctgcacacgtatcccagaacttaaagtataataaaaataaataaataaaataaagttgatcagagagcagagagtgaacatggaatttacttcattcctgcactgtcgtgactcatttgtgccatgttttgtgagcacacctgaggggcaggggtcagaattggagggagtcacaggtgtgtggctatcatcttttccttcccagtcccctggaaaggtgcttggttccacattttccatttgggggaacttccctaaagtgatacactggtttttgtctattatttgccaaatgtttcttatgggaagtgaaataagttatcttatttagtctcctcttcatctgaggttagtctctcttcatcatcatcctttcatcctggctactgagaaaaaaaagtagattcttttggtgctttttcaacatacactaagatcagtggagaactttctttccttacagggttggcctgtagtttgcaggggagagagaatggattaaattctgatacagaatagtgtgggttggcctatttgctctcctatctgagcactattagttattaacactgatattttatctccacttgtctgacttcaatgtccacctctcaggtggttccatcttaggccatagcaacattaagattgctttctgaccttctaacaccaacaaatcataattcccatatctccatgactcaacaaagcaaagcacaagtcccctgtgtcctggcaagagagcagatttgtgctgtttctgcctactggccacaaggaggcactgtggctttgttgtcatcagagtcaaatggggaggggcgaagatggctctctggaagattcttaagggaaaccctgggtttggccctagattcagggagctgggctgtctggaatgaaggctgggaatgaaggaattagagaccaaccaatttgcctgtattgttgtggagaagggttttgctctaaactgagctctgaatggggctgagtggcaggtgtgcttgcagtggatatatgtctgagcgcccttaagatgtggaggcacaagtagctggggtggtgcagtgcccaggttctgggctgggaaagcagagaagcagttttcatgttacaggagccttggagagcctggccccaaacccccaaaccagctcaggccagccctacctgctctgttaaaagtagaaggaagagcagggagagacggaggtgctaccctggaccatcggagggaccctgttccccagtgagggggcaatcacaattacaacaccagtagcatatacacttattaggcagacactagggtggagtagaacagagttttctccaccaagaccttttgctctcagcaggaaaatggcccagtctattaatagttcacctctgctactcacttcagactcctgtgtgtcccctggaagaaggtggggtctgggtagagatagtatcttttcttttggtttgaattaaagttctttccatatgactcgttcatttgcctctacctgtatcttgtatctagcttctgcctcttgtattcatgtgtgccttggacactataaagtatttgatttctactgctgctgtaatgaattaccactgattttggaggtttaaacaaaatacatttgctaccctacaatactggaggccaggagtccaaaatcagtgtaactgggccaaaatcaaggtgttggcaggcctgcgttctttcccagagctctaggggagaactgtttttctccccttttcagcttctagaggctaccagcgtgtcttggcttgttaccccattcaatcttcgaaaccaacagggactgactgagcctttgctcatgctgcatcactctgacactctttgtcctccctcttccacattttaggacccttgtgactacattggacccgcctggaaaatccaggacactctcccagtatgaaggtcagctgattgacaacctgactttgtgtggaactttaatttttcttttacaagtaacttaacacattcctaggttccagagattagacctggacgtggttggagggcctttgttctgcctaccaaacctaggaacttggtaagagggaggaaaacaaaatgatcacctggaaaccagaatactgaccaccgttttacatcccaggcctaacagacacaaaaagggatggagcccacaaggaaatagacacctcaggtctcacaagctcgtctgtaaactatttgctccttaggatcggaaagtactctggggtgcaggggactcagcagtatgcctctgtgccagcagcaaaaatgtggccctaaactgctccttcttggttagcaattaacccagttgaccaacccacagagcagaggcttctctcagctctgtacactctacaccctgagaggaagtcggcttctgagatgcaagactcttttataaggaaaagtccagttgtaaagattaagaaactttgagctttgctagaggtaaaaataggatgtaagtcaactctggagcatttaatttccaaatgtttatgaaaaagacaatcttcttcctgttttattgtatggatagagaatgagagagattctgtactctgggctttgcaaactcactagagttcaagaataaatacactcagagaggtctttcactgcaaagaagagctttgaaatcgaatgaactttcaggatatcagttcggctcctgtatctctaacaacgcagttgacatgcttgcccttcctagggatctcaggggccaactcctaactcacttgtggataattgaagtgcattcaaaggagtaggagcacagagacatcagggagaggaataggagagtttgcagagaatctggcttgctgtaagacaatgagttcatcttgaaataattggagtgtgaggtgcagatgaatatagttggcaagatcctaggtaagatatactatagagaaggctttatgaattggtaatatcaagacaaatccacagagagcctccgtaggtgtgcatttgtgtctcagatcaattatagttcagtcctgcctgattcatctcccagagatgcagcctccacttaaataaggagctttcaaattggaggtggtggcccattcagtgacgtcactgacagatgcatcttgtgtggataaaatgtcacaaaattaatttctttgttcatgctcacagaggccctggtctggaatgttccacttctgctctcactctgccatgggctcttggaccctctgtgtgtccctttatatcctggtagcgagtgagttctccgatatttattatggtcatgctggacctctgtctagatgactccttatattttccttattctttcccccaattctgtcttcttttatagcacacacagatgctggtgttatccagtcacccaggcacaaagtgacagagatgggacaatcagtaactctgagatgcgaaccaatttcaggccacaatgatcttctctggtacagacagacctttgtgcagggactggaattgctgaattacttctgcagctggaccctcgtagatgactcaggagtgtccaaggattgattctcagcacagatgcctgatgtatcattctccactctgaggatccagcccatggaacccagggacttgggcctatatttctgtgccagcagctttgccacagcactgcagaatctccccatctctgtgcagaaaccctggtgcttcctcttctccccacagctctcagcagtcgtcagcaaagtctttcctgctctctgctcaccatggctcacgcctataatcccagcactttgggaggccgaggtgggtggatcatgaagtcaggagatcgagaccatcctggctaacacagtgaaaccccgtctccactaaaaatacaaaaaattagccgggcacggtggcaagcgcctgtagtcccagctactcgagaggctgaggcaggagaatggcgtgaacccgggaggcggagcttgcagtaagccgagatcgtgccactgcacttcagcctgggcaacagagcaagactccatctcaaaaataaaataaaataaaaattaagtgggtttggagaatgacaaagacagaagatggtaggatattaacataaaaaaaatcatgtgtaggggataatgtagaaaatgtgttttgtgaatttctcacaaattgtctaaggagtcagaattcacaggcatgtaagataaaccttaattacccccactgtaggtttccttgtctccaggtatttgccatccgcattagcaagctgagagctcctgagaatggctatgtcttttgaactagtctgccctctgcattctattttcaccctaagctgtgaacagaaatttcccccacaagttttcttgattgtaaaagaaagttcttttctatggcattccttataatgttaatttcaacttaccatttatatagggattttgcattgcacttaaagagtaaacctcctgtgggtaatacaggcagtgaaataggttagatgtaagctgctcctcctggactctagggatctatttgtctttatcctgcttaaggagagccaagttctagctgaaggcctgtgccaactcacaggacactgacgtggtctcttccactgcctgcttggagctatccacatgtatccacacaggctgtctaaaagcacacaggcctggccagtcttactttgacctctttcctccctgatgctgtgtcctggacacgcatatctatatattttttctggtttatgccgcgtatttctacacagcacttgcaattcattctgaagaattataatttctttcttctatagtagtacttacatactgatcacttctcaacccctatcagggtatcattggcaggtgttgcaaactattcctgtattttgagtgcccaagacaatttgagtttacctgagttcttccatataggcctaggtttcacttgtcattgtctagttttgttatttaaaggccaaggttttcaagatcacaacagtacagaataaaattcaggaattttttaaaatgtacatcaaccgacctactctgtgtttatctattgtcctggtgtctcccttgctctttgggcttctctttgctgcctccagatcactttctttcctccttttttgaagcccagctccttacatacatgacgttagaacaggacccttcattgctgcacttgcttttttcccttcagaactctcttcccattcagtcctgtctgctactaatcctgtcatcattcttaacgactactcatcccacagaccatttttacattggtttggctcctcacttttgaggattttttttaacctactttttttttaagaattgcttccatgattacagtaaatatctactgaataaatgcatgtcttcctcagcttggagatttctgagggttgcaactttgtcgaatattttatccattaatcctaactgtgtatattagacaaggaaggtattaaaaatcatgttttaaatcagaaaatcaataaatagatttaaagagacaaatgcaaaacaaaactgtttagagctgctgttctgggctgaactacagatggactgtgtaagaaatagtaaaatcatctggtaatttcaacttatctttagaatctttggccggaacagctccagggaatcaagggatcataggtggaaagaaagacaaagaggttaaggaagtgagaactggctagggtagcattctctaccttaaggttttcaaacataatatcaaggtcctcagtttatttgtaatttttttgaggatgaaaggaaattatgcacgtgacccaaggtatacacaataaggaaactgacacatgactttgctgagatggaattatattaaagttctgtgacactcacaaactcatctcatgctgattagaaactgtgattggcaatgctgtgtgttacaaaaaaattaaaaaatgattcctttaaaaacattatttctttaaatcagcattttccaaaaatgggggaaatattaaatactatccaattttggtggtgcaaaaaataaaaaagcttaggggcttccagtacccctgacccagctgaccttcctttcccaggcccatgtcttttaatgtgcatttactcagggaaagggaagtgtggctgtgcaggaaaagtggcaatttagaaaacacaggctcaagggcttgatggagggtcccagaagagggcagggcactggtgatcagaggggattagagggcaagctgctagggtaagctgtgcatcagaagtggttccttttgtttccttcagcagtaaatttttattatcattattactttagctgtcctccatatctacttctttagtatggctggctacttctctttccaactctttatgcactaccgtggatctcaccctaggcagaaacaaatccccaaactctcaccagctgcgctcatgaaacaacccttcctggcaggctgtgatctcgccaagagcgatcaagttgatcaagctataaactgacttcatcactagtctaaagaggaaactgtggcaagaacagctgcaggagaaaccctaattacaatgggaggagagacataaggattttaaagcagttttcaaactagtccttctcaagaaccaaacatataagggatcactgggagctgtctctgaagtgggttaaagagaaaagaacagacaaagataaggttctgatgcctgctctctgttcctacagatctctccagaagtcactgtagacctgctacaatttccctcactttgctgtgacacagcctttcttcgttggttcctcctccctatgacttaaacctctctccctcccctcccctatctccattcttccagaaaattcctctgccattcccagagacttgcagaacactggggtttgaaatacattaaatagattttttttaattaataatgatctctgttaagtaacaaaagtttcatatgtgaattgtgcacaaaaaaattatagtaaacttctgagataatgttagaaggcttatgtaatgatcaggctagctttgatgaaggaatttgggactcagggtgagaagacaagataagttagtagacaataaaatgagttgatttattctgtagtagttgggaacttgtttaaaaaaatggagaaagaaattgttgaaaaccctaactccctcaagaggtctgggaatcctgtagcttacatggaatagaaactgaaagggaatcgcttgaacccaggaggcggaggttgcggtgagcagagaacatgccattccactccagcttgggtgacaagagcgaaactacatctcaaaaaaaaagcatgatcaaatttgaatcatagccaaatcttacaaaaattttatgtgaaatatttaattttgccaaaaaaaaaattgatgcaatgacctctacccttgttcacctttttttatcttcactatgtcacagagagtttggcacataatagatgataagtaaatttattttgactctattgagtaaatgacaataatatttcacattctctcaatataatagttgaattctatgtgtactttcttacttagcagagtttcacttcaaaaggggcttcgtcctccacatgaaatacaacagagagtcattatggctagtctcaattttccatacaacttctgcaatattccaagcaaatgtgtttccccagtcaggattaatgaccaatgttacacagtatcctaaccacatctaaagctggaatttgcaaacatccttttggaacaaagaaatttatgttataatagtatttatccagtctcatgatctggtaaaataaattcttcaccacaaccacattttcccaaaaccacattttttgaggctggaaacatcatcatctcagaaagcaccctaaaacactgtaagaaaaattcaccgtgctcggtaatagaatcttatcatccttgcaataagaagataccgtgtgtatgagtgcgagtgtgagagtgtgcatgtgtttatatgtgtgagtgtgtacacgtgtgtgtgtgcattttctcatggagactcatccacatgaaaatagtttctctttggatttcattactaagaggcactgggtgattggtggagctcataggcagttctggggagtgacaggaaatgtcagaccactcaatctgcctaagttatagctgatagggttgtttatttcaagactttctataaattaagaattaaatatgaaaaagcccagagacctccattataaaatgcactatctaaaattctgtaaataatccaagtacaaaatatgaagagatatgtgtctgatcaatcaaaaggagacatggaatatcgcgtttccaggctggatctgtttgatctcttcaagctgttttactttatgccctgtgttattcagggttctctctttcatcttatcatatgaattgcaattatgtaacatttatcagcaatcaaaatattggttaatgcacccttttgtctccactggctaagggtggatttgaagatcaaccctaaattggcctgcttgggaaagcattgaggttgtgtgtgtgagagggtagggtttgtaggagcggagatgcgggaatccctgttcctgatttggacaatcttgagcacatcagttcagaaagtgtgaatccatgagactctggacagttggccacgtggaggcactgtggcttcacaatgcagtggggaaccttggagagcggtgggagggtgacccaggagaggagggctgaagggaagcctggttgtctgctggcatcagcagggcaatctgagttcagagtggatcctgagttaaatactgccagagaagggtaggggtgccaaaggcctcaatttgccccaaggaaaaagtgtctctgtgtctgtatggacagtggagggtgctgaggctggggtgtcaagggctggggaatgcttctcaggacagggacagggtgggcaggcataggaaaataggggttgttgtgagcatgtgggcactgtgctgcacctgccccacctttcgtttaggggccctgcagaccaggaatggaacatggaatagcagagcctgaggcctgcctaagtatgcagtgagctcacagtgtcctgcagggccagtaactggaaaggccagtttcctatggaaatgccagaaatattcctgccctgactgaggttcaggatctggtggcagcctttcccaggcactctctgctgcttctttttttttttttttgagggcatcttgctttgctctgtcaccaaggctggagtacagtggcttgatctcagctcactgcagcctctgcctcctgggttcaaatgattctcctgtctcggcctcctaagtagctgggattacaggcacccaccacaacgcctggctaattttttgtatttttaataaagatggggtttcgccatgttggccaggctggtctcaaactcttgacttcaaacaatctgcctgcctcggcctcccaaagtgctgggattacaagtgtgagccactgtgcccggcccctctgctgcttctttatgtgacctgttttaattctgacagaaatcattcaaaataagtattatcttacctgtttatacatttgactgaagcagctttcctgggtctcacatacgcttagatggaagaaaccagacctggcattggatagatcagtagtagtgtgacagtagttaacatcagccaattatgcatttcaaaatagtgagaagagaataattcaaatgttcctagtctaaagaaaagataaatatttaagataatgcctatcccaatgaccatgatttgattatacaaatgtatcaatgatcatatctacctaaaaaatatgtacatctaatatacatcaataaatagtgaattaaaaaaaagataactggccgaagcctgttcctccaacacctctatccactgttcccactctgtagatttgtcctctcacctggccttccgtttccaggtccccattagcaggaggggaagattatgccacatatgtgatcattatagcctctccactgacaagtccaaggaggatatgacttccaggcaaaacatcttttcatctttcattgtgacaaaaatcaaggttcagttttctccactatagcagttctatgggtgaggccatgtgattgcttttatggaggctgtgtgaggagggaggtttctcagctgcacagcaaggaaataagatgttgtttaaggaaagcacagtcttccagtacctgatgcaatttaccatgagggaaaagacacaaataattgctattcattagttaattttattattttttaataagacacaaagtcatctaaaatgcaaagatagtagtctgataattaggtaaaactaacataaatggttgtgtcttaagggaaagtaaaaatgttgccccttacagcacttcctggttgatactgagtctgatatgcaagaaggtgtgatgctcccagaaagctgtgaattcagagcaatcagcaatcccacaaaagagctgatagaagaatgggcggttttattagaaagaagaggagcctctagtgccttccacgacatcctcactgcccacctctgatttcaggcttgctgtagtggacagttgtgtgcaagtccccattcgcctcgatctggcagtgcccttccacaggtgcatgctgggagtctctctgcttcttccccagggctgttccatgatattatctgagcccacctggcctgtactcaaagacagccagagctcctgatgcccctgctgagacagaggactaatgctccagcctgcccattcatgcagaaacttcagacagcattctgtgtgctcctgagaggccctgatggattccatctcctattgctccaacacaaactcttttgttgtttgtgcacttttatcctggcttcttccttccctattttatgtttcgttcctacttcttcttcctggaatcatttcccgaataagctacatgcacctaagtccccatcacagactttctcttcagggatagcctatactgtggcagtgatgggatgaagccaccatccaaagacccttccctttgaaggagacctttgtttttcttttactcataccgctacccattcgtttaaaaagtcttatgatgacatatataaactaatctcttccagattcatttggaattattcctgaattctcagcagcctcaggatggctctctgttcccttaaagctctgaacccaatttgaactgaatagacttgggttctctttacagaagcagagtttgcctggacccaggtaatcattcattccatttttcttccattcaacaaatctttaatgagctataggtgcagagtagattcaaattttgtggggcacaaagctgatacaattttaaggagctccttgcaaagaagaatgcaaaatgacaaagtgttggaaaggtcctgtgtgagtgagaaggcccgaggttattcttcattgatttcatggcaactacataggtactgtccaggtacttgggaaacaccagtggagaaaccagacagagcttcaagttgaggtagacacttccaaaaaattgttataacttattatactgaataataattaaaaagtaaaaggatatattccccatagatgcttatgtctccagagaagttagagtgctgttgaaagtactgacattctgggtagctcacacctcatttagggaaggatccttagagctctgggattctacgtgccgtatcccaaaaatgaaagtcctgcactgaaaagatttttttttcccctgccctggcccaaccacgaagattggcccctttgcttggtctcccaggaccagatgagttctgggcatagatgggaaagtccttccttggcttaccaggccccagccacggcctcccatggggatgctcatgggcctcctccctgtctccacttctgattctgtgtcctctctcactggagcatgattgtgggaattacccatccaggttgcatcaagatatgcaatagataatctattgtatctgaaataacaatagcagtgctattgactggatgtaagtttggtgccaaagcacgtttacacctcctccaatcttctcccatttagtgaatacaagatcttctgaatggaaatagaacatttccctgtgaccctagagactccagatagttgtagttctgggtgaacatttcatccacattcttaatgagcctcctcttttcttcataggaagtacagtcacttatgggacttaggtggtgagtgtttgtggcttcacctgaagcaaagggaaaaatcatcctcatgagaacacaccgcagcctgagcttggatggtgaggctcccatcaggtgcaatgaggtgctacagtgtgaaacaagacttcaaatgttaaagaccttgaatccacaactttgaaacctttctggatgtcagttgactcttttaaccaagggtatctctgtaggctgaaatacaaatatccagaggttaaacaaagtggaaaataattcaacttggagttgaattttgtacagagaagtcataaaagtcaccaggactgctatgacaatgctctttagactacagaaatattcataaatgttaaaacagcattcaaatgaagaatttagcataatgggagtaaaatacgcatagaagaacaaattcccctattaaaatcagggaatgagattacacattttaagatttctttcaaaacagatctacaaatttttcccaatctaagcttctcaagtatgtctataataaatgatttgttcctgtggggaagagaacagatgtggcaggttagctctgaggttcaagcatttagcagggacagtgacatcatcaagtcactgagagctcaacttcaatttgcccacagcagggctgggagacacaagatcctgccctggagctgaaatgggcaccaggctcttcttctatgtggccctttgtctgctgtgggcaggtgagggctggtcacaggagggcctccttccctggaattcccaaggactcaatgcaagcttttctgttgggatgacagcatcagtgtctgttgttctctattacaggacacagggatgctggaatcacccagagcccaagatacaagatcacagagacaggaaggcaggtgaccttgatgtgtcaccagacttggagccacagctatatgttctggtatcgacaagacctgggacatgggctgaggctgatctattactcagcagctgctgatattacagataaaggagaagtccccgatggctatgttgtctccagatccaagacagagaatttccccctcactctggagtcagctacccgctcccagacatctgtgtatttctgcgccagcagtgagtccacagtgctgcacagctgcctcctctctgcacggaaacggcagttagaaaaactgaggttgcctgtgcacccaagtctgggccccaccctgggacgtctcagcccccataggagtcacagagtcctgcccaggttgggggggtgtcttagagcaggggccatatgaccctcagtgctgtggctctattcctacccctgtctcagaccatctggagtttgccccaacacactaaccttgctgggtctttcttctgcagctctctttttctgcttgcagaatggaagagatattttgttgatattcctaattcccttcataatttcaaagccaacatattcttctctcccttatgggatcagtgacttcttcgtgtaaaccttaccgtatcctctactacccttcaactcacagacacaaatcttcccccatgtggtctctgctcctggctgcctttcttctaagggcaatagccctacaaggtcatctatcatttgcccttcacctgcttctccatcatcattttgtttttttttttttttttttttgagacggagtcttgctctgttgcccaggctggagtgcagtggcgcgatctcggctcactgcaagcccgcctcccgggttcgcgccattctcctgcctcagcctcccaagtagctgggactacaggtgcctgccacggcgcccggctaattttttgtatttttagtagagatggggtttcacggtgttagccaggatggtctcgatctcctgacctcgttattcacccgccttggcctcccaaagtgctgggattacaggcgtgagccactgcgcccagcctccatcatcattttgcattaagtttcccctggctttctgctttagccacactcccctacattcagtttacacgttcgcaggtgtagtgttgttttccaccctggggattgtttatgaataatagattatttctacttcactgagcatatgtgcctccaacttattcccaggcctccacttcattccttacataaaagtctatttcaggtacatttactcttaactgtaaaaagcaagacaaattttatgagagaaaaattaagaaatatatttttagcactcatttgaggaattagttttttagatgacacataagaaaaccactagccataaaaatatttgaggccgggcgcggtggctcatgcctgtaatcccagcactttgggaggctgaggcaggcggatcacttgaggttgggagttcaagatcagcctgaccaacatggagaaaccccgtctttactaaaaatagaaaattagctgggcatggggtgcatgcctgtaatcccacctactcaggaggctgaggcaggagaatcgcttgaacctgggaggcggaggttgctgtgagccgagatcatgccgctgcactccagcctgggcaacaagagcagaactccacctcaaaaaaaaaaaaaatttgtaactccagttgcattaaactaaacttttgtacaccaaaacatagcataagaaatgaaatgttaagccacagcacaggaaaaaaatgaggaatgcatgcagatgatgaaaaatcagtgtgacagagaagagtcaggctcacccatggctcctctatgcttcctggcctcatttgcacttggagggctgggagcatgtcaccaggttctgaatagtgggaggtgagtaaaaataatgttagcccaatttcaagtctggcccttaaaaatatcctgtaggtccatgctgagggtccctaagcgtactcccgtgtttagagatgtggtatatggcatagagttgtactcacagctaagattttctaacatgtcttagtaagttgtcagcagcagatcatatggagaaaacacaggtggaatctgaaggaatccaaactcaggcctccttatgctgtcttcctcccggggaggtcacacagggttctcgcttcactccgtagcaaaaatgcattaacacatgtgcagtgtttctaccaagtgagtccaacagagactcagcactcatgaggtttcagaggaggctggtcacaagcacatactgcctagcattaaccaaaaattcagactccagaaggaaatctggtgttcagtacaatactgtttgcaacaccagtttaggcacaacgagccgctcctctcagttaggagaaactttgccagtgcagggcatcactcatcagccaagtggccaaagatcagccaaagttcaatcttgcaagcaggcagtctcaagcctgctgtcaactcttttctgcacagacactcttcaactctcttttgccatgtgtggatgaatttgggaggtcatggcacagattataaactggaagcagcttggctccctgggtcataatttggtggacagccatggaaaaaaagctgctcatgccccactgggttttgtggtcatgagaggtaagacttgatagagttcagccactgagattttaggatttgttttatttatttttttttctgtagcataggtgtccttttctaataaacttagtacataaatgagtaaaacattcttattaataagacgacagcccaataaaaatggcaatactgaagctaaataggcaattcacacaagtgaacataagttaccactaaacatgagaataacttttcaaccttacttataatcagaatatagcaacctgaaataataagttatgattcaaaaattactagataggaaacttttcaaaggagtgacagtcctaaatctgaatagacatttgaactaatgaaaaccgtttatatatccactagaagagataatgacaaccacatcagaaaacccactgtgggatatattgtgactaatagcatttcttgagaaattatgagtgtatataaatcatttgggttccttttcttgtctttaggttcaatcgtagaaaattcaactttaagtatttatttttcctattgtaaaggtagttttttaaaacaatcttttaaaaaagtgggctgggcatggtggctcacacttgtaatcccagctactcaggaggctaaggcaggagaatcgcttgaacccagaggcacaggctgcaatgaaccaagattatgtcactgcactccagcctgggcgacagagtgagactccatttcaaaaaaaaagggtgggtggcagggggaaatatgtgtaacatataattttgtcactttatttttaaattgtacaattcagcagcattaagtacattcactatgttgggaaactgtcaccattatctgtttccaattttcttttcattgcctcaaacagaaactcaatacccactaaagaataactccacataccccctctttctgctaacctctaatctaatttctttctgaatgaatttgcctattgcagattatttatgtgaaaccatgcactatttttccttttgtgtcttgtatctttcacttagcttaatgctttcaaggtgcattcatattgtagcatttatcaaaacttcattccttttcatttctcaataatattttgttgtatgcatataccacatttgtttatccattcattaattgattaacatttgggttgtttctaccttgtagatattgggaataatggtgcaatgaatattggcctgaaaatatctgtttgatgccctgttttcaattcttttgggtatatacccaggagtgaaacttctgggtcctttggtaattctatgtttctccttttaagtaactaccaaaatggtttttttttggttgcagctgcacaattttagattcctaccagcaatgtcatttcttcacagaattgccagcatttatttcttgtttttcttttcaaaaatattatgatgatgatgattactattttgtatagccatcctagtcagtgtgaatgatatctcattgtggttgtgatttgcatttctctaatgactaaaaatgttaagtgccttttcttatgcctatgatcaatttgcacaccttctttggaggtaatgttttttgtctgattggcttttttggggtgtctcttgactttagaattatgttggtgtactgcgacaatgctaaaagaaattgagtttgaacttcatttgggaggtttgtggttggtagtgtttttagtgcggtacttcttaaacatttttaatataccatagaagagagaaaatgattacattttgatatgatttggctgtgtcccaacccaaatctcatcttgaattgtatctctcacaattcccacgtgttgtgggaggaaccctgtggggaggtgattgaattatgggggccgggtctttcctgctgtctcgtgatactaaatgagtctcttttagatctgatggttttaaaatgggattttccctgcacaagctctctcttttatgttaccatccaagtaagacatgacttgcccctccttgccttctgccatgattgtgaggcctccccagccatgtggaactgtaagtccattaagcctctttttcttctcagtctctggtatgtctttatcagcagcatgaaaatgaactaatacatatcgtgatttagggaactcctttttggattgaatttaactggcaacctctgagctttctgtacctggatattgctaactttttccagatttaaggaattttcaaccatgttttatatatgcttttgggactggaacaggatatggacatttttccaatgcatcactccacagattactactcagttacagagggtaaaagacatattaaaaatgaagagatccagtgtcagttacctcaaatatacattgacaaaactgcataaaaatgacattccacattcttgcaattgaccagatacaataggaaatacacatcatctgtggtgtatatttgccaagtaactaacctctaatagtatagaaattcttgttgtggctcattttacaactaagctgacctaggcacttcaaaaacttataatcatgaaaaacaggaaatataataagtgggtggaagagatgtataatttaaaagtaactaaggagaactgctaacctcatgaaatacgtgatctttgattttgttctagaggaaaagtgaatcaaaaccaagggacatgctgagacaactggagaaatttgaatgtgaagtatgtactagatgacaatgctatgtgaatgctaatgttttgagcgtaatagtgacatttgtggttatataagataatgccaattttttaggagactcattttattattaaggataaaatgcttcagaaattgagggcaaaatatatatagagagatcaagcaaaatcacaaaatgtacaatcggcacacagatatacattttaatattctgattgtttcattattctctcaccttttccatagatgttcagtttaaaaaaattgaagaaaaatattaacagaccaaaataaaatgttggtgttatttcagagtaataatgttgttgggtatttcttatattcatttttaatatatttgaaatactatgtcattaccataaaataaatatatcaaataaggtatcttttagtctagagtatacttttttaaataggagacaggctatgatttttaagaaagtcccaaaagaaaacaagagaatttgcagtctgaggacaaagcagcttggtatctctgagaccagtgcaaaacttagctagtaatgcatgtcaagaggccttttagcaaatatacaggactgttttctctgtatcaagagattctgagtattctacagtttggctgaaaactcaagaactttcaaaggtgactgaatgtaaagagaagagtagtgattttccaaagttagggctggacaatatgtatttgttcaacaaagagggaggctgtctcagtttatcctctgctgctatagcagaatacctgaggctgggaaaatgtataaagaaatttataaggaaaagggctttatttggcttgcaattctggaggctggaaagaccagtagggcatcaacatctactgaacttcttttgagggctttgtgctgtgtcacaacgtggaagagaagtgggagaaatgagcaggcctgtgcaaggagagccaggatgagcaagaccctcactttataacagcctgcttttatggtaactaatccagatgctggagagagagaactgactcctggcattaatctttgatgagggatctactcccatgacccaaacaattcccataaggctcacactaccccagaaaaatgtgagcaatgtgcctgtagcaacaccactacattgacgaataagcttcaacatgaattttggtgggaacacaccataactaaactataggacaggctctagcaagacagtaagaacaggtggaactaggaaaaaattttccctggtttctcacaaacactgtcctatattagccctgattctattgaagatagtatagaagtcccaccagtatctctaagccatggaccgaggacctaagtccagtgacactggccatcagaaggcactggggtttgatgatgctcaaatgtttttgaaacagggctcagtgctgcctgagatgttaagtttaaaggaaaagtgtgtatcctagtatccagtatcttgtttgcagaagttgtgagtagtcagtgaaatgtgaaatattaaaaaaaaaaaccctttatctttcattggtgctggcatgttctgctcagcagtaaaatctgaactgtagcaaatcttttgagtggagactcttctgggcttgcatgggaggtagatggaggaggaccaggagccagcctaaatgctcagagacccatgcaaagggaaaatgactggctcctcaggagaattcagagaaatgtgagcaatgcacctgtacctcacaccttacctattctagtcgtgctctggacaatgtatacgatgatgtaagggaaatataggagagtggacaattctagtttatgccagataggctattccaaattgcaggtagtaactacagatattcttaacaaaaaccggatttcccagggctctggccttttcttccctgagcagcacaatgaccagttcctgccttgacaagaattctgtcatagatttctcagttgcgctgcccaggaagcagatgaggcctgggaacaatgaggaatgtcttccctggacttgacatgcctcacttgcaagcacaccacatgcaggtcctgtggactgataggcttgatagacagataagtcctgtttccagctaccagcctccatcccctgaatgctgttgtcacccagaactgtaaacctggtcacaaagatggagcaggtagtggccccttaatgtgaagaaattttccatcatgcaattattacctggtgcctacatgagttggactcaaaccagcagatttttacctcagtagtaaaggatttatgacagaaacggatggctctggtaattctatacccacaggtattcacctgataaccttgacatgtgtcccctaggttttgcaggtttggtggaatatctctgagtgcacctcactgaacacatatatcctcattcccacctccctggacgtgcatctccttgtgttattgtcttatgccaactctgaggagcgccatcccctaactccttttatttcttattactcaggcaaggaataaaagtgcgtttgtgactaatgttgccccattagaaacaaaaaatagataatgaccactactgttcaactgtaatttacactagaggtatagctataaggttatttttagatttcagcaagtctctttgattttgcatttcttacaatatatactgatattttcagggataagagaattccccacctatcttcgataaaaatgagaacttactttcattgcactggtgacccaaaactacaggcagagccatgatgaaggcttggtacacaatgtatcatgaatgataacagtaaagaggaaactgttcattggccttcactaaaaatgaacccttccaactctgtgcccaggttattgttttatccctttagcttacagcgcgtcagctaattcaacaagcttctaggataaacttgtgtcaattaccccagcttctaagtgcataggaccaggaagatagagaacctagtaaaagagaaacacccaaagagaaggataattgctgataagacaaagaggtcactaactgatatctctgtttcgagttgccttcaactcgaaacatccagcagaggatgggcctagagatggagtaggagatccagtccccaagccctagagatgtgagtgaggacacttggctgaacttacacagtctgtgaatacagtaaagcaacttcgtgctctcttttagcttataataattggtttctaacaatgtaggcatttgtggaggcaatgatgtcactgtgggaactgccatgagaggacagggacgtccctcctcctctgcttttgctcacagtgaccctgattgggcaaagctcccatccttccctgaccctgccatgggcaccaggctcctctgctgggcggccctctgtctcctgggagcaggtgagtcctaggaacaccatgatcacattggatctctctgattatttcaatcatttccttctattttcaaattctgtctttttccttctcagaactcacagaagctggagttgcccagtctcccagatataagattatagagaaaaggcagagtgtggctttttggtgcaatcctatatctggccatgctaccctttactggtaccagcagatcctgggacagggcccaaagcttctgattcagtttcagaataacggtgtagtggatgattcacagttgcctaaggatcgattttctgcagagaggctcaaaggagtagactccactctcaagatccagcctgcaaagcttgaggactcggccgtgtatctctgtgccagcagcttagacacagtgtagcagagacacttccctcctgtgcagaaaaccagaaaaccgcaggactctctcctctctactcagctcacagcagcctttccttattcctcatcctcccaaggaagaagtgagttttcagatatagctaggactcatatagtgggaggaaataaactttttcttttcttttctttttttctttttgtttttgagatggagtcttgctccattgcccaggctggagtgcagtggtgcgatctgggctcactgcagtctctgcctcctgagttcaagtgattgtcctgcctcagcctccccagtagctgggatgacaggcatgtgccaccatgcccagctaatttctgtatttttagtagagacgggattttgatatgttggccaggctgatttcgaactcctgacctcaagtgattcgcccttctcggcatctcaaagcgctggaattacaagcttgagccactgtgcctggctggagataaactatttcttaaaacatgaaggctgcagttgttatttgaaaatatgtctaaggaatctgaaacacctatcggtgagaattcaagaaaccaaaactgaaagtgacttatcacagacttagtcttctggggtactaatagttgttcttgtatttaaaaaatgcatacaatattttatatcaattaaaaaatacgtaaatttgaaaaataaaaacatgcagtcaataaacatgtgtgataaactttaataatacagataatgattgtatgtgagtaacaatcagcaggttttctctctgcagttgtcagcatatgaataatttgaatcctatccttggtgacaccctggctctggagcctcctctagacctctcattggatgtattatgcaaccaaatctcaacaggtactatgtgtttggaaatctttttcccctgtttttgcagaaatatgctaataagagtaatgttaaagatgatgatgttgataatttcaactatttcattcggcaccctttaaatttcaaaaaaatgcacacaaatggatatcctggcaacgagtccaaaatcttagctcaaaatgaattctgctactccagagctttctaactcttccatgtaacaaacatatcccaacattatatggggctgggccagctagttcagagactgatgaggacactttcacttgtctgtcctcatatattaaaatagctccttagttgatatggtttgactgtgtccccacccaaatctcaacttgaattgtacctcccagaattcccacgtgttgtgggagggacccgggggatataattgaaccatgggggccagtctttcccatgctattctcatgatagtgaacaagtctcacgagatctcatgggcttatcaggggtttccacatttgcttcttcctcattttctcttgccgccaccatgtaagatgtgccttttgcttcctgccatgattctgaggcctccccagccatgtggaactgtaagtccaactaaacgtctttttcttccctgtcttgggtatgtctttatcagcagcatgaaaacagactaatacatcagtgcattagatattcctgaaagaacttcagaagcaattaactgcccctggtccagttgcctcctctgataatgcattgtgtgtgtccaactctagtctctaccctatcttctgcccagactgtcttgtactagaaattattctgaagtattggttagaatgtttggaaatgcagcttcctgggaatcttctgaaggactgtcactgtccctcagcccctcctgacttccctttccatccacctgactgcaggtcctaactgatggccatgaactcactacacatctcccttccttccctgcaatttactcagctaacaacacctcagccaggtggtgggtgaccatgaccatcctcctcttccttgccagaattttcatttggttctttttctgatctataaggtcatcttttacagtcagtcattccctcataaccttttttgagtgtatcttttatttcgttgagcataggacactcagttatttcagtctgtctgcttattttcacctctgtggtctttgtggacatttttgtatgtgtgctgcttctcagtcatttgtttgtatttttccttttaaacctgattatttttgacatcatgccagacactatggctgtagaaataatttctggtctaggatggatatatctttctccagagataattttattgtgctttgtaaagtgcatggatgcataaacaatccaggactccctggaacagaattaaaggcttgaggtgtcctggagaccctggaggacaggcttccttctagtgcattgattctattcaagtccctcaatggtcacattaagtaagttatggtctttgcctttacccctctggactgtgagtcagcttccttagtgctgggctgggatcagcaaatgcccataagggcagtgactgctgtgctcactcccgaggcccctgccttctccaagattctggcccagttattcctcatcgtatctttaggatatgaattagttgcagtttgttagtgtggttattttactcaagtacataaataataacaaaagcattaatctgagttccctcttctgtaattatacagattaaggtcaaaacattttatctgaagttttaattttctttgaattttaacgtcagattcttagtctgatttgtttgatatttgacttaaacagcgtagagatgttatacagaaactttaattttaaggaaagaactttttaaaaacttgaagtggatttataatcaaattgggacccttacttggttttgaggttttatcatttgagtatttttatgttatttattacataatctttgatgcttcactggatcataagacaagatgagaacagagagtgaatatttagacttgatcagagagcacaaagtgaacatggaattagtttctgttgatgaacagtccaactatgtaaaatatttaaagacatttattctgagccaaatatgagtgaccatggcctgtgaaacagccttctggaggtactgagatcagtgcccaaggtggtcagggtgcagcttggttttctacattttagggagacatgagacttgagacttcaatcaaacacaattaagagatacattgtttttggccagaaaggcagacacctggaggcaggagtggggagaggttccagcttaaaggtagatataaaatttttctggttgacaattggttgtctctcaggttaaattttaaaagagccctggctgggtaggaagtccattcagattattgggggccttttaattttatttgtggtttacacttcatttctgcattgttgtgatccatttgtgccatgttttttgagtacacctgagggccaggggtcagaactagagggagtcacagatgtgtgactatcatcttttcctacttaagcccaggcttctgggaaaacactttgctccacattttccatttgagggaacttgcctaaagcaatgctccagttttattctttctattgcttgccaaatcttccctatgggaagggaaataagttattttatttagtctcctcttcatctgaggttcctctctcttcattctctccctttcatcctggctactgggaataaaagcagattcttttggtgcttttttaaatgcactaagatcagtgggaaactttcttttccttatagggatggcctgtaatttggaggggagagagaatggattaaattctgattcaagacagtgttggtcggtctttttgccctcccatctgagccgggttgtttatggatattaaaactgatattatgtctccatctgtcagactgtaatgtccatctctcaggtggttccatcttaggtcataatgttgttttatgaccctccaacaccacaaattatggtatctcgtttccccatggctcaataaagggaagtgcaagtccttggtcttgacaaagagcacatttgtgctgttcctgcctactggccaccaggaggcactgtggcttcactgtcatccaaagtctatgggggaggggctgggattgctccctggaggatccttaatgaaaaccctggagttggacctagagtcagggagctgggttggaggtacctgcaatgaaggctgaaaataaagggattagagaccaacccttttgcctcttgatgcggagatgggttttgctgtaaattgagatttgaatagggctctgagtggcagatgggcttgcaagtggatgtaggtctgagctcactgaagacgtggaggcacaaggagctggggtggtgcggcgccgtgttctgggctggggaaagcagaaaagcagtgtttgtgtcacaggagccttgtagagcctggccccaagccggccgaggctagccctacctgttccgtcgaacgtagagggaagaacaggtagaaatggaggcgctaccctggaccatgtcagggggagcctgtcctcaggcagcttcaatcacaatgatgtaccagcagcatatacacttattagcaaggcttagggtggagtaggacagaattttctcccccaagaacctttgctcagggcgggaaaatgctgcagtctagttctaactctattactccagatgcctctgtgtccctggaagaaggtggggtctgggcatataaaagttttgtttgttttgcctgggttgatttcgtttttccatgtgatcgtgcatctgactctaccagtattttgtatccggcttctgcctctctctctcatgagtcccatggctactataaggtattcaatttctattgctgctgtaacgaattaccactaacttggtggcttacaaccacacaagtattaccttacagttctggaggtcagaagtccaaaatggatgttactgggctaaaatccaagcgttggcagggctgcattccttcctgaggctctagggaagaactgtttttctctccttttcagcttctagaggccaccagtgctccttggctcatggccccattcaatcttcaaagccagcaaggactggctgagactttgctcactctgcatactctgatgctcacttttcatcctccctcttccacattttaggaccattgtgattacattgggcccctatattaaggtcagctgattggcaagctcacttcacttggaacattaattcccctttatcaggtaatttaacacattccagggattaggcctgggcatggttgaaggggcattgttctgactaccaaacctaggcacctggtaatagggaggaaaacgtgttggtcaccttaaaaactgattgatgactaccgttttacattctggatctaacacacacaacaaagggatggaacccacaaggaaacagacacctcaggtcacacaagctcatctgtaaactatttgctccttaggatgggcaagtcccctggggcgcaggggactcagctgtatgcctctgtgccaacagcgaaaatgtggccttaaactgctccttcttctttgttagcaaataacctagttgaccaattcatagagcagaggttctctcagttctctatactctacaccccgagaggaagtcagttagtgagatgtaagattcttttataagaaaaagaccaggtgtaaagattaagaaatgctgagctttgctagaggtaagaataagatgtaaatcaactctggaacatttaatttccaaatctttgtgagaaagacaatcttgtttctgatttattgtgtggatagagaatgtgagagattctgtgctctgggctttgcaaactcaatagagttcaaggatcaataaactcggagagacccttcactgcaaagaagagctttgaaatctaatgagctttcgggacactgattcagctcctgtatctttaacaacgcggttgacatgcttgctcttcctgggtaactcagatgctaacttctaactcatttaaaggcatttgaagaactaggagcacagagtcaccagtgagaggaagaggagagtttgcagagaagctggcttgcaataaggcaatgagttcatctttaaatacttggagtttgaggtgcagatggatatagttggcaggctcctaggtaaggcatgttatggagaaggtgctatgaattgataatatcaaagcaaatctacagggatcctctgcaagtgtgcatctgtatctcagatcaattatagttgacttcagtcctgcctgattcatctcccaaaaatgtagtctgcctgattcatctcccaaaaatgtagcctccgcttaaaggagctttcaagttgggggtggtgggccattcagtgttgtcactaacagatgcatcttgtgggggtaaaatgtcccaaagtatcttttcttgcttatgttcataagggcgctggtctggaatgtgccacatctgttctcactctgccatggactcctggaccctctgtgtgtccctttgtatcctggtagcgagtgagtcctcatgtatttatcatcctcatgctgggcctctgtatagatgacttcctgtattttccttattctgtttcctaattttgcgttcttttatagcatgcacagatgctggcattatccagtcacccaagcatgaggtgacagaaatgggacaaacagtgactctgagatgtgagccaatttttggccacaatttccttttctggtacagagataccttcgtgcagggactggaattgctgagttacttccggagctgatctattatagataatgcaggtatgcccacagagcgattctcagctgagaggcctgatggatcattctctactctgaagatccagcctgcagagcagggggactcggccgtgtatgtctgtgcaagtcgcttagccacagcgctgcagaatctccccctccctgtgcagaaactctggtgcttcctcttttcctcacagctcccagcagtcctgagcaaagtctttcctgcctcaccctccccacaagaataattaagtgggtttggggcatggcaaagacataagatgatacaatatcaacatacaaaatcttgtgtaggagataatgtcgaaaatgcattttgcaaatttctcacaaattgtgtatggggtcataactcacacacaggtaggataaaccttaattacccacaccgtaggtttccctgccttcctgtatttgacactcccatccaaacagtgggagctcttcagaatggctatgtcttgtgaactactctgcccacttcattcccttctcactctaagccatgaacagaaatttcccctacaagtactctttattgtaaatgaaagttcttttctatgattgtggacattcctttataatgctaatttcaatttaccatttatatacggatttttacattaaacttaaagagatcttcagtgtggataatacaggcagtttaatacattagaagtaagctacccctcttggcctacagggatccatttgtttctatcttgcataaagcaagccaggtgctagctaaaggtctgtgtgcactcacaggacactgatgagatctcctccactgcctgttctggaactatcaatatgaatatacacagggtgtctaaaagcacacagggcctggtgtggtggctcatgcctgtaatctcagcactttgggaggctgaggcgggaggaatgcttgaggtggggagttcaagactaggctgggaaacagtgagattttgtctctaaaatatatatatattttaaaaattagcctggtatggcagtcttagctactcaggaggctgagttgagagggttgcttgagccctgaagttcgaggctggagtgagccatgatcatcgcaacagagtaagaccccaaatcacacacaaaaaataaataaataaagttaaaaaacatacacaggcctggccagtcttacttggccctctttcctccctgatgctgtgtcctgaacagccaaatctgtattttttttcttctggtttatgatacacatttctacacagcacttgcaatttattatgaagagttataatgtctttcttctatagtagtatttacatactgatgatttctcaacccctatcagtgtatcatcggcaattgttgcaaaatgtgcctgtattttgcatgcccaagacaatttgggtttacccgagttcttcgatagaggccctggtttcgcttgtcactgtcctatttttgttattcaaagactgagactttcaagatcagaatgatgcagaatgaaattcggggtatcctttaatgtacatcgagagacctactctgtgtttatatattgttttggtgtcttccttgctctttgggcttctctctgttgcctccagatcattttccttcctcctttgaagcccagctcctttacacacatgacattagaacagcacccttctttgctgcacttgcttctttcccttcagaactctcttctcattcagtccttctgtctgctactaatcttgtcatcattcctaatggctactcatcacacagaccatttttcattggttttgcttctcactttcttgacttcctcacttttgacattttatccattaatcctaacattgtatatctgacaaggaagatattaaaaatcacatgttttgaatcagtgaatcaataaacaggtttaaagagacaaatgcaaaacaaaattgtccagagctgctgttctgggctggactacagatagatcatgtaagaaataataaaatcatctggtaatttcaatttatctttagaatctttggacagaacagctccaggggagtcaagggatcatagatggtaagagagacaaagaggttaggaggtgagaactggctagggtggcagtccctaacctaaggttttcaaggataatatcaaggtcctcaatttcttttaaatattttttgaaagtgaaaggaaattatgcacatgacccaagctatacataataaggaaattgactcatgtctttgctgagatggaattatattaaagttctgtgaaattaacttatgggctcatctcatgctgattaaaaaccctgattgacagcgctgtgtgttacaaaaatgacaaaataaatgattactttaaaaacattattttaaaaaattagcatttgccaagagtgggggtaaaaaatgacatactgccagatggtacaaggaatggagacgtttgaggcttccagagcctctgacctagctcaccccactttcccgggcccgatgtcttctaaagttcatctgtgcagggaaagggaagtgtagttgtgcaggaaatacggcaggttaggaaatcacaggctctagagcttttacaggcttttacatcctgtgtatctgtgctatttccacagtctgcaacaaactgtattctccccaaacagggccagacactcctcatctatcaaggactgactcacatctaccttcctctttgcttcttaccctgacattccctggccactgcagtatatcattctgtttcctttacattcagaggaaaattcaggtatataattgatactactcgatgtttgtgaaatgaataaattaatgtccatttatacagagctctgaaatattatctattactgttttcccttcaaaaggggctccttttacttgaaatatgatggagagtcattatggctagtctcaattttccatacaatttctgcagtattccaagcaaatgtgttttcccagtcaggattaatgaccagtactacccagtaccctaactatatctaaagctggaattcacaaatgtccttttggaacaaagaaatttatgttataataatatttatccagtcctatgatccagtaaaagaaattcctcaccacaaccacacttttccaaaatcacatctttatgagtctggacacattatcaggggtgcatttcagaagtcaacctaaaacactgagagaaaaatttgttgtgctcagtaatagaatcttatccttgcaataagaagataccatgtgtgtatgtgtgtgtgtgtgagtgtatatgtgtgtatgagtgtgtgtgtgagagtgtatgtgtgagtgtgtatgagtgtgtgtgtatgtgcattttctcatgcagattcatccacatgaaaaagtttatctttggatcgcattacaaagaggcactgggtcacctggggagctcataggcacttctggctagtgatgggaaatgtcacaccactcaatctgcctaagttatagccaatagggttgtttatttcaagactttttataaattcagaattaaatatgtaaaaactagaagccccttttattaaatgcactatttaaaatttggtaataatgactctaaatacaaaatatgaagacacatgagatattaaatatttttccaagatcattctgctggatagcttcacactgtttaattgtatgtcctgtcttattcaggctcctctcttccaccttatcatatgaattgcaatgacataacaacgattaattttgcaatcaaaatgttggttaatacactcttttgtctccactggctaagggaggatttagagattaaccctaaattggcttatctgggaaagcttagagagggtgtatgtgagagggtgggggctgcaggagcgggatgcaggggtctctgttacggatttggacaatctagagctcatcagatcagaaggtgtgaatctgtgagactatggatctatagccacttggaggcgctgtgtctccgcaatgctgctgggaaccctggggaggggagggcaggtgacccagaagaggaaggctgaagagaatgcctggctgcctgctagcatcaggtgggggccatttgagttcagagtgagttctgagtttaacacagactcctcactgtccagagaagggtaggggtgcgaaaggcctcagtttgtaccaacaagagagtgtctctgtgtctgtctggccagtggatggtgaaggggctggggcatccagggcttgggaatcagtgtcagggcagggacagcggtgggtggagtaaggtgtgacatggacatgtggacactgtgctccacctttagtttcgggacccttcagggcaggaatgatacatggggtagcagagccaggcacccacctaagggtacagtgggcaaaggatggcctgcagaggaagtaaatagaaaggcaagtttcctatggtaatgccaaaacattcctgcccccactcagaaaaagaccatgaatgggatgttggcagccagaggggctcaggatctggtgatccgacaggcctttcccaggtaccctctgttgcttctttatgagacctgttttgattctaacagaaatcatgcaaaataagtattatttaactgtgtatacacttgactgaaataactttcctgggtcttgtacactcttagatggaagaaaccagacctggcgttggatagatcagtaatagggtgactgtagttaacatcaaccaattatgcatttcaaaatagctagaagagaataattcaaatgttcttaaggtaaagaaaagacaaatattaaagtgatgcctatcccaatgaccatgatttgattatattaatgtatcaaagatcacatctactaaaaaatatgtacatctaatatgtatcaataaatagttaattgaaaagaagataactagctgacgtctgttcctccagcacctctacctgctgtccccactctgcagatttgtcctctcacatggccttccctttccaggtccccattagcaggaggagaaagtcaggcattatatgtgatcactatactctctttgctgaaaagtccaaggaacatataacttccaggctaaacatattcattcatccttcattgtgacaaaaaagagaggtgcaattttctgcaccatagctgtcctatgaatgaggccaggtgatctctttcatgaaggatatgtgaggagagagatttctcagtgcacagcaaagggaatgggatgtttttaaaggaaagtgtagttttcctgtacctgatgtaatttattatgagggaaaagacacaaatcattattattcattagttaatttattgatttcataaacattttaagccccctgctttgtacaagggattgtgccacataaatttaaaagcgaaacaaaaaataaaatttagaaaaacagataagacaatttttaaaaacagtatgtttctcgcctttgacaatattaaggcaattaatatggaaatgtatttattgaattattttgaaatttatattttgctaattcaaaatactttaatgtttctgaattatacaaatgtcctttttaaaaatctttctctttagttacctacctccttttaccacctttttaaaaaaaattttagtgagaacatttaatatgagatctatcctcttaacaggcttttaagtatatagtagagtatcgtagtccacagacacaaggctgtacagtagatctctagaacttcctcatcctgcttaactgggaattttatacctgttgacagcaactccccattgccaccaatccctagcccttggaaaccaatgtttcagtttttacttccatgagtttgactatttaggttgcctcataaaagtagaaaaaggcacggtggctcacgcctgtaatcccagtactttgggaggccgaggtgggcacatcacgtgaggtcaggagttggagaccagcctggccaacatggtgaaaccctgcatctactaaaaatacaaaaattagctgggcacggtggcaggcgcctgtaatcccagctactcaggaggctgaggcaggaaaatcatttgaaaacgggaggtggaggttgcagcgagccgatattgtgccattgcactccagcctggtcaacaaggcgaaactccatctcaaaaaaaaaaaaaaaaaaaaaaaaagagtcgtgcagtatttgtctttctgtgtctggcttactcagttaccataatgtcctccaggtttatccacattgccacatatggtgagattttcttcttttttgatattatttccttgtgtgtatataacacatttaaggtctgtggtaataaatgcatagtatttgactgtttctataaaaccacacatcacacgagtaacagggtcatttgcagaggtgcaggctctgagtacattaatgcacctttatggttcaattatgctgcacggagaagattcagaaaaaaaaatcataattccatcctttattgtcattttactatacacaaaatagaagcccttcatttgcaaaattgcagttaattagaaattcaactgtcagaaaaagccttaagacacaaatgctattctcattttacagagaggagggaattgacccacaggttaaataacatgatcacattaaatggctattaggatgcagtaccgggggtccagctctgacctgtcagtctctaagccctgtgtttatagctctgtgctataaggcattttcatgaagagagacgcctacctttcaaaatcagagtatttgctctctacatccctttcagacctgctggctccaataacatcacagacagagatgaatgtatcctggagacagtatggggaaagaactctgaaaagatgccatggcacccagccctgactcccactctaacaccaccacatcactaactgagaccagctcttgacaggttaactttagtttggtttttgttttgttaatctataaaatgagactaatacagtctatctatagggctgtatatagaatttagtatcataaaatatctagcctataataggaatctaaatctcttgattccctttgttaatctcagacagcctcttccaccctcaccatgcacaaaggcagattcagacacactctgcctagaaatcttaagctgagaacttagaagtcacagaagtggaaatatatatacctgatgatccctcacatgaaattaactaaagaatgtagcatacatacctcctcagatagttaaaaatcaacttcattaatatatagattatataaacattacacattttaagtgaactgatgagtgattttggagcaatatatgtgtatagacccttcaatccccatccctattaagatgccgaacatttccatcacacagagagtgttctcattcctctctgcaatgcctccctccatccctgacaaccagtgatatttatcactagaaaattgttttgctcaggtacatttttaatggaaatttacaacctctaactattaaaacacttcctctttagtacacaggtaaatattcaagagagggaggtgctcccaaagatatttatggctattcccctcaatgacagaatggataaagaaaatgtgacacatatacaccatggaatactatgcagtcatatgaaagaatgagatcatgtcctttgcagggacatggatgaagctggaagccattatcctcagcaaactaatacaggaacagaaaaccaaacaccgcatgttttcacctagtgggagttgaacgaagagaacacatggacacagggaggggaacaacacacactggagcctgtcggagggcggagggtgagaggagggagagcattacgatgaatacctaatgcatgcggagcttaaagcctagatgacgggttgatgggtgcagcaaaccaccgtggcacatgtttacctatgtaacaaacctgcacattcttcacatgtatcccgaaacttaaagtaaaatttaaaaaatttaaaaaaagagagattttttatggctttagaagggtttcaaacccttccagaaccctgagagacacctgatccacgttagggataatcctgtctggagatagacaagatgatgaaatgacaccaaaaatcttcccacatggaagaggctatttccacataatttgttcattcattttcattattttttctcatacactcattcacttaaattattttataatgatattctgacaaaaactaatcatctccaagaacattattttgagtttccatcagacaatatttagctgtgattcagctctgcttcctgagcacatagagtgcactggggccaagtgaaccatgtgcaatagtgactaccttgagagataatgtcacattgagagaaggggtctctcttccttgaccgcaagtgtccaacccataaaacatgagccttgagctagaaaattcccctttctgttctggcgctgcctgggcaccaggctcttttgctgtgtgtccctctgttttctggaccagagaaatactgggcacatatgtggcatctactcattggtttgttggaccctagcttgcagataatagtaccaggtgttcctttgctgtgactttaacttctgtgttcttcacaggacacagtcccattgatgggatccaaagtaccattgatactgagtgacccagaccctggtcatgtacttgtgctaaaaaggaaaacagcacatggggaggtgagcagaatatgaaacacaattatggactcagaaacagccatacaacttattagcatcccgttgtttcaaaaaatcataagaatttgaagaacatgacaatgttatactgactgtggcgtcctaataagtgtgggactctgtgcaccaagatatgttatttgaattcctttttattgattactaaattaatggcaggaatcccacacaaagggatactccctatgaaacatgacaactcaaattaaaaaagagcactcttccttactctaaagtctgccctctctccccgagtccctcacgcataaggccacatttgtgcccctaggtcatgggcagcgctggttggccaccatcgtccacatgtagaaggcagtcagcaacgtgaagtggttctgcctactgcagtctcaccccagacatggaaagcaagagccctgggtggagctgaaggtgctcagctgggtttgtcagaagtctcatctgtcagtgagttgacaagaaacagagcaaaacgactcctccaatgttgacgagcctgcccctgggatttggaaacttcataacagaaaaaaccaatatagacaaaggattttaaacaggattaaggtcaattaagcaaattagaaaaggacacttgaaggagtatttgggacaggggaatcaaaagcaccaggaagacatgaggagtttccctaagactctagactacagcactagcactatgtagataactaacactaaaatattaattatatcattgaaaaaataaaatttacagtgaattacaaactgtttccaaaaggtcatgaaaatcttgtagacttgtttcaattcagacagatgtgttcttctcattctcagctgttcactggtgcatttattttggatttgaccatctggggaatgggtgtggcctctcctggcctctccctccctggggcccaggcagggagaatgtctcagaatgacttccttgagagtcctgctcccctttcatcaatgcacagatacagaagacccctccgtcatgcagcatctgccatgagcatcggcctcctgtgctgtgcagccttgtctctcctgtgggcaggtgggtcctgggcagagccccttgtgtgaatttcaaggcccagcgccttcccattggggctgcagcatcagctttgttctccttctctgcaggtccagtgaatgctggtgtcactcagaccccaaaattccaggtcctgaagacaggacagagcatgacactgcagtgtgcccaggatatgaaccatgaatacatgtcctggtatcgacaagacccaggcatggggctgaggctgattcattactcagttggtgctggtatcactgaccaaggagaagtccccaatggctacaatgtctccagatcaaccacagaggatttcccgctcaggctgctgtcggctgctccctcccagacatctgtgtacttctgtgccagcagttactccacagcgctacaaggccgtctcctctctgcacataaaggcagggaggttctgccctcctcccccacccaagactcagggatgccctgggcagagatctctgcgccaggaaccttggaacccacagtggccccaagtggcctggacagtatgagccttgctctgtgccaggtgcctctgcaggcatctcagccaggcctggactggtcccaggtcctcagatgtctcctttgttgctttctctggtctatccttggagctttccttttggggtggggccagggctttcccagctcctacttttctactcattatcctgagtccgaggcccccaggataaaacaggatttgcatttcagatccatctagactcccgtctctccctggtgaccctgttgcttcctctctctaatgtttcccccagcccccaccctcatgttttctctcctgtggcccacctttcccatctgggcagtcaccctccaaggcgttgctgggtctctcctccccccacctcctcgcccctctctactgcagccatgaggggagcccctgttctgtgcctccttccttcccatcacagagacttcaaaggccatttcctctgcccttgcatggagccttcctttctgcagtagccagctcctacctgtccttcatatctcagcatgatcaacccctcttgtgggaagcgctccctcccctcccatctgaaatcaactttcctctcataagctgtcacagattcatgtgtctgttagtaacctttagcacagcttggctttctcagatacttgtctggttatttttgtactccacccaatttttaagcccatgagagctaaggctgtgcctgctgcatttaccaacattggtgtctggcatgtagggagacccatttcacaaagaatggatgagtgaatgacaggctgagtgagtgatgagtgggtggataaaccaataataaaaacacactacatctactgtaacctggcagagatc

SEQ ID NO: 32013 - DNA, 684973 bp, Homo Sapiens
gatcttggctcgctgcaagctccgcctcctgggttcacgccattctcccacctcagcctcccgagtagctgggactacaggcgcccaccaccacgcccggctaattttgttttagtatttttagtagggacagggtttcaccatgttagccaggacggtctcgagctcctgacctcgtgatgcgcccgcctcggcctcccaaaatgctgggattacagtcgtgagccaccgcgcccagcccagcaaaggctacctttttaagatgtatggtaataaaaaggagatgcggtagtagctcgatataaatagaattaggtaaaagtattatcagaacagagtactctggagcataaatgtagcttgaaaaagcagagaaggtatagggaagaatcgatggaataaattctacagaggcagaagtgcttggaatctggagcactgtgggaggatgagctaagagtagggagagaagaatggtgaaggtgaagattgatgacgactttgacgacagtgagcaatcaattttaagcacttattgtgcacaagccgaacattatgtaccttattgccactaactaggtactattatctccattctatagatgataaaatgttaagtaacttgtctgagtttgcacagctattaagtacaagagttgggatttcaacccatgtctacctgacttgggagcctaaattcctaaccactcgcctctgctttatcatcatagtctttaacaccactgctatgtgaactcctatgactacatgcttgctgtctcgcacagaataaccaaacagtagtctccacacttcaggtaatctatcctttgttcaacccagattctcttgcatttgtaaccttctgacctccccggcaaggtacccatttgcatttgcacatccccacactaacatgcagtgaaatagtctcttagccactctcttcagtgctcctcagagaggtgacaatcatcagtaactgtgaccccattgagagtgtggtttctgaccacgctcaagattatttgctgcaattgaagcagttagtagttgcttattcttttcttttccttgtttgcagatacctatgaaaatggaaattattttttggcaaactttatagcagctcaggtaagactaatttactacattttacaaatcttttcccaggtgtctacagattaaacattacagttaactgcgtaaatgtaatatcccacatcttaataggaggttcttcttgcctttacttttataatccaggtctgttgtcattaaagtaaggaagaaacaatccttactttggcagttttccagtatactatctccatgaaaagaaacttggaattcatacaatgctggggaaaaaatggggccttaaatgtgtaacatgttttccaaagatgagaaatttactagctgataaattttgaaagaaaaatgctatataagctacttattatgcaataatgcataaaagacgacctcaaaaccttagtggtatctaacaataagcacttacttagctcatgagcttgcagggctcagaggatgtgggtctggtcttggctgatctttgctagctcacatacatctccagttagtcttgggtctattgggctgtttagataatcttggctgtattcacatatctggggggtcagctgactctcatatgatttatcatggccttgtgggaaggtctaggcacggcttcttcataattatggaagagggctaaaataaaaataaaagtggagatcccttagttctttataatttttttgtatcgagttgactaatttcccattaccaaagcaaaatcacatggtcaagcccagagacagaggagggacagaatgcctcaactggagtgggagggcattgcaaaactgcatggaaaggggtatggatttgtaagggttgaatatttcataacagtgatgcaatcaatgcaccttgcatattaaatatcccattggtaatctacataattttaattagagtatgaggagaatcattctaggtcaaactggattctgcttctctatttttacctagtcactttaaccaagaagtaatatagcacaaatctattttttttctataacagtgattcacatatttgaagatgtctctcagttatttcttttgtcttcttagaattatacatcaccaggctaacttcatattttctctatttcctgcttatagtggtttccaggtctgatcattctgtttagactccagttaacttagatttcttttaaaacatcagaaccgagagcatattttagagctgtctatccagtatgatagccactagccacatgtggctattgaacacttgaaatgtgaccagcctaatttgaaatattcaaaagttagcttaaaaaattcaaaaatgatttgtgggcttcctgggcaagatggccaaataggaacagctctggcctgcagctcccagtgagatcaatgcagaaggcaggtgatttctgcatttccaactgagatacctggttcatctcactgggactgattagacagtgggtgaagtccacagagggcgaggagaagcagggtgtggtgtcacctcccccaggaagcacaaggggtcagggtactccccccgtagccaaaggaagccacgagggacagtgctatctggcccagatactacacttttcccatggtctttgcaacccatagagcaggagattccctcaggtgcctacaccaccaggaccctgggtttcaagcacaaaactgagtggccgtttgggcagataccaaactagcttcaggagtttttttttttcataccctagtggtgcctggaacaccagtgagacagaaccattcactcccctggaaagccagggagccgagtgcccttgctcagcggatcccaaccccacagagcccagcaagctaagatccacaggcttgaaatactcgccgccagcacagctgtctgaagttgacgtgggaagctcgagtttggtggagggaggggcatccgccattactgaggcttgagtaggcggttttcccctcacagtgtaaacaaagccaccaggaagttcgaactgggcagagcccaccacagctccacaaagccgctgtagcaagactgcctttctagattcctcctgtctgggcagggcatctctgaaaaaaaggcagcagccccagttaggggcttgtagataaaactcccatctctctgggacagacacctgggggaaggggctgctgtggatgcagcttcagcagacttaaaccttcctgcctgccagctctgaagagagcagtggatctcccagcacagtgctggagctctgctaagggacagactgcctcctcaagtgggtccctgacccccgtgcctcctgacagggagatacctcccagcaggggtcaacagacacctcatacaggagagctccagctggaatctggtgggtgcccctctgggatgaagcttccagaggaaggagcaggcagcaatcttaactgttctgcagtctccactggtgatacccaggcaaacatggtctggagtggacctccagcaaactccagcagacctgcagaagaggggcctgactattagaaggaaaactaacaaacggaaagcaatagcatcaacatcaacaaaaaggatgaccatgcaaaaaatccatccgaaggtcaccaacagcaaagaccaaaggtagataaatccacgaagatgaggaaaacccagtgcaaaaagcctaaagattccaaaaaccagaatgccccttctcctccaaaggatcacaactcctcaccagcaagggaacaaaactggagagagaacgaatttgatgaactgacagaaataggcttcagaaggtgggtaataacaagctcctccgagctaaaggagcatgttctaacccaatgcaaggaagctaagaaccttgataaaaggttagaggaattgctaactagaataaccagtttagagagaacataaatgacctgatggagctgaaaaatatagcatgagaacttcgtgaagcaaacacaagtatcaatcactgaatagatcaagcaaaagaaaggatatcagagattgaacagcaacttaatgaaataaagcgtgaagacaaaattagagaaaaaagaatgaaaaggaacaaacaaagcctccaagaaatatgggactatgtgaaaagaccaaacctacatttgattggtgtagctgaaagtgacgaggagaatggaaccaagttgtaaagcacacttcaaggtattatccaggagaattttccaacctagcaagacaggccaacattcaaattcaggaaatacagagaacaccacaaaaatattcctcaagaagagcaaccccacgacacataattgtcagattcaccaaggttgaaatgaaggaaaaaatgttaaggtcagccagagaggaaggttgggttacccacaaagggaagcccatcagactaacagcagatctgtctgcagaaacctcacaagccagaagagaatgggggccaatattcaacattcttaaagaaaagaattttcaacccagaatttcaaatccagccaaactaagcttcataagtgaaggggaaataaaatcctttacaagcaatccatttacaagcaaatgctgagggatttggtcaccactaggcctgccttacaagagctcctgaaggaagcactaaatatggaaaaggaaaaatgagtatcagctcctgcaaaaataaaccaaaatgtaaagaccattgacactatgaagaaactgcatcaactaatgggcaaaataaccagctagcatcataatgacaggatcaaattcacaaatagcagtattaaccttaaatgtaaatgggctaaatgctctgattaaaaggcacagactggcaaattggataaagagtcaagacccactggtgtgctgtattcagaagacccatctcatgtgcaaagacacactaggctcaaaataaagggatggaggaagatttgcccatcaaatgggaagtaaaaagaaaaagcaggggttgcaattttcatctctgataaaacagattttaaaccaacaaatatcaaaaaagacaaagaaggccattacataatgttaagagctaactaccataaatatatatgcacccaatacagaagcacccacattcataaggcaagtccttagagacctacaaagagacttagactctcacacaataatagtgggagattttaacacccactgtcaatattagacagaccaacaagacaggaaattagcaaggatattcagaacttgaactcagctctggaccaagcagatgtaatagacatctacagaactctccaccctaaatcaacagaatatacattcttctcagcaccaatagcacttattcgaaaatcaaccacataattggaagtaatacgctcctcagaaaatgaaaaagaacagaaatcataacaaagagtctctcagaccgcagtgcaatcaaattagaactcaggattaagaaactcactcaaaaccacacaactacagggaaactgaacaacctgctcctggatgactactgagtaaataatgaaattaaggcagaaataaataagttctttgaaaccaacaaaaacaaagacacaacatatcaaaatctctgggagttttcagagggaaatttatagcactaaatgcccacaggagaaaacaggaaggatctaaaatcaacaccctaacatcatagttaaaagagctagagaagcaagggcaaaaaagttcaaaagctagcagaagacaaaaaataactaagatcagagcagaactgaaggagagagagacacgaaatacccttcaaaaaaatcagtgactccaggagctggttttttgaaatgattaacagaatagttagaccgctagccagactaataaagaaaaaaagagagaagaatcaaatagacacaataaaaaatggtagagaggagatcaccgctgatcccacagaaatacaaactaccatcagagaatactataaacatataaacacctctatgcaaataaactagaaaatctagaagaaattgataaattcctggacacatacaccctctgaaggtaaaaccagggagaagttgaatccctgagtagaccaataacaaggtctgaaattgaggcactaaattaagagcctaccaaccaaaacagcccaggaccagacagattcacagccgaattctaccagaagtacaaagaggaactggtaccgttcctcctgaaactattccaaacaagagggactctgccctaactcattttatgaggtcagcatcatcctgataccaacacctggcagagacacaataaaaaaagaaaatttcaggccagtatccctgatgaacatcaatgcaaaagtcctccataaaatactggcaaaccgaatccagcagcacatcaaaaagccatgatcaagttggcttcatccttgggatgcaaggctggttcaacatatgcaagtcaataattgcaatccatcacataaacagaaccaatgacaaaaaccacatgattatctcaatagattcagaaaaggcctttgataaaattcaacaccctttcatgctaaaaacactcaataaactgggtattgatggaacaaatataaaaataatatgagctatttatgacaaaccaacagctaatatcatattgaataggaaaaagctggaagctttccctttgaaaaccggcacaagacaaggatgccctctctcaccactcctattcagcatagtattggaagttctggccagggcaatcaggcaagagaaagaaataaagcttattcaaataggaagagaggaagccaaattatctctatttgcagatgatgtgattgtatatttagaaaaccccattgtctcagccgaaaatctcattaaggtgataagcaacttcagcaaagtctcaggatacaaaatcaatgtgcaaaaatcacaagcatttcgatacaccaataatagacagccaaatcatgagcaaactcccactcacaattgctacaaagagaagaagatacctaggaatacaacttacaagggatgtgaaggacctcttcaaggagaactacaaaccactactcaaggatataagagaggacacaagcaaatggaaaaacattccatgctcatggataggaagaatcagtatcgtgaaaatggtcatacttcccaatgcaaatcaaaaccacaatgagatatcatctcatgccagttagaatggccattatcaaaaagtcaggaaacagcagatgctggagaggatgtggagaaataggaatgcttttacactgtcagtgggagtgtaaattagttcaaccattgtggaagacagtgtggtgattcctcaaggatctagaaccagaaataccatttcacccagcaatcccattactgggtatatacccaaagggttataaatcattctgctataaagaaacaggcacaagtctgtttactgcagcactgttcacaatagcaaagacttagaaccaacccaaatgcccatcagtgttagaccagataaagaaaatgtggcacatatataccatggaatagtatgcagccataaaaaagaatgagttcatgcccttttcaggctcatggatgaagctggaaaccatcacactcagcaaactaacacaggaacagaaaaccaaacactgcatgttgtcactcatatgtgggagttgaataatgagaacatatgggcacagagaggggaacttcacacaccagggcctgttgggggtggagggcaaggagacagatagcattaggagaaatccctaatgtagatgacgggttgatgggttgatggatgcagcaaaccaccatggcacatgtatacctatgtaacaaacctgcatgttctgcacatgtatcccagaacttaaagtataattaaaaaaaaaaaaaaacatttggctgagcgtggtggctcatgcctgtaatgccagcactttgggaagccaaggcaggtggatcacctgaggtcgggagtttgagaccagcctgaccaacatggagaaaaccctgtctctactcaaaatccaaaaattaggcgtggtggcgcatgcctgtaatccccactacttgggaggctgaggcgggagaatcgcttgaacctgggaggcagaggttgtggtgagccgagatcgcgccattgcactccagcctgggtagcaagagcgaaactctgtctcaaaaaaaaaaaaaaaaaacctcatgaataactttatattgaaaaatgttgtaataataacattttggctatatcatgtaaataaaatatattttgaaattaatgtaccctttttcttttcactttttaaaaaaatgtgactactagaaaatattcaattacatatatagtttcccttatatttctataagatggcatagacttccatgttgcctactacctctttttagctagagtctatattttttctgctgttattacattgtgttattttttaacacatgtatcagatgtttggcacatataaatctcatggtcagctaagaccttcaaattattctcatagacatgattatcaggtcatattgttccatcctgcatttggcctctctgaaactaactgctagactttgtatactaattaaatttgtgtattctctgcccttaagagtagttgggttgaagactctacatattttttcctctcaaatattattttaatgaatattattttaatgatctggaagtcctgaattttagttctatttctactgctattattcaaattcggagagacactgtttaatctgtgttttttaaaaaattgtaaaacattagattgccctttaataacatctaacttcaaaattccatttttctgataaatgaattcttatttctgtgatgtttgatagattatttccttaagaataaggggcctgaaatgaaagaaagatcgcaactttccttaggggataactattatcagcggtttcctggttggtaaaccagcttgtgggggtgggagatgatttgtaacatttgctaatttctgtagtgtagcttctcccaccatcttaaccaatttcaagcatcagctggcttgcaaaattctaggaaatttaaaaatcaactctctcaaatcaataagaactagctttagtacacccatttattttgagctgtatattttttccttgattctgcctgcccagtagcaaaagtcttgttcatccttcatgatgccaattgaacatgtttcttttttctcttcctactgcagccatcataattgagaaatgcatagcttccctctgctacaactatctccttgattattgcatgtaatcttcaaaatctttccttacatacctaactggcctcacgtctctgtttgctcagcaccagctatggttgtccttgcactcctccatgaatgtggctttgttcaatgtgtccctgtacccctatttcctgtctcataataaatccttcccatgattaccaggagttccgaagttacatgtccttcctaagttctctcttgaccctcttcctcccatgtaatttttcctttctcttcacatccatgaaaaatatccactatgattttcatttgggccttcatcatgtgccacctcataatttatgtcatattattttaacccttgtattgatacttaaacaattcatgatttggttaacttcctatgtttcttgcacactgtcctcagtctagggactgtttgccacacttctttgttcactctaaattaacttgtgcagtactatgtacaggggcaccttgcgcttccaactttacctatgttatctagccttgtcgctttggactactcacttcattttccagagcctcagtttccttatctctaagatagcaataatgatattttcttttcaaaatgattataagaatacttatgatatagggaaaataactttcataatgctggtacaataaacttatttgtggcattacccaatttattatagcaggtactcaggaagtatgtcttcatgaagtgtgtggagagtagaattatagtaaccagaggctgggaaggggtgggggccataaagagaggttggttagtgggaacaaagagacagttaaatagcaggagtgagttcttgtgtttgctaacatactagggtgatgatagttaacaacaatttattgtatatttcaaaatagctagaagagaatatttgaaatgtttccaacacgaagaaatgatgaatgtggcttggtgtggtggctcacacctgtaatcccatcactttgggaggccgaggcaggaggatcacgtggtcagggatttgagaccagcctggccaacatagtgaaaccccgtctctattaaaaatacaaaaattagccgggtatggtggcacacacctatagtcccagctgcttaggaggctgaggcaggagaatcgcttaaacccaggaggcggaggttgcagtgagcccagaccacgccattgcactccagcctgggtgacagagtgagactccatctcaaaacaaacaaacaaacaaacaaatgttgactatttgaggtcatggatatcctaaataccctgatttgatcactacacattgtatacatgtatcaaaatatcacatgttctccataaatatgtataattattatgtatcaataaaaatttaaatacataaatagaaatagcaaactaatataacaaaagtaaatttaggtttgttaatattttaatatggaccatagtctatcaacaatatgttatgtattcttttctctttataaattctttatagaacatcctgcaaatccagaccatacacaataagtatttgagtgactcgaatccactaaaagttgggtatattagaatctggggtgtgaatacctatgtgacacaagtcagtttcacctatgacaaccggcaatttatggagacaaatttcaagagtgaaccttataatcaggtaggtctgaaaggaatattagcatatcacaagtaaattttatcattctgcaaaattatcaccaataattttgctaacaattaaaattatcattgttaaattttcatgtattagatggttataaatacgtgcaatagatatgttcctgaaaagttgcaaatgttgaatcatattgtaaaatatgcaacattaatggtctttccagtatggcctaggggtcagtgatcactggcctgatgagatcctctccatgtatttaccaaagagactgtgctatgttttgataggttagtcttccacattagcaaaataaaacttatttctgctgcagaggctaaaacaaaggaaagggtgattccctaaagctgttgaaggttgcccccatgcttcctgcagttattcatgtccctggtcaaattgatggatcttataggtagacgaaaattggcagtaaactgtggtaatcttcgaatgaatacatcccacctgtggtataggataaaaggttgataaaacagggggacataaatagcaggccctactagaggattctagaatcaactaaaccagaattttggaagatgaaataccaatagttaccaaaggcaaccacaaagaaaaaagtatctcacttttagaacataagacaacataaatacggaaccagcaacccaaaagggatggtttagaaaagtgaaaatggataaccatagttcttgttttctaaaacgtgaaatgagtgccctgatggtatttggactttggaaaatggcccctctgagcactcaaatagatcttctccctctaggctcttctgggtatttaccttaaagcattttacctggactattgagttcaaaaccactctttgcaagtaattgcttctagttaagattgtgcagaaaatccttgaataccttctttttaaaaactctatggcatatctgatgcctattatgtgccagacaccatactgtttgaaatgaggaaaacatgaaaccaacctgctgtcaagaggactaaaacccaatggcaaagcaaagagattttaataaatgttggttttaatcacagctacaaatatttgtaaacaataaggttctgactaaatgaagtgaaaagaaaagatttccagcatagggattatgcacacagagcatctctctgtatttatctgaccaaaatcaacatgacctaacccaaaaaggaatgtttatatcctattactggaaaggaatgaatccatcattttttgttaaattgtaatttaagaggtgagctacatgtgaggtttaagaagttctaaaatacccatttatatctcttcttttctggcagatactaactattcaattgactgacaagactatcaacctggaaaagttaactgaggttacttggattgatggtggtcctgtacttcctactccaactaagacaagtaccatcccaatgagttctcatccttctccatctactaccaatgccaccagttctgagacaatcaccagttctgccagtgcaaatactaccactggcactactgatactgttcctatcacaaccacatctttcccaagtactactagtgttacaactaatactactgttcctgatacaacttctcctttccctacaagtactactaatgctagcactaatgctactgttcctatcacaaccacacctttcccaacaagtactattggtgttacaactaatgctactgttcccaatacaactgcccctttcccaacaaatgctagtactgctagcactaatgctactgttcctatcacaaccacatgttttgcaacaagtactattggtgttacaactaatgctactgttcccgatacaactgcccctttcccaacaaatactactactgctagcactaatgctactattcctatcacaaccacaccttttgcaacaagtactattagtgttacaactagtactactgttcctgatacaactgctcctttccctacaagtactactagtgctagcactaatgctacccctgttcctatcacaaccacactttttgcaacaagtactattggtgttacaactggtactactgttcctgatacaactgctcctttccctacaagtactactagtactagcactagtgctactgttcctattacaaccacaccttcccctacaaatactgctgatgctaacactagtaatactgttcctaataccactatgccttctcctacaagtagtactactgtgagtactattgctaccgttcccatttcagtgactccttctctgacaagtactgctgatgccaccattagtactactgtacttattgccactacttcttctctaacaggtactactgatgttagcactagtactactattaataatataagtactcctgttcaaacaaatactactaatgctagcactagtactaatgttgctaatataactgctacctctcatacaagtactgatgatactgttcctaataatactgttccagttacagctattccttctcttgcaaatactggtgttgacactactagcaacagtttttccattatgaccacttctttctctgaaagtactaatgctatgaacactactgttattatggcaactacttctcctacaagtactgatgttgctagcacaaataatgatgcttctatgacaaattttcttttagctacaatgtctgctggtaatataactagtaatagtatttccataacaactacttcttttggtaatagtgttccttttgtgactactccttctccaagtactgatgctactactacaagtaataatactaatcctggcatgactacttattaccagacttctcctaccattcctacccatactcttacttctattcctagctctattacttctattttgagcatgtttccaacaagtaatacattcactactgataaaattactaattttactacccctacaaatgcaaacaccattattttcaacactcttgatacaaaaagtaccatggtaatagatgctacggtcactactaccagcaccaaagataataccatgagtccagatacaacagttacttccatagacaaattcaccacacacatcacacagttcgctactccccattctgctactactacaacactggccttaagccacacctcattagctcctacaaatctttctaatctaggcaccatggatattactgatgcagataactccagcagtgttacaggtaacacgacacacatttctgtttcaaatctcacaacagcctcagtcacaataacagccactggtctagattcacaaactccccatatggtaataaattctgtggctacttatttacctattactgcaactagtgctaccacagatactacaaatattacaaaatatgctttaaatactaccactcctgatagtacagtacatacctctgctactgcacctacttatattgcaaatgccataaatgctactcaagttccatgattactactcaaggcaggatagttacctcagataacgcctacaaacaactattacagatatagaaaatcagttacgagacactctatctatcttatgctacttaagttttcacggatattagtactctagccataaaagacacagctactccaaacactctcgtcattgcagacatgtttaggaaggtttacaaaccttataggtttcaccaaagaagctgtgggtacttattttgcaaccatagtatgtgctcttattcttttaaattatagttattactcctataacctcatcagttaaactacagatgttttatatatcctatatatccttgctacagatttcacaggtaattttggtatctcagataacaccacattaggctctgtaaatactattgccttagatttagttactgaaatagcccaacttgtttcttgggtcacatgacgtaccataactgagagtactggtgatacccccagcactcaaatggtttctataccaacagttattgatattacaggagagtatgtaattagtaatgctaaaaaaatgcactttattatcctatggacttttccaaatgccatagctaccaatagagtcatttgcattacacatactaatagtattatttcttctgaggagatcctagctgtagctacagatatagaaaattctaccattgaagatcttgtataaccttacttcagccactgaaataatttaaattataaatattacatgtgggtttgactatcacagaaaataaaatgattatagatcctaaaaacataaattcctgaactttgcaaccattaattcataggtactactaatactcttactacagattttataagtacttccacttatagacagaagagcattctcagaaaattagaattaatctaaattatgagatagtcttaaagcctcactgttaccaccaatgactggctctgactctagtataaatcagaaattatccagacagaggtgagaatgtaaatatacagcatgaggaagacagcctccacattggaatcagagttcataatcttatttgcattttcttctattaatacaagcttttcccttataatttcactgttcagactccccttcattgtgttagggttttcagtctattcctggtttttcatatccaaattcatcatccatccttgatccattgttttcttagatcactcaaacccccatgagtagacccatggtcattaccaaatctggtcatttgggtactattgtaggtttaaccctagggcaatattctcgaagtttagttcagggatccatggggttccccaagactttctggagcacacagcttcttcaaatctactttcataatgatgctaagttatttgttttttcagtctcattgtctcattagtatatagtggcactgtccagatgctctatgctgtattgtgtcataaaagatgaatatagaaaaagaaaaaagaatctagctgtattctattaagctagacattaaacagatttacaaaatgtaaaataatgtcattcttctaatttttttttgctttgggaaatacagttatttttcattaaaaacatatttatgttatcacaaagtgaatatgttattttttatgaatgaaaaataaatatttaaaaaatattttacaaatgactcaattttgatttctaatgcagtaaatattagcagatataacccacataaataaagcacagtgccctcaccaattttgaatgtaaaggggttctgagactaaagagtttgagaacaacttcctttaagtgggcagaaacatcgtatttccactctcatgtcctggtcaagtatattatcaacttccccagcatgtaggtactccagcatctgtggcttactcaacatgaatatctttccactgtctacaaacacatctacccagctttttgatctgtcagcccagctgtactattgtccagacaatttgatggtactccagatgaggggcacagattcatcagtcagcaacatttgcttttggaatctgcccacaagctacagtcctctgaacaaagttgatagaccttattcttgtgtatacatgactcttgaccttcccaactcaaaacaaaactcaaaattctatgggcttggtcagactccctcacttgtatctttactgagggagacttagtgcatttgtcttcttggcatcacaaactctgatacaggacaaagtgctctgtgtgatagggcaccatgagattctgctgccaggccaccatacattgctcattcactgaccaacaacttcattaaagcagctgggatttggaaaactgaagatgaatctgcttgaacaagcatagttctgaagccaccaaagtccaacctcttaagtacgtaaatggaacataattgaaagcatggaattttgaaaaggtaagaaatactttgaatatacaaaagtcttgactttggtcagatgtttgaaaagacttgagaattgaaactcaggagtcaatgcacaagtagtggtcctggaaccaggttcagaaaacatgagggcaatgttgacatgctaattctaccattgacaacactagcaaaacctgtgcatggactctgatttataaggtctagagaaacttctaagctccataatgactggccccgctgggtcacccacatgtgtgatattaattctgcactaatgattataacttatgttctaagtataaagaaatttacttttctacacttctggtacttgacacattcctacctttaccattactgtggacatcattatttttacacctaaaatttctagttattaatttaaacttcagtttctagtattccaagcatcgctatgtaaacactattcatgttgactatttaagagatgtcacacatactgcatgattaattttccagtgaggaatatagatgacagatgttttggattaacaggaaactcactgggagtctaaaggtatttaggaatacttcaaggagtaagggaagctgggaggtaccctgtagcacaaaaaagagtcaagaaaagctttcaggtggggaatgcactggacaaagagactgactttacatggtgtgattaggagatataaaatagtccactcttttctacagcaggagcattgtgagaagagacaagatttaaagtttatcaagttccatcaccaaacttccgtgtatatgagattagacattcaaatgagggttgaaagagcattcataccagtaaaggaacttacagggctagagaatgctttggtttccacatccctttccccatgggagagtggagtggtgctctgtgtgaagggcactgcagaagaagtgctcgatggagattaagagtgcctgtgaggagctgggactggcatctcactcccagctgggcactcgctgaactgagaaactcttgcctctcttccccatcagatgatacagtggagcatggagcatgggcaaggtttcagaaacctcatcatgcatctcccagagtgtggaagccaatgaaatcacaaagaatggcgctagagtcttgcccagagaattccaaaagtggcagagattggagaccctgcagtagtggatgcagagccagggaagtagtggtgcatcctggactcaacagtgttcaatggacaaggaagctgaagctcctcaggtgggtgtggggagatggctgggctagggctgtcatgaagcaatctgtccagtggagaagggactctagtgatgagaggtcgtggatggacttccaagagtggaaactaagtttgtagtggggagaggtcaaaataggtcatgcagattgcatctcacctcatgttagatgctgcacaaggggcctctgaaaaactcactaatgtgcccatgggaagaaatcagcactggggtcctctcacactgagggtacctgcggatgccttgccatagcatccatcacatgggaacctttgtcttttcctttaatttccatctggctgtgaaggatacccagaaacagtcaaggaagaggagaaggagaatatggaagtgtaaaagcatagaccgtaatccccttcctcactgctggaggtggtctctgcggaaggagaaaacttgacatggatgtgaaaatgacataccgatttagatgatacaaattcttgaaaacttccaaatgaccagaaagtgatgaggtctgttgacgggataagaaaagaatttcaactcagcattgaggaagaggggctaagattaagaaaaaatgaaaagcttgagaatgctgaaaagacacacactgcctcatttcacattgctcttacctgttagaatgatgggtgaacattcatccttaactttgtaatgctttataaatctcttattccaaggaaaagtggagaatggcttggagtacaaaagttagatctgggccccaaaggacgtttgaggttttctcaccttagccaatctctggtggcttcagagaaggtggctttggaaattttttactatgtaattgagaaaagtttggctcaagagaagaagtaaaggggtctgtacaacctatgggtcttgttacttaaaaacaacttcttatatttgcacaataatccatagtttgcaaagggcctcacataaatgttttattttgttccactcctgctgtgaggcagagagggaagaaatctttacactttttttctcagaggcagaaaggaagacttagaaaggttaaatgacttcttcaagaacacagagtcttaaaacatagtagagcttggccttctgattcacttcctattacccgtctgcttcagggtcccatctcctgaggaaagtccatctttgccatgatgtgatgaactaaaataaaataaacaaaaacccacttctagaaccaaataagtcttgtaaaagagtcctgatattattcctatctatttacgtgacctggatcaacttgcttgaattatctgagccttatttaattccttcattggtaaaatggaaggattgagagagtgcctaggaaaatatctagtgtagcaagaacccataatttggtattctttttggcatatcaaaacatcttgtaaccttgaatatatacaattttcatttgtcaattatacctcaataaagctggaagaaaaaaaaagagctgactactctattccttactgctaatacaccaagatgatacgtctggcttcctaggtcctctctcccaaattcttccctttttgataataattttaaaatgaacaataaatagataagttgtggtgaggttgccaatgtgttagaaacattgagtggaacttacgaaaaggaaccccttatgaaagttgtaagattcaaaatggagtcacttgtgccaaaccctggcaaaatagagttggggaaggtcctgaagagagggctctcacacaatttgtctgataacaggaactatcacaggacatttttccaaactgcagctttttacatgagtcacgccaagacagctagctgcctacacaagaatacttgcctgacacactgtctcacaaacctaatccctgcaagggagctacagtaacttccaggttacaaatcccacctagcaactatagactgttgccaatcacaactcgccagctcttgtaagacactgctagtgccaatgaactttctttcaaaacgacttgcataaccttctctttccccaataaaactctaatgtttttctttgttctctggatatagcagaggccaccctgttgtgcctgtatcccaaattgcagttctgttttcacattttaattccaaataaaagttctgtgctttgggaacatctctacattttttcttggaagttgacaccctttaactctgcctttgctttccttcttaccctcttttgctgggtggaaatgtggagtcagacagtagcaatagtgagttggctctagatgcccacaacaccttggagggggagctggagagcagctctgcatgcagaaagtaggtgtgggcggagtagctctgtcatgtgcctccacacaggagtgaagcttgacatggaacatggtcaccatatgccatttgcgcctccctctaattcaatgacttctcaaaaaaaccaccattttaatatatttattattcatttttaaatttccttttacttaaattactaatgcattggcagtttttgtagatgaagattcttatttattgactgtctacaaaaataaaattgtaatctttcttaataagaggaaaacccaaatttttgagggtgagctatgcaaagagcctcttcagggtgcatgtgtttggacatagaggtcgcagtagagggagaattgacagaccttgtggtcctaaatcttcccctgggaggttaattgctccttagtggtcacttactgataaatggcacctccatatgctgacatcaggcagaagtggagtgctgatgcaggacaggcaagcccccaaattggggctcagccagacagggttcttggctttccccaggaaagaattcaagggcaagtaggtggtgctaaacagaaacttttactgaagtggcagtgcatagcagcagcagaggcagtgcttcctgtggaacagggctatgctgtaggcagtgcacccagagtagcagctcagaggcagttctgcagcctcattaatacctacttttaatcacatgtaaattaaggagcaggttattcagaaatttctagaaaaggggtggtaacttccaggtcattgtcatggaaagggttgtaacttctggctgttaccatggcaatgccatggcaatggtaaactgggaagaggtcgagtgacatggcattggtggatgtgtctcagggagagatgcttttgcctcttcactatttcagctagtcttcaaactggtctggagttcaagccttacctcagtgctgcttccaatactctgtccaatactgattgttatctttctcttattttagagtgcagttgagataaggtggaaccactgaatgttttaggaaagcatactagacaggaaacaagagtataagaattatgatcattttctctgtaaggtaaaatccatcctttcttcctgagttctcagagaaaggatgtctgagctatgtctgcctgtgaattagtccatttttctctttcttaggtcctaactttcttcttcctttccagagggcagtcccaacaagacgacaattagttatttgaataaaagggcagtttcttaaatctactaaagatttaatctactaaatttaatctactgaagaccctgtgctaaacattttaattctataggcatgtgaaatgacagaaaaacaaaactgttgttcagagagttaagcaactggtctgatactgtttatcaggttaagtgttggagaaacgattacaatgagatctgcctgcctgtaaatagcattataatttcaaacttcccctgaggaagaaccttggggttcctaaaagctgctttaggatgagggaaggtcaaactcttccttcccagttgtatcagaattgctttgttttttgtgttttctcttctgtatttttgcataagattttatttgaagaaagggcatcattgcttaaaaaaattgaggaaaaccaattctgaacaatgccatactttcgataatttctgctgtatgagttagacagtattttgtgggctagctcaggaacctaaccaacatgcattctaagtaggaagcatattacctataaatcagctatcagaacacaatctccatgtaatctaaatactttatgtcaggatacaaagatggccaaattgaagaaatccttaaagcaaatgttgggagatgaggagaagtgaatgaaagtctcttcctcatgatggcgggagatacctggttctcaggagagggaagactacagagcttgtctgggacttaggctgccttggcctctaggacttgccccatctgttgtgcaaaggatagactgaagaaacagctctactgtttttgaataacctctttactacgacctgttactctcctgtcatggcaacccagagaagcatgggatttttttttccattacatgatgttttccatttaatgggattataatatgaactatgcatttaaaggtagtattctccattttttccaagtctttgtttttttatttttattcatttatttaaaaatacaatttcaatttcattttagattcagggtgtgcatgtgcaggcttgttaccttcgtatatcatgtgatgctgaggtttggtgtatgactgatcccaccacacaagtagtgagcatagtacccaacagttttccaaatctcatccccctccttccctccccactctagcagtccccattgtttgttgttgccatctttaggcccatgaatagctaatgtttagctcccacttataagtgtgaacatgtggcatttgcttttctgttcctgcattaatttgtttagaattattgccaccagcttcatccatgctgctgcagaggacatgattacatcctttttatggcttagtattccacggtgtatatgtaccaattttctttataacaaggaatttttgaacttgtcatttgtggttgtgtagggaattaatcacattgtatggggaatgatgtcttaggcaaaagtcagcttgatagctatcatttacattattttgtggcattgtactaaatgtattacatgtgttatctaagtaaatatgctgaatacaagtccaggaatcttttcacttgattggacttggcttttacggaattttcccagacataagggaaaactttgtggcatagcatttaataatttctggctctgccatcagatgacaagggttcaaatctcacctctgctacttaggaacttgccatcttgtgataattatttaacttatataagcttcaatgtcctcatttataagatggaaataatgtagtatttctttatatttctagtagtactttttgttttttttgatacagagtttcgctctgtcacccaggctagagtgcagtggcaccatctcggctcactgtagcctctgtctccaaggttcaagcgcttctcctgcctcagcctcccgagtaactgggattacaggcatgcgccacacatccaactaatttttgtatttttagtagagatggggtttcaccaggttggacaggctggtctcgaactcctgacctcagatgatctgcctgcctcggcctcccaaagtgctgggattacaggcatgagccgccgcgcccggccagcagcttgctacttctgagtcctgagttcagctggctcagacgccagatcccaatacatatagcagactccattggacctgcactaagagcaccacctgtaggggctgttgcttcaggtggacactttttttcctttcttgcctcagttcccacatctggaggatgaggcaaacatctgaactacaataaagtacatggaaatgcattttcagtctgtaaaatgctgcacaaaggtttactattatttattattgttattctataattccctgagtgttctgatgtctattgcgggttgttttttaagttttgtttttgtttttgttttttttgtcttcctttttcttccccttggatcttctggaagcagagaagtttctctttagtgctggtgaaacaggagagttccctgattcccccctgcaggacatgtgacaagggtgtggcctgcttggtcgccctgcagctcagccccctgtagggggagcatgcagacaggcaggcgtggaggccagcatgagcgcttctgggctccggccccagggcagtgtctagggaccggtgtctgagactcccgaagcccaagtggacgtgtcttactaagctcttttagatattctgtctgcagatggcttgtgtgttaatcagcttagtggatcctctgccttatcccaagggcagtgggccagagtgacaaccttctgcatcccaagtccttgcccagtgtattggaagaatcagatcacatgtgggctcgaaggatgagtgcaagattttattgagtggtggaggtaaacgttttctctgtttcagtcagtcaacaaccgcatgtaattacttaattttaatacaaaactaggatcagagggtaggagctgcggtgtgaagagaactaagagccccttcaaatatatgggaatctaggttttctggagagctaggtactctgctaaaaagaaataaggaagaaataagaataagagatgaggaaggggggctgtgaccacaagagataaataagattatctctagccaatgactctcccatagtcagaggacgcctaaaagcagagttgaatgttgactctcagtctgctgaatacaaatccagggatcttttcacttgattggacttgatttttatggaattttcccaggcataagggaaaactctgtggcatagcatctcatgagatgaatggggagccagagaggggggatggagagggaaggtggtcttcccctgagttgggccacccatgggtgggagaaagactctcctccaaccgcccccagctgaactcccctagggatccagacctccttcttctctctttctctgcctcttgttctgtcattgctgttctgctggttccaacattcagcagcttgcttgcatgtgcccactaaggtctacggtttatatgggggcaggatggggggcatggcgggccaaaaggcaatttttagggtacaaaaacagaattgcctgtcctcacttagggccatgggtcttcagacttgagggtggggccttttccagggaaccaccctcttctacccagaatttccccctcctgtctgtatcactggtgctttataataaggctgctctgagtccttttttcaaattgaagttttgtgagggaaagctatctccagaggtgtctctagtgtgtctcaaactgtgattctgggtaaaattggctcttatttgagctggaagaaaatgtttcactgctaaattaaataatgctcatctttcctcactttataaaatagttaatggatacagttatcccaattttatgttatttttcaatgattttttttcttaaacctcttatgtttgctgctatttatttgttgccttgtagaagctctagctaagcacaaaatgtatgaacaaataacaggcgggaaagattttgaaacagtcagtagggtttctattgactgtattggtgtggttgaccattactttatatggcaaaactcacattttatacaagtaaaattttctttggtttgtgtgattaaattgaacatagtgtttcatcatgttctttttttttgagacagagtctcgctctgttgcccaggcaggagtgcagtggtgcaatctcagctcactgaaacctctgcctcccgggttcaagcaattctcctgcctcggcctcctgagtagctaggattacaggcatggctaatttttgtgtttttactagagacggggtttcaccatgttggtcaggctggtctcgaactcctgaccttgcaatccacctgccttggcctcccagagtgctgggattacaggcgagtaatcctgtatgattataccgccaccattcccggccatcatattcttctaagaacactgttatttgatggtgatccacagaataaatgtgaacattattgctgagagagactttggcttgtctcctgctctggcagtgagatgttgagttttacagtgtttttccaaagcagacttgtgtccagcctcagctgaggtgtacacaggatgctaattgtccctcaacttgtctgcacatcgttctacttatactcacttatgttttgtcaaaatatgatattaatattaaaatatttgttgaaataagttacaaacattttataatctatacaaataattcacatttgaagtagaatattattaagatataacatcttggtatttttcaatgtattctatttaacattcaatttttaatattcaaattattatcattcactactcaatctaaccccgtttataaagttgtataattttacaactgcagggaatattatggatgactttatacaactacttaattttactgctgtggaaagtgaggttcatagtgattaaatgattaagcaatttgcaaaagtattatggctttgtagtttattgatctttccaccacatggtccccagctctgtttaaaaatatttctgagaacttaaagaagtcagctcctcctctgcaccaggcactgacctgttgccaagagactcttgtccaagccaagtagtggtggccaagagagtcttgtccttggagaatatacattctattagggtaggctatcaataaataggtgaacaattgcataatgatgagatttcaggactctgctgccagtgtgaatgtgtgcatggacactggctacccacacctccccttcactttgccatggccaccagtgtgatcatgcacacagagggcagcaggccctgccacaggtgcaaatgcaagcacagacctcggcaaccctgtccccacctatgactcactgctggcatgagcatgtgcaggaatgtcacagccccgcttctgccagtatccccctgccccagccaacatgcatgcatcctgctgtgctgtgccacggctgccagcacaacccgtcggagtgttgtggccagtggaccaggaatacctcggccccctcagcacagtaggttcctagccttgaggggccagagaagaaagctggggtcctggaaccagctccccagggttagagcacacagctcaggagtgctaagctgagtcttgggacccaaaaatcttccagaaacaaccccagggaactgaacccaccttataccacagtcaaacccccaagggcatcaaagaaaataaaagcaagtaaacaaacaaaaaatcatccaaagtatagtgccttcaaagattgaagaaacatcagcccacacagtgagaaagaaccagtgcaagacgtctggcaactcaaaaagccagagtgtcttcttacctgcaaataactgcactagttcctcagtaatggtttttcgctaggctgaaatggctgaaatgtcagaaatagaattcagaatatgattaggaatgaagaacatcaatatccaggaggaagttgaaacccaatccaaggaatctaaggtatccaataaaacaatataggagataaaagacaaaatggccatgtaaagaaataaccaaactgatctgatagagctgaaaaactcgctttgagaattgcagaataccatcacaagtactaacagcagaactgaccaagctgaggaaagagtctcagagcttgaagaatggatctccaaaatagtcagaaaaaaaggaaaaacaataaagaagagtgaacaaatcctccaagaattatgggattatataaaatatgaaatctatgactcactggtgtccctggaagagaaggagaaaaagcaagcaacttggaaagcatattgagaatattgtccatgaaaatttccccaacctcactagacaggccaacattcaaattcaggaaatgcggagaacctctgtgagatattacacaagacaacaattcccaagacacataatcatcagattctccaacgtcgaaatggaagaaaaaatgttaaaggcagctacagagaagtgacaggtaatctaccaagggaaacccatcatgctaagagcagacatttcagcagaaactctacaaaccagaagatactgggggcctatagtcaagaactcttaaagaaaagaaattccaaccaaggatttcatatccagcaaaactaagctttgtatgcaagggagaaataagttccttttcagacaagcaaatgctaaggaaattacttaccaccagactgccttacaagaggtccttagggaagcgccaaatacagaaaggaaagaccattactggccaagaagaagacttaactatctaaagtatatatacactcaacattgaagcacccagattcataaaacaactacttgcttaatgatttattctttctatgaagcacatgatgatgccatcagctgtgaatcagagatgtagggaggtggttgttggaagcttgagaaagaaggtgaaacagccatcctggaaagcagaaacattaaaagacaagggacctacttacacaaggatcaaaagctgtgttgtaagacagtttgtcacaaacgcacgagtgctgtttcttctgcaacagtcagctacatgggtacaactgaaggaaaaaaaggtaggtagaaaatttggccagaattgagatattactatgcaaatatgacagaaagagagagggagttaataaaggtaagagtgtttgtaaggaagcagttatagttctggcccatggaatctggcctgggaaagaagggaagttagtacaataaaagactgagttcaagaaactgagaggctggtatgctggacagaaccactctgtgaatatcgatatttccaaaaagacacaggaggagtggtggaagaagagacagttgattgtagtcatcaagggatgaatggtgtgacttgcagaggacattggatgacagcagcaagcagctgtgttcttagtacaagcttttcaaaggagctcgggtttgagagaaggagagaaattggagaggggagcagggaggatgtcaatctacctccacttcttacaaagagatggtagaaactttcagagagtttgttgctttctaaaggtcttttattgtggaggggtttgagagaaggtgtgggatggggttagactggggctgtgcagagcagtgtgaggatgagggccttatgatggtgagttaccccagaggattatattgtggatggtgatttagtatatggggtagtgagcaagataggaatggtactctggttggagagtaagcagtgatttcccatggcttgagggttttctagatcacattaggcagaggaaaacctcagaaaaggtgatttcaatccagttgagggttgatttatttgaggaaaagatgcttaaagatctccaggggattactttcacccaatactagatgttttaccatgtgatcattacaagagtaatacaagctattctaatttcagattagactagacattatatttttctttctggcagattataatttatgattacaacaattcctgtgacctgtatgaagacacatatttctaatttcagcttgagagaaatttagtcttttattggatgatttaagtagatgattagtcagagggaaaattggtaatatagaggacagagtgtattataagatgcaacagaaacttttctccaatatatgcccagataaaagtacaccagagtaggaacagagtttagggcatatgtggtttaaaatttccacccataaaagagtttcgtccacaccacatctttccaatctcatcagcatgtgatttatacatcctcaaaaggttgcccattaaatttttgctcattacttattttaaaaacgtttttgtcggtactgagataaattctggcttcccagaggtctacctataagctttaatttttcatgttaaaccatctctctgatactgtttcgctttttagataatggctactattttcttaccagtcatccagattaaaactccttattcctctaaaacatctgtctcatgacatgtagctaaaaaagaatatatataatatatatatttatttgaattctaccatcttgtggttatttaagtagttgtctataaaatcctatatatgtattttgcagccttaagccatgcatgttattactcgttatgccagacagcttgacagctgaaattagtccaagggtccagggctctactatagcttggagatgggaagttctctgctcagagtgaaaattggtcaggaatgcttgcttgggaaaacgtgcaggtgttgtttagaaacaacatttttctaattttttttccaggttactctttctctcccttgtttccattttttctgatttccacatttttaatactgtttttatatagatcctgtgctggtttctttgctttaattaatatttcattttcaaataagctcaaacttggagaaaagttgcaagtatagtaacaaattccagtattctctttatccatttttcccagttatctcctgtaaattacaaattgttcactatatttactttatcacttttctctttttctctcctcctttcccccctctctatctcacaaacattcgacagtttgtatacaatgtgtttcgttatcacaaaaatactttagtatgtatttcctaaaaagacaagaacgtattctcacataactacaacatcatcatccaaaccaggaaattaacatgcatacactaccaccacacaatgcacagacaccaggcacatttcaccaattgcaccaataatgtccaatataggaagcacaaacaacagcaacacaaaagaaattagtctgcgagcacaattgcatgtcgcatttaattgtttcattgttttattttgcttgttttttactcccctctattctggaactattccttggtttctttttttctttcataattttgacatttgaagattactagtcagttatttgtagaatatccctcatacttgagggttacctaatatgtcctcgtgattgcactgaggttatgcatttttgagggaaataacacaggcacgatgttgagcccatctcagtgctccctatcaggagccacacaatgtccatctgtccattatcgctgatgttctgtggggttacttggttgaggtggtgtcttccaggtttctaaagctactattttgtctcaacataaataataaatatactgtgagaagatactttgaagttatgcagcatcccatttgttagttgtggcatccattgatgattcctgcctgaatcaattattactctcaaatttgctaaacagtgattttgtatctccttattccttttgcctttgttattttgcttgggaagaacttgtctttctttgctatttatttattgagtgatgtttggtaatagccacttcctgaggcctctaaacgtgccacttctctgagatcccacatattctcatgatctagcaactaaaattctaactacaggaaatcagggggcttccaggatttgtttccactgatgtccattttgactggtcagtgcctgtgctgtggcttaaatgtgtgatgttagaatgtgattcctgttccatccaggaagtagactggtgaagaacatttgaacttctaattcaggggtcctcagtcttaatagcatattggaaatgcctggagaattcaataacctacgaatgcctgggtggtagctcatcatcaggtgatactaatatgctgtcaagattgacagccactgggttagtgtagttgagagctttcctgttcattgtcagctaactaagtagtagcagggacttagatactgatggaaaccctagcaaacagggagaagaaactaaattattcgactcatgaaggtatggagagggagggaggaagagagaaagaggagaaggagaaggaggaggagaaataagagaaaaggaagagaaagagaaggagagagaaatggagccaaatgtaatcaatggttagatttgggtaaagaatatataagaattactgcccttctttatgaatttgaaattgtatcaaaatattcttaagccactaaagaccaaagtcacagtaaacattagcccatgggtcctcttgtcctcatagaaccacagagaaaagtaaaaataaggaatacatcttttatttatcctccacatttaatatgaagttgtgagtagaggaggtgaagaagaaaaagagttacattctcatagtcactaggagagaatctgacctcagaaacccctgaaggatgagagatgacagagaggcccaagtgacagagtgttcttagaggaagttggggtatctttcttttgcagcatgtaacgcagtcaggaaacttgcatccagaacatatgatctggagaggatcctgaagtcatcgaattcaagctcccaccgcctgtaggaatgtttaaagtactttcccagcggtattcatatgcactgtctgtctaatatgtatgtaatatgaatgcataccttttaactatagaagtgcattattctctgcaggttgacaaaaatgtagtccatttcttgaggcgactggaagaggaaacattaggtggcatggagtaaggctcagaaggggacagtgtgacctcaaggagagaatggctgctgaggggcttgtaggcatgtaactgcagctctgtaagggaagagaaatgcatgtctcatttcctatttatttcagtggcacctgtttttgacctgatgtcaagcacatagacggtgctcaatgaatatgttactgataactaaatgctgagaccagcaatagagagaaaaataaaggaggtagtgggtagggcttcctttcttcctcccccagtcctccccaaggtcccttccacacacacgaggtcctgtatttcaggatgactcactctgatgcctcctcccctagctcgtgggccacgtagataatgtcagggtaccccatgcagctggagatgttattttggggatagtagaagaggaagatgaggcacatctcattaatggtgctggggcctccctggaggaaacagacaaagatggagagacaaagatacaaaggcatgcagagacaggaggacaaagcaaacagaaaatagttgaagtggttatcttaccagtgatgccattctccttttcccttaaggtagagccagctcactgccctatttgctgctctattttcattggtggacaattattgatgttattccaaaaagcattccatatatctgccctgtcctcagcttcactgccactatcctgatttgggctagactatctgcctctcaactattgtcagtcactcatctgttctaattgcaatctgacctctgtagagctaccagacaagttgtttacaatttgtcttgcatcctgccatttgcctgttctgaaacctccagtggcttccagtcactggaatagtcagtcatcactaaaccaattatttgattctatctaataaattccaacccattcattcattccatttacttacctggcaaatatttatagagttagccctgctgtcctggagatataggtgggtcaggatcacccctgcttcaaggactgtttccaactttatctacctcatcctcattccattcctttagatatcttttgccaaccaaacttcttcatgtgcaccccacgctctccttatatatggctttctcagttttttccttctccagaattccccatctctatgtgtctaaagaaggactcattcacctacgtcacatgttcagttcactgtagtaggatctcatgattctttcctgtgaatttccctagtgggttattcccgttcttcttgtatggtatatatcacttactaacttgtgatataatcatttgtagggcggtattttttcctcagttgcctgcaacaccttttgaatcccacaagcactgaaccactcctgatgcacaaaacgggggattttcttgtgatcatagaaacaatagccaactttaattgagaatctactacaagtcaggcaatgatctaggtgttttgcatgtgttaaccaactcccacaacaatcttgtgaggtagaaagtagtattaatcttatgtgaattgggaaactgagatacaaaaaagtcaaataacttgtctaaagttagaaatgtactaaatgattgtgctgatattcaaacccaggcaatgaggccccagaatctctgctcttagtcgctatagcatactatatttccatggtcttggtgggttattggcagataatgtgagaaatccctgttcctatcttagatgcatggggtgtgagaacatgaaaagccccgtgtggatgtgtgatgccattggaggaaggaaggggcttcagtgaaatcacaggggtcactgggtagccaaagccatgagtgggctctccactggggctatggtcatggtgaccatggtggggtgagaggtcacttacaaatgtcatggagtcacggtccagtgtctggtagtgacattctaccagcaattcatctccctgttcagagtgaaacatgaaggctgagagtaagacacagagggactggtacagcttgagaactttcttggttgtcagtaatgaggtatgatgctgctgcccccaactctgcctggcctccctcagactctcaccggcttgatctccactctagagggcaaatctcgagtctcctgcaggttgaagtcataggaatcgtctttacagatttttcgaagttgtgttccattcctagaggaagagaagtcgggaattcagaaataaagagaagatgaaatacagaggggtctgccaataaagatgtagcatgcgggtggggtcattctgtgagtagattatccataaaaataaacaaaacacttcatcttccacagtcttatttcagttatttctactctaaagatagttctacctcttcctttttctcaaccggacataatcgtatgctacagaataaatcactattcttaaaattcattcccacctgcagaagggagagcttcaaggtcttccctcacctgtattgcactgcttgcagagcccgtccagccaagtgggtgtgcagcaggtagccatacacctgtatgtcaggcataggagctccattcatctgtaacagggaagaggtgcacccgatttgttaaggactgtgttcttgacctgctgcttgattttccccccttggtatttgacactttcctctgatgactgacatttaccactgtaattcttattgaacctttctgacccttcttccttctgcacttcccttgttctcaaagccctgactccttcccttccttgcaaaagtcatgttagtgaatctcctgagtaccaggctgtaattattctccaagtctggggttcaggctgtgtgggcttgtggatctgaccagatctgggatgggggacaaggagagtgtgtttcctcctcaggaagggtgcgcctcccagctccacctcctcaaacttctccgtcctacacagcccataggacatgaaggactcagcgcccggggggatgaagtggatgggaaacgtgaagaagcccagctggaggacatccgtgtcgtatttgcacagctgagaagtgtagtacacgcgaatccccgaggaatcatacacacctggtgcagagaggaacagtcaatcacaggaggcaggagagtgggtcacaatgtggagagaaagaggctcaggaaagctggggtggggctttgaccacagggagtcagcacacatcccacaatgcgttcccaataccgaaaaaaacagccagccccaccagcttcccttccttaaatcctctggatgctcaccaggaaggttgttaaaattgctgtaatgaatctccagtcagatccactgagggtccaagggggtcccaatagagacgcctacgtcatctggaaactggtagctctgttggaaggagttagatttggcagcaagaagggctgggaaccagccatagggattcagggctcctggccttgttttctaattgtcatcccagacttcccctatcccctggtcttccaccagcccagtgatctcattacccaaccacatgcacccgcttagccatgtgtttaccccatcacgggactcactgtgcccccgacagccgagcccacgatgacctgtgagcaaagggagaaggcagggtcggccccatagcagtcgctgatgcctgtggggagaacgctagcattgccacaggcgtacaccaggatgtgatgcaccgttgtctcattgtggtagaccaacttaggctcaaactgggcagaaaaggagagcagagcatgatcaagaccttctacatcaaatccatattatcttccttcctgtcaaaactatacccatttccgtcttctctctgtttctctctctccctttttctctgtttttgttccccaagctaccattttcccacccagtcagtttgactctcctctcaactcccccctcctttaagccccttctggagagcagacatgaaatctagccagggacattctgccttcccttagtaacctcctcagttcactgtatctgagcatgtagccatgccttttcaaattatctgtctaaagaaaaaaagtctccacatttgccacatattgtgagatcatacctttatttatttgatcaaaattgaaatcactcaaatatgaaattgggttaccaagtttgagttcattctagctagacttctccaacctcctgacagcccctggccatatcctctccctgcctttacctcctcttgggctaagagagcacaattctggggccaggttgaggctcatactttgttctttgcaaacaattattaattcttaaccttcatcaacatgtctgttgcattgtggggcttaaataaaatagcgctgggagttacatttctgggctcaggaaatgatgtagctgcgacctctaccaagccctgcctgtccccctgttcttgcaactacttccttcttgcttcctccaagaaattttccagacctcatcctccagggttgaccacaccccctgctctgctccagcacccttccctgccttgacaatgtcccccatctggtccaccataccttgtaaatgtgatgcttctcgctcacaatagggagaggaagaaaggtgcaggcatacgtggtgtcatcctctggaatgaggaactgtggaagggtgcacagaagctgagccagatgacagtgaggctctgaaaaagtagggcaagggccaggccagggaagggggttcacattagggtcagattggcagtccttaggagacagagaagagtcagagtaatctccacccaagggatatactgaatactgggggcaagagaagggatctgggttgagtggggtgaggagaagggagctggaggctgctgggtgggatgaaggtgtcttacattagtgatctccaagtcatggatgatggtgtcctcagggacatccagatcgtcagggtggacgacttgtagcagaaagatggacttgacaaaagtacgctcccgatacagcttcagagtgtcatccaggccataggcggccagcaccctcacggtgttgctctgcggggtgccataagcattgaggagctgccacccctgagcagcactctgcatatccctgcacccaaggacctacacaaggcacttgctcatgtctacatggtggaatggaaggaacttcacactgggagtgagaactagttaagttctatttctgcctccgaggctcacttgctggtgatcttgagcaagtcacactccctctcgcatgccctctctaagcttgtgtccacatctgtaaaatgaaaggactgaattaaactcttatatcctaacactctaaaggtcagcgaaactgggcagaattcttcaaaaggagaaccctggggcaggtgggcaggaggtgaatcagtgggaggtcaccctgcggaaggcttgtggatttcagcaggtggcacaattggagcatttcctgggaaggctgagaggaatagaagtcctgggaatgatgactagctgcctgactgggggcaactacctctccagaaggaaaacctgcttgtgaattaaatgcttttctctgctctctattttaccgtaatatccaggtcatgagggtcgcaggagcggaagggcctggaaaagtgcatggtggtgtagacagcatcttccgtcaggcccagcagctcagcatcctggctcccatcctccttcagagtgtcttcctccaccaagtgctgatccttgggtccagtgaaggtcaagaagtaagaactaggagcttcaaatgtcatgctttggagcagtagctgttcctttagctcccctaggatactagagtagcagagcccaggtgttctttattatgtagtttttctccttgggcaaagcatggcatgaagaacatggcagagcacacttttatggataatggagtttcaccacctgtccttgctttacttctcccatttcaaatctcatgtccataaagtctaatattcctgcatccctaatacttgaagtctcacatattatctgaagtatgtatgacattcattctctcatgtggctcttcatgtaactatttctcagacagctttgaattttccccagtgacctgcagttagtgggctttagcaagtaagtggtgcaagactatctcacaatctaatggtttcattctctcagcagtctttagagacttgcagtctggaagacatagatttcaaactctacaatggaccatttctggagggacacaccagcattcagctggcattctgggagtgtgtttagatatcctcggggaatgtgaatcctttctggacagaaaccatcctcaacccaacaaagaccctcatccttggaagcaagtcaccctcacacttaccgagaaatagacattgccattaggcaagactcctccaacaaccagatcacttcccacgttggtgtagcgatttgtgacaccgaagcccacccagccagctgtacggacctggagctcaaaactgatgatttcagcctcaaggtcaaagtcccaacgcaggaaaatgacattagaaggatctaggaacctggaatagcgcaggcgagatgtggggccaaggcggttgctttgtaaggggactcccagggccaaaagtggaaaaagcctgaagagaaggtcatgggccatggctcctgggacctggagcatctcccttgcagatgaacattcgagagcttcagagttttatgtcctacctgggccaggcaccatgccatgggggagggccaggctggggcacttctgatctgattatcctccgggttcagagcgatgccccttacataactctggaggtgagagatgcccagagaggatacagggcaggttgctttcactctgaagcaggggcctggcagaaaattcttaggattgaatcatttagactttccaccctgaccccatgccagcgtcctgccagtggggaccctgcagaatcaagaaagtttagtttctttttctccccctcccttcctgcccacctcttccatcttctatcctgggatgtctttacaggacattctgcctctggactatgcccccaccccactttttgtgggcatttcccattttgtctatgtatagaacttcggtactagcaaggatgtgggactgcttgtaaacctagtctttcaatttcccagtgcagtgcaggaaggagggaagtagctggcaaggaccggagggaaggctgcaatttccatctgctagaggaggctttgctactaatccctagaaggacactgagaggagggatatcagcttctcagatggttgagtcgggcagctttggttttctgcacactcctggggaggagcaggaagagggaggaggtgaggggaagaagatgagaaataaacatgagtttgcctttgggatgctttgtgctttcccttccggccatcaattacctttcagagaaattaacttaatggctgcatggcaggctgagcttgcccgattgagcacattagtattatgcaaacaatggaagcaacacagaaggaaggttagaatattagaacaccagaatagaaaagaactttagagccacttagttttccaaaaatttctatctccttaatttctagatgatgaaatgggagctccaaagggtaacaagagtggtgcttgatgccccgttgagtcaatggtgggtcatggtccctgaccataatttccttaggtcacagacaccctacaggtaccagacccctgccatgcatttccacatggcttgtcctggtggaagaatctagtgacatttgttggctgtttcttagggaagaaaccaaagtctgactctaactccacagtattttccccctggtgactgacacagctgacctagagctagaagtcaactcatctgacccctggttgctggctctccatttgacaatggagaggacatggaccctgagggcctctcccacacagactgggcctcacctctccacagaggaattcagctcaggagtagatgtacagatgccggcacgatctgcttacagcttctcattgcaggcatagtctttttttttttttttttttttggctactgagctcatcaaagctggtgaggacccagctaaggttgtttgctgctgctgtgagctcttgagtagtaattggggtgtggtgagggagaaaacaaatgcctcaagggggcagccacagcccctaactctaggcctgacagagaaggcagggagctcggcagccatctggaagcaagaggcttatcttggcccaggaccagagctgagccaagagaagaggagaggtcggagcctgggaggcactgaccttgaggagcagtaacaccagagagagagagagataacaggtgcgtggagacattctgatcccaatctcacttaaggattaagggagggggcagtagggagacaggatagccagtcttgtaaattgagacaggcccaggatcccttatcctgcaatctgtcctgctggacagagcactgtcctcagcacagaggcaaggtcctcaataaagagctgggagcagtgactgcagactcagagggtctcttctcctggatccttatctggcttccaccccaggaagccaggccattgctacacctgtgtggggctctctagggagatggggctggggctggccctgcttcccttctgcatttatcaagtgcctgtgacagggaagacaccacaagagggtcaccgacccgagggcagtgcagtcccaggtcttgaaatagtgaagttcagtttctaaacccctctgtgcctccttctcgctctctgtaaaatgctgcggttggagagatggtggatacagggccttttaagttgaatttcccagatgattggtttccaagctttctgaaaaatgaggccccttatcaatgttgaaaaataggtaaatctcattcttttttatgactgaacttaaagaatgtgattggattgtttgtaacccaaagtataaaggcttttttttttttttctgagacaaggtctcagtctgtcacctaggctggattgcagtggcataatcacagctcactgcagccttgacctcccaggctcaggcgaccttcctgcctcagcctcctgaatagctgggattataggtgtgcatcactatgcctagttaatttttgtattttttgtagagacggggcttcatcatgttgcccaaatgcttgatgtgcttatttcacattccatgcctgtatcaaaacatctcatgtaccccatacatgtatatacctactatgtacgcataaaaatttttttaaataatttttaaaattaaaaaaattctgagaatttaagcttttaatctcagttgagtactaagtgaatggtaattaaagactaaaattactaccagttgtcatattttaattgaatttaaaatttaccattgcaatcatagaagtcaactcttattgaaagcttagtctgtgccaagctctattctaaaatgtattgaccctaaatacatttagataatgtatacattatctaaaatgtaataaaaaaataataatttttgttattatttccatcctatggatgaagctgctgaaacccaaggtcccactactgggtggtggcaacactatgagctgttgggaaaatataactaaatctattattaagtttaagtaaaataattgaatattatataattatatgaattaatcaaatataattaaatatatttcataaataaatattattagaaataattcaaggagaaaaaaaatcccccaacccagaaaacctctctacaaaggtagatgagaacaaaagtacttttaaaatctttttttttttttttttttgagatggagtcttacttgttgcccaggctggagtgcagtggtgtgatctcaactcactgcaacgtccacctcccgggttcaaacgattctcctctctcagcctcccgagtagctgggattacaattgcccaccatcacgcgtggctaatttttgtacttttagtagagatggggttttaccatattgatcaggctgttctcaaactccttaccttaggtgatccactcacatcggcctcccaaagtgctgggattacaggcgtgagccaccgcacctggcctcattttttttttttttctaacaaagagcatcctgaaatattgagctgcaaacataggtaagaaagctggaaacttgcatggggagatgcctgcagctacaccaaaagaaaaggtgtacctgggggccaggcatgtccaccatagaagcttcatcttcccttttttgttagcacatgtacagtaagaaagaaatgggcaacatggtgcagctcaggccagagggagtagctatttgtcctcactcaaaataacatattctgaatttggattttctttcccctgtcaccgttactgtcctagcatcacattccttggattctctgaatgccttattgcattccacacaaaaatgatgtattctccaacaaaggaggtcacctcacagtgctattggagtcttatggatagtgctaatgcttatggaatccagtggccttgccatgtttcaccacctaggatcagctggccttatacaatatcactacgacctattgaaatcttaggaccagctcaagttgggagacatctttagaggctaaggtgctcctctgaaaaatggtctccaaaccattttcctctccaaactaaaatttcagttaataaaatatgtgcaaatgaagctgtcacagttgcacttaataattcgcactcccaatttagcttctcaatactgcaagctaggcgttactgatttaggggttttagagccctggatagatgaagttttcctactagaacttctgcttcctgagggggttctcttcttccctagctgggctgaaagactccagtagtccacttgtagcagccacaggctgaactctctaaaatctgttcttgtttttgtttttttaaatactcagtcaactggccaaaaaaacacctctccacttaaaactatcaattaaaactctcagggggtaacagactgcagggtgaagtgaagagagaaggaaggaagagaggaaaatactatagagtgagaaagtggagttcctgggcaactagctttatataaaaggcaagtatgtactaggaaaatctgtcattgatttcccgtttatctgctgtgccataaacctcagttaacttttatagtaactcctcatgtctccagtaaacactcagaatcctgcaacatgaatgaccagaatccatcgatggcattgagagttgcatgggcaaggagaagctaagtgtaacacctccctctcacctttgccctcccctcccctctcacctttgcccttctatatagatccctctttattagacttccttttttcaatcagcatagtaatgtgccaaaatcacacattgtctaatttggtgcatgtagtaaagggttttgtaccccaaatggctgtggagtggcctttattttatgtcagttaccaattcgttagagagaacataattcccacttcataaacttcaattatctgaggaattttgggttttccatccttatctagacggcaagaagggttgttatgaataatcacagtgaagatatgtacaagtaaaactgctcaagcacccactctgtttagcagaattgagacaggtatgcatggggcaatgtgaggagttaatttatatttaattctaaaggtgaacgatggggacaagctgtgtcatatggtccacaactgccacagctcagttattttggattacattttcaatccagggtatatagtaaaaaattttggcatagatgccaacatcggctctcaaaacacatccatccgcaaaagacaggattccttgaagcatcccattgcagattgccggggcagcagaaacttcctgccaggaaaacaataataacaacaacaaaaaagcagattatctttctggcaagacagaaggaagaaaatgggaaaattaatggatgaagagtattttaccttgcagggctgcctccttcctggcacaatgcccacacacagcatattttccgtgatgttgtaggttttataggcatcgcgacactgaggcttggagattacagagatgttcacagtttgcagtgaatcgggctctttgtctaaagaaaagatagaagtcaaacttccttaagagttttgttaggtattaaaacttcttttaaaaaacttttcttcttctaccatcagaaattaaaagagatcaaacattcagagaagtcagaactgtggcagttaggacaacgagggtataggagatgatcagattaacaatttcttatgatgcagaatcggtgaccttataaaagtgatcaaattcttgggagttacatgtacatgtgagacactccaggaatgaaatgaaacactttgttttaaacttttctggaaatttggctgggcacagtgctcacgcctgtaatcccagcactttggtaggccaggatgggtggatcacctgaggtcaggagttcgagaccagcttggccaacatggtgaaaccctgtctctactaaaaatagaaaaattagctgggcgtggtgatgagtgcctgtaatgccagctacttgggaggcaggagaattgcttgaactcaagaagcggaggttgctatgagccgagactgcgccactgcactccagcctgggtgacaagagtgagactccatctcaaaaaaacccaaaaacttttctggaaatttaaacattcaaagggtttcttttgagatgtaatttttagagtttgaatgaatttacagatatctggcctactttctcaattgtcaggtcaaaacaaaaccgagtatctgcacaaaaaagtcactgaaaaagcagttttcttaaacatataaagctagtaaatggtaaagctaagatttaaaactggatttcctggttcctaattaaagttcttttctttgtatcaatagtccacaaatactgtgaattgtgcacacttgtaacaaaatttgtccaatctgaaacaaaatgagaaaaacaacaaagtagtatgaacacatgtggcatgtgttctttccacggacgtttctttgggaagaagtactgtattttaagattttggtttttttaataatggaagagtatgtttaatgtttttatttgaaaataatgtattagttcttgaaaataaaatgtataagatccttcactttattttccaagcaataatttcatggctaaacatttcttttgggaatacttctgtaggaaatgcttacttaactacttgatgacccagatcaaaataagatgcattttttttgaagtcatatctcgttttgaaccttatgccataacccagatgaatcaaacatactgctcacagaaggacatttggctctttccaaaaatcaaattgactctcagaggacaaataatttctacttattgatatattcaagaaaatgtgctctaaatctgaaggtatttactaaggattagttttaaaaggcttgaatcatggcaacaatgatagaataagtgtacatctgcccattggtttctataaaaagaaagtagtgatggatagatgaatgtaatctgacaagtttgtttcaaataaatctccttttcatactatggtatctagtgtatgatgtatattatatatactcaaacttactcatgagtaaagttgcattaataattcttcacaagggattatatatcattgttctattttgctaataggtaatcaactccctttcaccactactctcaactctcgtaattagcaactatagacagttaattagggtttgcatagaaatttggagatggagtaatgggcagatggagatgcaacttagaaaacagaaagttgccttaagttgtgggtgttttatggaatatgaaacatgaggcctagaacaaagtttagatagactatctagttcaggagtttcaaattatgtatagaaaacttccattgataaaaataatggtagccctttgtcaattttctgaagaaatgagtgaatgcttagaatgttaccagtttaaaatgtttatttcagaagttctttttaaaactttaactctgtatctttattaaaatcttacataaggaagttctatcgcatttagtaaaatattatatatttatcttacatttaatacactgatatttatttcatgacttttcaaagcttcaagttgctttattgcctgaaatggtttgaaaatatacaacagagtaatctgctttattttagagttaaggaaattgaggctccaaggtaaaatgacctgctgtcacatagaaaattaggattggaatacaaatgttttctttccactaaaaccacttctatcatatatgaaagagaaaatgatagaaagatacagcgggtgaataaaaaaaacccaaaaaccttgaagcactccttcagtgaggtacagagaaaaggaaaggggggaaagaggttagaagaaagcttcactaggccgaattgaagaagccaagagtcgcgaaggtgtagaagcatgtctaattctgagagaagaacattgtcttgaactcacagatatcacacacattgtagctccaggtagagacagagcacatggtattttcagagatagtttggtagggcaggttggctaatttcacatagtcattgagttcagcctctgttttcagcttgattagcatgatgtcatgatcaatagaagtgactgagaagtgtggatgatgaatcatcttctcatagccaatcacttgcagatgcttttcattagagtctgctgggattgtaacccccaatatcacccgaagctttctggaacaatatagacgtttatgagaggacttaacagagatggcttctccatcattatgagcctctattatccctccccacagacctttttctgtaccctcgtatgtctcccaaaggcctttctaatcccatttaattgggagatggtctcagacaggggtgagagtctgtgcccaacctgagaacccaaagaatggagtgcctttgaaggcttatcactcacggtaaattgcagtgtgcagctgtgatcacccaaagcgggtggatcaggactccagcgcagggcaagtagtcagatttcaaatagaccaagtaagggggagtggagctgactgtgtaatctggattaaaggccaaagcaactggaaagagaagcatagacaagaaattccaagatttctcagtcatcaccagaaaaacttcaggaaagtcatttaataggctccaagttcccctatccttttctctagcaactttatctgtaaaatgacttactttgttctaaaacacgaagaaaagacaaatggtagaaacatatctcttttgaaaaataaaaagtgtttggctttttcactgtcaataaaatctttcaaattaaatgttcaactttcttaaataccttccacaatttagtgggttgtatgctaaatcaacgaatttttttcactatttttaccaattttagaatgcttcaataagtcttaaggcattcttatttagaatgctttaataagtcttatctctttttcccaacaacaactcaagacagaattatataagtatcatgacaagaacagaccaaatgctaagagtctgaggaggggaaaaataatgtattgttttaccaaatatacattgagcacctagtatatgtcaagctctgttttaggggcttgggctatatagtgaacaaagtagatattcctgctctcatatattacaattaatgaagatattcagtaataataaacacaacacacaaataaactatgtaggatgttaaatggtgattagtgctatggaaaaacacacaagtaaactatatatgatgttaaatggtgattagtgctatggaaataaaagtaggacagggaaagagagaaaggtattaccaattgtgtgttgcgggagaaggaggggtttcaggcagtatttgtttgttgtttgtttgagacaggatctcactctgttgctcagattggagtgcagtggcaagatcaggctcactgcagcctcaacctcctgggctcaagcaaaccctcctgagtagcttggactacaggtgtgtgccaccatatctggttaatttttaaattttttaattttttaaatagagatggagtcttgatatgttgcccaggctggtctcaaactcttgggctcaagtgatcctcccacctcagcttcccaaagtgctgggattataggcatgagccattactccagtctcaggtaatattaaaccagtcatcagagtataacttcatgggcaatgttgaacaataacatgaaaacgggggaagttgctagtcaaatatctgggtgaagggactccaggcagaggcaacagctgcagcatgggtcctgaggcttgtgtcagttacatcacagaggccatggctgctgacccagagtgaatgaaggggagcagaggaggaaaggggctcaaagaagaatggagggttttgtagaccatcgtaagaactcggccttgtttcctgagtacaaatggaaccactcaaggatttgtgcaaaggagtgatgacagtctcctcatggagaacctgtagagtgtagaagtatagaggtagaggggtctgttaggagaataatttgctaatccaggcaagaggtggtggcttagatcattgtgagcagtggagatggtgagatgtgattgaatttaggatacatttagaagataaagccaacatttttctaagagatcaaacgtggggtatgagagaaagagaggatttatgaataagcctgggtttatgcctgagtaactggaactgtgccaggagatatctgattcttcaatgttctgctgtgccctctgtggtgcagaacatcaatcctgttgcagacaggtccagagtcaggtcttaggagtgggtctggtatttgagtgacaatgtccacgcctcccacaaaagcacacaagcaaacctcctgcggcaggcaggcaggcactatcacaggaggaaacttgatgggaacggggcagtggagagggacagaggaccatcctacacttgaattctggaatgatgcctctcgctgttacccgtctttcatgcttttcccaggatttctctttggtgggtaaagagacaaatatgcacacactcaccagtcagattcaagagggcccagaggaggataaacttcatgatgatgttgaaagcccagtttagctccagtctctggaaaactgggaagagagagagaaaacaactaaataaaacaaagcaagattgtagaattggaaaaatatatcatctgaattattttagtagcaggattcagttttagaaatggtgtccattattcagaggagagtgtagcgtcatctgtcagagagacaagaatagagtcaagtgattggtccccaatacagttgaaaatggttctggaactcagagttctgccctctgtcttcagggaagaaagtaccaaagctaagttgaagttcatgatatctctacagacgcctcctgtctggtctcctttttgccagccttggtaggcaggttcccctctaaactatgtgtgggctgctgcccctcctgtctgtgtgatgctatcccccactgtgtgatgctatttttctccagtggacataatgtagccctctggagctgacattgcttcctctgcctgacattaaactcctctttgaaatacattaaccttttccttcatgtcactgtttatccatttattctgtgaaccaacctgctaattatttatcttatgtatctaacttgtgctaggatctgtgcttgctgttggggttgcctcaactgaaggatttctttcctaccttccaagagcttacagactagtgggaatgatacttaagttgatggttatgaaacaaagtattcagggctaaaaattgagatatgccacagactagataaaaatatttgcaaaacacatatctgctaaataattcatgtataaggaaatagtaaaattcgacattaagaaaacaaacaacacaacctaaaagtgggccaaagatccttaccaaatgttttagtctgcttggactgccataaaaaaaaccacagtctaggtgtcttacacgacagacacttactttcttatagttctgaaggtcagaagtccatgatcaaggtgttgtcaaattcagtttctggtgaggcctctctccctggcttgtggatgatcaccttcttactgcttcctcacatggcctttcctctgtgcacacagagataaagagggaaagaaagctctctggtgactctttttataaggacataaatcctattggatcagggctccacccttctaacctaatttagccttaattgcttccttttaggccctatcttcaatacagttgcattgaggtttaggccttcaaacagatatattttgcagtgatggggaagataacaccagagaatatatacagatggtaaatggcatatgaaaaaattcttaacataatatgtcattagggaattacaacaacaatgggataccactacataccctgtggaagggctaaaattcaaacactgacaacaacagatgctagtgaggatatgaagtatcaagaactgatgctggtgagaatttattgctgatgagagtgcaaaatggtacagtcactttagaaaatagcttggaagtttcttattaagctcaacataaccttactatatgatacagcaattacacttcttgatacaccaaaagatttgaaaacttgtgttcacaaaaatcctacacataaatgtttatagcagctttgttcaaagttgccaaatcttggaagcaaccaacatgtccttcaatagataaatggataaacaaagtgtgattcatccatataatgaaatgttattcagagattttatgatttaaaaaacttaactctcaagccatgaaaagacatggagtaaacctatatgcatattgctaagtgaaaagagctagtctgaaaagattatataccatataattccaattatatgacattctgggaaaggcaaagctatggagacatatgtatgtgcaagaacttttttcctataatgacttcttttcctccggatagattccaaggagtgggattgctggatcaaatggtagatctactttcagttctctaaggaatctccacactgttttctatagtggttgtactagtttacaatcccaccaacagtgtaaaagtgttcccttttcaccacatccattccaacatctatttttttttttgattatggccattcttgcaggagtaaggtggtatcacattgtggttttgatttttttttcatatgttttttggccagttgtaagtatttttttaagaattatctattcatgtccttagcccactttttgatgggattgtttttttttttcttgctgatttgtttgagtaccttgtagattctgaatgttagcgctttggcagctatacagattgcaaagattttctcagggttgtctgtttactctgcagattatttcttttgttgtgcagaagatttctcatttaattaagtaccatctatttatctttttgttgcatttgcttttgggttcttggtcataaagtcttcgtctaagccaatgtctagaagggtttttcctatgtaatcttctagaaattacatggattcaggtctcagatttaagtctttggtctatcttgagttgatttttgtgtagagtgagagatgaaaccagtttcattcttctacatgtggtttaccaattatcgcagcaccattgttgaattggctgtcctttccccactttatgtttttgtttactttgtcgaagatcagttgattataagtatttggctttatttctggattctctattctgttccattgggctatgtgcctatttttataccaggaccattctgttttggtgactatggccttgtagtatagtttgaagtcaggtaatgtgatacctccagatttgttctttttgcttagtcttcctttggctatgtggactcttttttggttccacatgaattttaggattatttttctagttctgtgaagaatgatggtggtattttggtgggaattgaattgaatttgtagattgcttttagcagtatgatcattttcacaatatttattctacccatccatgggcacggaatgtgttttcatttgtttgtgtcttctatgatttctcagcagtgttttgtagttttctctgtagaggtatttcacctccttgattaactatattcctttttttgtgtggttattgtaaaagggattgagctcttgatttgattctcagcttggttgctgttggtgcatagcagtgctacttatttgtgtacattagttttgtgtcctgaaactttgctgaattcatattccagttctaggagctttttggatgagtctttagggttttataggtatacgatcatgtcatcagcaagcaatgagagtttgaccttctcattactaatttgggtgccatttatttctttctcttgtctgattgctctggctaggactttcagtactatgttgaatagaagtgatcaaagtgggcatccttgtcttgttccagttcttagaaggaatgctttcaagttttccccattcagtataatgttggatgtgggtttgttatagatggcttttattaccttaggatatgtcccttctatgccacattttgccgattttgctaagggtgttaatcataaagagatgttggattttttcaaatgctttttctgcatctactgagataatcatatgatttttgttttaattctttttatatagtatatcacatttgttgacttgcagatgttaaacaatccctgcatccttagtatgaaacccacttgatcatggtggattacctttttgatatgctgttggattctgttagctagtattttgttgaagatttttgcatccatattcatcagggatattggcctgtagttttcttttttgttatgttctttcctggttttgatattagggtgatactgccttcatagaatgatttagggaggattccctttttggaatagtgtcaatatcttttggaataatgtcagcaggattggtaccaattcttctttgaatgtctgatagaattcagctgtgaatctgtctgatcctggacttttttttattggcaactttttaattaccatttcaatcttgctgcttgttataggtctgtacagagtttctatttcttcctggtttaatctgggagggttttatatttccaggaatttatccatctcctctagattttctagcttatgcatgtgaaggtgttcattgtagccttgaatgatcttttgtatttctgtggtattggttgtaatgtctcccatttcatttctgcttgagcttatctgattcttcccttttcttttcttggttaagctcattaatggtctatcaattctatttatcttttcaaagaactaggtttttgtttcatgtatgttttgtattttcttttgttgttatttccatttcatttagttttgctctaatcttgattatttcttttcttcttctaggtttgggttttgttggttcttgtttctctagttccttgaggtgtaaccttagattgtctatttgtgcaatttcacactttttgatgtagacatttaattctgtgagctttcctcttagcacctcttttgctgtatcccagaggttttgataggttttgtcactattattgttcagttcaaagaatttttaaattttcttcttggtttcattattcctgcagtagttcttggagaaaaagttgacgatgtgggtatccacatgctgctctgtccctccaagtgggagctgcaacctagtcctgctcctatccactaattttttcttgaactcctcctaaatgtgtatttttattaagccattaaatttgtgatgtttttacacagcattagaaaactaatacaaatgcatactggatgctggcatcatattctataatgatgattccatggcaagggagataagaagcttgctctcatacatcataatgcttaatgagggggagacagatgtaacaagaacaatcatcgtgaatgtcaaaggaaaagggaggtagagaagcatgtcgcaggaccctaatataaggtcagaagaagaccttctttgggaagtgaagtttgaaacttgaaggatgagtagaagttagccaaatgaagagatggggaagaaatctccaggtggatgaaccagagctccaaggagaacaaggaatgtaaaaaagagaatgaagagagagacaggcaaggagacacagataggagaatcatatgaaacagactttgcaggatttgtcgagtaagaactgcctgcaaaggaaatagaggaggcaatcagagagtaggtcaaagaaacatgtcctcgggttctgtattttagatgagtgaggctttattttccttaaatgataacaggaagaaggtgatagatagggaaaattggagataatcaatacagcaagtccatgaggaagtcagacaagatggggtccatttcacaggtagagatagaggctgtaaataataaggtcttacctccactatagcaggaagaatgaaaaagaaaaaaggtgggggaaagcaagtatgtttgcagttttagtggtggcaatttcagagaggtatcttctgctggtttcagtttttctctactcccacactagaggtcatctgctaaaagtgagcattaaaagtttgaggagagaggagagggtttgaaattgctactgcggagaattatacaaacaatttattggagaagataggattgccaataagtgctaaagatgtaattcaagggttacaagaagtaattagttgagctctataatcctaagtgaattaacacgggaacagaaaaccaaatatcgcatgttctcacttataagtgggagctaaatattgagcacacatggacataaacatgagaacaatagacactgcagattactagaagttggagggagggagaggggcatggtttgaaaaactacctaccaggtactatgctcactacgtgggtgatgggatccataccccaaacctcagcataacacaatatacccacgtaacatacctacgcgtgtcccccccgcatctaaaataaaatttgaaattaaaaaaaaactctggcacaaatacagacatgattcattaagggtgctttgggcagtgagtcagagacaggaaactggggaaaatgtgagagaagactggcaaactgaggacgtgtcatttggatggggccagaaattaaagaaaaaaataatcatatagtgaatgaaatggctttagtatctagattttagaacaaagaaaatttctgtgaatggaccagaacaagctattggtcttagatgcacctaagctctctggttttggttttttgttgttgttgttttagagacagggtcttgctctgtcactcaggctggaattcaatggcacagtaatagctcattgcagccgtgacctcctcccctgtcagcctcccatgtagttaggagcttttttttttattactattttatgtagaggcaaaggtttctctgtgttaccaaggctggtcttaaattcctggtgtcaaacaatcctcccacctcagcctccaaaagtgctgggattatagacctgagtcaccccatgtgggttttgttttgttttgttttgttttgttttgttttgttttaggagaagagaaaacacattcaggcatccaggttcagggtccaaaaaccaactcacctctgcagactttatagatgccctagattcactgcgcccctcaagggaagaaacctcaaacctctttacgcctcccacagtgggtttctcctatggtgtggttctctgttcccatcttcactggcctcctctgcccatcttttcttttttaacataagatccctatgtcatattgacccttttctctctgttgctctttggtctctcatatgtcactcaaacccctaactttggggggccactcagaatccccttaactctgtctctgtttttagatgatttggacagtggctatgggatgctgcacatctccccaacatatgccagtgtgagagaagggctgagcacccatcacagctcttctccataggagagagccctcccaaaccccgcagctcccacccaccaatgtaggactcctgtttgttagtcactcctcaggaagcatctggatttcagatcaatgtctccaactgcctgctggaaataaccacctctacatccttaaaggatctcaatatagcaggccacctgtctcctcatgcaggaccatgctcttgataccttgcacacaaatgcacttgttatcctcatattatctttgagaatcaccatcttacctgttgtccaagtcaaaaacttgggagagttatccctgacatctcccttgcctttcttcttacagtaagtatgtccaaatcttacagatgttacttccttagtatctctcaaatcagaaattggatggtgttttgtttactgtaaaagcttcaatgacaccccctccaatgcctacaaggtaaaaatctaagttcctttatagagcaggtcaggcccttcatctctcaacatttgcctgcctataatagaataatattttatggcattatttttccttttctacaatttattttctaccttcaaggtttgcttatttacatatattttccagcctataccacactttcatatgcttttttgccttttaataaactatgtgctcagttttacaatatcctcccctaatttgtccacctctctggtgttacttctcctggcactaccactcagaatgttttattttatgttttcgtggagcttactgctcatctctgttatagcagttatcaaaaggtattgtagttagctaactgatggccaaggtcatgtcatagtcactcaggcatccttagcaaaggccgtgcctactaaacagctagtggttaatatttgaatgaataaatgaatgaacaaacacaaggtgaagaggttgctaaatttctcattatcctcaaagtttacatgacaaagacagcaggagtcatggcacaggttctcagctactcattttttttttttaatcagatgtttcctctttggattttgttccaaaataacaaagatgaagagagttgtagatccagtgtagaaattatgaagaggtggtactgaggggatatgggaacagaggcgcctcagtgggtatccataattttcaagatccatcttgcatagctatgaacacctgtgaagaatccttcacttcctagggtgacacttccttctgcccaggacaagattccatgcaacctcccattgcagatggctggggcagccgaaacatccttatagagagaaggaacagaaggtcaatgtgtccttgtccttatggaacaagagtaaatgccagctgggcgcggtggctcatgcctgtaatcccagcactttgggaggcagaggtgggtggatcacaaggtcaggagatcaagaccatgctggccaaatggtgaaaccctgtctctactaaaatacaaaaattagccgggcgtgatggtgcgtgcctataatcccagctactcagcaggctgagaatcacttgaacctgggagacggaggttgtggtgagccaagatcatgccactgcactccaggctgggtgacagagtgagactacatctccaaaaaaaaaaaaaaaatagtaaattccaaaaagcggcacataacagtagcaaaaccatctaagagaatgggcttatttttcttgagaggtggcagacttctctttacatccacataagtcttacttctaaggttcaagcttgacccaacccaagtgcaagacaaaggacaaatagttctaccccaaatctctcccactctgaaagatgagaagggcaatggttagaaacccagaggtgagtagggagaggagagggactccagctctctgcttctctctcttaggaggccttttggatgagtgctctttgattctgcattatcatcactcctcccatgggactcttgctatcttccagtatagagaagggagaaataccttgtttttagataggatccttagagggtgtcctacacaaatgatgtttcctgcctgttcttctttgagtctatcctgacagtcacggaatggaagagaatattggttgatccatgtcaggatgtcaggatcactgactgtgggaaagagaaaacaaactccagagtgactcttcttatcacaagggctcttctaaccagatcctgttttgtaaataaattcagtcctgagaatattcaatgcaggtagcagcagacactccattctccgtaggattccttgttcagtaatctccatgttagagaagtaggtttataagtcccctttgtcagatatcaaatccataggtctttctgtgctatgcatcatttataaaattttgaaaaaactgtgagttattagtgaccacaaggagaaagagacagtaacgaaaccattgtctcaaagattttccccctacacacacacctttattgggcatctacttgatccttttcacgtttagttataaagggagaaactatttttagtgcatataaaactgctttttgagttacacagattatttataagtgtttatagtatgtgtattgatataaatatacatatatatttcccccaagaagttgtcatgttgttcatctccataatagcaattgctattatactgtcaaattcaggatacagggactttaacgaaggtatcatgtaatttaaatttctggtagagaatagcaaagagaaaggaaacaaaaacgctgaccaggccgggcgcggtggctcacgcctgtaatcccagcactttgggaggccgaggcaggcggatcacgaggtcaggagatcgagaccatcccggctaaaacggtgaaaccccgtctctactaaaaatacaaaaaattagccgggcgtagtggcgggcgcctatagtcccagctacttgggaggctgaggcaggagaatggcgtgaacccgggaggcggagcttgcagtgagccgagatcccgccactgcactccagcctgggcgacagagcgagactccgtctcaaaaaaaaaaaaaaaaaaaaaaaaaaaaaaaccgctgaccagagattgctcaagctaagtccagtgttgtttaaggagcaggattttttctgatagagtgtatccaatcaaatgccctaaagcagattaggccagaagttgtcaggtcagagaagaaagagaaattatgttcagttttatgtttttatgggaactaaattaaaatatgtgtaaaaaactaggtgaaagtaacttaagttacttgaaataatgaatttctaataaatattggaagccctgcaccagaaagcttatagaggtagagtttgtcactgtgattttgacatgcagagcctatatacctctgaatagttttgttttgttttcaaattgtacgtaataaattacttctgtaagttgtaattcaattactttgaataagacttacaaaatcaaggacaaaaatcatacaagctgtaactgttcagaaaacatgttcacttagattcccaagtacttgcttctaagtggaaaaatgaatctgcaaaatactgagaatataatagtttctgctttttatttctgttttttaccaaagactgacttctaaaattccacttttatttgcttttacagagcacgtgcattgttctgtagccaccagagagagatttaaacctgattaatagatccaggacaacttgcttgagtgaacataacttttgcagtataatcaatgtcagccttcacttcttaaaaccagctgatcaggatcagaggtcctctgaaaaacacgcctcagagcaccaatcaatcaacagcaatccccctgaagtagccaggcctcaacagatgatggaacccattcatacctctgaaagtcctccaatccctcaactccaagcttcccacaaaccccttatgctaatcagcactccattctgcttagtgggatggtgcctggtcagcattgctctgacttgctgtaataagcaatagatttacatttgtcatttcatttcagatatcaagtggtggtatcctcatcctcaacaatacctaaggagagaataatggagtaacagccaacaaggaccaacaaacttattagaaagtagttttcttcacaggtgttctttattagacagactcctgctgagaccggatctttctgctcatcccaatttcagctcacaggggagatggatgtgtgcttacaacatgggctgccactgtttttcttgtgaggcatgtcagaccagggagataacaactgattatgtcataataatcaatttccctacgaaccaccaaagtctccacccctaaatgggaactctgggaagaagcagtgggtatgagtagcactctgtgcagggaaccagctctggtgacaggacaggtactccctcaaccattctcttctctcccagggttctctgcacataactgggttctctgcggaaggtgtaggaagcatcttctgctgcttcaccgcatcacatatattttatgttcatttcccccactgttcttccattgtgtgatgggctttcagcaactatcaatgggtgtcaccctcccgcaggctgccttcatactgtctttgtgcacgaggactcctatttctcccacctgtatttcaatccagttctctggactcttgtcttcaatattctagagatatgaaaattactgtctgctccatttgttggtgtcagagtggctgccctttatcagtctctttgaattttatctttgacctccagtgatggtggtttgggtccctggcaggaatccctctatggtggacaacattgtctcatagcagcgatttccattagggacatccctctacattttctcccagctccaacctcctcagcataaagaacacagcatccaacacatacggtttttatattcattccaggtccaggttggaataaagcaggattcattaaatggaatgggttccaaggctatggctatagtccccacatgggggttgagtgaagcaggtgttgatagcttgatcatcattaggtcatcgttcaaggattttgcatcaaagtcagggtaggtcacaatcgatgaatagtttcatatctgttgtttcttgtttgtgatgctaggttgagaaactcccagtcgaatttcaacactttggaagaaagagggcagagagatgagaagaaagagagtcataagataatggattacaagaaatcctacgggccaccctctttaattattttaactttatttcttaacctgagaactgacatggccttcttttgtctataaaacaatagcagtaatttacagaattgttgtattagagacataaatttgtaaaatgtctgacatcgtgtctggcaactaaaacacaagtcagtggagccttgttattaagatttttatcatctgaattagcagctaatagagaggcagcacacatccagttcatgtgttaagtatggatgtaagaaagaacatctgccttttcaatttttattctggaaggatgtgaactgtgtatttcctttgtatttcccatataccacagagcagaggttagtctgcgttaaactaaactgccttgaacagccagatggctaagatttctgaatttgaaagaaccgttctatactcatgaaactgagtaggtcttgatcacacagcacattctcacacacaacagaaacactgagatttgcaaggaattgctttattttgtatcgtgctcccttgccctctactgtcactgcatgatatggcttctgcctaagtctttgacctcatcctatgagcgatccccctgctcattacccttaattcctgccgatttctcagcttaatatctttgttacttcagggagtatatgaatattgttcccttggcctggaatatcccccaggatttattcatttggctggctccttctcttcctatggatctcacctcttcagagatgatggacatgaccacattaactaaagcagatttcttatttcatgcccatatattagagcttgccattaaaaaaaatactttgtttttggccatttatttgtggtggctactccctctaccaaaatgtaagctccatgagggaacacttattttcatcttgttccttcactgtttcatcagtgattaagtagcccttgctagataataaatgtttaacaagtattgttgatgaatgaatattatttactacccatgagagggaatcctctgacatcttcctactgatctcctcctaaactgcccaaatttgtgttctgtttcccaatgggaacaagagtctctctttttccgtgtcttctgattttactaaaaattttctgggatgcttcaccagatctacatttgtttgaacagattcctcccagctcgcaagagaaagggatacttacggtaaggggcagtgggcagctgtcaatacccagtcaaggtgaatgagagaccccacgcagggttctgggaaggactgaagatagaccatgtaaggaatagtaaaattatatgtcagctcctgattatctttagagtctttagccagagcagctcctggagaatcaaggggccataggtggaaagggaaaaagaagttaaaaggccagaactggctagggtagttttccctaacctaaggttttcaaatgtaatgtaaaggtcttcaatttacctttcatattttaatcaaggaaaattatgcatgtcctctaagttatacacaataagaaaattgacacatggttttgctgagatgaaattacattaaaattctgtgaaacttacttacatgctgatcagaagctcctattggcagtgctgtgtgttacaaagatgaaaaaaataatgactacttgaaatttttttttaattcacttttgccataaatgggggtaaaaaagtatggcgtgatttaaatttttttaaattcacttttgccataaattggggtaaaaaattactgcctgactttggtgatgaaagaaatagaaaagcttagggcttccagagcccctgacccagctcaccccccttttccaggcccatgttctctaatgtggttccttttgttttcttcaacggttgttttatttaaatgtcctccgcttcctagctgtttagttgtgcccagctactcctctttccaatctttcatagactatcctgggtgtcacaataggcagaaacaaagccccaaactctcaccagctgcactcaagagagcgacgatgagaaaacccttcgtggcagacagatctcgccaggaacagacaagttgatcaagctgtaaactgtcccaatctttagtccaagtgtccttgccaagaacagctgtggagattatgggcagaagacagatgagaggagagcagtcttcacatgagtccttatcaagacccaaatatatacggcattgctgggagccgtctctgatgtgggtgaaagagagtggcacagaccaagccgaggtcctggtgcctcctttcctatcctacaaatcttgcctggagttattatgtacctgctgattttccttctcctctctatgacacaacctttctttgttgtctccttctccctctgtgacttaaaccgctctccctgcccatcttgctgccatctcacctcttccagagacttccagaggattggggtatgaaatgcacttaataaatcattgcttttttcattccttgtaattttagtgatgaggaagctatggttctcttggaagttagtggcaaagtcaggactcagaactcagtctccatattctctgtgtcaaggctgaactctatcttagcctgtgttcccagaaaagagcaatggttaagaaatccctccatcgttttgtgttcttagaaatgaattaccacaaagagctacctttcctatatgacttaaataagactctctgccccttctttctcccagctcccagaaaattttgcatggttctcttgcttacctgtgatgcatcaaatacagacctttcctcttttgcccggacttgctgacatggccagacatggaccatccaactccccattttttgtttcaaaaatgattagctgagattagaatggtttgtctcttcgaaactagctacattaaaaaataaacatttcctattcagccaactaactgaggcttccccctgattgtaaaacaacccccactataaatctccccacctcaaacttatctttttctccctataaaaattccagggcaaaaccaccctgccaagatacttcataatcttcagatcttggatgctctcctattggatgatctgaatgcaaccaatctccttactagttcactttttgtcttctatgctgattactctcaaaatgcatcccattttttctttttattagctacccgtatatggtaacttccagcctgtcccacagagacgggtaataacagtaggttcaatcccacattttatatagagtagactggaaaaatgcaaactatatagtatcaaactgatctttatcagagtaattaaggagctgatcagttataaaagtccataaacataacattcctatatctgtaaaaattataggcagacttagttctcctaaaatttaattattaacttaaaacctcatcagtatgttcccatgtactctaaacttttggggacaatatttctttagtacccaaaggttttaaaataataattattaaaataataaagtcagtatttgttttgtaccatgtgacaaatactgtgctatatgcccagcatgtgtgacctaatttatcctttatcacaggcctatacattaaatatcgttattatccattttcaagctgaagctctgtatggttaaaaaccttgctcacaaccatactgttgaagcccacgacccccaacattttaggaaatccagcatccctctacttgttccaattatttatctggtaggactgggccttatttctgctaagttctttgcttatctccagacttctttgtcccagcacatgaaaacagctgtcttcattttatttcttaattcaccactaacctaattctagggtgggtttcagacttttactgaagctttggagatattacaggaaattttggcaccagcctgaaaacatctttaaatagtatatcagaaatcactttgtgaatgtttatgaatcacctacagtccacggagtctgttaacctataacctggtttctgccacattgctggaacctaccctgaattccttttttattttcttgttttcttcatgtctttagtcagctcacatttctgctgcccagaagccccaagtagagagagacaaacatctacccttttaagctatcggaggagaactgaaaatttttgttactatcttacattgagaaatccatattttctctctctattctcaatctctgcctccctcccacaaagcctcaccaatgagaatatgaaggcgactattgttagtttcctttcttttaaaatgtctttttcttttcttttctcatggaaagaataggctaaatacaactatttgctttgtaaagaagtgagacgatacaatttatttaatggatataagagattatagtcactatcttctttataatttctcgtataatattctaataaaggtcactcaattgtgacctcggcaagcataattcactgcagaggcagtggcctagagctgtcagtttcccctggaggctcagtccagggagttgctgagttggtactggcatgacagctctggtgaggggtggctggaggcccaggcctggaggacctgcccagtgaggagatatgggaataggcacctacgtaccagtctggccacttttctgtagggttgctgcaatatgcttggggcctgctccagtctctagtcaccttggattttctagaacctggaggtgtcaccaatgaaggctgcaaaacagcaaagatggtagcctgtccctgcctctgggagctttgtcccagggaggtgcagacatattggcagcccaaaagcacctgtaggatgtggctggagaaaccttacaaaccagaagagattgcaggtctacattcaacacaattaaagaaaaaaatcttcaaccaagtgtttcatatccagccaaactaagtttcctaagtgaaggagaaataagatctttttcagataagcaaatgttgagagactttattatcaccagacttgccttacaagggatcttgaaaggagcactaaatatagaaaggaatgattgctatcagctgatacaaaaacacacttaaacacacagcccagcatcactgtaaagcaaccacacaaacaagccaacataataaccagctaacagcacaatgacaggatcaaattcacacgtcaaaactaacctttaaaactaaacaggctaaatactctacttaaaaggcacagagtgacaagctggataaaaacacatgacccaatggtatgctgtcttcaagagatccgtctcacatgtaatgacactcatagcctctaaataaagggatggagaaaaatctaccaaccgattagaaaacagaaaaatgcaagggttgcaattccaatttcagacaaaacaaagatcaacaaaagacaaggaagggcatgacataatggtaaagggttcagttcaacaagaagacctaactctcctaaatatatattcatccaacacaggagcatccagatccataaagcaagttcttagagacctacaaagagacatagatccctacactatgatagtgggatacttcaacattccactgacagtattatatcattgaggcagaaaattaacaaagatatttaggacctaatctcagcattggaccaaatggttctgataaaccttcacagaagtctccaccccacaacaagagaatatacatttttctcattatcacatggcacatgctctaaaattgaccatgtaattagacataaaataatcctcaacaaaagaatcaaaatcataccaatcacactcttgggccacagtgaaataaaaacagaagtcaacacaatgaaaattcctcaaaacaacacaattacatggaaattaacatgctgctgaatgagttttgggtgaacaatgcaattaaggtggaaatcaagaagttctttgaaaataatgagaacaaagatacaacaaaccagaatctctgggacacagctaaggcagtgttaagaggaaaattcatagcactaaatgttcacatcaaaaagttagaaagatctcaaattaacaacctaacttcccaatgaaagaattagagaggcaagaacaaatcaaccccaaaagaggataagaaataacacaaataagagctgaaatgaaggaaattaagacacaagtaaaccattcaaaagaccaaagaatccaggagttggttttttgaaaaaaaaaaaaaaaaaaaaaaacaaagccactagttagctatttaggaggaaaaaagagagggtccaaacagacacaatcagaaatgatgacgggaatgttactactgaacccacagaaataaaaacaaccatcagaaaccaatatgtacacctctacacacacaaactagaaaacctagaggagatgaatacatttttggatacatacaccctctctagactgatccagagagaaactgaatccctgaacagacctataacaagctccaaaatttaatcagcaataaatagcctaccaatcaataaaagtgcaggatctgatggatccacagctgaattccactgtatgtacaaagaaaaacttgtaccattcctacagaaacaattccaaaaaattgaggaggaaggacttctccccaactcattctatgaggccagcatcatcttgataccaaaacctggcagaaagacaggaaaaaagaacacttcaggccaatatctttgatgaacaaagatgtaaaagccctatacaaaaatacttacaaactgaatccagaagcgtatcataaagctaatccaccatgatcaaataggcttcatccttgggatgcaaggttggttcaacatacaaaaatcaataaatgtgactcatctcataaacagaactaaggataaaaatcacatgattatctcaataaatgcagaaaaggcttttgataatattcaacattacttcatgttaaaacgcttaataaaccaggtattgaaggaacacacctcaaaataataagagccatctatgacaaaaccacaaccaacattatactaaatgggcaaaagctggaagcattccccttgaaaactggcacaaaacaaagatgccctgtctcaccacttctattcaacatagtattagaagtcctagccagagcaatcaagcaagagaaagaaataaaagacaaccaaatgggaagagaggaagtcaaactatctctctttgcagatgacatgattctatgtcaagaaaaccccatagtgttggcccccaagctccttcagctgataaacagcttcatcaaaactgcaggatacaaaatcaatgtacaaaaatcactagcattcctatacaccaacaacaaactgagagccaattggaaagttagtcccattcacaattgccatgcacaaacaaaaaaacccccaaaacctaggaatacagctaatcaggggggtgaaagatctccacactgtgaattacaaaacactgctgaaagaattcagacaagacacaaacaaatggagaaacatcccatgctcacagataggaagaatcaatatcattaaaatggctatacttcccaaaacaatttatagattccatgctattcctatcaaactaccagtgacattcttcacagaactagaaaaaatattttaaaatttatatggaaccaaaaaaacaagcccaaatagccaaggcaatgctaagcaaaaagaacaaagctgaaggaagcaagttacctgacttcaaactgtactacaagagctacagtgactaaaacagcatggtactggtacaaaaacaggcacatagaccaatggaacagaatagacagcctagaaataaggctgcacttctatgacatctcatctttgacaaagctggcacaaacaagcaatgggacagagcctctctattcaataaatggtgctgggataactggctagccaatggagattgaaactggaccccttctttacaccatgtacaaaaatcaactcaatatggattaaagactaaaatgtaaaacccaaaactataaaaaccctggaagacaacctaggcaataccatcctgtacctaggaatgggcaaagatttcatgactgtattagtcagtttgcatgctgctgatgaagccatacccaagacttggcaatttacaaaagaaagatatttaactggacttacagttccatgtggctggggaagcctcacaatcatggcagaaggcaaggaagagcaagtcacatcttacatgacggcagcaggcaaacagagagagcttgtgcaggggaactcctctttttaaagccatcagatcttctgagacttattcactatcacagaaatagcatgagaaagacttgctgccatgattcagttacctgccaccgggtccgtcccacaacacatgggaattccagatgagatttgggtggggacatagtcaaaccatattaatgaaaaagacaccaaaagcaatcacaacaaaagcaaaagttgacaagtgggatccaattaaacttaagagtttctgcacagaaaaagaaactatcaacagagtaaacagacaaccttcagaatgggagaaaatgtttacaaactgacaaatgtctaatatccagcatctataaggaacttaagcaaacttacaaaaggaaaacaaaggaccctattaaaaagtgggcaaaggacatgaacaaacacatctcaaaagaagacatacataaggccaacaagcatatgaaaaaaagctcaatatctctgatcataagataaatgcaaatcaaaaccacaaggagatatcatctcacgtcactgagaatggctattattaagtcaaaaagtaacagaggctggcaaggttgcagagaaaagggaacacttatacactgttggtgggaatgtaaattagttcaaccattgttgaaagcagcacaacaatccctcaaagagccaaaagctgaactaccattcgacccagcaatctcattactgggtatatacccagaggaatataaagcattctaccataaagagacatttccagaaatgttcattgcagcactgctcacaatagcaaagacatggaatcaacctcagtgcccatcagtgacacactggataaaataaatctggtacatataccccatgaaatataacgcatccatagaaaagaatgagatcatgccttttgcaggaacatgaatggagctagaggctatcatcaaattagcaaactaacccaggaaaggaaaaccaaataccacatgatctcacatataagtgagagctgaatgataagagctgatgaacacaagaaggaaacaagagacactgaggtctacttgagggggatggtcggagaagggagaggagcagaaaagataactattgggtactgagcttaatacctgggtgatataataatatgtacaacaaaccccatgacacgtgtttatctatgtaacaaacctttacatgtacctcaaaacctaaaataaaacttataaaaaagcataattcagttcccaagagatttttcctggatgtgagatgatgtgtggcttagaaagtattcctttattgtttggctctcttccctacaaaatgtaaattctaatttcgttcctcttaaatatgaactggcataattttggagaacagtttctaaaagtcaataaatttccatctggctctcttcttcaaatattcttagagtacatctgctttgctataagtaagctgaagccatcccatctggaggcaaatagagaagccatgcacaggtgctgtggccaaaaatcaagctgaagtcccagctgacagacagtatcagccaccagacctatgagtgaggaagtctttgagatggctccaagcccagccaccagctgcctgcaaagcatgagagattcccagcaatgactgcctataggagcccggtcaaatcctaaagccatgagaaatagtgataacaagtgattgacattgctatattctgctaaatttgaagtggttttctatgcagtaatcaataaccaggactggagtcaaatcatttccaactctactccgttttctaatggtgataggtgaagcaagtatgccaagagggtgattctgcctgagtggttccggggtccctgttgtgtcctcccaatcctgaaggactggaaagcaatttatctgggtccattagtttgctctaatttcacgtttaagcctcaattctggggagtggtggcttgatggacggagggatcaagatcatccagagaagggtttggcagggcagtttaaagtgagcatgaggtgtgattctttccacctttagaactaaaatagaaaaaggattagacaacgctcctatgagagaagatgttggaatctacagtagaaaagataagagtatgagtgttcataatacactacctgtaattctcatggtagcctctgaagcttgatcataatgagctctgattatgacacattttgtagccatacgcccttgggcaagtttcttatctctggctttatcagtttcctttcttgtaaaatgaaaagcccattacatcgattgtttttaggaaaatgaaaagagttagtgtttttaaagtggctttggacactgcctaacaaatagtaaatgctagttaaatgttggttaaataaaataaaataactgtaactttaggattcccatattttccaggctttcagggacagtaatttatcttatgtcaaaatattgttgtgaagttcttaaatctttatgatattttcttgtttctttctttgtttttttttttttttttttttttttttttttggttaacatggtgaagagcgtggagaaggacgtttaactaccttaagcctcagtattctaagctataaaatggaaagaagattagtacttacctcataagatagtcatgaggattaaatattatttaaaaacacttaagcaccgtatatgacacacagaagataataaatgtgagttatcatcactattacctttttcacctctgcaaaactcctgagtactagaaaggagaaaaccttctggatgctcctggttcacaggattgtgtgatttggctccagcaatgtcttggaactgggtccctcctgaggtcagtgattcagaattactggacttcttaggtttcagctcttcctagctcaatacccctctctctaaagagaaaaagtattaccccctccaattctactcatgtttcactagggacatctcgtgactagcatgaggctcagaaaagatgtggagggatgagagggtggagcaggtcagtgctgggaagcctcccaacctgaatgggttgcactcattgtcagctggctttcttcctgcagattagggtggattaagggatttttgtaaggtgagaaagattaatactacattttataagccagacatcctggaaatttcattaaagacaaatgttatctttgttttataaaacccaacacctgtttatcaagaaaaatgcagaaaaggaacaacataaatatgaaacaacaataaaaacctgcaactccttttagagttgctcgcattgacatgtcaggcaccacaaaatgatctttttcctttaccccattctttatattttttccctcgccaaaaaagtaaataattcttttttctctagtgattctcctgcctcagcctcctgagtacctggacctgcaagcatgcaccaccacaccccgcttattattattattattattattattatagatacaaagccttgctatgttgtccaggctggtctcaaactcctggcttcaagagatcctcctgcctcagcctcccaaagtgctgggattgcagacataagccattgcacccggccaaaatttaatagttgtttatactaaaatttcttctctttatattgctgatgtggtttgtatttcctgaatgaatctggagtaatacaatgtctgaggaaaaacctttggtggaacccacagctatgggaagataaattttctatggtgtgaagacactttatttctaatatttggtaatgtcaatatatgattgacaaagaaatataccttccccatcctgcctcattcttgttacccagatgtgggtcatcttttgcccaaagccagtgtttaaagctcatctaactactattttattccattctccaaatcagattcaaaactaaaatacagtagcaaaaataaaaattgttctggacactacacaggaaactaaagaaaataatttgtattatattaccacacagcataattttctaaagacctattttagttatttttattcttttttgaaatttcttcctaagtctatcctaccttacctcttttcttcttctacatctctaatgtctctctctctctcttttttaaaagattattgtcttctccattagatccagccttcagtttgcatatctcactcagtagaacatggcaggtagccatcctgtgggagggtgtaactctcccatcccatgtggcttatgaagttattgattgaacaaaaatgtagctgatttgggttgaaagaagggggttaaattacatagctaaaaaaaagaataaaatattttgttatgcctctttctcaaatgaaatgagagattttgtccttttttttttggtaaacacatgtaaaacaatgtaataatgtggagaacatgctaagctacagtgaagaaaatttatttttcctagacatggcagtaaatggaaatttctttatcaagggcaaaataatcctagtagttaaacaggaagaagaaaatgaaaaggacttcaggggattaaggagggagttactgatttcaaaactgcagtttcggagttcaaagtgttgatcatcaaaaacggaaaatgtgattttgaagtgaggaaaccccaaaagaaagttaaatgataattcagtggtgagagtcacatcggagcagtgtctataattcttatgagtgctccttggaaaagaaaatggaggaagaggtcctgtgggagaggcagttatgtgtaaagaaactttagaggcttggagaggcgtttctcagaaatctgcccagcctttccattctacatgcaatagagagaaatgcagtggggtgatgagggaggcttctaacacgccaggacaacaatccagtgactcccagggaagcataatcttttgtcttataattttttaaactgcagatatagtacatgagtggtatgagaaattaccacaacacaaagttgtgtgaactgtgaaagttccccttacgaatgaagacaaaactaactttccaacagttcttcagaacatatggccttatattttctgtttggaaaacagtgtactctactgctatcagatctttgagccagaagctggccttggaggaaacctgtggcctttcactgcatgggtccctccaagtctaataagagtctcagaggcagagctggcaagggctaagaacactgcaaatagaaatggaccacaaaaataggaaagtcatttaaaaaatgaagttggattatgcacacggacgtgtccttaaaaataaactctgttaagtaatgaaggctttgcatggggactgtgtacataaaatcacagtagactgttgaggtcatgttagagcgcttatataactctcgggtaagttttgatgaagggatttgtgccttgcagtgagaagatgagatcagttagtaaaggagaaaatgaattgatttattctgtagaagtagggaacttgttaaaaaaatggagaaactaagaaattattgaaaactatgatttcttcaagatgtctggaaatcctatagtttagatggcatacaaatagaaagtggttagactgagctagtcagaataaatgagtatctctaggactaagacttttgtatttgtgccccatcaacaaattgacattttaaattgacttttaaaagtgagactaaataatatgaagatagaaaatattttattttttaaagacattttaaaatttgatttcaaaactaaagtcactttccatgaaagataaatagtggtgttacagcaaaataataaattaaataagatttataggggaaaagagataatttatttatagagataaatttagcaatttatcttattaagacaaatgttcttatataaatattcttgaagccctccctactcctaagcttccatttgtgaattttttaaagactttattagtcagatattctgttccttgcaacttcctaagagatgtgttcacatttataccttttttttttaacttaaacgcttattttattagggtgaatttataaaagctaagttgttgtttaaaatggcatatgacatatacagtttaataaaaattcacaaattgtaaagcattaaacaaaataagagactgaaactggcaagaataagtactaaacaaacactattggataacataaaggattaataatttgtttgcctttttcttttctctggacctgccctgatctctcatcttctgtgtatctcacacttcctgttaagtcttggaaccttccctctatctggggtgggaagctgaataggtaggtattgatggtggtaattaagtggagcagaaaagtatttcagagggaacagggaaaacttaatctcattttgttcaaggcggaagcccaagatgttttagttggggtagatataaggctacctatttacacaaagagagctatatatgaaattaatttagattatacacaaacataaaaacaattcaatgagaacaaaggaaataagacagaaaaggttagttgtgatcaaatatttgagaatgttgaatgcaaggctaagaaattttggctgcattttaggggcagtgataaggcagtattaagagctcagcttttctctacaaacatgccatccatacttacaaaaggatagaaaattgctaatgggcacgtatacctttcagtactctcctcctctgaaatatttattatggactgcatgtttgtgccccacttcccaaattcgtatattaaaaatttaacctccaatgggatggtgttgaggtggagtctttgggaggtaattaggtttagataaggtctagagggtggcccccatgatgggattaatgtaccaatttgtaagaagagaaaaaggactagaactggctctcttggccatgagtggatgcaactagaagatggccattaggaaacgtggaagctatcctcaccagacaccagactacctggtgtcttgatcttggacttcacaggctccactgcaagaaataagtgtctgttgtgcaagccacccagtctgcgatatttttgttatagctgactgagctgcctaagacagtacccttccttcaccttatcactgaaccacaaataaactcccatttccaactgcctccacctgtaccgttctgttttctgatcccagtgtgtcttttcctttgtctcattccagataaccatgagagtcacgtgcagggtcttctgctccaagccctcctttcaatgccacacagaacaatgaagatttgagggacgactcgtggaagaactaaagccagagtctgtgatgcactcttcaaacaggactgaagagaatagataatatatctgtagccatttatgacctcaaggcacaatatctattttctgcaaacttatctgaatttgtacctttttgtttctgtttgtagtttaaattagtacatcatgtgggctgggatttgggggaacttgtggtgaaaaagggacacagattgtctccagagaccaggcctgctatagcaaatttctagttggaaaacaagaaagatcttggaggaaaggaatatacaggtaggtgaaaccttggaaaacacaggaaacctgtgaattttaaatatttctgcatctacaggtttctgctacctagcttcccagagtttcagacagattgaagaaaaaggaaagaaagaccattctgttctatcagcagcaatccactgggaatgcccacttgggctttatcttagctttactgtgaatcttttgaatgattttgggcaattaagtttaattttctgcattttagtgtcattatatcttgtaaggtatgaatgcatgatgtaccataaaagttcatgttttcaattaattgatttttatttttagagatagggacttgtgtctcctaggctgaagtgcagtggcacaatcaaagctcactgcagcctcaaactcctgggctcaagtaatcttctcaccttagtctttcaagtagctggaactacaggcatgcaccaccatgcccagataattttttaattttttgtagaggcagtgttgtccaggctgatctcttaactgttgcccaggctgatctcaaactcctgacctcaagtgatcctcccaacctggcttctcaaggagtttggattacaggcatgagccaccacacctggccccagaaatgcaagttaaaatacatactgtggccaaatcttaaaacaaaatttatctgacatatttttagagttcttgattttgtaaaaaaacaaaatgtggtggtaacagtgacctctaagcttgttcacctttttattctcaatgtatcacatagagtttggcatatagttggtgatcagtaaacttatattgattaggttgaattaatgactaaataactgcattagtccattctcacactgctataaagacatgcctgcaactgagtaatttataaagaaaagaagtttaggcagctcatgattctgcaggctgtacaggcttctgcttcttgggaggcctcaggaaacttataatcatggtagaagggaaagcaaacacatcttcatgtggatggcaggattaggggggtgcacccacttgaaacaagctggttttgggagaactctatcacaagaacagcaagggggaagcctgcccccacgattcaatcacctcccaccaggccccacctccaatactgggaattacaattcgacatgagacttgggtggggacacacagccaaaccacatcaataacctttcacattttctcaatataatagtttggccctatgtccaccttcttaacagctagtttcaagagaaagttaatcaatgccgacagggaccattcttgaaaagacgtggtacaagacagtatatttttatttagatactgtgttttggcatagaaagaaggtaaagttgatgaataggatatggaacatgaagagataaaggtgtttagttggcagcaatggtctgctgaatccatttcacgtagttgcaaactttagtgtagactccaggtttgttcttctgaggacaaccatagccccaggagacaatgccctggagttctccgttgcagaccacaggaacaccagagtcaccctgggcaaaaaggaagggatattcagagatcttatttatgcccagatgggagaatgggccgtaagatgttcttccattgtgctggagccattgtcccacactgctgatccagcatgaagcactttctcttcctcttgaaaccctccaaccctcaatctacttactatatcagtagttagtcttccttataccttatttgagccccttctctttccttggtaggccaagtgggccaagaggaggtttcatgctgcttaactagctctgctccttccgctagagttcctttccacagtttacctcctcagaagggcacttagaaatactatttgcacaccatcttctgtgcatcttttaactcttaaacctagacattaatacaataaaaataaaatatttaatttgtcccaaggctatccctcacctctcacaatcagttatagggactgttttacaatcttctgtgtttctgaaaaggggaattatggtggagaagactaagaataagctggaattgagaagcagtacaaagaaactaacctggcaagagtcctttcaaccctccaggaatcccagacatatcatgtttgtagtaatcttgcctgggtaggctgtgcggcaagcagtgttagagagaatgggagccttcagacactgcaggagatcagggtagttggccgtggagtggaagagtgaaaaatgcaagattactcatgaggtttccaaaattttctttctcaatacatctcccctcttccccaatactctcactttttctttcaattagccaacggcttctcatttgagagaacaatactttcttttctagaagctttcccaaatagttctaatcaatgaattgttccaattcattccaattgaatgctccaagcaagaccaaatccctgagtctttgttttgtttacctcctcagtttatagttctctgcccatcactaatcacacttcagttaaataccctgatatcttcatagtacttcattattatgtcttctgcatggttccagcaaaggaatcttcttcatttcaattattaatagtatatttctgagattccatgtatccaaaaactatgctctgggaacttaaccttaagtgagtttggactagctgactttccacatgtctttcagctctaaaattgtcacacttggtacttctgtttcaggcgacactaaagccactgctcagggtgttgtcccagccagagatgaggcactgagtaccagccgctgcacaggatcttggcagagagatggtggccacttgagagttgatggtggcgactgagctcagcttaatcagcatgatgtcattatcaatggtggctgagttatacttggggtggcaaataatcttggctgcatttatgaattgttcattgccttcatagaccttaatgttgtattctccaagatgcacatggattcggctggattaaaagatataagaggttcctaagtatctagcttgagttatttccactcctcctgaccccccatttatgagcataaacacagacaccatccttttcaagcaatcggtcatacagtaattgtgcacttaaggtagcattctgcaccaccacatggtacaggttagagttttccttagagaagtgtcactgcaagtgcagactcactgcccgccatcttgttagaatagtaaggaatgggaatgagaactcaaggacttgaataaaacagttggagataaaaaggaagttggtggagattgatcagcatttgccatttctctctggttgggatcaccagttatcacagggaatgaagcaggagtcagagaaatggcagaatgttaagggaacagaatgaatcatgcatatttttaatgtgcactgtaaattctctgtattttattacttccatatacagtttatactggctgagctacagtaattagcactatgtactgattcatgtcataagctatttctagggatagttcatcactcactatttcccttccatatcttgaataccatcatttgggaagacatcagggaaccctgaagggtacctctccatgcaaatccccctttatacatcagataatgcctgagaaaataagaagtctctggaggtctgaatgcctcaccctcaagcacaactctgcagtttactctggattgtgttttgtcagggatagaggattaattaatcttagtgcataagaaaatgagtatcaatgaattacgacttatagcagtgagccgtggacacctcccatttgttattgatgagggagccaccacagaagtgatagccagcattcagggaccctgataggggacagcattcgtctgacaggtgtagccccccaacgatcttgtcatcatcatcactagtggggaaagtggctgacagaggaaagttgggaactatcagttaaacagattcatcttaaagtttctacaataccatgaaaagttttctcagatttaccaaaagagcagaacgttctcttgtctcacataatcaggaaatggtggctttaaggtaatttgggggggaaatttattatcccatacctttaaattgtaccccacttataacattataactatctattttttaatttatgctttaactttgataaatgcattctttttttaatatatgtactattcagacacacacacacacgagcgcgcgcacacacacactcaaagatcagaaactcttgacacagtaaatgtcctgaatatcacttcctgaagacacaaggaaacttttttcacagaactctgctccgcgccatacaattaggtgtaatgcttttcagtagtcatgctgatgttggtttgtggtcgttggtaggatgttggtatgggagagagagccccatacagtaacagaaaggaagctttaaaaaggcacctgaggctggttgcggtggcttatgcctgtaatcccagcactttgggaggccgaggcaggcggatcacgaggtcaggagatcgagaccatcctggctaacacggtgaaaccccgtctctactaaaaatacaaaaaattagctgggcgtggtggcgggcgcctgtagtcccagctactcgggaggctgaggcggagcatggcatgaacctgggaggcggagcttgcagtgagccaagatggcaccactgactccggcctgggcgacagggcgagactctgtctcataaaaaaacaaaaaaaaaactaaggcacctgagaattttctcgtctggaaggaaattagagatttatatttttgctctcctaatttctcttcttgattccagtctagaatttttattaaaatcattttacagagtattataggatgaccctcttcagcctttcctcttatcccaattatctttccaacacttacgaatttattcagcttttaaagtctagcccactttatatcttgtagctccaaaagtttgtgattatattttatgagccccattgttcagatatttttgatagttttaggaaagaagttagcaggtgtgtagacagatgaattgaatttatacctgcctaacttgagaaaatttagtattaagttttagtcttataaaatttagtagtataaaaggaaaactcatcatttttctattatattcatgatgaaatgacatgttactttacaccagagagatatccatggcaaaaatatcgtaaaacacagcccatagcttttattcatgagaaagaaaattgcttttccctttggctttatatcactagccctttagtgtggagaagatgcaggctctgacacctgcagcctctttaagagcacacgattagtttcaattattaactccaaattcttggaaaggtcaggataagcgcctccttaatctgggctatcttttccttctctctccttcttccttaatattacccagaagttgagagcaagtcctgtgtctttatatcttctaccctgatcacttttgctcactgtgaacttcctccaacaagtgaaatttaattatccacaaacatatgtattttgcactgttgtttcaatattttaagcttcttgaatacagagaacagattcaacattcattgttgtcttccagagtataaagtacaaacttaagtttatgttcgacatccgctgattcactcattaaaagatactcaccagcagctcccaggagagcaggaagatgaaggtcttcgtggttgctcacttcacctggacttggaaataggatgacacttttcttccacagccatttataccaacggacttgtcttgacattctggccacaggggccagaaaagtgatttcactggaaactcacaaatctaaatctaaattctgtgacagatgcaagataactcaacataaattctaaacattaacatttgcctacttttctagagggtcatgggactgaaagtaataagcccacctggtagaaactgtaccccataataggtaagtaaggcggagtaaggtcacaggacagagttacaggtgtccagattcccagataaaaaatcttaagtagttgggcatctcaactgtatatgtttattctaagaacgactgcacttttgaagtttcataatgtagactcttttacaattatatactttgtcttttgactgctctggtcttatatatccatgttagcttttctctttttaaaatttcaactcttattacaaattaaagggtacatatgcaggttttttgcataagtaaattacgtgacacccaggcttggggtcccaacaacctcatcacccaggcagtaagcatagtacccaacaggtggtacttcaccttctcattgttaaaggaacagcttgtttcccttagaaaaagaagattgctattaattgaacttataatagagaaaaggaggaaagttaaaaaatgctaataacttataattttcttgagcttataattatcttgagcttactgtacttattctaagtacttattgaataagtcagtaagtatgtagaatactgacatacacgtatgtcagggatattttaagtatttgcccatattaatttagtaatcttcacaacaaccatataagatacctattataattcccactttacagatgtggaaactaaggcacacaaaactgtaggggatttgaccaaaatcacatagcaaatacacggtaacatcagcattccaacccagaaaaatcttccttcagagtctgtggtcctgaccactatgaaacacttctctcagtaagttcaccaaaatctggatgccaagataatgcaaaattcttggacaatgataacatagctgaaatttttaaagtatttactatgtgtccagcactgtggaagtggattacgtgcatcaactcattcagtcttcacaagcagcatcgtaagtgttaaactacaaatttcaccatttaagagatgtggagaaagaggctaaaagaagtcaagtgagtatatcaaagtttcatagctgttaagtggccaatctatggttaaaacttaagcagcctcacttcagggttcatgccctcaacagtgatgccgtgaatataataagagagaacagggctgggcgcagtggctcaagcctataatcccagcactttgggaggccgaggtgggcagatcacgaggtcaggagatcaagaccatcctggccaacatggtgaaaccccgtctctactaaaatacaaaaaaaaatagccaggcatggtggcgggcacctgtagtcccagctaatcagaaggctgaggcagcagaatcgcttgaacctggggagtggaggttgcagtgagccgagatcacaccaaccaactttatcgatattccaagacctctgggaaacagcaagagtatgataggagacatccagacattcatcaggaggattcttcatttttcaagtatggcaaatattgttgctgaagttattcataaacatgccttcagagggaagtatgggatttacagacctcatctggttaaggactactcttgactttcttgatttaatagagttttactgtgatgacacaaagcactgttaaacagagctgcgttactcgaagaatgaaatactttcaatacaaccaatggataaattcttctctcactgtgcacattacctctcttggcctttttataatctaatttcttatcattcataatcagtccctcaaatactgactctcacctgagctcttctcagatccaacttctactgaacatgtctgctcccatacctagggtcagctagtctagcgctgaattcatcatagctttctctttctatattttctgtcagtgcaatgaagctacacacatatggttagccaaacttgaaacacagaagtcacccttaacttttttttttttttgactgagtttcactcttatcacccaggctggagtgcaaatgatgcgatctcggcccactgcaacctcctcctcctgggttcaagcgattctcctgccttagcctcccaagtaactgggattacaggcgtgtgccaccatgccgggttatttttgtatttttagtagagatgggattttgccatgttggccaggctggtctcgaactcctgacctcaggtgatccacctgccttgggcttccaaagtgctgggattataggcctaagctaccacacctggcccacccttaacttctttatccaccttgcttactacctgtattcaaagtcttgacgattttacctgtcttaaagatccttgacttttctttgaagatccttgattttcctttcaagtcaaccacctatgacttggttcagtatcacattttctctcctgaattattgaaatcgtgctaaaaccacttccttgtttgtggctttattctccttcaactcactctccacatcagagtaatctttctaaaatgcacatggatcattacattttccgcttaaaatgctttggtggctccacattgacatcaggataagtttaaattccagcaccaaagttcatgttcttggacactgtatgctgttttaaacctctgtgccttcccacacaccttacctggttaactcccatcattcttcaactctaatcgtggagaactctgaactccacctgcattctccaactaaagtcaggccttcctgaactttctaggcagctttactttcattacatttacttccagtcacatattacttgtataaatatctgcttaatgtctattttttccaggttgtttaaaattcctgagggcataaatgatgtctgatttgctcactattacacttcaaagccggtatgtacgtggcacatagtaattgctcagtgaataactgctgaatgaatgaatgaggttactttccctctttgctggtgaacttctagtcatccattaaatttacctgaagtatcatctctatctataattaatctctgacattaacctatgacctcccctaactctactgccataatgccccaattggttagatgctaatccgttctatttcttatcggtgccattttgaaaccctgtgcatgttgctattataacttttgaattttgttgcaggctttgatttccttttctcttcaactagaatatgagcttctgaagaaaatattgtatgttaaaatttccagtttatgacactgtctctggcatagagtagatgcttaagttcttctgttcttctttgccccattgggcacttaagccttgtccaaaacatcttcaccaacagtcatccagcctctattctggacaggaaaccacaggaccttctggaaacttcttccttctgtcgagctggaaaatcgtcttgttagagctttgactctttttctctctgtcctatagcttggggacataggatcaggagagagatagtaagaagataagtagacaacaaagcgaaaagaagattgtaggttctaaaatagttaaagatgagtcagataagtgaaaactccagcccagcaaatatacatttttctctttaggtagcagttacaaattgtgaaaggaaatcaaaaaagtgtctccctgttactgggaaatagcatgccaggtagtagtagtcaaagctaatgctggcttctttgtagacaattcagcagaaatagtttcttagaaaaaaaatacttggaacaggattagatagattgccctaacatctggcttagagtactctccttcaaaaaaccttctccaattgcatcaatccccaactgataattggttttctatatagtctatgaatgctgatgagaatagtttgggcccgattatttgatggtcagtcaaatatcatatagtgattttaaaaagttatttcttctcaatattggctcagtcacaccatctagaatattcacacacactgaaaaccaagatgaataacctgtagtttttttttatttgtatggatttatttccccctttcacatggtacccattgcaatcagggtccttctatatatttgtaaacccggacaaatcaagtacaaacaagctcattagctgcaaccaccaccctgtacactaagaagatcttcctgaaaggtcctgaggtcttccctgatcatcgcccatgtcagatgcctcaagttatgcaataaacacacagcgacatgaaatacagaggactaacgtgcatttctttgtatctgtgtagaagggaggcctgttggaaggtgacagagaccatgcagcatgtggaaggtgtctccccaaaagtggggtggagtcaaaaggggatgaggaaagcagcctcctgcagattgtggaagccccagcagactgcaaagggcacccgtggggcaaggcatccctcgtgtggtgtgtcagaaattggactgaggtgaggagagtttcaacatgggtggtctccatggcacaggaagtcagaacttgaacggagagaggtggccatttacaaaggagagatgatggcagccacagcacacatttagttacctgtaaagggactaatcaaatatgtaaatctataaggataacagaaccatgtttctcagttattggataagagagttgcaaatatggaaagagaaaacactagaacacaagaacataagaataaaccttataatacgggattggaactagtgtgaactcatcgcttctcaatatgtatagacaggaattaaagatatctgtaaatatatgtgtactgtgaaaacatatgtgtatgtacagctctgtccactgtgatacctaagagtagttccccccaaaagcaccccaaaagatctagtatccatattctgttttctaaataccactgtccactagaaggaaccaggactttttggacatatagtagatacaaagacaggcaggaaaagcctagaaccccttgtgccataaagtaaggaaatgctgaaagaatgatggggaccctgacaggaaggagaatttaagaattaacaacccctctatttccgtatcatctttgcacaatgcttcatcaacattgaaagattattattcataaataaaacctttgaaataaaaattgtttttatcagttacattccagccttacatactgagactatgacccgatttctgtagatttgcagatacaaatataccaatgccaaccatagcagattagaaatacaatttttaagtgcttagacctaccttttacatatgatttttactgttttccattccatctatctattcattgaccaactaagcaaatatgtattaagcacccgcactctgtaaagtattttgacagtggccatgaaccatgtaagcttctggcacagcagcctagtgaagtctaccctgcttggcttacattgtttcggagctgggtagacagttggggaaaattatttcagcctctccccacaaccagatttcaagattgaggcaataagaaggtcagtagatgaaatgatttaggcacctaaaaccctttaaccctcctaaagcataccctgtaaaactttccaaattagatgttatctctaaacatgtcaaacatgtctttctttttttaagatggagtctcagtctgtcatccaggatggagtgcagtggcacaatcttggctcactgcaacctctgcctcccgagttcaagcgattctcctgcctctgcctcctgagtagctgggacttcaggtgcacgccaccacccctggctaatttttttgtatttttagtagagatgaggtttcaccatattggctaggctggtctgaaactcctgacctcgtgatccgcccacctcggcctcccagagtgctaggattacaggcgtgagccaccatgcccagcccacgtcaaacatgtcttatagctcctgtaatccctgaagcactttgagaatgtgaatattattcacaaaagctgtttgaacaaattaaaatggcccatgtgcccatgagagttggttttattcactgttatattcctggtcctcaaacagtgcctgacatatagttatgtgttccataaatacctattggataatattattttgatatcttaagtgtgtatatggaggttgttggaggcatttcaccagtaggtggtagttagagttgctaaacctttacttcggcgtttcaaatgccttcttgttttgtgcattccctgcggaatccctttgtattctattctctcaatgctgtatcaggaggactgagggcagatggctgacatgagggcaatgtgcctctttcacctccaggaggagctacgactttagtgaaattcctgagtcatgtggagggagaagagaggcaggagggaggaaaggactaacgaaggaatcaaatgctctggtatcagggtttgctccttgttgtagttgagagaccatgtgtggacaacttgaagacactaaagtccattccacctggacctgcatctctgcagtccctctgctcatgcccttagggcctcctgttattctagtctgtgttcaggtcctgcatcctaagtaggtgagatgctccctgggggtaggggtcgcagattatttctctcatgtcccctcgagcacccactgaaaggtgcttcctccctagttggcattaccttactgggtcttaaaatgatgcacagctggctccagggaagggctccactgagctaggtgaggtgtcctcctggaattcactgagatgagggaggggagctggagtgtgctcatcctgggtccaagacaggcatcgggaaggcatctgcccaaagggaaggggtctgtgtgttagggaggaggggagccataagtagaaagaggaaggggagacccattcattcgttgtgggaagggcaggcagctgctaagaaaaaagcaactgtctaaagaacccgccctgcacacctggccctgagaagctagtctaaacccacctcttgaggtgccagtgccaagcttggaaaggaaagaggaagtgtgagctgtagacactaatagtgacaccaacaggagcagagacttcccaagcagcccctgtctcagggccagggaagcacacccagacgacaaggacacagagcagggagacacagggtccccctgcctgtgccccgggtgaccctgccatgggctgaagtctccactgtggtgtggtccattgtctcaggtgagtcctgggcacaggtgggacatttctgtccttaaattttttgcttttttcatggaactgcttcagaagattctgtcctaggcttagtctgaatttggcttcttattttcataggctccatggatactggaattacccagacaccaaaatacctggtcacagcaatggggagtaaaaggacaatgaaacgtgagcatctgggacatgattctatgtattggtacagacagaaagctaagaaatccctggagttcatgttttactacaactgtaaggaattcattgaaaacaagactgtgccaaatcacttcacacctgaatgccctgacagctctcgcttataccttcatgtggtcgcactgcagcaagaagactcagctgcgtatctctgcaccagcagccaagacacagccctgcagagtcaccgcctccctgtgcacaaacctcctggatctaatcagaaaaccgtgggggcaacgcatccagctgagcctcagcactcggttcagcattctgtaagacctcagcagacatctcagatcataatactgtcatttattggatgtggcaatgctaaattgcccagactcctgcagcctgtggcctgagtttgtcttgaatgagactgtgcctgaacttgaatgtaggacagatgccgtcaagtttaagtttttccaagtatctttcagtcggtttgtgcctctgggaaatgttgtgtgaggtatttaacactctggcctcaccaatccaccttccaatatggactgttttttgactttcttttgactcaagttagacccggatctcagccctcatcccagctccaaatatgtatggtcagaccttttcttttcttttcctttctttttttttttttttcttttctttccctcccttcctccctccctccctcctttctttctctctctctctctctttctttctttctttctttctttctttctttctttctttgtttctttgtttctttctttccttctttcttttttgagacagagtctcactgtctggagtgcagtggcgcgatcttggctcacttccacctccatcttccagattcaagcgattctcctgcctcagcctcccgggtagctggaactacaggcgcccagcaccacgactggctaatttttgtatttttagtagagacagggtttcaccatgttggccaggatggtctcaatctcttaacttcttgatttgcccccctcgggctcccaaagtgctgggattacaggcgtgagccaccgcgcccggcaggtccttttctttttctttctttcttttttttttgaaaaactaaagaatacccaatcccctcctcaggtggctctatcactgcctcaccctgaggacagtatttccccatggggtttggatcactgttctctagttccctctccctggggcatgtgcagagtttcaacttcttgttggctgctctcttccactcaggatttaaaacattcacacttgattctttttccttctatctctgtaatcctaataccaagttttcttggcattcattatcagccgtggaatctgttgtacctgaattgttactcacagcaggtaataagagaacaagacctcctggaatttctgagccagactttgtactcagggttaccttgctgacccccatattttccagcattgctcttattaattaatggccctcagtcctgcacacaccatcagatcccaggggctgagcacagcctgcattgtcaggttctgcaacaacacaaaggctccctcctctctcctatagagggcgctccagggatggtgggtgttgccagagacaccagtaattctgccagaccttgcctgtggggccatgggagctcaaaatgcccctcctttcctccacaggaccagatgcctgagctaggaaaggcctcattcctgctgtgatcctgccatggatacctggctcgtatgctgggcaatttttagtctcttgaaagcaggtcgatgcttagactctaggaaattcttgctttgaacttacctaagacaattctaaaccattctcttaatcttcttcttttctcacaggactcacagaacctgaagtcacccagactcccagccatcaggtcacacagatgggacaggaagtgatcttgcgctgtgtccccatctctaatcacttatacttctattggtacagacaaatcttggggcagaaagtcgagtttctggtttccttttataataatgaaatctcagagaagtctgaaatattcgatgatcaattctcagttgaaaggcctgatggatcaaatttcactctgaagatccggtccacaaagctggaggactcagccatgtacttctgtgccagcagtgaagccacagccttgcaaagacaactccagcctgtgcaaaatccctcacagagctgcctccctcccagccgccagctcccacttcctgcctaagaaaaggaagtctctggttgggtttgttcttgcagctgtctccaaatagacagatatctgaaattaaattaccaaaggtatcttgggcagaaatgaccagacactgtaggatttgaagaatgtttacagatactacagagtgtgagtgtgatggtgggctctgaatatgagagaattgtacacaaccaagtaacttatatcttctcctcattcccatttggccatctttattagaattgttttgttttagttgcttaggaaaacatattttaacttctagggtggcgagatgattcctgagtgggagttcaggtatttccatgagaatatagagggtgctcacagaaatcttcagaagaaggggcttggtacaaagaactcaattatcaatgactcttgctcagcatgtggtcaagagcagaactatctgatgaccctgtgaacctggtgtgatgcatttgggctaatgatgctagctcacaaaataacaagttaagagagtagaaaacatggagtctaatatttcacaccatttcaaggtcaacagagttctagaccagcatgagaatcgccagaataaagcaaggcagtgcaggaacagaattcagcagcaaaagtcaagagacacctagaggcagaggcaggaatgaatttgtcactttcaacttaacctgaagcagccagattaacttcttgagtttcatttaagaaattattcctcttttaaacatacctattgaagtctaaattttaggtattttatatatttcagttctggaatttccatttaaatcttgctacaatttccagttgtttgctaaaattgcacattttgtcatttactttgttgactatattaacatctgtcattttaaagccactttttgataactttaacatctgaatctgtttgggtctatttcttttgtctgttttctctgttcagtttctgggcacgtgattttgttttctcatacaactagtaatttacttgaatgccggatattgtatataaaaactatagagataatttgaggctctgaatgatttcatcttcctcaaatgattcacttttgcttctgctgggattgtagcaggggcggatcaccttaattgagctgatgaatgagctggatcagacctgagcttcagcctgcatgatggctgctcgcctttgctcttagccatgtaagttccaactagatgtctgaagtttaacagctaaatcaaattgtaaattacataacataatatttgcccattgcaagcatgcaattcaatgaattttgataaatttgtggagttgtgcaacaatcaccatgatccagctctaaaacatttcatctttccccacccggaaagttccttcgtgctcattttcagtcaatccctgcttctacccccagcaccaaggactggggtctttgccaggctcctctcctattcagtagtcactgaacgtaaatgttctccagaccagaaaggtggtggatgctcctcaaagcctgctacactctcagtcttcccttttcttctcagctacttagccaacgatataaaactggcaaatgacttaaggcgaaagtggtctgttagatctctcctttctcgttgagatcccaatcccttaagttcttactgcctcagtagctccaagtgccttcaaacgtttatttttatattttgttaagtttttctagttgtttttggtgggagtgttgttctgcaaaaaatcagtctattaactctgaaagccagtttctatatttattaaaggtgaggtgcaatgttttatgtttttattttaggtagaagtatcttgaagaaaggaaggagtgaacctctctgccttcccttttttttttctttttgagacagattctcactctgtcacccaggctggagtgcagtggggcgatctcagctcactgtaacctctgcctccggggttcaagcgattctcctgcctcagcctccggagtagctgggattacaggcgtgcaccaccacacccagctaatttttgtatttttagtagagatggggtttcaccatgttggccaggatagtcttggcctcttgacctcatgattcgcccgcctcggcctcccaaagtgttgggattacaggcatgagcctccattcccggccagattatctctatttctaagagttctattagccttctgcctttggtccaccatgggacagagtcttgacacgtttgaccttttaccacaaggaggagctgtgactctactgagattaagggaactcagaggaagggcagagcattctcaggatgggagacagttaaaagaaatattgggtttatttacaacaggggaaaatgtggtctgcagaagctgtgttaatgctgaaatgtgagaggataaatatagactattcatttgccttgctgtgcaggtgcttttgatctagcaaagagcctagactgccagatttgttgcatgtgaacctgcatgggatgagaaagggagagaatttgagctgggaaagagcagagctcacaagcagatgccagtggaggaactcttcctgagaggaataagagaggctctggatgctgggcctcttctccagttcaatcctgccatgaaatgacttcctggaacctgggcagtgagcctgacaaatcagggcttccttgagggatcttgcaaagagagtaattaccaagggaaatctacctatcagaccaaagaatacctggagcaccattctcctgactctaaatgatgaaaaacctaagctagaaagggtttttttttttctttttcctcttctgaatgttcctctaagttcttggagtgagggcttcttcgaaggataggaaacctgtctcctgggtctgagctaatggttctatcaaaacagcctcaccagactcccttccagcttccagcttcaatatctatccctgtctaccaagacccatggaagctagacttgtccagatatcaaaagatgatgccaaacacctggagatgggaaagaaggtggcgtggacagacctccaggatgcacatctgaaacaggctcttcattttgttttgactacagcctcctgtttcgccttttcaaaaagcatttggaatttcccttacttcttggaaatccaaaaatacagcaaagatacattttctataggctctagttattcagtaggagggagcttcagaatatctctatactctactatgcatattctagcatgctgcccggaagtgaaagtctagccaaacagtttaacaggaaaaccgttagctgtcctgtggaggttaattttgcagtttattttggaatggaacaaaagaaggtattgaagataggaatctcatttctatatgctagaatctaaatttcttaactttctgtagtatgggccattttcaaatcagctaaagtcctaaaaccagactatgggaaacacacacttctaagctcaatattaaatatctaaagtgactaactaacgtagggttggagaggcagggtccccctggacttttcaaactcctaccctcacaaaaaatctagaacttcttctcagtaacaaaaataagatgacgtataatcatttttcattgttaataaataatctctatccatcatggcattgcattgaatttgtgttaattgttgctaaaaaatgactgtgggttaaacatttgtgattcatataataatagaaataataaatgtaaatgttttaagtgaacaagtgagattttaatagctcaacaggcaaatagcatgaactgatgctctgcaaaggtgagggacacctggcctgagacaggatgtcttatctgattttggtctgaatttcatttggaaaactggcagctgctggtcaacctgcagggatatgatcccatgagctgatatgcaatgttgacttttgtatttttgtcagcatgaaataatttttttttttttaaatcagggtcagagtctcgagtaactagcagccagctgatagaatggaagtgaaaccatggccctcgtccccttgcaaacctggaaacccagtgttgagcatgtgtgaagagagaaacagaatcaggtgaaatgaaatcttcctaagaccctgctcaggaaactaaatttgacgtaattggacacaagaagttgttcatccattctattccgccagaggagacaggacagatttcccgtgcgttcttgggaagctggaagagggagacagctctgccaggtggagtgatattctcatgagaagtgaaaaagaagaggcagagatggagagtttggttctagaagggtggaaggttttgcttataaacatatcaacacacttgcttttcccgccaagatgcaaactttggggaattgctcaaatataagatggggtttaaatattggacagccaaaaatatgacccatgttcaaaatatgcatcctggtatcattcagttcgacgtgttctagttcttctgcagctttctgtctcattccttttgcccctacaactctccacctttttgtggattaagttatctccatgataaaattattatgttgtcttccctctttgactttcttgtcggcagcctggctcttcccagggatcccagcgtctatcctctctcctttctgtagcttttttccgcttctccagtatggcgggccctgtcagaaaatacgtacataatcaatttatttgtccttcttatcctttggacaattcttttgtttgtttgtttgtttgtttttggttgagaccaagtctcgctctgtagtccaggctggagtgcagaggcaggatctcggctcactgcaagctccgcctcccggcttcaggcctgcctccgccttcctagtagctgggactacaggcgcccgctccacgcccagctaattttttttttttttgtatttttagtagagacgggtttccccgttttagccaggatggtctcgatctcctgacctcgtgatccgcccaccttggcctcccaaagtgttgggtttacaggcgtgagccactgcacccggtctagacaattcttgatggacaatcaaacacttttgcttttcatatctcctgtaaaacacaaaacaaaacaacaaccagaactaacattgcctcatatgaggcgagtttctttctatcagtttcattccagtgcctctcccagacgctgtccgtctgatttggtaaaaagtcttgcgtaaaatagtgaaatacatatttatttaaagtctactctttaagaatggttacatctttacatagttatgatcatcaccattgaatgtagcctcttgtcatttcactatcttccctccccacccgttccttctttgaaaaggttcccatgtcagctgtgtggtgcaatgtggtaggtactgaataagacccacaactacgggggtacctggttatgttcacagaattgtagagctagacagagtgttgaaaattatttatttctgcccattgtttcatagatcaggaaatgggatgctttaaaaaaagtatttaaatgtaaatagtaactattttgctggcctccatgtaatatgtatttcatattcttagtctacaagtaatgtgtgaatgtgtttttgctcctattggattataagcatcatgagagtgagaatattgtttactcatgctttgcactaagtagccattcagtgactataaacaaataaagcatgcttgaagttccaagaaggatggtggtcatttttcttttgtttagttcaagttctgtgtttagtaaatcacaaatgaaccatcaaggtctgtctttgcaggggattcaccagtagatgacaacactaccaaagtgtgtgtgtgtgtgtgtgtgtgtgtgtgtgtgtgtgtgtgatacctttctggcagtgctggtctctggttttcctcctggaggttcctgccctggggccattgactgaggcactgaggtctgagtgctggaccttgctgacaagagcaggaggagctgcagccctgccacacccccgaggttgggtggttgatggctggcagaggagaggagtaccatgggcaagaataaaggggactgtggtcctcaacattagataattcacaaaacgcgaaggcattttctgtcgtcacattgccatcaggtgggtagggcccaaggatgccgccaagcatcctccctacacaggacagctccccacaacaaacaatcacctgatccaacatggcagtagtgctgaaattgagaaaccccgcaataagcttcggttgtaaactttgtaccaagaaggagaattctctgcagacaactcaaggggcaataccgtcaactacttttgttttctctgactgccgtgttgttgaccttcatcgccattctttcccagcacatggtgtctgcatattttccagcagcctcctgtttcctcataaatctgccccttggacagataagaacatcacagggagcagggctgcagttcactcccaataataacgcctcagcagggtttgctctgcagtagcatcacagtcatgtggagtaggtggctatggctggtattcaggtgaaatctcaggccaatctctcctgaatcaaggggaccactgatcattaatgagaccttcaagtgagcaaagattcaagagagcaaattaatgtcctgcgctattgtgaagggacgcaaaggatccagagaggaaaccagctgactctgagagaagggcctgaaaaggagaggaagggaggaggtggtcagatccccgggaaggagcagggagggagggggctgctggcccaggaatgactgtcagagacacatcctggaggtcacaattccaccctctcaattattcccagaaattccaaaaactcctttaaaggagcaagtgcagggcatgaaagggaggagccatgctagaggagaccctgggaatgggggaatgattacaggctgtgacctcactggcgcagcacctctcagcggcagtggaaaccacagcctagtcctctcaccactgcagaccagaatcctgccctgggccttgcctggtctgcctcactctgccatgggctgcaggctcctctgctgtgtggtcttctgcctcctccaagcaggtgagtcccgggcccaggtgacatgatcctattggagtccctaagccttttcaccatgacaacaacagcaggccgtctcctaggatttgcctgaattctgcttctttcctttgcaggtcccttggacacagctgtttcccagactccaaaatacctggtcacacagatgggaaacgacaagtccattaaatgtgaacaaaatctgggccatgatactatgtattggtataaacaggactctaagaaatttctgaagataatgtttagctacaataataaggagctcattataaatgaaacagttccaaatcgcttctcacctaaatctccagacaaagctcacttaaatcttcacatcaattccctggagcttggtgactctgctgtgtatttctgtgccagcagccaagacacagccctgcaaagtcactgcatccctgtgcacaaacctcccggctcagccaggaagctgcagggcagcgtgtgcacctgcacccagggctccagtctccattccctgatggcctctgatggagtttcagtctgtagtacagccagctagtgcacccagtggagaagtcctccatcttatgcacacaaaagtctcacagaattgtttatcagctagagcagggcttcacaacaaagccactaaagtattagggctccacaaacaaaaaagagcctgtcctatgcactgatgatcttaactgatgggggaagctctttcttttctttctgtgtggcacatattggtacgtattttatataacattatgaaaaaaacacgattgctgaaaatggttgatgagcacaagcataaaggagggggaaggaaatatttccaagatcaagagacaattctgatgatcagtgagtactttattcaacagaaaaatatttggagaggcatgaaattccatggcaataggtaaactggaaagtgttgaggagatgccggtggaggtagccttgtgcgttgtgggctccttctcttcaagaagggtgaccagcaagtgtctctcccaattctgatgaatatcatcttgaactgtcctcaacagcaggcaatagccagatgactggggatattgggagacctgaaaggactttggacacaaatctctaggcagtggtgagccattggtcctactccaagtgaaacaacatgatgaaactgatattttggtagaggaacactggtagtagtatggatcagaaaggagatagatttttgggtggcatgaatgattaggagacttctaaatatcctacatgaaagattagaaagggttgatgtgaagcattgtggacaatataggcttgaggctctgcattatgttatttcttggaaatgtattgggttttattctgggagggttgaatgtaggacttgctagggtctatttcagccttgccctccctcttagggagccccagcatgtggtcatcattgctagtgcatggcctttccagggtcttagtgggaatcacagtcacccaccacgactctccactctcactgggtctgaatgccattgccttcctgccctgggtatcctctgaaatccctgcccgtgtctacagccttccagagtttgttctctgctgggccttcgggagtgccaccctctgcatacacaacttaggacctggcccagaaagaaaaataaaaaatgaaaaaagattttcttacacaggttctcagggctccttggtagtactctgtgtcctaaatcccagctgtcttggagtcagttatgtcctcttatcttcaatcacatatactacttctattttatataaatatgtttacttggcttttcttcatatttaccattccactcttcactcttcttgcaattcacatggtcctgagatcattttccttcttagatccatccctaattcagaccacttgaactcgctggtcaccaccccttgttgtgggaaatgcttatgttagctgttgtcctcaggacaattaaacctttcgctttcaccattattcaagttttcagtttaaattctattgctttttttaaattgtctttgcaatttggtttacttattgagagccaaacaatgcaataaaattttattcgttcaaatttgttctactttgtagaagggccaaagtgttttcttgctgaagtagataccaatggaaacaattttaatggtaataatactagtgtttaaaataaggctaattttaggtttttatctagtgaatagaatatctccaactgtagcaggatagagatcgatcctatatgtaacctgttgagggggagaatactcaaccccattaaattctaatctacatgctttacattttttgtttgtttgttttatgggccacattgaaaatctgatgaaatttttgcattagaagaatgctacaattttcctcctgactgagaacatccccaggttaaaacaaatctaaattataaatccttgacttaaatcatggataagtatcttccctcagccccatgtagatttacatataacatagatttacgaccctaatctcatgcctacaattataattatcatcatgaaaaggtaacactgatgtaatacaacaataaatagatggtaaaaatcactttgaaagtatgaatcatctcatttttgtgtttatttgtgttcatttgtatctccaaatgctctagaatgaaaagccaatattggcataaaagtaccttttaagaaaattgatgatattccaattcttaactggtcacaaagcataaatagcttatgcagtgaagtacagaagacccataggaagtcatccagctggttcctagttggaaagttctccacagaactgatgaactaatgtggtttctaacatcttagaaatggcagggctttagagatcatctcatttcagttctcctgatttaatatatgaggaaatatggcatcacatatatgaagtgattgaacaatgacatactgattacatttctcaaactttatgtaagatatatttttattctctagttgttttctgaatatgttgaattgccttacacaaatagaattctgggggtgaaaatgttggtgattttctgcttgctcctagctgttgctcaaggagtatttgttgaacaagtcagactggcccaagaactcaagagggctgggatactgtctgttctgcacattactagagatccaggcatagacaattttctgttcttttttcttttctttatttcatttcatttcatttcttttccttttttttttttcttttgaggtgtgtggtgggagcagggtcttgctctgtctggagtgcattgacacaatcatggctcactacagccttgacttccatggctcaagcaatcctcccacttcagcctcttgaatagctgggactacacacaggcaccactacattccgctaatttttgtagagataaggtgttgccatggtgcccagacacagacatagacaatttctgttgagtaaaaatttagaatgtcttatgtgtgtggatacctggcgttctggctgctgactctctgtgttgttgccaacacctccttcgtcttcattctcccctggcctttcaaacccttctctgctgctcagggttgtgagatgtggaacccatctggatgctgacactgggtcggtgagtggccaaatactgttttggccacaggcaggagctgtgctctggtgaaacctctaaggcagggacctggggaagggatagagaataagaggagagatgggccaggagggatcttgcccatggggagccaaccgtgcctcaactgagagcatggctgtactcagcccaagcacactaacatcagcttcaagctgatttccctttcctttgctccacacaccttgtgttgttctttttcagcatcctgtgtatgttagctctaagcccagccaagccccatgccctccacttcagggacagagggtggctcatcccttttgtgctccctcagctccctccccagtgcctggtggctggttggcaacacagtcatgcccttgaatgatgggagctggtgcacactgcatccgtgttcatgcagtcaccctccctccacagagccgggcagaaagggctccaccacacttagacattgagggaagggacgttttgaatggcactgttttatgtgatcccgcaggacagaaggagatttcttgaatgggagtggtctgttgttgagagggatcctgaaagacagggagacaaagatagagggaggatccacataattaggaagcagctgagagcaaaggagcccctgccagaggaatatccttggggggtaaaaagccagctctgccctttctccccagccgattcatcctagcccagcaaattcaaatctaccttctatcagaacttagaaaggatgtaaagcagtcaggaagaaacatcccctgggtctggggaaactatcaggagcagtgacatcacaagaaaaaccaccaaccagggccaaggagaccagagcccagcacctcgcccaaaggaccccagtcagaggccccatctcagacccgaggctagcatgggctgcaggctgctctgctgtgcggttctctgtctcctgggagcaggtgagttaggttgaaattgtctgtccttggactccaacccttttccttgtggctgcaggaacaaccctcttcctgggctctgcctgaattttgtccctttcctcctacagttcccatagacactgaagttacccagacaccaaaacacctggtcatgggaatgacaaataagaagtctttgaaatgtgaacaacatatggggcacagggctatgtattggtacaagcagaaagctaagaagccaccggagctcatgtttgtctacagctatgagaaactctctataaatgaaagtgtgccaagtcgcttctcacctgaatgccccaacagctctctcttaaaccttcacctacacgccctgcagccagaagactcagccctgtatctctgcgccagcagccaagacacagccttgcagagtcaccgctttcctgtgcagaaaccttcggggcctgccaggaagccgtgggggccacggagggctcgggtgaacatttcctccaagagccccgaagaagcttcagaacatcatagcacctgctaattcatccatgtggcaactttacatcctatgacatatttagagtgtgggtttccttttgcctgagtgtgactctgccccgtcaactgatttgaaaaaagagaaacatattcagatctagtttaaaaaaaaaaaattttttaatcatgaaataggccgggcatggcggctcatgcttgtaatcccagcactttgggaggccaagacgagcggatcatgaggtcaggagtttgagaccagcctggccaacatggtgaaaccccgtctctactaaaaatacaaaaatcagctgggtgtggtggcatatgcctgtaatcccagctactcaggaggcaggagaatcacttgaactcgggaggtggaggttgcggtgagccgagaccgtgacattgcactccagcctgggcgacagagtgagattctgtctcaaaaaaaaaaaaaattcctgaaataaagcaagcatgctgtaaggattgtgtagcttaaaattttataagaaccctctaaacaatcacctgtgtcaccacagaggcacaccctgcactgggtcagacactgtcctgtgaggagctgtgttctcctgacacttcatgtccagtggtttccatgactcttctttggggccaagggttccctttcatcataggttgttgtcatgcagagtcaagcaacactgagcactgggaaatcagagaaggaacttccaggcaagggtcccagtgcagaagccagctagagaggacagtagtagactcaccctttgggaaatatgtttgagaaatatgtatctattttcaccagttctattactctatattacagcttgtctattctctaatttctcatttgtacactgaaagctagactgtgaattctagccctgatcaaagctccacatatacacagacaccttctctgaaccctgcaggcagcaaacttgcctctgtctgctccccttgctgcagagtccatggatcatggtctagaagtttcctgactcatccactctccttctcttggctggaagcctccttgttggtttcagatctcagcgcctccctggattgcctctccagactgacacttgaaggattatttttccccctttggtctctttattcccaatgtgttcaatcatcaggctcagagcctgatgcctccagagcgcagctctacattagcttttagagaggagagtgggtcctggctgttctgtttatctgttttcattcactaattcattcattcatttattatagagacaaaagattccctatcccaagatatatggtcatctgtgctgtatcaaaagagaagatattcttctcacagttttatgaaatgaggtagcttcgcaacttgcggggagcagcctcttaagttagttgtcaaaattaggcttttgcctaagtaaagttaggatcctaaattaggctcctactctcccacaaaaactgggagacagggcctctatcttccttgacgattgtatctcaaaaagatggttcctagagtcttgggaaagacattcctgggtcataaagctggctagaggtttacagagattttaataggattgtcaaaaagccttttctgtgtttattgagatgatcatctgggtttgtttttagttctgtctatgtggtgaatcacatttgttgatttgtgtatgttgaaccaaccttgcatcccaggaatgaagcctacttgattgcagtagataaactttctgatgtgctgctggatacagcttgccagtattttgttaaaaatttttgcatcgaattaaataatttttaaataaggtgacttacattaattgctttttaaatataaaaccaattatgcattcctggggcaaatctcatctactgattagatattaacctttttatacattgtgagttaaatttactttatttttgttaaggatttttgcttctatgttaatattagtactatttattcttcacaatttgtaaattgataaacttgctcaatttcatcaataaagtaagctgggcctggagttttctttctggaaatgcttttaattattatgagttcaatttttaaaaccacttctacatgtattttttaatatccctatggacattcaagttatccactttttgagtgggtaattgtgttttttggggaatttgtttattttgtctgcttttgaatttattggcataatattaatctttcattggagttctaatttgcatttctctaaggattaatgatgttgaggacattttaatgtttttattaccatttgcagatatgtctttttcatatacctattaatgcttttgcccagttttaaaggttaaattatatatcttttatattgatttataggaatcctttataaaatataaaggatttttatattatatagaatcctttatataatctggatacaatattctagtctgatatatgtattgtgaaactttttcctcagtctgaaaattttcctttccactttcttggtagtacctgggcacaacccctatgaaatgagagtacccttctgtctcctttaattttgtctctctaccttcacccttatcagtatttggcaggcaattaattcagtcagattgagagagtgcaaaggcttctagctagccctcacaacactggcttgggtacacctctaatctccaatcacacgaaacaatttgccagcccagaagctacccctgctatgtattctaccatgagtagaccttaaatgtgcacctcccactctctccatagtacatatggtagaatggtgatggatccttcttttggcagactttccacaatgcatggagctatgcctatccaagcacatctctgcatggacaaaggaaggggtggataattgagtcagtgtttctgcttcttgcttgtgagttttccccagtaaatcttgttttatgtgtatattgcacagggctagtgctgtctacatgtcccttcatatgatggtgctctcacagaattctgaggctggaaggaacaaacaaaagttctcataaagagaaatttaatcacctctagaaagaagtccgtgcttaatggctttggagtttctgtgaagaaagggtttcctcctgccttagaaggtgggcaaagtgagcaacatcttcaccaagtcaggaacacttgatttcagccagaggcagaagtggggttctatgataatgcccgattgtggttacagagggactacatgagcaaggccatggaggtgaaaatggattcatttgggctgaaatcctgtaaatgaagtaagcgggaaaacccagcgcacattccaatggaagatgcagcttcctaatattgtgctttcaacttagattctgtcatctgtaattactccacacactttctcaaatcattagcacaactgtgggccaggtaatcatttagcccctttgcttggtacaaggtagccatgctctctacttagctccctatttttctctgggaagcttttgctgagacctgcagtgaccatgcttctcagacttctctctttcttattgtcatttccatttatattttaactttaattgtagtttatttgattaacatctgacatgtttatgtttctcttttgcttatttgacctcacttaatgataacccaggtaactggtcagctgctgctaatcaagttatattttctggggttacattggttattttttcctctaaagtttctatctgtgtaagaattgaggtagcagaaccttctctctcttttttttttttgagacagagtcttgctctgttgcccaggctggagtgcagtggtgcgatctcgactcactgcaagcttcgcctcccgggttcacaccattctcctgcctcagcctcctgagtagctgggaaccttctcttttttggaaacagggtctcactctgtcacccaagctggagtacagtgatgcaatcatggctcactgcagcctcaacctctgagattcaagcaatcctcccacctcagcctcccaagtagctgtgactacaggcacacaccaccaccactggctaacttttttgtttacatttttggtagagatgaggtcttgctatgttgccaggtttctctcaaactcttgagctctggtgatcctcccgcctttacctcccaaagttctgagaatacaggtatgagccaccgcgcttagctcctcctattgatttctgaaatttaaatggagatcagactgtctccacgcaaggaggaagtcagacagggcagagcttaaccaatgtccacggtttgttttctcactgcagtcttggacttaccactcatctcttcattctctggctcaaaatagcttcagtcttcccagaagattctcatgattttcagtttgtttctggtttcttagttatttcttgtctcatcaggctcccctgaggaaggagccaggagatgctacaagtctgcaattttagggggagtcagatggagtgcactggtcttttgcacttctttataatattatctaagcctcctcttctttgaaatataatggctattcatcatgggatatgaggcatctcagaagcaatctaaatatctgtttgtttctttttctagtaaagaattgaccagtattctagcaattttattttaggtattcctttaaaagtaaaaaatacatagtttttcttaacgtgacttctattgatagtttatatttttatgattttgtgtagtagctttaccttccctaggatcagaaaccacatcagataatcagcttctattatgaaagaagctgattcttctatttggagagtgaggtatgcagaaaatccataaaaggtattaagttatagaacaccaccatctgatccaccatctgatcttgagagaattttaactggtttatatccatgaatactccctcagtagggtatttttgttctctggatggcatcttggaagaggtactggtcattgatcatatctcactggcacattggctagtgaccgctaatgtcacatgcagctggattggaatctcttctcattgctttctcatggggtcatttgcctttggacttaaaaatcaagaaatttcataatgacaatatctagatttactgtatatatgtaactattcttaaaatttgataacagatatgtcaaatgtagatatttaaagaaatttggattggaaatacactaaatcagaagtagcaagtgaaggatagcggttctgtaatggaatctttctcagattctgttttccctagtctcatgtttcttttttaaacccagtctggcctctccttcttagcttactaagtatagaaccacaaatagaaacttagaaatttaatcattttctgcacatatctttactcatatatgggaaaatgggcaagaggatattgtcagtgaactcaggcaaaaagaggatttctaaaagagagagtatagatgggaaagaaacaaattccccagcagcatgggaacagtgggtactgttttgtttatttttggataagctgattagttggcatgtagcacagagtggtctgaaaggtcttcttggagcaagctggctggagtcatcacagaaaaaagaactttaataataaatcatccacaaatccctgagagtctgcctgccgcaagggagacgggatgacttgatgtgattctggcacagttcttcctgcagcacacctacctgagctaggccaggtttgcatcatctccttcatcagcattttctcaaaggcaacatttcttttctatcacttttttcccttttacagtgcaaaaagtgatcttgaagaacataaattttaaaatgtgggggtttcttttagttcccctagagaaacagtataatagtcaagatggtgaaattgttcctaatttaaatatgtcccatgtctcttgcaccatgttagaaaggctgtatccatcagctcagacagccacagcaaatagcacagactgcatgggttaaatacaaatctttttttttcacaactccagagcatgaaatggggatgccagcatgtggggctctggtgagggccctcctcttggcttgcagagcaccctcttccagttgaatcctcacatggtggagagagaacaagctagccatcaagtgtctcatctcagagggcattaatcatactggatcagggctccacttttataaactcatgtaaacataattttctctataaagaccctattgtcaaatattgtctccctgggggttgtattttggagggacatcaatattcagtccactaacaatggcaaaatcttggttactgcacagtgggccacatgggggtgctgtggaaccactgagctccaaatgtctctggggcatgcacagagccaggagcctgggacagggagggttaaggagcagccttgcttgatgtttgtgctcactaaaaaatgtgatgacggatacataaaactgcaggtgtgcctctcatcagggagccatgcacttcagctatgcctgggttaggaagcctctgtgagccgaagagggagaatgaagatgggatgtcccatgctgggatgggacaacctgcatgtccagggcagggacagatagaggaacaactgcctggaaggaaaagcaaaggaactgtgggggggacatgcagcctaacctcagtccagccccacatggtatgtgagagtattaacagcacaaagcagaggtcctggatcgggtaagccaggggcctaacaaggaaggcaggatgcatgggaacccgcagagatgacatcagagtagtgatatcacagcctaacatccgatcagagatgcaatgcccaaaaccccagctctcagaggaccagtatccctcacagggtgacacctgaccagctctgtcccacctggccatgggctccaggtacctctgatgggaagacctttgtctcttgggaacaagtgaatccttggcacaggtgggatgtctctgaagcacgcctcatccaaggcaccctcaggctccctcctgtgttcttgccctagcctctgtctccctccctcacaggcccagtggattctgctgtgcagaacagagagcagtggacctcaggaggcctgcaaggggaggacataggacagtgacatcacagtatgcccctcccaccaggaaaagcaaggctgagaatttagctctttcccaggaggaccaagccctgagcacagacacagtgctgcctgcccctttgtgccatgggctccaggctgctctgttgggtgctgctttgtctcctgggagcaggtgagtccctgcagacaggatagcgccccattctgagcctgtcctcacccctgtgtcttccactttaccatggggaggcaccaccaggctgtctccggtgctcattctccatctgcttttcccacaggcccagtaaaggctggagtcactcaaactccaagatatctgatcaaaacgagaggacagcaagtgacactgagctgctcccctatctctgggcataggagtgtatcctggtaccaacagaccccaggacagggccttcagttcctctttgaatacttcagtgagacacagagaaacaaaggaaacttccctggtcgattctcagggcgccagttctctaactctcgctctgagatgaatgtgagcaccttggagctgggggactcggccctttatctttgcgccagcagcttggcacagccctacaaagccaaccacattctgtgcacaaacctccctggcccaatgtggagcaacctcagccctgacatatctgtgagaacctggggactgcagggagaaagaaaggcaatttagaatgctaggatccacagcctggggctttctgcaactcagggctggggaaaacaaggccaagagagcctgctcagaggatggtgctgcttccgtaggttgactgcagcattaccttctttgccgacactgtgaactacaggagtagaggaaatgtgtgtaatttaacagctggcgcactctttctcaggacaagagatttaattttgtggtcaagattgttgataacagtgtagtgtagaagggagaatcacagggtttgctttatacaacttggggagaagaaattgaggttttgggaaagtcaaggagagagaaaacgaaagatgattgaaaacagagatagagcagaaggtgatgaaaagtggtgttctgtgcaccatgaactctctttcccccacccgaaagttttcaacacctagaaaaaaataaggaaaggtcttatagccaccggaatcacctggtagccggtcccagtcggaggcatcaccaaattgccgcttggccattgtgagagccctggagttgcttctgctgtcttccttcttccagccctgatcttgactcctcaggccacagtcaggtacttcccaaaacacagaggaaggtaaagtcacccttcttcctaaaggggcaaatactttccagtttccccccaaataaattctgcaaccctgggattcctttctgacactcacctcccaaatccaattaccttctatgaccaaatgctctttgaacattttctaaaactcagcagtctctacatcctctgcgtttgtccttacagtttccatggcctgggaggacctttgttctcctaagacggggccacatactgatcatctgtcaaggacaggctcacacctgccttcctcttcacttcttactgtgacattccctgggactgtactgtatcactctctttcctttattttaaagccaagcatacaattgatactctttgatgtttgcaaaactaataagttattgccctctcatacagaatcctggagtgtgattaattactgtcttctctttacaagggactctacatgaaatatcatggagaatgattatgaatagtcttagtatttcatgtaacttctgtaatattcctagcaattgtgtcttcacagtcaggattgatgaccagtgctgtcaagttcccaaagggtatctaatgctggaatttgcaaatgttcttttggagtgaagaaaattatgttatttaggctgactgaagaatcactaaagaaagaaaattatggtacagtaatatttataaagactcataatcctgtaaaaaacttcctcaccataaccacactttccacagccacatttttagagatttggtgagggtggaatatagtcaaaggtgcttcttaatcatccttgatgaaatcaaccaaaatcaacctacaacattgaaaaaaaaaactagctttgctcagtaatggaatcttatcatccttgacaatgaaaagatattatgtgtttgtgagtgtgaatgtgtgtgtgtgttttcttgtggatactcactcacatagaagtttctcccctggtggcattttatgaggtgctggatcactggcagagctcctaggcacttctaggtaaggatagaaaatagcagacctaacggaatctgcctaagttatagctgataagatagtttatttcaagattttatacattcagaaataaatttgtaaaatcaaaaaatcctttttataaaatgtgcttgctaaaatttgtgaataattaaactaaatgcaatgtgtgaaaagatatgagtctgactaatcaaagggagctctgcaatgtagtattttcagcccagattggcttgatattgtcacactttcatcctgtggcctgtataattctggctcctttcttccatcttatgatgctcattgcaataatgtaacagcaatttcttgtgcaatcaagatgtgtccttttgtctccactggtcaagggtgagtttgaagttccaccctaaatcaacccttccgggaaagcaatagacagggtgtgtgaaagaatgggggctgcaggggttggagtgggggcaaccgtgttcctgacttggactatcctgagctcatcaggtcagaaggtgtgaatccatgggactgtggaatgttggccacttgggggcgctgtggccccactatgctgcagggaaccctggggaggggtgggagggtggccaggaagggagggcggaagggaatgcctggctgcctgctgacatcaggagattaggtggaaattagagtaggtcctggcctgggactgcccagggaaaggtagggccagggttggcaccaagcagggagtgtttctgcctctgcatgggcagaggagggtgtaggggctggggtggcaagggctgggaatcagtgtcaggacagggatagggtgggcagaggaaagtgaggtgtgatgtgggcatgcggggactgtgaccagccacctcccctttagttgaggggctgtgcgggacaggaaggctgcatggagctgctgagcctgagtctttcaatgggtgaacaaggcaggagtggcctgcagaaagagtacctggaaaaggactgtacccgaagaattgggtgacactttcttagctccactcagggagtgaccctgaggagggtgctgccagccagaggggctcaggtcctggtgagctgacaggcttttcctccagacacttcctgttgtttctgtatgtgatctggttttatgctcactgaaatcatgtaaggtaggtatgatttcacctgtttatacatctgaaggaaagcagctgttccgggtctcatattaagtaattggctgaggtgttttcctccaacatctctgcaccagccccgtcccccgactctatatctgtcccttcatctggcttcccctttccaggtccaattagcaggagcacaaggtcatgcctcatatgtgaccattgtaacctcttccctgacaagtccaaggaacacgtgacttccaggccaagcatatccattcacctttcactgaagcaaaacagaaggatgaaattatctgcactgtacacttcctgtaactgatataatctaccttgaggaaaagtaacaagaaaaattgttattcattagttattattttatttaatatatgtttggagatcctttctttgtatagatattttatgacataaaaagcaaaataaaaaagaacaaatgaaaataaaaaagaaaagcttgaaagaataataagtgtttcttactttttagagtattaaggtttgcattaatttttttaacttattcaaagacgtttgctcagtttctgaattatacagatttcctttttttcttctctttttctctttagccacctacagctttttctgccagcttttttagtttaataacctaaggctatcttttaaacagatttttaaatgtacaatatagtatcgtaatctacagacacaaggttggacagcagatctctaaagcttcctgattcttctttactgaaattttgtagccactggcggcagctgcccatttccccctcttcctagcccttggaaatcaccattttcatcttcacttacatcagtttgacttttaggttgcctcatataagcacaatcatgtagtatttgtctttctgtgcctgactttttcaactcagcataatgtcctccaggtttagccacattgtcatgtatggccagaatttcttctttttaatacttaatgatattccattgtatgcatacaccacatttaaggtctgaatattaaatgtatagtatcttattgtttctgcgaaaccatctgtcacaggagtggcagggtcatttgcagaacagtaagcactgagtatatgaatgcacattcattcgaagttcaattctgcttcatagagaagacttcaaaaaaataataatttcactatttattgttattttactatacacaaatagaatttcttttttcttttttttttttttttgatacagagtctcgctttgtcgcctgggctggaatgcagtggtgtgatcttggcccactgcaacctctgcctcccgggttcaagtgattctcctgcctcagcctcccgagtagctgggattacaggtgtgcaccaccatgcctggctgattttttgtatttttagtagagatgagatttcacagtgttagcctggattgtcttgatctcctgacctcgtgatctgcccacctcggcctcccaaagtgctggtattacaggtgtgagccaccgcacccagccaataccccaataccataaaatatttagcatatagtagaaatctagctatttttatttcctttgctagtctcgggcagcctcttccactgcgccaatgcccaaaggcagttaaagacacattttgcctggaaatcttagggtgaggactcaggaagccacagaaatggaaatacatatgcgtgatgattactttgaaagtatgaactagagaatgtagcatatatccctcctcaggcatttaaaactcagtattattgatatataagttatataagcattacacattttaaataaacagatcggttatacgtaaccaaataattaacagaatgaggagctcctgaaaagttttatggttttaaaaggggttgaagccaggtgagctaccagatccacattagggacaattctatctggagatggatattgtgatgaaacaacctcagaaggtcttctaacctggtacagactgattttacgaagtttatttattcattttctttcatttcttttcttatctgctcattcactccaattattttgtaatgatattttggcgaaaattaatcatctttaagggaaatattttgagtttcatcagacacacatgcagctgagctttgtgttcacacactgagtgccctggggccaaacaaaatacggtaatagtgaccttgttgagagatgacgtcacattgggagaaaggttctctttgtgttgacactaagtgtccaattcataaaacctaagccttgagctaggaaatgcccttttctgccctgggaagcaggctcctacattgtgtgtttttctgtctcctggtctagcctggacacagacagtgtacccactcacgaacttgttatatcctggctgtgaatttcagcaccaggtggccctttgctctgacttcaatttctgtgtccttctctcctaaacaccatggatgctgagtgactcagactccagtcatgtgcttttgccaaaaggaaactagcacaagaggaggtgagcagaatatgaaacaaaaccatgtactcaggaccggcaatgtgacttactggcagctctttgctcaaatattgtaaggaagttgaagatcatgacaatgttacagtaacagggatctctttaagtgtggggctctgtgcactaaaatacgggtttttttttttcttttctttttttttttttttttttttgagacggagtcttgctctgttgcccaggctggagtgcagtggtgcaatcttggctcactgcaaccttgcctcctgggttcacgtgattctcctgcctcagcctcctgaagtagctgggattacaggtgcgcaccaccatgaccagctattttttttttttttttttttatttttagtagagacggggtttcaccatgtttgtcagactggtcttgaactcctgacctcatgatccgcccacctcagccttccaatgtgttgggattacaggcgtgatccactgcgcctggcctttttttttttttttttaattgttactgaattagtggtgagaatcctgaccaagggaatattccctatgaaatatgacacttcaaataaaatgagagcgctttttcttatcctggagcctgcctcttctctcctctccccacatccctcacatgtcaagacacctttgtgcccacagatcatgggcagcgttgggctgccactatcatccacacagagagggcagtcagcagcgtgaggtggttctgcctgctgcggtctcaccccaggcacagaaagcaagagccctgggtggagctgaaggtgctcagctgggcttgtcaggagtcccatctgtcggtgaattgaaaagaaacagagcaaaatgactcctccaatggtgatgagcctgcccctgggatttggaaacttggtaacagagaaaaccaatatagacaaaggattttaaacaggattatggtcaattaagcaaattagaaaaggatacttgaagggggatttgggacacaggagtcaaaaacaccgggaagacatgagaagtttccctaagagtctaaattagagaaatatttagataactgacaccagtgtatgaatgaggaattatatcatcacagggataagagttccattgagttacaaactgcttccaaaaaggttaagaaaaactcgtaaggctgtgtcaattcagacaaaggcattcttcccattcaaacggttcaccggtgcatgaatcttgaatttgaccatctggggaaggggcgtggcctctcctgacaggaaggctctggggcccaggcagggagaatgaagtctcagaatgacccccttgagagtcctgttcccctatcaccgatgcacagacccagaagacccctccatcctgtagcacctgccatgagcatcgggctcctgtgctgtgtggccttttctctcctgtgggcaagtaagtcctgggcagggccccatgtgtggatttcaaggcccagcctgtttccattgtggctgcagcatcagctttgttcttctctgcaggtccagtgaatgctggtgtcactcagaccccaaaattccaggtcctgaagacaggacagagcatgacactgcagtgtgcccaggatatgaaccataactccatgtactggtatcgacaagacccaggcatgggactgaggctgatttattactcagcttctgagggtaccactgacaaaggagaagtccccaatggctacaatgtctccagattaaacaaacgggagttctcgctcaggctggagtcggctgctccctcccagacatctgtgtacttctgtgccagcagtgaagccacagcgctgcatggccgtctcctctctgcacataaaggcagggaggctctgcctcctccctcaccccagactcagtgatgccctgggcagagttctctgcaccaggaaacttgaaaccccatcatcatgggtctgaggcccccaggatgaaacaggatttgtatttcagatccatctagactctcgtctctccctggggaccatgttgcttcttctctctagggttccccccagcccccaccctcatgttgtctctccctggggaccatgttgcttcttctctctagggtttcccccagcccccaccctcatgttgtctctcctgtggcccacctttcccatctgggcagtcaccctccaaggccttgctgggtctctcctcccctcacttccccacacctctccacagcagccatgaggggagcccctcttctgtgcctccttccttcccatcacagagacttcaaagtccattttctctgccctgggctggaggcttcctttctgcagtggccaactcctacctgtgcttcacatctcagcatgatcagccctcctgtgggaagcatgcccttgcctcccagctgagatcaatttttctgttataagcactgatggtaaaatgtgcttgttagtcaacagagttgagcacagttggagttttccagttacttgtctggatatttttctgctcatgtcgattttaaactccataaaggggaaggctgtgcttgttacatttaccaacagctgttcctggaatgaagggagacctgtttcacagataatggatgagttaatgaatgacaggctgattgagtgatgagcgggtggatgaaccaataacaggaacactccaggtccgctgtaccctggcagaaatctagagttaactgtgcctgagatgctctgctatgagctcttcaaagggcactcgcttgttgaacaagcgttggaccattcattgtgcaagccagtttgtcagttcatctaggagtttccaattttaaatatcatatgttcttcaaactcaatgagggtaaagtctacattatacaattctaagttattttttaaagttttgggttaggaaccaaaaaggaaagaagagggaatatctttagactttggagtttttttattgaaaatgtatttatataaatttttcttggaagaacaggtagggaaagtcatgactacacagccttataggtgctaatttctggagaaggtgtcatgaaaaataacaaaaatgagaactgtgttctggagggaacattgtgactgtcctgagagcgtgttctgatcccaggaaccaaacccaggagtgtgtttggcaactcagagtgcagcagacaattctttgccccgtgcatttgggataagactggagacagctggaaaagctatggactggacgttctgcactctcaatgcaggactctctgaaatcccacagattaatgtcaggtaaatatattcccactattaagacaactaaagcaagaaccaatgaagaaaagtgagtagaaacagtaagcaattgaaatgtatgaagacaaggaattttgccataaaaagatataaaagttaaagagctatatttaaaggaatacaaaagcgaattgatatgtgaacatgaaaaagaagactgtcagaaataatcaaggaaacattaaaaaataatcaaagagaatacactaacgattaagattatcattgaaaacaaaatggaaatgaagaaaagatgacatgcttcaaaagagattgttacaggaggtcaaagacagatctgaagaagttacctagaatgcagcacagaaaattaaacaggaaacaagaaaaggtaagggataaggaataaaacacttgtgggttctagtgtattagtgtatatataatattttgttggaacttcccatttttcttacacatgattgaagtgtcacaaagagaaagtagagagaatgataggtgataattatgagacattagctgagaattttcaagacgtgtttcaggacctaaatcctctgtttcaacaagttaaatgaatatgaagtagatgaatacatatgttatggtgaaattgcggaacacaaatgacaaagagaagattttaaaagtagcccaaaagataactatctcccagcagaatagactgaaaggaacagtgaaagtcaagaaaggagattaaaaataagcatcaagtcagaattataattctcattcattaaatattgagattgaggtaaatatatttatagatagagaaagaaaaaacacggtgagtttgtcaccaaggtatcctttctgaattatagttaacaaagatgggaagtggtcccagaagaggggcatgaggtgccgctcgtgagggaacccatgtgatgggacagccccattgggcacgtgtgactggggggatggaggaggctggggcatcaatggggatggcacaggggactctgacttgcaggaaagacaatgagctcaccttttggtgctttgtgttggcggagctgttgacacatcctagagaacatgcccagcagacagaggagcggctgtgggatgaggagataaactcagagatgcagcgtgaggcctccgggtccagacagcatgagagcccaaagcgatgatacatgcattgatgttgttaaaaaggattttttttttttttttgagacagattctcgctctgtcgcccaggctggagtacagtggcgcaatctcggctcactgcaagctccgcctcccgggttcaagccattctcctgcctcagcctcccaagtagcttggactagaggcgcccgccacaacgcctggctcattttttgtatttttagaagagacagagtttcaccatattagccaggatggtctcgatctcctgacctcatgatccacctgcctccgcctcccaaagtgctgggctcacgcctgtaatcccagcactttgggagaccaaggtgggcggatcacttgaggtcaggagtttgagaccagccggggcaatgtggtgaaaccccgtctctactaaaaatacaaaaattagcctggtatggtggtgtgagtctgtaatcccagctactcaggaggctgaggcaggagaatcacttgaacttgggaggcagagtttgcagtgagccgagatcacactgctgcactccattctgggcaatggagcaaggctctgtctcaaagaacaaacaagcaaaaagcaaggaactcataaatatttaaaggagtcatttaagtaggtcctaaaataaatcctttgttcctgtcattgcgtggattgagagaggatgtgatgtcactatgggaccttctgtgtgggaacaaggacatccctcctcctctgctcctactcacagtgactctgatctggtaaagctcccatcctgccctgaccctgccatgggcacaaggctcctctgctgggcagccatatgtctcctgggggcaggtgattcctcagatgccaagcagtctcctgtgtgtgtgtgtgtgtgtgtgtgtatgtgtgtgagatgtgtgtgtgagagagagagagagagagctgactatagttgtttttctcattcagttcccaatttctgtctccacagatcacacaggtgctggagtctcccagtccctgagacacaaggtagcaaagaagggaaaggatgtagctctcagatatgatccaatttcaggtcataatgccctttattggtaccgacagagcctggggcagggcctggagtttccaatttacttccaaggcaaggatgcagcagacaaatcggggcttccccgtgatcggttctctgcacagaggtctgagggatccatctccactctgaagttccagcgcacacagcagggggacttggctgtgtatctctgtgccagcagctcagccacagcactactgctccagtgtcagcttggttccctaggaaatggggtttctagaacctgaatgctgacaaataagagttgtatatgtgtataccatgcaacctgcgtttaaaaatgtatgtacatagtgcaatgactaaatctagctagttaacatatgcagtacctcaatccttatcctttccagtggtgagaatacttaaaatgtactctgttagcattttcccagaatacaaaccactgttgctaactctagtcatttgttgtataatagatctttgtaacatcttcgtcttatctgagtgagattttgtatctgttgaccaacatcttcccaacagtccatctctactccagcctttgctaattactgctctagtctttgaatttgaagtaatttccctgaggtctttagctcaacaagatgggggaattttctctataatgatgcttacgttatttttgctttgtttttgtttcgttattttatgtcttgcaatatagtgtttattgtaaatataaataagtatattgtaataaaaatccttcacctctctttgggtaaagctacagttcacatattctaaatttcatgctgtgaccaacgctgacataattatggatcatgggtttctgggagtcctcagagacagccccatacaccaagtttaagatagaatattccagacccagccaggacagaagtgcatggtcctgcatagctccttggaaaattatagttccccaaattcagttattggatattgtggtgccgcagacaccaaacgtctttctctagcaaatgatggtccttggcagggattgttctgaacccattacaattttgccatcatcaaatcactccttgctgttaccttgtgtctcctgggagtgaggacgccccgggcacagatggaaattccctgaccttcggatgctatttcaaggacttcctaagaccttgtgtccatctttttccacctttatccacatgactcctgagacccacgctcacaatagtggaccagctctgattcttaggcttgaacagaattcagaccacagctgtaaacactgttgctgaaaaaagatgtaaaaaaggtgggcagggcttcctacctacactgagggtgaacatacaagggcataaagggaatattttattaatagctaaaaaaagaagaaatacaagccctgctctaatgaaatgagaactgtagcttcacccacagagaggtggaagattttattacaatatacttatttatattcataacaaataatatatttgaaaaaataaagaaaacaaaaagtaatataagcattattataaagaaaatacccctgtcttcttgagttaaagacctcagggaaattaagacacatcaaaagactagagcagtaattaccagaggctggggtggagatggggtgctggggagatgctggtcaaaggatacaaaatttcactcagataggaggaagaagtttaaaaaatcttttatacaacaaagtgactagagttaataacactggactacattctgggaacatgctaacagagttgaattttttagttgaaccaaagcagaatgtccataaaattattttgaatcaaagtctagaagctttcaaaccagttggcatagccttgtgttctgtgatctcagcagcttcagaggacttggcaatcctttctctgcacaaacacccctttgtccactctaagaactagggacacacactcttatcctatcacgaaaacaacaggctgtgctacagttgctggtaactcgttttaagggtgttgagtatggaggattgaacaagattgaaagctatgctcctgagtctgggaatgtgctggaaccagcttgcatgattcagaagagccaaataggcaaacccttcccaaatcctcattgaatgaagccatgatgacagcttgaaatctgccatagtggctatgctgataccataggaactgacaaatgctactaggcatggccccaccctcacagatatccagtttacaaggacatcactggaatgttttctgatacaatgatgatcctattagggcatgtcttatggggccaaaaaggctcagaatccactgtccatctgtttctgctcctagaagccatagtctaagggaatctcaagtgatcctacttctctccaatctccaaattcccttgctctgtgggtctgtgtctcttatgagcatgccaatctgaaacaagacaactatttggaatgtagctaaaggaaacagggaaccagtccattattttcaaattatccttccttgcatgaagtatgcagatgctgcaatcactgaaaacagagatggggcaagcagcagctctgggctgtgagtcactttatactatagtgccccgctattcctctgtggcactgacagaccctgcagcatggactaatttgcataggaaactaagcagcccctgaccatcaggtatgaccctggattcattttgggctgagaggtcagaaggatcatactcaccttaaatattatcctctccaagctgcaatactcccactgtccatcttagtcccaggatgttgtccagagctccagagaatcccttctcttggggcagaatcaccaagcttgctccctccagatttccacagtctccagtgggtatggggcacaggtgccattctgtgtctcaggtagagagaggcatcatgtcaaatgatatttgtagaagagggattcaaattctgaggctcctctccaatatttgacataattttctttgcttcttgtttcattctacaatctcacaatttaggagagtaattcttttgcggttgcattgttgacagcatttgggaaagtttttgtggttaaattaatttaaacaatcattttaatggtgtatttcttctgttcacgatagaacagtgaaagcagtcatttacacatcctgttgatgaaggtgttgtttaaggttcatgatccacacctaactctcaatctagttgaaatgaaaaggtgcagaattaggtggcacgtgagcaagctatgagagaggctcatgccaattactgtgggatttggagggagggagagatgacctctgctctagaccatgctccacgaagaaggagtgggagtttgtccatgggagactgcagaggaataaataccagcagcttctaactggggtggagtgagggctgcgggagcaaatccttggaacagaaaatggtgcatttgagctctcacagaggacagtggaaagaaaagtcatataggccacagtcccccggcaggttctgtttgctaatgatactattttgcaccagtgtgtccttatctcacaccactcctctgcctcttccagaataatctcttccctctccgctgctcagatcagcagatgtgccttgtgcaagttactcatttcacatagcaggccttttgctggtcttaattatatccgtcgttactttccacattagatactgtgtattgccttgcaaatgatcctactttttatattcctatttttcacttgttaatgcatatttgaccccttcttgaaggtcaagatgaccttggaaatataaggctatctcattatctggtcagtcttttactaatctttatttttatcgtaacattgactgtcattttgggggacatgtttgtttatcttgaatttcattgagtttcctcaaagcacgattttgagttctttgtcttaaaggtcgcatatctctgtctgtctagggttggtccctgttttattttttttttgagaaattaccgacttcaccagatgctgtaagctaccgggatagaggaagtttttgtgatttcatagcttgggtcttctttattcagggcagggaattttattttggggtcaagattgttgaaaatggcatagtgaagaaggtagagtcacaggagtttgctttatatacttgaggaagaagaaactgagatttgggaaaagtcaagaaaagagaacctgatcaaagatgactgaaaatagtaatagagcagaaaatgatgaaaagtcgtgttctgtgcaccacgaacgttcttctccccactccaaaagttttcgacacctagaaaatataaagaaaggactgatagcaactggcatcacgttgaggccagtctcagttgggaaaaacaccaaacagccgcttgtctcctgtaagaaccctgaagttggtcctgatgtcttctttctggactctggccctgatcttaactcctcagggaagtcaggtacttcccaaaatacagagaatgtcagattgcccttggttttgaaggagaaaatgctctgtgcttctccccaagataaattctgctttcctaggaatgctttctaacactcgtcatccagatctgattaccttctgtgaccaaacggtttccgaagattttgtaaaactcagcagcctttcacatcctctgcgtttgcactcactgtttccatggcccagaaggacatttattttcccacgacagggccagacactgctcatctgccaaggacgggctccctcccacctgtcttcctcttcacttctcatcccagcattctctggcactctatgatatcactctcttcactccacaggccaaaccaagaatataattggaactgcctgatgtttataacatgaatcaattcaagtccacttacatagacccctggaatacatgaattactatctcctctttacaagagacttctactacatgaaacatactggagagtctttagggataggctcagttttctacacaaattctgcaatatcctaaacaattctgtcttcacagtcataattgatgacttgttctctaaagtacccgaactgtgtttaaagtcagaatttgcaaatgttcttctgagaaaaaagaaaatcattacatcttagtgacatttatccagtctcacaatcttgctgaaaaatatttgtcatcataaccacactttccatgaccacatctttagatatttggtgagactggaaacatcaacaatggtccttctcagaaatcaacttaaaacactgaaagaaaaagtagctgtgctcagtaattgaacctcatcagccttgccaattaaaacacgttgtgtgcatgtgcttgtgagtgtgagtatgttttcttgtggagatgcaaatagtttctgtgggtggcatttactaagcatcactggatcactggtggagttcataggcactttcctaaccccagggagtgatgggaaatgtcacagccactgaatcggcctaagttatagctgatagggttgtttattttaaaattttacaaattcagaaataaatttgtaaactcaaaaaatggggccgggtgcagtggctcatgcctgtaatcctagcactttaggaggctgagggaggtggatcacgaggtcaggagtttgagaccagcctggccaacatggtgaaaccccatctctgccaaaaatacaaaaatttagctaggcgtggtggtgcacccctgtaatcccagctactcgggaggctgtggcaggagaatcacttgaacctgggaggtggaggttgcactgagccgagatcgcaccactgcactccagcctgcgtgatagagcgaagctccgtctcaaaaaaaaaaaaaaagaaaatcaggaaatcctctcttataaaacacatgatgtaaaatttactgatattaatttaaatacaaaataggaaaagattgggcctgattaagcaaagggagccagggaacaatgcagtgtttctgggctaggtgggcttgacatcctcacactgtttaattaagggtctgtgtaattttggctgctctctaagtgcaacaacggtttattttgtaataaaaagattggttcatgtgtccttttgcctcacttggcccagggtgaatttgaagatcaaccctaaattggccttttggggaaagcatagagggtgtgaggatgagggttgcaagggtgggagtggggcatctttgttcctgatttggacaatcttgaactcatcaggtcaggtgtgaatccatgagactgtggaatgttggccacttggtgacgctgtggctccacaatgctgcagggaaccctggagaggggtgggaaggtggccaagagaggagctgaagcctatgcttggctgcctgctggcttcaggggagtggtttgattcagagtggatccagagttaaacacaaactccccactaccagagaagagtagaggtgctggaggcctcagtttgcaccaaagagtagagtgtccctgtgtctgcttgggcagtggatggtgaaggagcttcagccacaagggctgggaatcagtgtcagggcagggacagggcaggtagaggaaagtaaggtgtgatgtgggcatgtggggcctgctctccacccaccaaacctttagtttcagggctgtgcgggacagatgcatggagcagctgagcctgggacctgccaaagcgtgcaaggggcagtggtggcctgcagggagagaaactcgcaaaggccagttcccgcaggaagctccagaaacattcctgcccccactcaggaagtgaccgtgagagacatgctgtcagccagaagggttcaggccctggagagctgataggcttttcccaggcactttctgctgcttctacatgtgatctgctttaatattcacataaattatgcaggataagtattattttacctgtttatgtatctgaaggaaatcagctgtccggggtctcatacttaataactggctgaagactgggtgcagtggctcacacctgtgaccctagcactttgggaggccaaggtgggcaaatctcctgagctcaggagttcgagaccagcctgggaaaatcggtgaaaccctatctctactaaaaatataaaaatttggccaggtgtggtggtgcacacctgtaatcccagctactcaggtggccgatgcaggagaatcgcttgaaccctggaggcagaggttgcagtgagccgagatcatgccattgcactccatcctgagcaacagagtgagactctgtctcaaaataaaacaaaataaaataaaataaaataaaataaaataaaataaaataaaagtctcaagcctgttgtgccaacacctctccttaaccccttctttgtagctctatcctttcacctgctttcccctttacaggtccccatcaacaggttgtgaagttcatgcctcatacgtaatcagtatagtctcttccctgagaagtccaaggaacatgtgacttccaggccaagcatatacattcatccttcattgagacaaaaaaaaaagtgtaattttctggccagccatgatgcttcacagctgtaatcccagcactttgggaggctgaggaggtgaattgtttgagcccaggagttcgagaccagcctgccaacatggagaaaccacgtctctactaaaaataaaataaatcagccaggcatactggtgggtgcctgtaatcccagctactcaggaggctgaggaatgggaattgtttgaactcaggaggtggaggttgcagtgagctgagattgtgccattgcaatccaggctggacaacagagctagactcccgaaagaaggaaagaaagaaagagagagagagaggaaggaaggaaggaaggaaggaaggaaggaaggaagaaaagaaaaagaaaaagaaaaaaaaaggggtggtaattttctgaactgtagacttcctgtaacggatgcaacatatcttgagaaaaaggaacactagtaattgttattcactagttaatttattttattcttttattcaataaacttttttgggggacctactgtgtataagataccctatgtcgtcaaatagaaaatgaaaaagaaaagtatctgcagatgatggcagattttaaaaaataaaaaaagaaaataaataaagaaagaaagaatattttaaaataaaaaatattttttggctatttataacactaaggtctgcatttattttcatttttcaattgttttatgtttattttcaattgttttatgtttagtgtacttagtttttgaatttatatatttcctttcttcttctcattctctctttggtttctccttctctcttctttgccagcttgtatttcttttttatttaaacttttggtaaggacatttaacatgagacctatcctctgaacagatttttaagtgtacaaaacagtatcatagtctacaggcacaaggttgtacagaagatctctaaaacttcctcatcctgcttaactgaaattttatacctgttgacagcaactccgcattttccccaactcccagctcttggaaagaaacattctcatctttgcttccatgagtttgacatggttgcctcatataaacagaaacatgcagtgtttgcgtttctgtgcttgacttgttcacttagaacaatgtcctccaggttcatctatgacacatatggaaggattgtttttcttttctaacccttaataatattccatgtttcagatctgcaggattaaatggatataacatttggctatttctatgaaactctctgtcatgtgagtggcagagtcatttgcagagctgcgagcactgagtttattcaggcacattcacagataaattctgctccatggagaacattcagaaaaaaataataatgccaacttttatttgtcaattcactatatgccaaataaaaatctttcatttgaaaaagttcaattaattagaaattcagctatcagaaaaaaaccttaagatgcaaatgctattctcattttacagatgagggaattggctcataggttaaaaaacttgaccaaattgaagagctattaggatacagtattgggacttcaacctgatctgtccaatttttgcatttataactctgtgctatagtgcatttcatagagagagatgcctaccttcaaaaatcagaatattggatcctacatccctttcagatcaactggctctaacaacatggaaagagatcagtttaccctggagacagtgatgtaaggagagatctctggctagatgccatgacactcagccctgactcccattctaacaccaacttgtaaagacctgaggccattcttgacatgctgcgtttagtttgtgttttgggtttttatttttttctgtaaaatgagatgactactgcccttatgaagagttgtacaaagatttaatatgacaaagtatctagcatatagtagattctagctattttgatttcctttgctaatctcaaacagcctcttccactgtgccaatgagcaaagacaaatatgaacacattctgcccaggaatcttaggttgaggactcagaactcacagaagtggaaatatatatgcttgatgattcatttgatgaaattacctgcagaacatagcgtacatgccttctcagacattttaaaatcagcacaattgatatataaattgtacaatataaacattacacatgttaaataaacagatcaatggttttatatatatatatatatatatatatagacatatatatgggttataaggatatatatgtatatccttataaccactatccctataaaaaggtctctatcacccagaaatctctctcatacccctttgccatgactctctccatctctgacaaccaatgatgtgatttctatcactggagaatacatttttttcaaaaaatctattagtaacattttaaaacctgtattgattaatccttttcaaatacatacatttaagagtgcaaggtgctcctcgaaagttttatggttttaaaagaggctaaatttctgtgagctacctgatccatgttagggacaatcctatctggagataggtaagaggatgaaatagcctcaaaattactttccagctggtggaagctcattctccaaaattatttattcatttttatttatttcttttatcatctacccactcattcaaattatttattttataatggtattgtgacaacaattaatcattttaatggaattattttgagttcccatatcacacatatttaattggccttcaagttcacacactgaatgcaacggcaccaaacaaaccatggtaacagtgactttgttgagagatggtgtcatatgtggaaaagggttctctttgcttttaccgcaagtatccaacccataaaacctgaactttgagctaggaaatctccctttttgttctggccctaccctgggcaccaggctccagcaccatgtctccttctgggttctggcccagagaagttcttggcacagttgtagcacccactcatgggcttgctggatcccagctgtgaatgacagtagcagggccccctttgctctgactttaatttctgtgtccttctcaaataagccctatagatgctgagtggcctgggcccctgccatgtgcttgggctgaaagaaagacagcacgtggggaggtgagcaggagcgaagttgaagcaaatctagaattgacatggaaaggactttggacataaatccctaggcagtggtgagccactggtcctactccaagtgaaacaacatgatgaaactgatattgtgttacagtaacattggtagtagtacggatctgaaaggagatagatttttgggtggcatgaatgattaggagacttctaaatatcctccatgaaagattagaaagggtttatgtaaagcattgtggaagacataggcttgaggctctggattatgttatctcttggaaagagtgttgggttttattctggaagggttaaatgtaggacttgctaggttctatttgagctttgcccttcctcttagggagccccagcctgtggtcatcattgctagtgcatggccttcccagggtcttagtgggaatcacagtgtattcgccacatcactccactgcaactgggtctgaatgccctggctcttctgaaatctctgcccatgtcttcagccttccagaacttgttctctgctcagccttctggtctgccaccctctgcatacacaatttaggatctggctcaggaaaaaaaaaaggggggtttcttacatataatttttgggttcctttttactaccctgtgtcttaaatcccagctgtcttggagtcagttatgtcctatcttcaatcacataaactaacgatatttggtacagacatgtttactgactttacttcacgttaccattccactcttcactcttctttcttgcaattcagacagtcctgaggtcattctccttcttcagatccatctggaattcagatgacttcaactcacctgtcacccaccctatgctttgagacatgtttatgttagctactgacctcagggtagtcaagcctctcattgtcattgttattcaaggtaggttgaatcccactaaaaaacaaaaatccttgaaatttggtttccttattgagagccacacaatgcaatcaaattctttttaattcaatttttttttcttttttggtggaagggccaagaactgtttccttgctgaagcagactcctattataataatttgaatactaacaacattaacctttaaatcaggttgatgttaggttcttatctaagaatgaagtatatccaactgtagcaggttgaaggtctctcatatatgtaacctgttcaggacgagacaattcaaccacttttcttaaattctgatctacatgcctttacattctttgctttaagggccacataaaaatactctgaaacaatttacacatcagaaaaatgctaacactttcctcctggcccagcacatctccaagttaaaaaaatctctaaattatcaacccatagtttaatcatggtaactcccttctacccccaacatagatttttatgtaactgatttgtaactacaaccttaaccgtacaatcacaattgtcattataaaatactaacaaacatgtgctattaacaatggatggttaaaatcacttagggattatgaatcatttcatttttgtgtttatttattatgtcagtttcaacctgatttccctttcccttgttccacacaccttgggttgttctttttcagcatcctgtgtatgttagctctaagcccagccaaggctcatgtccctccacttcagggacagagggtggctcatccctttcgtgctccctcagctccctccccggtgcctggttgctggttggcatcacagccatgcccttgaaagatgggcgctggtccacactgcatccgtggtcatgtagccaccctccctccacagaaccgagcaaaaagggctccaccgcgcttaggcattgagggaatggacattttgaatggtgctgtcttgtgtgatccctcagaggagaaggagatttcttgaatgggagtggtctgttgctgagagggatcctgaaagacacggggacagagacaggggtaggatccacataatgaggaagcagctgagaacaaaggagcccctgccagaggaatatccttggggggtaaaaagctggctctgccctttctccccagcccattcatcccagcccagacaattcaaatctgccttctatcaggacctagaaaggatgtaaaacggccgggtataaatatcccctgggtctggggaaactgtcaggagcagtgacatcacaggaaaaaccaccaaccaaggccaaggagaccagagcccagcacctcacccagaggaccccagtcagaggccccatctcagacccgaggctagcatgggctgcaggctgctctgctgtgcggttctctgtctcctgggagcgggtgagttgggttcacatcagctgtccttgaattcgaaactttttccttgtgatttcagcaacaagcctcctcctgggctctgcctgaattttgtccctttccccccgcagtccccatggaaacgggagttacgcagacaccaagacacctggtcatgggaatgacaaataagaagtctttgaaatgtgaacaacatctggggcataacgctatgtattggtacaagcaaagtgctaagaagccactggagctcatgtttgtctacaactttaaagaacagactgaaaacaacagtgtgccaagtcgcttctcacctgaatgccccaacagctctcacttattccttcacctacacaccctgcagccagaagactcggccctgtatctctgtgccagcagccaagacacagccttgcagagtcaccgctttcctgtgtagaaaccttaggggccctccaggaagctttgggggccaccaaagccttcgatgaacatttcctacaagagccccgacagaagattcagaacatcatagcacctttaatggcataaaatatctagcatatagtagaagcctagctattttgatttcctttgctgatctcagacaacctcttccaccacaccaatgtgcaaagacagatatggacacattctgccaagaaatcttaggttgaggactcagaagtcacagaaatggaaatatatatgcctgataattcatctgataaaattaactagaggatgtagcatacatatctcctcaggcatttaaaaatcaacattattgatctttaaagtatatgaagttaacaggacaccttttaaatgaacatatctgtgatttttgagcaacatatatctatatatgcaaccccacctctatgaagatgtatctgcatcacccagaaagtccctcactcccctctgcaatgcctctgtctgtcccagcaaccaatgatgtgacttctatcactggagagtcgttttgttggcaaatatttttaatgcaaatgtcaaacctcttctgaataatcctcttgaatacatagctaaatcatcaaggcagggaggagttcctggaggttttatggttttagaagtggttgaagccaggtgagctacctgacccatggtagggacaattctatctggagatggatattgtgccaaaataacctcaaaaggtcttttcggctggtagaagctgattctacaaaatttattcattttcattcgtttattttctcgtcaattcattcaatcaaacaattttatgttacgttttgacaaaagttaatcatctttaaggaaattattttgagttcccatcagacacacaagcagctgggctttgtgttcacacagtgagcatgctggggtcaagcaaaccatgatcacagtgacttcattgacagatgatgtcttattgggagaagggttctctttgacttgaccccatgtgtccaacccataaaacctgagccttaggctaaaatccatcttccttttctcaccctgccttgggcaccaggccactgtgctgtgtgtttctctgtctcctgaagcagagtcctgggcgcagatttggaacctattcgtgggcttgtttgatcccagctgtgactttcagtaccagggggtcctttgctgtgacttgaatttgtgttttctttactcttaagttccacagatgctgagtgacccagaccctggtcatgctcttgtgctgaaaggaaaccagcacatggggaggtgagcagtatatgaaacaaaatcatgtatttacaaccagtggcaagacttactggcaggtgctttgttcaaacactgttaggaatttgaagatcatggcagtagaatgtgaaaccaagtgcagggtccttccaaatgcaggcctctgtgcaccaaagatagacttttggagctcattttttttaaacaaaaacggaaacaacactctatgttcatggctgtaggccatgcgagaatatttttttaaattttaatttaatttttatttttccatatattattggggtacaggtggtatttggttatatgagtaagtttttagtgatgacttgcaagactttggtgaacccaccagctgagcagtatacactgcaccatatttgtagtctgttatccctcaccccctcctgctgtttccccaacacttccccaaagtccgttgtatcattcttatgcctttgtgacctcatagcttcgctcccaaatatcggtgagaacatgctatgtttggttttacatttctgagttacttcacttagaataatagtctcccatctcatccaggtagatcattccaaatgctgtttattcattcctttttatggctgtgtagtatttcatcatacatatatgatatatatatgatatatatgatatatatgtgatatatatgatatatatcatatatatgatatgtatatgatatatatcatatatatgatatatagatgatatatatatcatatatatgatatatagatgatatatagatgatatatatatcatatatatgacatatatatgatatatatatatcacagtttctttatccactcgttgattgatgggcatttgggttggttcctttttctttatcactaaattaatggcagcaataaatccagaacattcctcattaccctaaagtcagccctgtctcccaaactcccttacacatcaggacacctttgtgcccatagatcatgggcagtgcttggcagccaccactgtccacacagagagggtagtcagtagcgttaggtggttctgcttgctggggtctcaccccaggcacagaaagcaggagccctgggtggagctgaaagtgctcatctgggtttgtcaggagtcccatctgtcagtgaattcacaagaaacagaacaaaacaactccttcaatgttgatgagactgcccctgggatttggaaagctaataacagagaaaaccaatatagacaaaggattttaaacaggactatcggattatgatcaattaagcaaattagaaaaggatacttgaaggagtatttgggacacaggaatcaaaaacaccaggaagacatgaggagtttttccaagattgtagactatagcaatacttagataaccaataccagtgtattaatgagtaattattagtattattattttgagatggagtcgcactctgtcatcaaggctagaatgcagtggcatgatctcggcttactgcaacctccgcctccctggttcaagaattctggtgcctccgtctcccgagtagctgggactataggtgcacgtcaggatgcctggataatttctatatttttagtacaggtgggatttcaccatgttggtcaggctggtctccaactcctggcctgaagtgatctgctctcttcagcctcccaaagggctaggattacaggcatgggccactatgcacagccaagtaatttgtatcatcatgggaataaaaaatatacattgagttacaaactaattaccaaaagatatttaaaaaatggtagacttgcatcgattcagacaaaggcattcttcccatccaaactgttcactggtgcattgatcttgaatttgaccatctggggaaggggcgtggcctctcctgacagcaaggctctggggcccaggcagggagaatgaggtctcagaatgacgcccttgaaagacgtgttcccttttcaccaatgcacagacccagaggacccctccatcctgcagttcctgccatgagcctcgggctcctgtgctgtggggccttttctctcctgtgggcaggtgggtcctgggcggggccccttgtgtggatttcaaggcccatcccctttccactggagcagtagcatcagctttgtccttctctgcaggtccagtgaatgctggtgtcactcagaccccaaaattccgggtcctgaagacaggacagagcatgacactgctgtgtgcccaggatatgaaccatgaatacatgtactggtatcgacaagacccaggcatggggctgaggctgattcattactcagttggtgagggtacaactgccaaaggagaggtccctgatggctacaatgtctccagattaaaaaaacagaatttcctgctggggttggagtcggctgctccctcccaaacatctgtgtacttctgtgccagcagttactccacagtgctgcacggctgtctcctctctgcacagaaaggcaagggaaggtgctgccctcctccgcagcacagattcagcgatgcccttggtcctagcaccgaaaactttggagccccaatgggcccgggcggtgcgagccttcatctgtgccaggtgcctctgcagtcggtctcggccaggcctggatcggtcccaggacctcagatgtcttccttgttgccctccggtctttcctctgaggtgtccttttgggctagtgccaggggtttcccagctctgactttcctagtcattcacctgagtctgaggcctcctaggtgaaataggatttgtatttcagatccatctagactcccgtctctacctgggtaccacgtgctttcctctctctatgatttttcctcatgttgaaccctacggtggtctcagctgcagcctgcatttcctatattcacagtcgccctccaaggccttgctgggtttctcctccccgacctccctgcccttctctactccagccatgttgagagactccaaagtccatttcctgtgccctgggctggagccttcctttctgtagtggtcaacacctacctgtgcttcagatctcagcatcatcagccctagtgataatcaccattatgcttcccttggctcccagctgaggtcagtttccctctcataatctctcatggtatcatgtgtctgttaatcagtagaatttagcacagttggaatcttccaagtactttaaaccccatgaaggccaaggctatgcctgggttataaatcagcagctgagcctggcacaaggggagatgcatttcagagaatggatgagtcagtgatggagtgagtgatgagtggatggatgaatccataacaggagcaccctagatccattttacccttgcggagatctggctgtaagtacaagaactcttacccttttgattgctgggctacgggaggtccttgaaattaatggggagtcgctatcatgggcggccccaccttggtcaaagattcctcctgagtctgcagcaccagacctcctccaggtctctgtgctctccttcagactctttcccacaacaactctacacagatcagagatccctttccagaaacccatgcatagagttgtgttattttggaaccacttctggtaccaaaaactccattaggtttacatcaataaaacagaatcactaaaagtactatggagaggaggatttatgacaggagttagaccttatataaatgtagggggagctgaggaagagaaggtctggaggggagatatagctaggcagatttaattcatgattaatgtgaccgtgacctcttattctactcaaaggagagcatatgatttcaacaaaaaaatattgattttcctttgtaaaagtttgatccaaatagtgagctatttttgtcccataattgtcttaagttggctaatggtggaacaaatccgactttgatttccttgaaagaacaggaaaaaaaccgtcattcatatacagtcttacaggctctattttatggaggaagcataataaataggaaagagaaaatcagaattctcttctggaacctacattgggactgtcctcagagcaggttgtgatgtgaggaatcaaatctacaggggtatttcgcagcttggagcgcagcagactgttcccgaccccatgcatttgggggtgagaccagagacagttgaaaaactatggaatcttgacattctgcactctcaagcctggcctctccctgaatttcacagattaacatcagaccaatttattccgactattaaaagtattagaacaaaaaccaaggaggaccagtgagcagaagcaataaaccattaaaatggacatcctaaagatttaaaattttgccatcataagatgtgaacgtttgaagagctgcatttaaatgaatacaagaagggactgaaacaagaatacacacaaaaaagagacggcccgaaaccatcaaaaaacattaaagaaataatcaaatagaatgtctagaaatcattacgattactccacaaaacaaaatggaagctaaacagcagattcaatgcttctaaagagattgttagcaatatcaaaggaggatctcaagaaatcacctagaatgcagcacagaaaattaaatgtaaaatataaaaaaagtgaaggaacaaggaaaaaatgaagtttctagaatattagaaagcatataatgttttattgaaacttttcttactttcttgtatataactgacgtttcagaaagagaaaataaggcaaatgatctgaggtgattgtgtatgtgatgctagctgagaatgttcctgagatgtttgaggaccgaaatcctcgttcaagaattcagatgaattgcaagacaagtaggcaggtccctgtgaaactgcagaccataaatgacaaagagaagattttaacagcagtcaaaagggaaagataaataacttccagtggaatagaatgaaagaaataatcaaagtcaagaaagaggattaaaaataaccattcaataagaattgtagtcctcatttattgaagattgagattgatttaaaaaaatctataggacaggaaagaaaatatggaaaaccaaaagaattctgtgagtttgccaccaaggtatgttttctgaattatagttaacatgggtgggaaatgatcccagaagaaaggcatgagggcagtttgtgggggaacccatgtgatgggacaatcccattgggcacgtgtgagtgtgggaatggaggaggctggggcatgaatgggtatggcagagggcaccctgacttgcaggaaagacaatgagctcactccttggtgcctggtgttgggggcactgttggtgcatcctacagtacgtacccagcagacagaggagcgtctctgggatgagaaggtgaacttggagatgcagtgaggcctctgggtccagacagcataggtcaaaaaaagagaacctgatcaaagatgactgaaaatagaaatagagcaaaaaatgatatatgtgcctgatgattcatttgatgaaattaactagagaacatagtgtacatgcctccacagacattttaaaatcagcattatttatctataaattatacaatataaacattacacatgttaaataaacaaatcagtgagctatatatatatatatatatatatatatatatatatatatagagagagagagagagagagagagagacatatatatatgggttataaggttatatatgtatatccttataaccactatccctatacaaatgtctctatcacccagaaagttctctcacaccccttggcaatgactgtttccatctctgacaaccaaatgatatgatttctatcactggagaatacatttttctcaaaaaatctattagtaacattttaaaacctgtatcgactaatccttttttaatacatacatttaagagtgcaaggtggtcctggaaagttttatggtttaaaagtaaagttctgtgagctacctgatccatgttagggacaatcctatctggagatagataagatgatgaaatagcctccaaattactctccagctggtggaagctcattctccaaaattatttattcatttttattgatttctttactcatttactcactcattcaaattatttattttataatgatattgtgacaacaattcatcattttaatgaaattattttgagttcccatctgacacatacttaactggccttcaggttcacacactgaatgcaatgggactaaacaaaccatggtaatagtgactttgttaagagatgatgtcacatgtggaaaagggttctatttgcttttaccccaagtatccaacccataaaacctgagctttgagctagaaaatctccctttttgttctggccctaccctgggcaccaggctcctgcaccatgtctccttctgggttctggcccagagaagttcttggcacagttgtagcacccactcatgggcttgctggatcccagctgtgagtgacagtagcaggcccccctttgctctgactttaatttctgtgtccttctcaaataagccctatagatgctgagtggcctggacccctgccatgtgcttgggctgaaagaaaaacagcacctggggaggtgagcgggagcaaagttgaaggaaatctagaattgacagtggaaggaggagatgaggaatatcaattatggcattaagtaccagtgatagtagcaggactgtatcttatttccttaaacctctgatacttgtacagatagcagctgaccacaaccttgaagacctatttggactcaatggaaataatgcatgagtggactgtatcagttgcctctattaccacctcatactctcttggttccacctttgattccagccacagctatgatgaacagttctatgcagacactgacctgctccacagttaccgcacctcaccttcaatgtggccacgtgttcccaaaacacgctgttgctgaggcatgagacacattggtggtctgcatggcgcttgttcatgcacaatgaagtgtgagtgagttaatgtcctatggggcaattctcaaccactggagaatgagaactggtggataaaagccttggcattagtctcaggctcctagaaaggcctagtttgatagccagccacctatctatagagatggcccgattaatatgttttcctttgtattttctctgctttttgtttctctgattcagtatggatattttcacctgacctatcttccagtttatctagtcttttcagctttatctatccttctttaaaatatatatatatatatttttttttcctaaattttatgtatttcatatatttcagttctggaatttccacttcaatcttgactacagtattcagttgtctgctaaaattctccattttgtcatttcctttttgattatattaacatcagttattttaaaggcagtgtctgataacacatctctgttggtgtctatttcttttgtccgctttcttttttttaatttttggtcatgcaatgttgttttctcacacaatcaacaattcatttgaatgctaggtattgcatataaaaattacagagataatgaggctctgaatgatttcatcttcctcagaaaggattcatgtttgcttctgctggaaattgtagcagagacaggtcaccttaattgagttgatgactgagctggatcagagctgggattcagccttcctgatggcttctcaactttgctattagccattaaacttccaactagatttctggagtattttaccagcttattaaagtgtaaattacataacataatatttgcctactggaagtgtgtaatttaatgagttttgataaatttgtggagttgtgcaacaatcaccatgatctagctctaaaatatttcatcctccctacccagaaagttccttcgtgctcattttcagtcaatctctgcttctacccccagcaccaaggcctggggtctttgccaggctcctctcctactcagtagtcactgaacgtaaatgttctccaggccagaaaggtggtggatgctcctcaaagcctttggcccatcagtcctccctttcttcttagcttctcagccatcaaatgaaattgacaaatgaatttaagggaaaagtaggtttttttttttttttagatttatccgttttctatgatatccctatcttttacgctcttactgccccagtagctccaagtgccttcaaacatttatgttttatattttgttaagcttttctagttgtttttggtggaagtgttgttctgccactatccagtctattaactctgaaagtcagtttttatatttattaaagatgaagtgcaattgagttggtaggtttgtatgtttgtattatggtggaaacttcctgaagagagtgaggagtgaagcccctctagtctcccgtcacgtgtccctaataagacctctaccaccctgctgcctttgttccactactggactgagccttgacacgtttgaccctttggccacaaggaggagctgtgactctgctgagattcagagaacttggaggaaggagagacaattctctggatggcagagggttaatagaaagattgagtttatttacaacaagggaaaatgtggtctgcaaagaatgctagtcaaggctctaagtgtgagggttaaatacagactattcattttgctttgatatgcaggcgcttttgtgctatggaagagcctggactgtcagacttccactggagcgtgcatgggattagaaaggacaaggcatgagctggggagagtgggagcccacaagcagacacagatggaggaccccttcccaagaggaataagagaggctctgggtgctgggccgttgctccagctcagcccagtacagctgagccctgccatgaagtgagtctggccggccaggggtcccttggggatcttgcagagaataataactcagggaaatcttcttatgagaccaaaggtgacctacagccctgttctcctcactctaaattatcggggaattaagctagaaagaagttttttcttgttcctcttctggatggtcctctgagtttttggagcaggagctccccacagtgataggaaacccctctcctaggcctgagcaaatgtttctatcaaaacagcatcaccagactcccttccagcttccatttccaagttctttccctatctacgaagaaccgtggaagctagacttgtccagacgtcaaaggatctgatgatgccaaaacacctggagataggaaagaaggtggcattgacagactgccaggatgcacacctgaaacgcactttgttttcactacaggctcgtgtttcacattttaaaaaagcatttggaacttccctgacttcttggaaatccaaaaatacaacaaagttacattttagtagactctagtcagtcatctggcaggaaaaagcttcaggatataaataaaagtataaatagtagtatatacatatatatactaattatttatatataaccttacatgtatatatactacatacatgtatgattatgtatacatatactatacataatatagtgtatacgatacatgtactatatacaatatatactatattatatatattctgtattacatatagtatatgtatatgcatgtattaccatatatgtatatatacatgtatgtatacgcatatattactatatatgtatatatacatgtatgtatatgcatacattaccatatatgtatatatacatgtatgtatatatgtaggctggatgactagagcctacatcaaatgtaactttgttgtattcttgaatttccaagaatcaagggaaatttgaaacgtatatatccaagtatgtagtgtgtgtgtatatatatatatacatacatgtatggtaatgtatatacatgtatataatatatactacatgtaatatacatgcatatattatatatacatgtatatatatacatgtgtatattatatatacatgtatatatatacatgtgtatattatatatactacgtgtaatatacatttatatatacatgtatttatatataccactaccaaatacatgtgtatatatatactaccatacatgtgtatatatatacactatttttatatataatatatactacgatacatgttctagcatattgcctgaagtaaaagtccagccaaatagtttaaaaggaaaaccatgagccttcctgtgaagattaattttgcatttcatcttgaaatggaacaaagaaatctactgaagatagtcaattcacttctatatacggaagtctacatttatcagctttctacagtatgagcgactttcaaatctcctaaaagttacacaaatcagaatatgcagaacacacatttctaagctcaatattaaatatgtaaagtgactaacttgaacgtaagagttggacgttcagggtcctcctgtgatttcttcattcccaccatcacaaaacatctacaccttcttctcagtaacaaaaatgagatgacataaaatcatttttcatagttaataaataatacctatgcatcatgacattgcattgattttttgttaatggttgttttcaaatgactataaattaaacatttataatctatacaatagaaataataaatgtaaatattttaagtggatacatgagattttagtagccaaacaggctcacacctgtaattccagcactttgggaggccaaagtgggaggatcacttgggcccaggagttcaagaccagcctgggcaatatagggagatcctgtctctgtattttaaaaaatagttatacagaaaagtaacatgaaatagtctgcaacaggatgtcctatctgggtttgatctgaatttccatttagaaaacagacaggcactggtccatctgcgggcataggttctcatgaattgatgtgcatgttgacttttgtattttgtcaaagttaaaggagatattttgatcagagtcagagccacaagtaactagcaggaaactgagtgggatggaggttatgccatggtccttgcttccttgcagagctaagaaaccagttgtgagcaccagcgaaaagagacaaagtcagatgaaactgaaatcttcatgggactctgtgcccaagaaaaccagcttgacaggattgggcacaagagctattccttccatcctacgctgccagagcacacagcacagtttcccccatgagctcttggggagctggaggagggagatagctgtgctgggcggagtcgtattcccatgggaagtccaaaaagtagaggcagggatggaggttttccttctagaaagagtggaagattttgtttacaaacgtacccatacacatgcctttctcccgaagacccaaactttggggaattgcttaaatataacaaggaggttaaatattggacagccaaaaataggaccgaagccaatctcttctgaagtaggtgtagtcactgtgcattagtcagatattcaaatgagcaaagattcaagaggaaaaaaaaaagcattattggaaaaggaagcaaaagatcaagagaagaaaaccagcctgactctgagaggagagcccaaaagggagaggaagggaggaggtcctcagatcccgggtagggagcagggagggaggggtacaggcacaggaatgactgtcagagacacatcctggaggccacaagtccactctctcaactattcccagaaattccaaaaactcctttaaagaagccagtgcagggcatgaaagggaggagccatgctagaggagatcctgggaatgggggaatgattacaggctgtgacctcaatggcacagcacctctcagaggcagtggaaaccacagcctagtcttctcaccactgcagaccagaatcctgccctgggccttgcctggtctgcctgactcggccatgggctgcaggctcctctgctatgtggccctctgcctcctgcaagcaggtgagtcctgggcccaagtgacaagatcctgttggagtccccgagccttttcaccatgacaacaacaggaggctacctcctgggatttgcctgaattctgcttctttcctttacagatccactggacacagccgtttcccagactccaaaatacctggtcacacagatgggaaaaaaggagtctcttaaatgagaacaaaatctgggccataatgctatgtattggtataaacaggactctaagaaatttctgaagacaatgtttatctacagtaacaaggagccaattttaaatgaaacagttccaaatcgcttctcacctgactctccagacaaagctcatttaaatcttcacatcaattccctggagcttggtgactctgctgtgtatttctgtgccagcagccaagacacagccttacagagccactgcatccctgtgcacaaacctcccggctcagccaggaagctgtgggccgtgtgtgcacctgcacccaaggctccagtctccattccctgatggcctctgatggagtttcagtctgtagtacagcctctgccagtgcacctgatgtggcaattctccattttatgtacacagaactctcagaattctgtttatcagctaaagcaggggttcacaacaaagtcagcaaagtatcagagctcaactaacaaaacaggagcctgtcccatgcactgaaggtctttactgatgggagaagccatttcttgtctttgtctgctgcacatatgggtccatattttactaatgttatgattataaacacactgtaggcaaaaatggttgatgagcctaagcataaagaagaggggaaggaaagtatttctaagatcaagagacaatttggattatcagtgagtattttgtttgacagagaaatattttgagaggcgtgaaattccatggcaataggtaaactggaaagtgttgaggagaagtcagtggaggcagccttgtgcattgtcggctccttctcttcaagaagggtgaccagcaagagtttctcccaattctgatgagtgtcatcttgaactctcctcaagagcaggtgacagctggatgacaggggatattgggagacatggaaaggaatttggacacaaatccctaggcagtggtgagccactggtcctactccaagtgaaacaacatgatgaaactgatattttggtacaggaacactggtagtagtatggatcagaaaagagatagatttttgggtggcatgaatgattaggagacttctaaataccctccatgaaagactagaaatcgtttatgtaaagcattgtggacgacataggcttgaggctctggattatgttatctcttggaaagagtgttgggttttattctgggacggttgaatgtaggacttgctaagttctatttcagctttgcccttcctcttagggagccccagcctgtggtcatcattgctagtgcatggccttcccagggtcttagtgggaatcacagtgtattcgccacatcactccactgcaactgggtctgaatgccctggctcttctgaaatctctgcccatgtcttcagccttccagaacttgttctctgctcagccttctggtctcccacccttctgcatacacaatttaggatctgactcaggaaaaaaaagggggttttcttacatataatttttgggttcctttttagtactctgtgtcctaaatcccacgtgtcttggagtcagttatgtcctatcttcagtcacatatactactgctatttggtacagacatgtttacttgactttacttcacgtttgccattccactcttcactcttctttcttgcaattcagacagtcctgaggtcattttccttcttcagatccatcccatattcagatgacttaaaatcacctgtcacccatgctgtgctttgagaaatgtttatgttagctactgacatcagggcagtcaagcctctcattgtcattgttattcaaggtaggttgaattccattaaaaaataaaaatccttgaaatttggtttacttattgggaaccacacaatgatatcaaattctttttaattcaattttttttcttttgtggtggaagggccaagaattgtttccttgctgaagcagactcctatcataataatttgaatactaacaacgttattttaatactaacaacgttaacctttaaatcagattgatgttaggttcttatctaagaatgaaatatatccaaccgtagcaggttgaaggtctctcatatatgtaacctgttcaggacgagataattcaaccactttccttaaactctgatctaaatgcctttacattctttgttttaagggccacataaaaatactctgaaacaatttacacatcagaaaaatgctaatactttcctcctggcccagcacatctccaagttaaaaaaatctctaaattctcaacccatagtttaatcatggtaactcccttctacccccaacatagatttttatgtaactgatttgtaactacaaccctaaccctacaatcacaattgtcattacaaaatactaacaaacatgtgctattaccaatagatggttaaaatcacttagggattatgaatcatgtcattcttgtatttatttgtacttattctttgtgtttatttattatgtcagcttcaagctgatttccctttcccttgctccccacaccttttgttgttccttttcagcatcctgtgtatgttagctctaagcccagccaagccccatgccctccacttcagggacagagggtggctcatccctttcgtgctccctcagctccctccccagtgcctggtggctggttggcatcacagccatgcccttgaataatgggcgctggtccacactgcttctgtggtcatgcagtcatcctccctccacagagctgggccaaaaagggctccactgcccttaggcattgagggaatggacattctgagtggcactgtcttgtgtgatcccacaggacagaaggagattccatcaatgggagtagtctgttgctgagagggatcctgaaagatagggggacagagacacactgggaggatccacataaagaggaagcagctgagaacaaaggagcccctgccagaggaatatccttggggagtaaaaagctgactctgccctttctccccagcccattcatcccagcccagacaattcaaatctaccttctatcaggacctagaaaggatgtaaaacggctgggtataaatatcccctgggtctggggaaactgtcaggagcagtgacatcacaggaaaaaccaccaaccaaggccaaggagaccagagcccagcacctcacccagaggaccccagtcagaggccccatctcagacccgaggctagcatgggctgcaggctgctctgctgtgcggttctctgtctcctgggagcgggtgagttgggttcacatcagctgtccttgaattccaagctttttccttgtgatttcagcaacaagcctcctcctgggctctgcctgaattttgtccctttccccccacagtccccatggaaacgggagttacgcagacaccaagacacctggtcatgggaatgacaaataagaagtctttgaaatgtgaacaacatctgggtcataacgctatgtattggtacaagcaaagtgctaagaagccactggagctcatgtttgtctacagtcttgaagaacgggttgaaaacaacagtgtgccaagtcgcttctcacctgaatgccccaacagctctcacttattccttcacctacacaccctgcagccagaagactcggccctgtatctctgcgccagcagccaagacacagccttgcagagtcaccgctttcctgtgcagaaaccttaggggccctccaggaagctgtgggggccaccaaagccttcggtgaacatttcctgcaagagccccgacagaagattcagaacatcatagcacctgctcattcatccatgtggcaacgttacatcctatgctcatatttagagtgtgggttttctttagcgtgtgactctgccctgttaactgatttgaaaaatgataaacacattcagatctagtctttttaaaatccctttttaaattgtaaaataaagcaagcatgctataaggggattgtttggtttaagatgttataagaccctctcaacaaccacctgcgtcactacagagtcataccctgcactggaccacagagtgtcctgtgaggagccaagttcttctgacactttatgcctggtggtctccatgcctctctttctcagtaaccaggggtccattctgtcataggttgctgacacccaaggtcaagcagcactgggtttgggggaatcatagaggcaacttccaggcaagggtcccagggcgggagccagctggagagaacagtagacaactgagcttttggggaatgggtttgagaaatatctgtcaacccaattctattattctatcttccatcttgtctcttctctattgttcttatttaaactccaagctagagcgtaaattccagccctgatcaaagctccatatccctcacagacaccttctctgaaccccgcaggcagcaaatgtgcctctgtccactcccatttgtgtgggcggtaagccacccaagtcctgaggcaagagaccgagggcacgagctgttccagtataataaagaaaatatataaaataagaatagttatactagtaatagattatagatatgatggtatacaaatattatgaataatcagtttgtagcattactcttcattccaatattataataatccttgctctacaattataacctaggaaaaaccaggccatacagagataggagctgaaggggcacggtgagaagtgatcagaagacaagagtgtgagccctctgtcatgcccagacagggcccctagagggctccttggccttgtggtaaccccagagcctgggaggaagccccttgcctagaggaccttggtctagccttagcgtcagtgcctagaaaaagcacccattacttagccgaccaggaaagggagtctccctttccccgggggagttagagaagatattgcgtgtggctaggcttggtgctcacgcctgtaatcccaacactttggaaggctgaggtgggtggatcacgaggtcaggaggtcaagacgagtctggccaacatagtgaaaccctatctctactaaaaatacaaacaattagcgggttgtggtggtgtgtgcctgtaatcccagctacttgggaggctgaggcaggagaatcacgtgaacccgggaggcagaggttgctgtgagctgagatcttgtcattgcactccagtctgggtgacagcgtgagactccacctcaggaaaaaaaaaaaaaaaaacgataccgtatgtgtgaatgtgtgtgtgcctatgtgtgtgagtgcgtgcatgtgtgtgcatggatgtgtgtgtgcatgtgcatgtgtgtggatggtgtggatgtgtgtgtgtgtgtgtacgtgtacatgtgtgtgtgttcttgtggaaactcacccacatggacccaggttctctgggtggcattactgagaggtgctgggtcactggtagagctcataggcagttctggggagtgacaggaaatgtcacagccaattgaatctgcctaagttacagctgatagggttgtttatttcaagattttgtaagttcagaaatagatttataaaaaatccaagaattttctttctaaaatgcactacctaaaacttgctgataattcatttaaatacaaaatatgagaacatgggtctgattaatcaaaaggaacgattgaatacagtttccaggatagggctgtttgatatcttcacactgtttaaatctgtggcctgtatttttcaggctcctctcgtccatcctagcatactaattgcaatgctgtaacattgtttattttgcaatcaaaatgttggttaatgcttgcttttgctagctaaaggtgaactttcagatcaaccctatattggcccttctgggcaagtatacagagggtgtgtgtgagagggtggggattgcaggagtgagggcagggcatctctcttccttctctggacaatcttgagttcatcaggccaggtgtgaatccgtgagactgtggatctttggccacttggaggcgctgtagctccacgatgctgtaagaaaccctgggcagggctggagagtggccaggagaagagggttgaaggggatgcctggctgcctgctgccatcaggggccctttgggattccctgagtgggcctggacatgtggaattaagcacagacccctcactgccaaagaagggtagggatgctagagtcctcagtttgtaccaaggagggagggtgtctgcctctgcgtgggcagtggagggtgaaggggctggggtggcaagggctgggaataagtgtcaggcctgggacagggaggacacaggaaaggcaggtgtgatggggcatgtgggggctgtgctccacccgctccacctttagtttcagggctgtgtaagacaggaagatctcatggagtagcaaagcctgggccctgccaatggttgcagagtgcaggggtggccggcagagggagtaactgggaaaggccagttccccaaggaaatgccagaaactttcctgccccattcagaaagtgactgtgaggcgggtgcttccagccagaggggctcaggccctgctgagctgacagcgttttctttcccagacattctctgctgcttctatatgtgatctgttttaatgctcactgaaatcacaagtatttattattttgactgtttttgtatctgagggaaggcagctgtccctggtctcatatttaataactggctgtcgtgtgctctccaacacctctccaccctccctactcagtacatctgtcccgtcatctggcttcctctctccaggtcccattagcaggaggggaaggtcatgcctcctatgtgaccattagaacctcttccttgacaagtccaagaaacacgtgacttccgggccaagcatatccattcattcttcattgcagccaaaagaaagatgaaattttctaccctgtagactttctgtcactaatgcaatgtaccttgaggaaaagtaacatgaataactgttattcattagttaatttcttttatatcctttattcaataaagtctttgagaccctttctttgtatattttatgacataaaataaaaaatgggaaaaattgtttaataacaaatatttcttactttttagagtattaaggcttaaatttattttgttttattttagttttatattcaaagtactttactcagtttctgaattacaaaaatttccctttctttctctgtctctctttagctacctccctcattttttttgccagcattttaatttaatgtggtaggaacatgtaacatgagatctgtattttaaatagatttttaagtgtacaatacagtattgtaatctacaggtacaaggttgtacagaagctctctagctcttacttatcttgctgaactgaaattttatacctgctgacagcaactccccattttctccattcccagcccatggatatcaccatttttatctttgctttcatgagtttggcttttaggtagcctgctataagcagaatcagggagtatttgtctttctgtgccaggcttagtcacttatcacagtgtcctgcagctttatccatgttgtcacgagtgacggggttttcttctttttaatgcttaataatataccattgtatgaatataccacatttatggactttgactgtttctatgaaactgtctgtcacataagtgggagagtcatttgcagaactgaaagcttggattacatgaatgggcattcacatttcaattctactccatgggcaagacggagaataaaataatgattccatcatttactcttactttgctatacacaaaatagaagtcctgcttttgggaagtttcagttatttagaaattcgactgtcagaagaaaaccctaagacacaaatgcttttctcattgtacacgtgagagaattggctcattggttaaataacctgaccaaattaaatagctattaggatgcagtactgatcctccaaccctgcccagtctaagttccatgtttatagctctatgctataaaatatttcataaagctgccaacctagaaaacattggaaagttttcccctacatcccctttaggcctgctggctctaatagcatcatagtcagagatcagtttaccctggagatggtggagtagggaaagaagtctgaagaggcaccatgactccccgccctgactcccactctaacaccagctcatcaagacctgaggccagttcttaacgggttaacttaagtttttcagtttttttttacctataaaatgagactactactgtccatcagcagagttctagataacctttaatggcataaaatatctagcatatagtagaagcctagctattttgatttcctttgctgatctcagacaacctcgtccaccacaccaatgtgcaaagacagatatggacacattctgccaagaaatcttaggttgagggctcagaagtcacagaaatggaaatatatatgcctgataattcatctgataaaattaactagaggatgtagcatacatatctcctcaggcatttaaaaatcaacattattgatctataaagtatatgaagttaacaggacaccttttaaatgaacatatctgtgatttttgagcaacatatatctatatatgcaaccccacctctatgaagatgtatctgcatcacccagaaagtccctcactcccctctgcaatgcctctgtctgtcccagcaaccaatgatgtgacttctatcactggagagtcgttttgttggcaaatatttttaatgcaaatgtcaaacctcttctgaatagtcctgttgaatacatagctaaatcatcaaggcagggaggagttcctgggaggttttatggttttagaagtggttgaagctaggtgagctacctgacccatggtagggacaattctatctggagatggatgttgtgccgaaataacctcaaaaggtcttttcggctggtagaagctgattctacaaaatttattcattttcattcgtttattttctcgtcaattcattcaatcaaacaattttatgttacgttttgacaaaagttaatcatctttaaggaaattattttgagttcccatcagacacacatgcagctgggctttgtgttcacacagtgagcatgctggggtcaagcaaaccatgatcacagtgacttcattgacagatgatgtcttattgggagaagggttctctttgacttgaccccatgtgtccaacccataaaacctgagccttaggctaaaatccatcttccttttcttaccctgccttgggcaccaggccactgtgctgtgtgtttctctgtctcctgaagcagagtcctgggcgcagatttggaacctattcgtgggcttgtttgatcccagctgtgactttcagtaccagggggtcctttgctgtgacttgaatttgtgttttctttactcttaagttccacagatgctgagtgacccagaccctggtcatgctcttgtgctgaaaggaaaccagcacacggggaggtgagcagtatatgaaacaaaatcatgtatttacaaccagtggcaagacttactggcaggtgctttgttcaaacactgttaggaatttgaagatcatggcagtagaatgtgaaaccaagtgcagggtccttccaaatgcaggcctctgtgcaccaaagatagacttttggagctcattttttttaaacaaaaacggaaacaacactctatgttcatggctgtaggccatgcgagaatatttttttaaattttaatttaatttttatttttccatatattattggggtacaggtggtatttggttatatgagtaagtttttagtgatgacttgcaagactttggtgaacccaccatctgagcagtatacactgcaccatatttgtagtcttttatccctcaccccctcctgctgtttccccaacacttccccaaagtccgttgtatcattcttatgcctttgtgacctcatagcttcgctcccaaatatcggtgagaacatgctatgtttggttttacatttctgagttacttcacttagaataatagtctcccatctcatccaggtagatcattccaaatgctgtttattcattcctttttatggctgtgtagtatttcatcatacatatatgatatatatatatgatatatatatgatatatatatcatatatatcatatatatatgatatatatatatatcacagtttctttatccactcgttgattgatgggcatttgggttggttcctttttctttatcactaaattaatggcagcaataaatccagaacattccttattaccctaaagtcagccctgtctcccaaactcccttacacatcaggacacctttgtgcccatagatcatgggcagtgcttggcagccaccactgtgcacacagagagggtagtcagtagcgttaggtggttctgcctgctggggtctcaccccaggaacagaaagcaggagccctgggtggagctgaaagtgctcatctgggtttgtcaggagtcccatctgtcagtgaattcacaagaaacagaacaaaacaactcttccaatgttgatgagcctgcccctgggatttggaaagctaataacagagaaaaccaatatagacaaaagattttaaacaggactatcggattatggtcatttaagcaaattagaaaaggatacttgaaggagtatttgggacacaggaatcaaaaacaccaggaagacatgaggagtttttccaagattgtagactatagcaatacttagataaccaataccagtgtattaatgagtaattattagtattattattttgagatggagtcgcactctatcatccaggctggaatgcagtggcatgatctcggcttactgcaacctccgcctccctggttcaagaattctggtgcctccgcctcccgagtagctgggactataggtgcacgtcaggatgcctggataatttctatatttttagtacagatgggatttcaccatgttggtcaggctggtctccaactcctggcctgaagtgatctgctctcttcagcctcccaaagggctaggattacaggcatgggccactatgcacagccaagtaatttgtatcatcatgggaataaaaaatatacattgagttacaaactaattaccaaaagatatttaaaaaatggtagacttgcatcgattcagacaaaggcattcttcccatccaaactgttcactggtgcattgatcttgaatttgaccatctggggaaggggcgtggcctctcctgacagcaaggctctggggcccaggcagggagaatgaggtctcagaatgacgcccttgaaagacgtgttcccttttcaccaatgcacagacccagaggacccctccatcctgcagttcctgccatgagcctcgggctcctgtgctgtggggtcttttctctcctgtgggcaggtgggtcctgggcggggccccttgtgtggatttcaaggcccatcccctttccactggagctgtagcatcagctttgtccttctctgcaggtccagtgaatgctggtgtcactcagaccccaaaattccgggtcctgaagacaggacagagcatgacactgctgtgtgcccaggatatgaaccatgaatacatgtactggtatcgacaagacccaggcatggggctgaggctgattcattactcagttggtgagggtacaactgccaaaggagaggtccctgatggctacaatgtctccagattaaaaaaacagaatttcctgctggggttggagtcggctgctccctcccaaacatctgtgtacttctgtgccagcagttactccacagtgctgcacggctgtctcctctctgcacagaaaggcaagggaaggtgctgccctcctccgcagcacagattcagcgatgcccttggtcctagcaccgaaaactttggagccccaatgggcccgggcggtgcgagccttcatctgtgccaggtgcctctgcagtcggtctcggccaggcctggatcggtcccaggacctcagatgtcttccttgttgccctccggtctttcctctgaggtgtccttttgggctagtgccaggggtttcccagctctgactttcctagtcattcacctgagtctgaggcctcctaggtgaaataggatttgtatttcagatccatctagactcccgtctctacctgggtaccacgtgctttcctctctctatgatttttcctcatgttgaaccctacggtggtctcagctgcagcctgcatttcctatattcacagtcgccctccaaggccttgctgggtttctcctccccgacctccctgcccttctctactccagccatgttgagagactccaaagtccatttcctgtgccctgggctggagccttcctttctgtagtggtcaacacctacctgtgcttcagatctcagcatcatcagccctagtgataatcaccattatgcttcccttggctcccagctgaggtcagtttccctctcataatctctcatggtatcatgtgtctgttaatcagtagaatttagcacagttggaatcttccaagtactttaaaccccatgaaggccaaggctatgcctgggttataaatcagcagctgagcctggcacaaggggagatgcatttcagagaatggatgagtcagtgatggagtgagtgatgagtggatggatgaatccataacaggagcaccctagatccattttacccttgcggagatctggctgtaagtacaagaactcttacccttttgattgctgggctacgggaggtccttgaaattaatggggagtcgctatcatgggcggccccaccttggtcaaagattcctcctgagtctgcagcaccagacctcctccaggtctctgtgctctccttcagactctttcccacaacaactctacacagatcagagatccctttccagaaacccatgcatagagttgtgttattttggaaccacttctggtaccaaaaactccattaggtttacatcaataaaacagaatcactaaaagtactatggagaggaggatttatgacaggagttagaccttatataaatgtagggggagctgaggaagagaaggtctggaggggagatatagctaggcagatttaattcatgattaatgtgaccgtgacctcttattctactcaaaggagagcatatgatttcaacaaaaaaatattgattttcctttgtaaaagtttgatccaaatagtgagctatttttgtcccataattgtcttaagttggctaatggtggaacaaatccgactttgatttccttgaaagaacaggaaaaaaaccgtcattcatatacagtcttacaggctctattttatggaggaagcataataaataggaaagagaaaatcagaattctcttctggaacctacattgggactgtcctcagagcaggttgtgatgtgaggaatcaaatctacaggggtatttcgcagcttggagcgcagcagactgttcccgaccccatgcatttgggggtgagaccagagacagttgaaaaactatggaatcttgacattctgcactctcaagcctggcctctccctgaatttcacagattaacatcagaccaatttattccgactattaaaagtattagaacaaaaaccaaggaggaccagtgagcagaagcaataaaccattaaaatggacatcctaaagatttaaaattttgccatcataagatgtgaacgtttgaagagctgcatttaaatgaatacaagaagggactgaaacaagaatacacacaaaaaagagacggcccgaaaccatcaaaaaacattaaagaaataatcaaatagaatgtctagaaatcattacgattactccacaaaacaaaatggaagctaaacagcagattcaatgcttctaaagagattgttagcaatatcaaaggaggatctcaagaaatcacctagaatgcagcacagaaaattaaatgtaaaatataaaaaaagtgaaggaacaaggaaaaaatgaagtttctagaatattagaaagcatataatgttttattgaaacttttcttactttcttgtatataactgacgtttcagaaagagaaaataaggcaaatgatctgaggtgattgtgtatgtgatgctagctgagaatgttcctgagatgtttgaggaccgaaatcctcgttcaagaattcagatgaattgcaagacaagtaggcaggtccctgtgaaactgcagaccacaaatgacaaagaaaagattttaacagcagtcaaaagggaaagataaatatcctccaggggaatagaaagaaagaaataatcaaagtcaagaaagaggattaaaaataactgttaaatcagaattgagattgataaaaaatacctacaggacaggacaagaaaatatggaaaaccaaaataattctgtgagtttgccaccaaagtatcttttcagagttatagttaacaagggtgggaaatgatcccagaagaaatgtatgagggcagtttgtgagggaacccatgtgatgggacaatcccgttgggcacatgtgagtgggggaatggaggaggctggggcatgaatggggatggcagaggggaccctgacttggaggaaagacaatgagctcatcccatggtgcctggtgttgggggcactgttggcacatcctacagaacgtgctcagcagacagaggagcggctgtgggatgagaaggtgaactcggagatgcagcgtgaggcctccaagtccagacagcatgggagcccaaagcgatgtcccatgcaataacgttgtttacaaggagcttataaatatttaaagtagtcacccaagtgtggtctaatataaatcctgtgttcctgaggtcatgcagattgagagaggaagtgatgtcactgtgggaacttccgtgtaaggacggggcgtccctcctcctctgctcctgctcacagtgatcctgatctggtaaagctcccatcctgccctgaccctgccatgggcaccaggctcctcttctgggtggccttctgtctcctgggggcaggtgagtcctcagacaccaaccattctcattgtgtgtgtgtgtgtgtgtgtgtgtgtgtgtgtgtgtgtgtgtgtgtaggggtgggctgtgtgcattcgtgtgatgactaaaattattttcctcattctgttcccaactttgtctccacagatcacacaggagctggagtctcccagtcccccagtaacaaggtcacagagaagggaaaggatgtagagctcaggtgtgatccaatttcaggtcatactgccctttactggtaccgacagagcctggggcagggcctggagtttttaatttacttccaaggcaacagtgcaccagacaaatcagggctgcccagtgatcgcttctctgcagagaggactgggggatccgtctccactctgacgatccagcgcacacagcaggaggactcggccgtgtatctctgtgccagcagcttagccacagcatggcacagtcgcctccttcctgctcataaacctcatccttctctctccttgcagctcctagacacccttaacagaggcttctctttgcttctccctccccatgggaaacaagtagatttggacctcagcttgtcctttgggtagaaagagaccacagatttacccttaagacacagtaactgtaaatgtgggtggtggaagcaatcgtggcccaccgggctattggagtcctcagagccagctcattgctctaaggcaagcactgggtgtcttagccttggccttcagggctgggacacacagtcttctttggggcctgggaggttgctgcccacatagagaagcttcgggcatggctgaggaacaggtgtcttcccctacatgtgttggggcatctgcaaggtctgaagcttcatccacaagaacattctttcttctgaagcctcttctgttacattggaagttttctgcaatacaagagcaaaccattcttcctgtttgatttaaaagtctttgtggcttttgtggccattacttggtgaatacagccaagataacaataagacttcgtttcttctgcctagtgtaagcaatgcgagttctttattttgttttcatttaccactgctcctgtcctgagagactgaagcatgcgtccactactgctccagtatcaacttggttccctaggaaatcgggtttctagaacctgaatgctgacaaataagagttgtgtacatgtataccatgcaacctgcgtttaaaaatgtatgtacatggtgaagtgactaaatctagctaattaacatatgcagtacctcaatccttatcctttcctgtggtgagaatacttgaaatgtactctgttagcaatattccagaatacaatccactgttactaactttagtcactgtgttgtacaatagatcttttgaacttcttcctcctatttgagtgaaattttgtatcctttaaccaacatctccccagcaccccatctccatcccaacctctggtaattgctgctctagtcttttgatttgaaataatttccctgaggtctttaacttgagaagatggagttttaaaaacaataatgcttatattacttttgttttgtttgttattttacatattgcaatatagtgtttgttgcaaatataaatgagtatactgtaataaaaattcttcacctctctttgagtgaagctacatttcacatatatgaaatttcaagctgtggtcagagctgacatgattatggatcatgggtttctgggagtcctcagagacagccctatacacaaaggttaagatagattatcccagacccagccaggacagaggtgccctgagtcctgcagagctggttggggaattatagttccctaaattcacttatcagaaattgtggtagctcagataccaaatttctttctctagcaaatgatgatcgttggcagggattgttctgaatccattctaattgttctatcaacagatcattccttttttagttgccctgtgtgtcctgggagtgaataagtcccaggcacagatgggaatttcctgaccttaggatgctgttccaaggacttccttgctagaccctgtctccagcttttcccacctttatcctcatgacccctaagacaaatggtcctaataatggaccagctctgaaacttaagattgaacagaacacaaaccacaactgtaaacactgatgctgaaagaagtggtaaaaaaaggtgagcagggtttcccacctgcactgagagttaacatacaaggacagcaaagggaaggttttattaataagcaaacaagaagcaataaaggccctgctccattgaatgtaactaatctctttgagttaaaaaaggagcacgtcaataaaagtatttcaaatcaaagtctagaagtttccaaaccagccagcacaaccctgagagctctgtgctctcagcaacttcagagaactcatcaatcctttctgggctcaaacttccctttgtccactcgaagacccagggtcacactctcatcctattacaaaaacaatgggctttgctatcgttgctgatgcctcatttctaggagttgagtattaagcactgaagagctttgaaagttgggcttctgagtcaattgatgtgctggagccaacttttctgactcacgagagacaaataggcacactcttcccagctccccattcagtgaagccatgttgacagcttgaaatccaccatagtgcctgtgttgatacaacagaaattggtaagtactactaggcatgtgcccacctccacagacactcagtgtaccagcacatcactggaatgttttctgagacagtgatgtccctgttatgtcgtcatgtcttgtggggccaaaaggactccgaattcacctcctctctgttcttgcttttagaaaccataatctaaaataacctcacctgacactatttctattcaatctccaaattccctcactttgtgggtctgtgtctcctgtaagcatgtcagtccacaacttgacaactattttgaatgtagctaaaggatacagtgaaccagtttattattttcaaattatccttccttgcatggaatatgtagatgctgcagtcattgggaacagagatggggcaagcagcagctctgggccgtgaaccactttagagtcagacaattcttcagtggcacagacacacccttgggcatggactaatttgctttggaaactaagcagttccacaccagtcaccaatgaccttggatctatttccagctgagaggtcaaaaagatcacactacctaaatgtcctcctctccaatatatagtacagcccccatccatctcagtccctggaggtcatccagagctcccagagaatctctgctctggggcagaatcaccacgtctcctcctcgccagctccccacaggctccagcaaggctttcctgccaggtgcagggcatgggtgtggctctgctgtctctcaggtagagggaggccatacgatgatgtttgtataagaaggattgggtttcagaggttcctctcaaatacttgacataattttatttgctttttgtttcactctacaatgtcaccatttaggagagcaattattttggttgcattatttatggaactttgaaagatttttgtggttaaattaatttaagaaatcattcccattgtgcatcttttctgttcagatataatctgaggcagtgaaagaaacagcaatgattctgaaagcagtcacttacatgccctctgataaaggcattgttcaaggttcattactcacacctaactttcagtctactggaaatgaaaggcacagagttgggggcctgtgatcaagccacaagagaggactataccagctactctgggacttcagggcacgaagagatgacctcccctttagactctgctcaacgacgaaggaatgagttggtccatgggaacctgaggagcagaaattccgggagcctttaactgggacggagcaaggactgtagagcaagtcattggaaagggaaatggttcatctggtctgtcacagaagatagtggatagaaaggtcatataatccccagttccctggctgatttgcttccttatgatactattttgcagcagcgtaccgtcatctcacaccactcctctacctcttccagaatcatctcctccctctctgctgctcagatcagcacatgtgcattgcacaagctattcttttactgtagcagaccttttgctggtcttaattatatccatccttattttcccattagatactgctccctccatgattgcttattgccttgcaagggatcctttaccccgcgcccccagacagagtctcactctgtcgcccaggctggagtgcagtggcgcaatctcggctcactacaagctctgccttccgggttcacgccattctcctgcctcagcctcccgagtagcgagtagctgggactacaggcgcccgccaccacgcccggatgattttctgtattttttagtatagagacggggtttcaccgtgttagccaggatggtctctatctcctgacctcgtgatccgcccgccttggcctcccaaagtgctgggattgcaggcagaagccactacgcctgaccaagggatcctattttttatatcccagttttactttttattaacacatatctgaccccatcttgaaggtaatcacattatctgcctagacttttgctaatctttatttttatggtaccattgtcatttggggggacatatttgtttatctttggtaatggaaatgaaattacgttacacttcactttctgtgttttcttcctactttagggtaaatattatttccttctattcttcctattctattcctctctctttagatagttttaagggagaaaatgtcagtgagactgtaactgcagctatggggtaagaattatttagaatgagggtgggatattaagcttgataactcaaaggaacagtcagggttaaaactaatgttgggatcggggttcagagaagttgcttgtaaaacctgcaggatggcacttctggaatagtctcccggctccctctgcagacacttcccagcatcccttgggccatttcccttgcaaaagcaatgatgaaatttcacttattggccacaagatggcactgtggtccactgggctctaagagactctggggagagcctgggagagcagcctaggaaggaaagggttaagaaaaatcagggctggcatccaatatcatgcagatgttgcagcagttttcagttattgctagactacctacagttatacaacatacaggaaatacctctaatctttaatgagatccacagttgaagaagtttggcctggcagccttggtgtcaagggcaggtgcagacagaggagcaactatctcagaggaaaatgggaaagtgaggggtgggctgtggcttaagcccagtgcgtctctgctgcaccccgtcttccctgcagctcttaccaggcaacagcctccatgagagtaggtggatcctgcctgagcccagtcagaatgccccggactaggtgaactctgtaggcatggggagtaacacaacaggcccacctttcacacgttttttttttttttttttttttttttttttttttttttttttttttttttgagacggagtctcgctctgtcgcccaggctggagtgcagtggcgcgatctcggctcactgcaagctccgcctcccgggttcacgccattctcctgcctcagcctcccgagtagctgggactacaggcgcccgccaccacgcccggctaattttttgtatttttagtagagacggggtttcaccgtgttagccaggatggtctcgatctcctgacctcgtgatccgcccgcctcggcctcccaaagtgctgggattacaggcgtgagccaccgcgcccggcctcacacgtttccaaagtctgggctccaagcctttttttcccctttcctctgcagagtcctgccacttctgaagccttgtcctcactttctgcctgcctctcccacagcccccatggaggcagggatcagccagataccaagatatcacagacacacagggaaaaagatcatcctgaaatatgctcagattaggaaccattattcagtgttctgttatcaataagaccaagaataggggctgaggctgatccattattcaggtagtattggcagcatgaccaaaggcggtgccaaggaagggtacaatgtctctggaaacaagctcaagcattttccctcaaccctggagtctactagcaccagccagacctctgtacctctgtggcagtgcatccgcagccctgcacagccaactgctctctgcacaaaaaagggcagccacaggctggaggtgggcactccttcccaaggcctctatctcaaccaggagataaagatgccttttttgaagctcttctcagatgtcccagcaatgggctcccagtctgtgcatcctcctgcagcaggaacttcagtgtgagctgaggtccatcactgtgatgtggatgcacgaatgcaaacaacacttaatgttattttactcaattcagaatattctggcagttgcgtaaaataggaatagtagctcccaaaatgaaatttgtgtctcattttctttatgagagaaaagaaaaaaaaacagaaagcagctgggcagctttaacctgcttgagtgatctgggattctacaagtctacaagtggtacaaagaacatcaccttggcctggattccaatggataccaaacactacaaaaagtattgaaaacaatttataaaagacctaagtaaacaatctacttataggaaatgttagtagatccatcgcatagtgccattatacctgacgatgatcaactagtgaaattattatgtagagattatcagctaagcctctacttattacctctgagcatagagcagtgtttgagccttctgagggtatcttaaggaaggaacttaattcttaccattactttggcttggattaaaatccatgagcttgtcgtttttattgtaaaatattacagaataataatgatcaaacgttttattttcctctagcgtttattcctctttagaacgtgcaggttgaagctcacacacatgagcagggttccttaagatgagatccattaactccaggactgggaggtacacagctggccttcacaggaagtgcaaaccccaaatgcagtgacccctcctgtgtctacgctgtgcccaatacccctctgtgaggctgccataaaggcgggcaggctccttgcttggcaaaaaaatcagttcaccaattggccactttgctgaagaccagaataaaaggctaaattgtgagaatgatgaatgcccaattcccaaattgtgaaatgtgtaacagttcacgattcttggaataatttcaaccatgtgtggtttgttttttttttaagtttttctttgtcgacagctttctttcggccactgatcctcagttgtttcccagccgccttgtcagctgatctcattttgatgctaatttttttttttttttgctagctttgggattatttgttcttgttttactatgtcctctaagtgtggtggtaggttgctaatgtgagatctctctaacttgtttatgtgggtgtttcgttctgtaaacaatactcctaacactgctatagctgtgtcccagagattctagtatatttaatcttggttttcattagtgccaaagaatgtcttgttttctaccttcattttatggcttacccaagtcattcactagcagattgtttaatttccatgtaattgtatgattttgagagatcttataactcttgatttctattttttttgtgctgtggtccaagagtatggttgacatgatttcagttttttttataatttgtttacaattagtctgtgtccaatcatgtggttgatttcagagtatgtgccatgtgtagatgagaagaatgtgtattatgctgttattgggtggagtgttctgtagatgtctgttaggaccacttagtcaaatgttgagtttagtttatgaatatctttgttagttttctgccttgacaatctaatactgagtgttgaactcttccagtattgttgtgtggttttctacgtgtctgtaggtctctaagaacttgttttatgaatccagctgaaccagtgttgggtacctatatatttaggatagtgaggtcttcttgttgaattgggccctttatcattatgcaatgcccttctttgtcatttctgataattgttggtttaaagtttgtattgcctgaaattagaatagcaacttctgctcttttttgtttcccattggcttggtcatttttctccatcgctttatgttgagcctatgggagttgcatatgagatgggtctcccgaagacagcatacagttcagtgtttcacttgtctatacaactggacgctctttttttttttttttttttttttttttgagatggagtctcgctctgtcgcccaggctggagtgcagtggcgcgatcttggctcactgcaagctccgcctcctgggttcacgccattctccggcttcagcctcccgagtagctgggactacaagtgcccgccaccacgcccagctaattttttgtattttagtagagacggggtttcaccgtgttagcccggatggtcttgatctcctgacctggtgatccgcccgccttggcctcccacagtgctgggattacaggcgtgagccacggcgcccggcagctcttttaataataaacgacttttatgtgctgtgtttagcctgtttacattcaaggttaatattaatacgtgtagatatgatcctgccattgtgttcttgcttggttgttatgcagacttgattgtgtagttgctttataatgtcaatggtctatgtacttgagtgtgttttttggtggctgttagtgatctttcatttctatgtttaggactcccttcaggacctcttgtaaggcaggtctggtagtaacaaattccttgaacatttgcttgtctgaagggatcttatttctcctttccttatgaagcttagtttggctggatatgaaatatatagggatactggttggaatttcatgtctttaagaatgttgaatattggctcccaattgtttctgccttgtaaagtttctcctgaaaaacctgctgttagtctgatgggattccctttgtaggtgacctgccttttctttctagctgactttaatattttttctttcatgttgaccttggagaatctgatgactatgtgtcttgggggtggttgtcttttatggtatctcataagaattctccgtgtttcctgaatttgaatattaaactctctagcaaggttagggaattttttgtgctcaatatcctccaatatgttttcaatgttgcttactctctctccctctctttcagggacatcaatgagtcataggtttggtctttttacataatcccatatttctcagaggtttacttcattcatttttcttttttttccattctttttttgtctgactgaattgattcaaaaataagtgttcaagctctgagattattttctcattgattatgctgttaatacttctgattacattatgacattgttgaggttagtttttcagctctatcagatcaattttgttctttcataaaatagctatttcatttttcagctaatgtgtcattttattggattcatcagattccttagattgactttcagctttcttccgaatcttgatagtgtttgtttctaacctgtttctgaattctatgtctatcatttcagccgcttcagcctggttaagaatcattgttgggaagctagtgtgttcatttggtgctaagaaggcactctgactttttaagttgccagagttctttcactggttctttctcatctctgtggtctgaggtttctttaatcttttaagctgatgtcttttggaagggttttttgcttttatattctatgcccttgagggtttcactgttacataagctgggttcaggagactggcttcatttatggaatatttcagggggctaagattcagctcagtatgtctgggctgcgtgttgtaggcctgtggtgctggaattaagcccagagctttggtttttgaccccttaaggttaaagcacctgctacaccagaggggctgaggcgttcccaattccactggcaacaacactgcaatggggaatgccagccaaagtactttttccaaatggtggcattggggtacatgctcagaagcatgtgccaataatggcaatgtggcagtttccatacatatgtttgtgctagcttttttattattatatagtaaacttctttgcctctttttatagttattgtcttgaaatatattttatctgatatagatatagctactcctgatcttttctggttttcacgtgcatgaaacatctttttgttatctcttcactttcaatctatatgtctttttaggggaggtgtgtttcttgtaagtgacagatcattgggtcttatttttatattcattcagctactctatgtcctttgattggtgagtttagatcatttacattcaatgttattgttgataactaagtactggctcctgccatgtatttgttttctggttgttttgtggtcttctcttcatttgtttcttctttcctgtcttctttttagtaaaggtgattttccctgataacgtgttttcatttcttgtttgttatttttgtgtatctgttgtatgtgtttgtatttaaagttactacgttgcatatgtttgtatttaaaattactatgcatgaggcttgcaaataatatcttatactgatgacaacataacactgattgcctaagcaaacaaaccaaaaaaaaacagagaaaactagtaaaaatcttatattttaacattgtccacctacctttcaactttgtgtcatttctatttatatcttaggcactgtctatgtcttgaaaagctgtagtttttttttttaattggttcatcttttagtctttataagtagtttacacgccgtaatcacagtattataatattgtgtttttcttcgcactattatcagttagttttgcacctgcagataatttcttatttctcattaatgttcttttctttcacgctgaaaaattatcttttgcatttcttctaggacaggtctggtgttgaggaagtccctcatattttgtttgtctggggaagtcattatttccctttcatgtttgaagggtattttcactgagtacactattctagtattaacgtttttttttttttagcattttaaatatgtcatgctgctctctcatgacctgtaagatttgcactgaaaaagtctgctgctagactatattggtggtccatggtatgttatctgtttcttttgctgcttttagaatcctttctttatccttgaaattttgatttatccttgaagtttgattattgtcttgatgtagtcttctttgacttaaatatgcttggtattctataatcttcttttacttgaatattgatatctttctctaagtttgggaatttctctattatcatagctttgaataaactttcagccctatctctctctctacctcctctttaaggtcaataactcttaaagttgcccttttgaggctatattctagatcttgtatttgtgcttcattaatttttatccttttgtctcctctggtggtgtattttcaaatagcctgtcttcaagctcactgattcttctgcctcatcaattgtgaggttgaaaccctgatgcattcgtcagaatgtcaattgtattttcagctccaaaatttctgcttgattgtttttaattatttagctctcttccggattctgaatttcttggctgtgttgtcttgaattttgttgagtttcttcaaaacagatattttgagttctgtgtctgaaatgtcacacatctctctctctctctctgggattggcctctggtgctttatttggttcatttggtgaggtcatgttttcctgaatggtcttgagacttgtggatgtttgcctgtgtctgggcattgaagacttaagtatttattgtagtctttgcagtctgggcttgtttgtactcgcccttggaaagcttttcaggtatttgaatgtacttgggtgttgtaatctaagttttctatctctgaaaccttatctgcattagggagcaccccaagtccagtaattctgtggtccttgtggactcacagatatactgccttggtggtcttggataagatctgaaagaattctctggattatcaggcagagactcttgttctcttccttcactttcactcaaacaaacatctctgtctctctctctgctgaactacctggaactgaggagtagtggtacaagctccctgtggctgccatcactgagaccctaggtcagaaaaagccagcatgataatgggtctcacccaaggtccacagtaaccactgccttgcttgttgcctatgttcaaggccccagggatctacaatcagcatgtggaaaagtcagccagtcttatacccttcccttcagggtcacgaggccccctgaccccaggcacatccagagatgttatccaggagccagggcctggagtcagaaaccttggggatctaactggtgctctattctgctgcaactgagctggcattcaagtcacaagataaagttatttccactcttccctgccctttcacaaccagaggagtctctccctatggctaccaccgccccaggcccacagcaagaattgcctgactattgccaatgttcactcaaggcccaaggactctttagccagcttgtggtaaatgctgccaggcctgagactcttctttcagggcaatgggctctcctctggcccaggactggtccagaaatgcaatccaacagcaaagtcctggaatccgggaccccaggagcctactttgtgctctactccactgtggccaaggtggtagctaatctgcaagacaaaggctcctttattattccctctccttttatcaagcagaaggagcctctcctcatattcatcacagctgggaatgtgctgcatcacacctgaaaccagcatgtctcagattctcacctaagctctatggcaagtactacctgggcattgctgctgattattcagggcccaagtgctctttattcagcagatgatgaatctttctgggccttgttccttccccacaaggcagcaggttcccttctggcccatggtgtgtttagaaatgtcatccaggagctagggcctagaattggggcctcagtactctgctcattgccctatctgactatggctgagctggtgtctgattttcaagaaaaagtcctctttactcttccctctcctgtctttaagtggagagaaggtatattaggccattctagcattgctataaagaatacctgagactgggtaatttataagaaaagaggtttaattggctcatggttctgcaggctgtacaagaggcataacactggcatctgtttctgggaaggctccaaaagcttataagtatgcagaaggccaagggagagcaggcgcatcacatcgcaaaatcaggagcaagagatagagagtggagggtgtattagtctgttcttatcctgctaataaagacatacccaagacggggtaatttatttaaaaaaaaaaaaaaagaggtttaatagactcacagttccacatgtctggggaagccacgcaatcatgacagaaggtgaaggaagaccaaaggcatgtcttacatggcagcaggcaagagagctttcacaagggaactcccatttataaaatcatcagaactcctgagacttatttactatcatgagaacagtatggagaaaaccaccctcatgactcaattatctccacctggccctcgccttgatacatgatgattattacaattcaaggtgaaattgggtggggacacagagccaaaccatatctgagggggagctgccacacacttttaaatgacaagatcttgcaaaaactcactcactatcgtgaagacagcactaagccatgagggatctgcccccatgacccaaataccacccaccaggccccacctccatcactggggatgacaattcaacatgagacatgggtggggacaaatattcaatctctgtcattctgccttttttctctctcaaatctcacatccttctcacattgcaaaatacaatcatgcctttccaacagtctcccaaagtcttaactctttccagcattaactcaaaagtccaaagtctaatgcctcatttaagacaaagcacatctcttccaccttactagcctgtaaaattaaaaatatatatatttactcttaagatacaacaagagtataggcatggggtaaacattcttcttccaaaagggagaaattgggcaaaagaaaggtgctacaggcgccatgcaactttgaagcccatcaggagagtcattaaatctttttgtttgtttgtttgtttgtttgtttgtttttgagacagagtcttgctctgtcacccagactggagtgcagtggtgcgatctcagctcactgaaacctctgcctcctgggttcaagtgattctcctgcctcagcctcctgaatagctgggattacaggcacgtgccatcatgcctggttaatttccatagttttagtagagatgggatttcgccatgttggccaggctgttctcgaactcctgacctcaggtgatcttcctgtcttggccgcccaaagtgctgaaatgataggcatgagccactgcacccagccaaagtcattaaatcttaaatctccaatagttcttgactccatgttccacattcagggcacacactggtgcaaagggggactaccaaggtcttgggagttcttcgtctgtggctttccagagttcagcccccagggttgctttcacatgttgttgggtgttttggcttgtccaggcacagggtgcaagctgtcagtgacaatatcgatctggggtctggagggcagttgtcccctttccaaaactccactaggcaatgccccagtgggattctgtatggggcctccaacctctaatttcctctctgcatttccctaatagagattctctgtaaggtttccacccttgcagcaggcttctgcctgatcaccaaagattttccataattctctgaaatctagatgaaggctgccaagctttcttgattcttgcattatgtacacctgtaggcttaacaccacatggaagccaccaaggctatagcttgcattctccaaagtggcaactcaagctgtatctgggcccctttgagccacagctggagctggagcagctgggatgcaggccgatgtgttctgaggctgggcagagcagcaggaccctgggcctggcacacaaaactattcactcctcctaggcttcagggctggtgatgggaggtactgcctggaagatttctgaattgtcttcaggcaattttcccaaagtctttgctattagcacttggctcttttttaactatgttaatatctctaacaagtggtagctccacagcctgcttgaattcttctcccacaacattttctttatttgccacatggttaggctgcaaattttccaaacttttacactctgcttcctgtttaaatatacattccagctttcagtgttttctttgctctcacatctgagtgtaggctgttagaagcagccaggccacatcttcaacactttgctgcttataaatttcttccaccagatacactaggtcatcactcgcaagttcaaacttccacagattcctagggcagaggcaaaatgcacccaagttctttgctaaggcataacatgtgtgacctttgccccagttcccaataagtttctcatttccatctaagacctcaacagcctggacttcactttccatatcactatcagcattttggtcacaaccatttaaccagtctctcagaaattccaaactttccatcatattcctgtcttcttctgagccctctaaactcttccaacttttgcccattacccagttccaaagctgcttacacattttcagttatttttataacaatacccaacttcttgtatcaattttctgaattaggccattcttgcattgctgtaaagaaatacctgagactaggtcatttacaagaaaaatggtttaataggctcatggtttttcaggccgtacagaaggcataacaccagcatctgcttctggtgtagtctcaaaagcttacaatcatggaagaaagaaaaggggaggcaggcacattacatggtgaaaacaggaacaagagagagaaagagagtgtgtgggggagggagggaaggtcatttaaaacatacttttaaatgaccagatctcacaataattcattctctattctgaggacagcatcaagccataagggatctgcccccgtgatacaaacacccctcaccagcatggggattacaattcaacatgagatttgggtggggacaaatatccaaactatatccgaaggagtctcacctggagctgtgggctgtgctgcctgaggttggggatggggtggcataagcaatttcttggccaccccagctggtatctcactaggtcatgtgtccccaagtccactgactctgagttcagcacagcaccaagacttgcccaggaattgtagtccttgtggcctggactgtgtttcaagtttatttaggaccctaaggcactttagcccatggtagcgaggctagccagaactcaggttctgactgctgggataagtgattcccctctgactagggctggtctaaatgttcttccatgagtgctggctgagtcctgcctgctgttgctatccactgtgtgaggacagcaacgacttccaacacaaagtcccacagtcactgcactctccctaacccaaatgcacagactgtctctccaagccatatggccactgccaggggatgggggaggcatggtattggcaattcaagagtgtcttttctacctctttagtgcctctttcagtgatatgaagttaaaaccaggtactgtggtcacttagttgatttttggttcttatgaaggtgctattttgtgtggatagttgttcagtttgatgttcttgtttggaggaacagttaacgaaggcttctatttggccatcatgttctaccttcttcttaatcattctattgggtctgtagtgatatctctatgcatttttctataagtaattatatttacatttttttctgttttcattagtaatttctatctccttttttcaagtgtctgcttttaaatttgcctgttttaaaatcttacgttgtttgttcttatattactaatacgtataatatgtttgtattttttatataaaccttttgaccattaaatatattgagttagtcttctcccagagtggcctgcctttgtactttctgaatagtgtcttctcatgaactgaaattttctattttttgaagtttaattcatatatatttttccttttacagtgactactctttgcatttcaaggatatcttgcctataacagaattatgagttgttccattctgttacttactctactcctcctcattagtagccccatccctttttctttgtcatcacttgaaaatgctaaatctccaaaatcacaaattaaatattccactatctgcctacagcttcttatcctatcatacctgttctttgatattattgacatctcctctccactggtaaatattctttctatttcctagggtccctacagaatttctttactcattctagagcagatatgaggatgctacgtgttaaaaatcctagcttgcaaatagttattattttatattgatactcttaggcttccctttcatttacaaaaataaacaagaataaatgcactgatctctttggcatggcagaagctgaatgctgtcagagtaagtcacaccggcacaaactgttatcatgataaatacatagtcactaagcttacctgcctttatatccctgctttgagattatagtatggtccttttactagctcagtctttcaccctcctcaaatattgtttcaaatatttaagacttttttccagtccctaattcttctcttcttgcctcttaagccaaaggcacatcttgttaggacatgctggaccttgcatctctgcaattaacacagtttttctactgtgtgaaggtgtcaccttgagtgaagatggttcttgcggacgggaacccagtgtggggctcaactctaaagggatgtggcaatgggtctgaaaatgggttctcaatgaagcatcacagtgtccactatgtttatgaagtagatccaccctgccacagacttctaggtaagagtaggtgatcatgcatcatgattctctactagaacctctttagattccatgtactcaagtcatactatttattttcatactgcatattttaatgcttctcccaactcttttggtaatgctaattgcatgtgatagaattttcgttactgctatttgcaaagagtgagaaattgtattatttctaattgcagaatgttagaacttgtattattttgttaaagcaaaataagatctccaagactcacttttccattgctatgtctattaaccatggtcctggaggtattgaggagggatgaaaagacaatttacaaaactgtggcaaggttaaggaacccagtaagagaagagaaaggattatggggatagtatagtgagtgctcttattcacattggcctaaaagaagtaggagagtgtgtggatctcggggcttttgacattttacatttggggtaaggatgtttgtagggtgctgtgacctttggtagagaaaagcaatcaatatgaaatagtccagcaaggaggcagccaggagacacacaaaccgggacagttggttaccctctctctctctctctcctgccattgtctctcataagacaaactcactctggagtacacaaaaagagatgcagttactataatccattggcatcaacctctgaaggcaggatggatctggagggataaacataacctgcccagaggatgactcatagggtggccttgtgggtgctgaatcccaagtggttaggtctgtgctgtgagctgataaagccccagaattatttatggggaatctatactcctaataatttacagacaacacagatccactttggacttgatcagatggacaaaatcttggggacttgacatcactgcgcacacaggggaggagctgggattgttgtccaggaaaggaaaatataaggagaaaccttggtttgaatttggtgtcagacatatgatgagaggacagccaggaagatctggaacatgaagatttaattacaggccactaactctcagctgacgggcaggtctgtgagttccagaatggagcactgcagcagtaggtggggaggaggctgagagggcgatgaggcagtctgagtgctgagggcagtgcagtcagagaagcaactgcctcatcacagaagcttctgcccttactcagcccccttgctctgcaggatgaggagggagttccatgggtagggaccactggacctaaggaagcctgaaggggaaggaccacaggacagtgacatcacaggatatccttcctatcaggaaaagtgaggctcagaactcagctcttcctgggaggaccaagccctgagcacaggtgcagtgctgcctgctccgctgtgccatgggctccggactcctctgctggacgctgctttgtttcctgggagcaggtgaatcctgtggacaggacagcacccctattctcagcttgcccacccctgtgtcccccacttcaccatggggaggcacaagttcattctccacctattttttcctcaggcccagtggaggctggaatcacccaagctccaagacacctgatcaaaacaagagaccagcaagtgacactgagatgctcccctgcctctgggcataactgtgtgtcctggtacctacgaactccaagtcagcccctctagttattgttacaatattgtaataggttacaaagagcaaaaggaaacttgcctaattgattctcagctcaccacgtccataactattactgagtcaaacacggagctaggggactcagccctgtatctctgtgccagcaacttgatgcaggcctgcagagccaagaacattctgtgtacaaacatccctgccccagtgtggagaacttcagccctaacatatctgtgagaacttgaggactgtagtgggaaagaaaagcagtttcaggaagctggatcctaaaacctggggttttctgccagttaggagtggggataacaaagccaagagggtctgctcaggaggtggtgaaaactaccttcttcgccaaacgctgtacactatagggatagtggaagtgtttgtaatttaatagctggtgccctctttacagggcagcagatttaatttcagggtcaagattcttgataatagtgtggaagggaaaatcatagggtttgctttatataattcagggagaagaaagtgagatttggggaaattctatgaaagagaaaatgatcaaagatagttgaaaacagagatagagcagaaggtaatgaaacatggtgatctgtgcaccatgagctcccttctcctcccacagtttttgatatccagaaaatacaaagaaaggtcttatagcaactgacatcacctggggactggtcctagttggggatatcacaaatagcagcctgcctgatgtgagggccttggggttggttctgacatcttctttctcgacttctggatctagtcttgcctgctcgaggcacagtcaaatacttcccaaaacacaaaggaggtcaggtcagtcttggtcctaaaggtgcaaatgctgtccgttttctcccaagataaaattctgcatccctgggattcctctctgagactcagtgcccagattcaattaccttctgtaattaaacagttctttgaacattttctaaaactcatcagccttggtatcatctgcatttctgctatttccttggcctggaaacttttgttctctccagacacatccagcccctgctcatctgtcaaggatggtctcacatctgccttactctttgcttcttaccctgacattccctggaactggactgtatcaatttatttatttacttttttaagacaagagtctcactctgttgcctgggctggagtgcagtggcatgatcttggctcactgcaacctccatccccccggttcaagctattctcatgcctcagccttgagagtagctggaattacaggcacatgccatcatgcatggctaatttgttttgtattattagtagagacacggtttcaccatgatggccaagctagtctcaagctcctgacctcaagtgatccccacgcctcagcctcccaagtgctgggattacaggcatgagtcactgcgcccagccctggactgtatcactttcttttctttattttcataagaaaagccaagtttataattaatagtatctgaagtttgtaaaatgaaaaagttaatgcatacttatatagaatcctggaatatcattaatcaccatcttcccttcaatgggactcctctttcttaaaatgtaatgaagattcttagagacagtgtcagtttttcatataatttctgcaatattctaagcaattgtgtcttcatagtcagaattgataaccaatgctataaagtatcctaactctaaggctggaatttgcaaatactcttttggagcaaataaaattgtgttgtagtaatattcatccagtctcatgatcctgaaaaaacaaattattcagcataaccacactttccacagccacatttttagagatttgatgagactggaacatcatcaaagatgcttctcagaaatcaacctaaaaaactgaaataaaaattagttaagctcagtaatggaatcttatcatcctttctgagtaaaagatattgtgtgtgcaggaacagaaaaccaaacaccacatgttctcattcataagtgggagttgaacaatgagaacacatggacatagggaggggaacatcacacaccggggcctgtcggggggttgggggaaggggagggagagcattaggacaaatccctaatgcacgcggggcttaaagcctagatgacaggttgatgggtacagcaaaccaccgaggcacatgtatacttatgtaacaaacctgcacgttctgcacatgtatcccagaacttaaagtaaaataaaaaaaaaaaaacccaagatattgtgtgtgtgtgtgtgtgtgtgtgtgtgtgtttgtgtgtgtgtttgtgtgtgttttctgtggagactcagccgcatggaaatagtttctcagggtggcattactaagaggtgttgggtcattggcagagctcctaggtacttctgggtaaagaaaggaaatatcagacccaattgaatctgcctaagttatatacagctcatagggtcgtttatttcaagattttttaaaattcagaaataaatttgtaaaattgaaaaatcctctttatagaatgtgctatctaaaatctgggaataataaatctaaatataggccagacgcggtggtttacacctgtaatcccagcactttgggaggccgaggcgggtggatcacgagatcgagagatcgagaccatcctggccaacatggtgaaactccgtctctactaaaaatacaaaaattagctgggcatggtgacaggcacctgtagtcccagctgctcaggaggctgaggcaggagaatggcttgaacccaggaggtggaggttgcagtgagctgagattgcgccactgcactccagcctgggtgacagagcaaaacagcgtctcaaaaaaaaaaaaaaaaaaaaaaaaaaaagtctaaatacaaagtgtgaaaaggtgtggctctgattattcaaagggagctctggaatgtcgtgtttccagtctggatctgcttgatatcctcacactgtttcaccctgtggcctgtataattctggctcctctcttccatcttaggatactcattgcaatgatgtagcagcagtttattgtgcaatcaagatgtgcccttttgttttcactggccaagggtgaatttgaagttccaccctaagtcaacccttctgggaaagcaatagagagtgtgtgtgtgagagggtgtgggttgcaggggttggtgtaggggcatctctgctcctgacttagacaatgctgagctcatcaggtcagaaggtgtgaatccatgagactggaactttggccacttggaggtgctgtggctccacaaagctgtggggaaccctggggaggggtggagggtgacccaggagaggacggctgaagggaatgcttggctgcgtgctggcatcaggaggcggttggaattcagagtaggtcctgggactgcccagggcaaggtaggcacaccagggacctcagtttgcatcaaggagagaatgtctttgcctctgcatgggcagtggagggtgaagaggctggggcagcaagggctgggagtcagtgccaggaaagtgacaggggttgtcagagaaaaataaggtgggatatgggcatgtggagactgtgttccacctgccccacttttaatttcagggttgtgtaggacaggaatggtgcaggaagcagcagagcctggggtctgacaatgggtagagcaggcaggggtggcctgcagggagagttactgggaaaggccggtttcccaaggaaatgcctgaaacattcctgccccactcaggaaatgaccatgaggtgggtgctgccagacagaggggttcaggccctgcagagctgacaggcctttcccaggcactccctgctgcttctacatgtgatctgctttaatgcccactgatatcaggcagggtaaatatgattttacctgtttatacatatgggggaagcagctgtccctgttctcatgtttagtaactggctatagtcagttcctccaacacctctgcacgccgccctgctctgtacatgtgtcctctcctctggcttcctcatttcagatccccgttagcaggagggaaagatcatgtctcatatgtggtcattaaaacctcttccccgacaagcccaaggaacttccaggtcaagcatctacattcatccttcactgtaggaaagaaaaagaaataaaattttctgcactgtggactttctgtaactgatgtaatataccttgaggaaaatgagcataaatagttgctattcattaattaattaatcttattcttttactcaataaactttttgaggatccttctttgtataaggtattctgtgacataaaattgaaaagaaaaaatattaagtggaaaaaatgtttcttgctttttacagtgttaaggtttgcatttattttttaaattgttttctttattaaaaatagtttactgatttctaaattatacaaatttacttttttctctttttttggctaactagtcccattttagacagccatttaatttaactgtggtaggaatatgtaatatgaaatatatctttttaacagatttttgtatgtacaatacggtattgtaatctacgggcaaaaggttgtacggcaatctctagatcttattcatcctccttaactgaaattgtataccattgacagcaactctccatttactccaatccccagcccttggaaattaccttcacctttgcttccgatacttcgattatttacgttccatcatataagcagaatcatgtggtatttgcctttctgtgcctggcttattcacttagtgtaatgtcctgtgggtttatccacattgtcatatatggctggattttcctctttttaaatgtttaaaatacttctttgtatgcatctaacatgtttaagttctgaagtataaaatgtgtcatatctgactgtttctatgaaacagtctgtcacatgactggcagtcatttgcagaactgcaagcactgagtacactgatgcacattcacagttcaattctgcttcatggagaagacttagagaaaatattaatctaatcattcattatcattttatgatgcacaaaatagaaagccttcattaggaaaatttcaattaattagaaattcaactatacgaaaacatcttaacgtgtaaacgctattctcattttacaggtagaggaattggcccatagtttaaattacttgaccaaattaagtaggaattaggatgcagtactggggttctaaccctggtctatcaaagccctgttttttatagctatatactataatctatttcataacaaatgatgcttatcttcacaaaaattcaaatgttatctcctaggtccctttcagacctgctggctctaataacatcatagacagaaatcagtttaccctggagaggggggggtgggaaacaactatgaatgggtgccatgacatcaagcctgactcccattctagcaccagctcctcaagacgtgaggccagttcttgacagatttggcttagtttgttttctgtttttttgtttttgtttttgttgttgtttttgtttgtttgttttaatctatgaaatgagactgctactgtccatccgcaggctgtgtacaaaattaaatagcataaagtatctagcatgtagcagaaatctagatattaggttggtgcaaaactaattgaggtttttgccgttacttttagttacttttaatggtaagaactgcaatacttttgtaccaacataatattttaatttcctttgataatctcagatagcctctttcaccatgccaatgtgcaaaggcagatgcggacatatgatacctagaaatcttaggttgaggattcagaagtcacagaaatggaaatgtacatttcctctgatgatttatttgatgaaattaactaattaactaaagaatgcagtatggatccctcttgaggtatttaaaaaatcaatgttgttgacatataaattatacaatgtaaacattatacatcttaaatgaacagatcagtgatttttgagcaatatatatgtatatgcccttataatccccacccctcttaaaatgtaaaatatccccacccctattaaaatgtagactatctccagaaagttccctcgaacacctctgcaatgcctatcttggtcccagaaaaccaatgatgtaacttctatcactggagagtagttttgttcacaaatatttttaatgtcaatttaaaacccatactgattaatcctcttgaatacatagctaaataatcaaggcaaggaagagtttctgggaggttttatggttttagaagggattgaaaccatgagagctaccttgatccatggtaggaacgattctatctggagatggatgttgtgccgaaataacctcaaaaggtcttttcagctggtagaagctgattcgacaacatttatttattcattttcattcatttctttgcttctccattcattaactcaaattgtttagtaatgatatcctgataacagttaattatctccaaggaaattattttgagttcccataggacacacatgcagctggttttgtgttcacacactgagaacgctggcgtcaagcaaaccatggtaacagagacttcattgaaagatgatgttacattgggagaagcattctttttgccttaaccccaagtgtttaactcataaatcctgagccttcagctagaattcatcttcctgttctggccctgtcctgggcaccaggatcctgagctgtgtgttcctgtctcttgaaccacaggagtcctgggcacgcacatgaaacccactaatgggcttgttggatcccagctgtgactttcagcaccaggtggcccttagctgtgactttaatttctgtgtccttcactgctaagtgaagccccatagacgctgaatgaccagatcttggtgatgcattgtgctgaaaggaaaccagcacagggggaggtgagcagaatatgaaacaaaatcatgtatttacaaccagcgacatgacttactggcagatcctttgttcaaacactattaagaatttaaaaatcatgacagcagagtgataaagcaagcgtgggatccttctgaatgcagggctctgtacaccgaagatacagtttttgagctccttttcatttattactaaattaatggcaggaatcctgaacgaagggatattccctatgagacatgacacctcaaataaaacgagagcatttttccttatcttgaagtctgctccctctcgccaagtccctcactcatcaggacacctttgtgctcacaagtcttcagcagcgctgggtggccaccattgtccacacagagagggcagtcagcagcatgaggtggttctgcctgctgtggtctcaccccaggaacagaaagcaagactcctggatggagctgaaggtgctcagctggacttgtcaggagtcccatctgtcagtgaattgacaagaaacagagcaaaactactcctgcaatgttgatgagcctgcccctgggatttggaaacctgataacagagaaaaccaatatagacacaggactttaacaggattatggtcaattaagcagattggaaaaggatacttgaaggagtgtttgggacacaggaatcaaaaacaccagggagacaagaggatttttcctaagattctagactacagcaatacatagataactaacaccagaatattaatgaggaattatatcattgcaggaataaaatttatattgaattacaaactgtttgcacaaaagtcaagaaaaacttgaaagccttatatcaagaagcattcttcccatccaaacttcagtggtgcatttattttggatttgaccctctggggaaggggcatggcctctctcgacaagaaggttctggggaccaggcagagagaatgaggtctcaggatgacttccttgacagccctgttcgcctttcatcaacacacagacccagaagacctctctgtcttgtagcatctgccatgagaatcaggctcctgtgctgtgtggccttttctctcctgtgggcaggtaagtcctgggcagggcccatgtgtagatttcaagacccagagccttcccattgaggctgcagcattggctttgttctccttctctgtaggtccagtgattgctgggatcacccaggcaccaacatctcagatcctggcagcaggacggcgcatgacactgagatgtacccaggatatgagacataatgccatgtactggtatagacaagatctaggactggggctaaggctcatccattattcaaatactgcaggtaccactggcaaaggagaagtccctgatggttatagtgtctccagagcaaacacagatgatttccccctcacgttggcgtctgctgtaccctctcagacatctgtgtacttctgtgccagcagtgactccacagtgctgcacagccatctcctctctgtacataaatgcaggggaggctctgccctcctccccgaccccagactcaaccatgtccttggcagagttctcagcactgggaatcttggaagcccaatgggtgccgggcagtgtgagcctcagtctgtgccaggtgcctctgcaggcagtcccagccaggcctggactggtcccagagcctcagaggtctcttttgttgctctctggtctttcttccaagctatctttttgggatgggaccagggctttcccagctcttacttttctactcatcatcctgagtctgaggtccacaggatggaacaggatttgtatttcaaatctgtctagactcctgtttctctctgggggccacgttgcttcctctctccagggtttcctccagtacccactctcatgtggtctcacctgtggcccgcctttcccatctgagcagtcacccccgaaggccttgctgggcctctgcacaccacctcccctcgcctttctactgcagccatgaggctgcctcttctgtgcctccttcctttccaacacagagacctcaaaggccatttcctccgccctgggctagtgccttcctttctgcagtggtcagcttctacctgcacttctgatctcagcatgatcagcctctcctgctggaagcactccctcaactctcagctgaggtcaaatttcagtttccctctcataagctcacagaatcatgtgcctcttagtaaagttcagcaccgttgcaatttttccaacacttgttttattccttttgtgctccacttaattttaaactcatgaagctgaaggctgagcttgttacattcaccaccagcagtgcctggcaggcagggagtcctcattcatttcacagagaatggatgagtgagtgacaggtgagtgagtgatgagtgggtgaatgaaccagtaacaggaacacactagattcattgtaccctggcagaggtctagagttaactttgcctgagatgctctgttatgagctcatcaaggagcactcacttgttgaacaagcataggaccatgcatggtgcaagccagtttgtcagtctgggaatttccaatttaaaatatgatgtgttcttcaagctgaatgagggtaaactttctgtatataattataatatctaagccatttcttaaagttttgggttaggaacaaaaaacccctgaagagggaacatttgtagatttaggatttttaaaatatatttatattattttcccttggaagaacaggatgggaacagccttatagttgctaatttgtggagaaggcatcatataaaagtaagagaaaatcagaattgtgttctagagggtaaattgtggctgtcctgagagcatgttccccaggaacctaaaccgtgagcatgttcaggaacccagagtgcaacagacaattcttggccccatgaatttggtggtaagactggagacagttggaaaaaccatggagtcttgaagttcttcactctcaatgcaggcctctcttgaacaccacagactaatgtcagataaatatgcttccactattaagactattaaaacaagaaccaatgaagagaagtgagcagaaacaataagcaattgaagtgtttgaagacaagaaatttttaccattaaaaggtatgaaagtttgtagaactatgtttaaaggaaattgaaatgtgaacaagaaaaaaagactgacagaaaccatcaagataacattaaaaaataatcaaattcaatacagaaatgattaagattatcactgaaaacaaaatggaaatgaagaaagatgaaatgcttctaagagattattagtgatgtcaaggacagagctgaagaagttacatagaatgcagcaccgaaaattaaatatgtaactttagaaagagcttaagggtggtttccagcatagtagaatatataatttttaattatatatatttatttatataaagttatttatatttatatatttaattatatatttattatataaaaatatataatataataatatagaatatagaatatatattctataatatagaatatagaatatatattatataatatagaatatagaatatatattatataatatagaatatagaatatattatatagaatatataaatatatatatttcccatttttcttatagataattgaagtttcagaaaaagaaagtagagggaataagtgattgtgatgagacattagctgagaattttccagaggtgtttcaggacctaaattctcaatttcaagaattcaaatgaatatgaaataagataaatgtttatattataatgagattgtggaacataagtgacaaatagatgattctaaaagctgtcaaaaagaaaagataaatctctcctagtggaatagactgaaaaaatcaatgaaagaaagaggatcagaaataaccatttagtcggaattataatccccattcattaaacactgagatggaggaaaatatatttacaagtggaaaaattaaaaaaaaagactatgagttttccaataaggtatcttttctgaattatagtcaacaaaggtgggaagtggtcccagaagaaaggcatgaggtgcagcttgtgagggaacccatgtgttgggacagccccgttgggcacgtgtgactgggggatggaggaggctggggcatcaatggggatggcataggggaccctgacttgcagaaaagacaatgagctcatcccttggtgccttgtgttgggggcgctgttggcacatcctagagaacatgcccagcagacagaggagcgcctgtgtggtgaggagataaactcagaaatgcagcatgaggcctgtagctccagacagctctagagcacaaagtgaagaccgatgcattgatgttgtttaaaaggagctaataaatatctaaagcagtcatccaagtgtgttctaatataaatcctgtgttcctgaggttgtggggattgagagaggaagtgatgtcactgtgggtactgttctgtgtcaggacaaggacgtccctcctcctctgctcctgctcacagtgaccctgatctggtaaagctcccatcctgccctgactctgtcatgggcaccaggctcctctgctgggcagccctgtgcctcctgggggcaggtgagtcctcagacaccaaccagtctcattctgtgtgtctgtatgtgtgtgtgtgtgtgtgatgagtacaactgttttcctcatcctgttctcaacttgtgtctccgcagatcacacaggtgctggagtctcccagacccccagtaacaaggtcacagagaagggaaaatatgtagagctcaggtgtgatccaatttcaggtcatactgccctttactggtaccgacaaagcctggggcagggcccagagtttctaatttacttccaaggcacgggtgcggcagatgactcagggctgcccaacgatcggttctttgcagtcaggcctgagggatccgtctctactctgaagatccagcgcacagagcggggggactcagccgtgtatctctgtgccagcagcttaaccacagcatgacacaatcgcctccttcctgctcataaacctcctcctctctctccttgcttccttatgatactattttgcaccaggggatcctcatctcacaccactccactgcctcttccagaatcattgcttgcatgtccgctgctcagatcagcagatgtgcgttgtatatgttaatcattttctgtggaaggctcgttgctggtcttcattatccatccttattttccacattggatactgctcccttcaagattacttgttgcctacaagggatcctactttttacattcaaattttactttttattaatacgtatttgatgccatcttgaaggcaatctcattatcatcctaatcttttgctaatctttatgtttacggtaacattgattgttattttgggggacatgtatttcatctttggtaatgaaatgaaataactatgcacttcaattcctgtatgttctgcctacttaagagtaaatccaattttcttccattcctcccattctatcccactccctttatatgatagttttaagggagaaaatattaattagactctaactgcagctatgtgataagagttatttagaatgagggtgggatattaagctttgagtaaagcaatagtcagggttagaactagtgttggaatcagggtttagggaagttgctcataaaacctgcaggatgacacttctagaatagtctctcactcactctgcagacacttcccagcatcccttgggccattgcaaaagcaatgatgaaacttcacgtgttggccacaagatggcactgtggtccactgggatctaagggactctggggagagcctgggagagcagcctaggaagggaagggttaagaaaaattagggctggcatccaatattatgcagatgttgcagcagttttcagtcattgctaggctacctacagctatgcaagatgcaggaaatacctctaatctttaatgagatccacagttgaagaattttggcctggcagccttggtgtcaagcgcaggtgcaagcagaggagcaactgcctcaaaggaacgtgggaaagctaggggcgggctgtgccctaagctcagtatgtctctgctgcaccccatcttccctgcagacctcgccgggcaacagccttcatgagaggaggtggatcctgcctgagaccagtcagaaggccctggaccagctggactccgtaggcatggggggtgacaccacaggcccaccagactattccctagggagcagcctccaagccccagctcacagtcctgaggatcactgcacttagttgggccagcccctcctcactctgaccctaccatgaaccccaaactcttctgtgtgaccctttgtctcctgggagcagataagttctggaaacagctgcaaaaccctgtaatgggtttgcaatgtctgggctacaagccttttttgtcctttcctctgcagagtccccttatttcttaagtcttgtcttcactttctgtctgcctctccagcaggctctattgatgctgggatcacccagatgccaagatatcacattgtacagaagaaagagatgatcctggaatgtgctcaggttaggaacagtgttctgatatcgacaggacccaagacgggggctgaagcttatccactattcaggcagtggtcacagcaggaccaaagttgatgtcacagaggggtactgtgtttcttgaaacaagcttgagcatttccccaatcctggcatccaccagcaccagccagacctatctgtaccactgtggcagcacatccgcagccctgcacagccagctgccctctgcacaaaaagggcagtcacaggctggaggtgggcactccttatggaagcccgtgtctcaaccagaagaaaaagctgccctttctgaagctcttcccagacttcccagcaatgagatctcattctatgtgtgctcctgcagcataaaacttagagtgagctgggtctgtcactgtagtgcggatgtgtaaatgcaaacaacgtaatgttattttgctcaatttggaatattctggtaattgtgcaaaggaatggtagcttctaacaagaaattcatatttcactttcttttcaggagagaagaaaaaagcagaaagcagctgggaagctttagcctgcttgagtgatctgggattctcaagtagcatacataacatcaccttggctttggttcctttagataccaagcatgtgttctgtggaggacaagaaaatccatttttttttgttataaagttataaacacacaagagaacaatccagttagggagaatgttaataaatacaacaaactctgccattagacctgaagataatcagctagtagaattatcaaagagattgtaagactcttactgagtacctgtttgaggtcctctgaggatagatgaaggaaggaacttaattcttaccatcactgtggcttggattagaatccatgagttccttaacttgtttttcttgtaaaatattataaaataatatagaacacacattttattttcctgtagcctgtagtcctctttagcacctaaagggagaagcgcatatcccggtgcaaaagggagctggttgcttgcttggcaaaaaaatgaattcaccaattggccaatctgctgaaagtcaaaatgaaaggctaatatatgagactgatgacagttcatggttcttggtataacttcaacagcgagtgaacatttttttctttgtctatagctttctttcagccatcgatcctcagttgtgtcttagcctcttatcagtccagctcactttgatactaaatttgattgttgtgtatctcagcaagaagcacgtctcacattctctgtattttatgtggtcatgagtgtgttcctgtcttattcttattttatgtggtgcatttttaaataggactgtacagaatacaagcatctatttgtatatgactctcatcttttatggggagaggtcagagtaggtgagcgtgcactttgattctctgctggaatctctttggattctatgtcccctgtcacatggtttattttcatatgcatatttctcatggttctcctgactcttttagcaatgctcattgcaggatattagaaattgtattacttctaatggcagaatgttagaaattgtgttgactcttaaggcaaaataaaatacccggactcacctttccattgctgtgtctattagtcgtggtcctggagatatcaaggagggacaaaaggagtatttgcaaaggtgtggcagggttaagggaacccagtaagagaagtagaagtagcctaagaacagcagaatctgtggctcttattcacattggcctgaaataagtaggagaggatgtggatcccaaagcatcaggtactgtagctctaaggcaaggctgcctataaggtgctgtggactttggtagggaaaagtaacctatataaaataatgaagcaagaggagagccagggcatagatgaatcagaacaagtggtgcccctacctccctctactctcctgccattgtctcccattagccaaactcactctggagttagagaagaagagagccagttaacataatacactgaggtcagcctctgaaggcagggtggatctggagaaattaacgtaaattatccagatcactacgcataagatggccttgagggtgctgaatcccaaactgtctggctaggtctgtgctgtgagctgataaagccctagtgttatttctggggaatctgtactcttaataatttacagacaaccaaggtctgctttggatctgatcagatagactaaatcttggggactttgcaccactggccactcaagggaggggctggaaatattttctgaggacaaaaaaatagaattagaaaatttggttgaatctagcgtcagagagatgacattaggacagccagggagagctggaacaagaaggtttaatcacaggctcctcaccctctgctgatgggcaggtgtgtgagctccagcatggagcacgacagcactaggtgggaggagggtgagagggtgatggggcagcctgggagctggagcagtgtaggcagaggagcaactgtctcatcacagaagcttctgccctcacccaacccttctgctggacagggagggagttcaggttgtggggagtactggacctcaggaagcatttatagggaggacacaggacagtgacatcacaggatatcccacccatcaggaaaatcaaggcccagaactcacttggcccttccccaggaggaccaagccctgaatcagatgcagtgctgcctgccccactgtgccatgggccccgggctcctctgctgggaactgctttatctcctgggagcagatgagtcctgtgcacagaacagcagccccattctcagatttcccacccctgtgtcctccactttacactggggaggacctccaggctgtctgctgtgctcatcctccatctgcttttcccacaggcccagtggaggctggagtcacccaaagtcccacacacctgatcaaaacgagaggacagcaagtgactctgagatgctctcctatctctgggcacagcagtgtgtcctggtaccaacaggccccgggtcaggggccccagtttatctttgaatatgctaatgagttaaggagatcagaaggaaacttccctaatcgattctcagggcgccagttccatgactgttgctctgagatgaatgtgagtgccttggagctgggggactcggccctgtatctctgtgccagaagcttggcacagccctgcagagtcactggaactctgtgcactaatctctctgcttccgtgtacagcagtctcagaccagacagctgtgagaacctggggccttcagggggaaagataaacaatttcaggactctgaacaaggctggcggaaacaaggccaggaggatatgctcagaggatggtgctgcttcaggaggttcacggcaaaattactttctttgtcggatgctgtacactatagtgatagagtagctggcactctcctttttagaaaaagaaattcattttggtgtcaggattgttcgacagatgtgtagtatagaaggtaaaatctcaagggtttgctttatataattaagggagaagaaattgagatttggtttggagaaacttgaggagagagaacatgattaaagattattaaataaatagaagtagagctaccagatgataaaaaattgtgttctctgcaacataacctgtcaaagttttcaattgctagaaaatacgcagcaaggccttgtagcaactggcatcaccccgaggccactctatgatggtcatcaccacgtagccagttgccctgtgggagggccctggagctggttccaatgtcttccttctggacttatatctcaattctcaaaacagaggaattcatttcactgctgatggtaaacagataaaggctctcccatttccccaaagatacattctgcttcccttgtatctctttctgacacttaccgcccagatccattaccttctgtgatcaaacacctcttcgaatatttcctaaaactctgcagcctttacattctctgcatttgtgctcagtatttccatggcctggaaggaccttctgtctcccaagaaacagccagaccctgcttatcggtcaaggatgggctcacacctgcttcctctttgcttcttaccatgacattccccagcattgtactataccaccatctttattattttcataggaaaagccaagtattaattaaatatataatgaatattatttgatgttgtgaaatctatgttaattcctgcttatatagagttctggaatattattacttttattcatgtgagggatattattaaccactaactatttcctggttagagatcaaagtcacttctgtgtaatgatagcaaatgtgagaaccagctgaatctgtttgaattacagctggcagtattattcatttcaaaatttttataatttagaagtaaatttttaaaatctagaaatccttttgtgaaatgcactgtctaaaatttagtaataatgaacctaaatacaaaatatgaaaacatatgggtgtaattaactgggattagctgtggaatatagggtttccaggctgggtttccttgatagcatcacactgtttaattgtatggcctttataattctggctggtctctaccatcttaacatattatttgcaattatgtaacaattgtttattttgtaatcaaaatgttggttcatgtgtcctttgactccattggctaagggtagatttgaaaatcaaccctaaattgactcttctgggaaagcatggacggggtgtgtaagagggtgggagtggcaggagtgggggcatctctctttctgatttggacaatttgagcatatcacgtcagagggtatgaatccatgagactgtagactgttggccacttggaggcgctgtggctccacagtgctgcagagaactcagcggaggggtgggagagtggccaagagaggaggactgaaggggatgccctggctgcctgctggcatcagtagagtggatggaattccctgagtggggcctggccatgtagagttaagcacagactatcattgccttgaaagagttggggtgccagaggcctcagtttgcatcaaggagggagtgtctctgctgctgcacgggcagtggagggtgaaggggctggggtggcaagggctggggaatcagtgtcagggcagggacagggcgggcagaggaaagtaaggtgtgatgtgggtatgttggtactgtgttcagtcctcctcacctttagcttctggcctgtgcaagacaggaatagtacatggagtagcagaacctgaggcctgccaaagagtacagtgggctggagtggcctgcaggggaaagtatgtcagtgtggtgacatcacaggtcaatgctcctatcaggaagaagggagcttaggaacttcagaatgcttactacagagacaccagccccaagctaggagatcctgccatgggcttcaggctcctctgctgtgtggccttttgtctcctgggagcaggtgagtcctgggcacaacttgaaagtctccgatcttcatttcttgtccctgaaatgcatgtgggccaacgatggcttcagcaggaggctttcttctgtgccttatggttaacttttgtcttctgacacacaggcccagtggattctggagtcacacaaaccccaaagcacctgatcacagcaactggacagcgagtgacgctgagatgctcccctaggtctggagacctctctgtgtactggtaccaacagagcctggaccagggcctccagttcctcattcagtattataatggagaagagagagcaaaaggaaacattcttgaacgattctccgcacaacagttccctgacttgcactctgaactaaacctgagctctctggagctgggggactcagctttgtatttctgtgccagcagcgtagcacagccctgcatgagcatcagccttctgtgcaataacattcctgccccactcaggaagtgacggtgaggggagggctgccagccagaggggctcaggccctggagagtggacaggcctttcccaggcactctctggtgcttctgtatgtgatctggtttactgctcactgaagctgtgtaagcgaaatattattttacctgtttatatatctgagggacagcagatgtcctggggctcatatttagtagctagctgaagtctattgtttcaacacctctgcactgtccctcctcactccggagatctgtccttttacctggtgtcccctttttgtgtccccaagagcaggatgctaaggtcatatatgaaactgtgatcatgataacttgttccctgacaagtccaatggacacatgatttccaggcaaaacatatccatctattctttattgtgatttaaaaaaaaaagaaagaaaagaaaggtgcagttttctgctctgtagccctcctatgggcaaggccaggtcatctcttttatggagactgtatgaggagggagctttcctaggttcacagcaaatagcaggaaacgttttttatggggcgtgtagtcttcctgtggcggatgcaatctgccatcagtgaaaggacatgaaaaattgttattcattagttaatattttttattcttttttttttttgagacagagtttcactcttgttgcccaggctggagtgcagtggtgctatcttggctcactgcaacctccacctcttgggttcaagagattctcctgccttagcctcccaggtggcctccaccacacctggccagttttgtgtttttagtagaggtggggtttctctttggtggccaggctggtctcaaactcccaatctcaggtgatcacctgccttggcttcccaacgtgctgggattatagagccattgcactaggccaattttttattctttatcaataaatcttttggggcatcctactttgtacaagggattatatcacatgaaatatacaatgaaaaaagataattggaaaaaagggaaattttttaaaaatgaagaaaagggtgtttcttgcatttgagggtatcaaagtctgtaatttttggtatattctaattagtttactcagtttctgatttatacgaatttcctctttcttctctttctctctttggctacctacacacttttgccagattttttaaagtttttagtaacaatatttaacatgagatctaccctttttatagacttataagcacacaatacagttttatactctgtagtcataacgttgtacagcagatctctagatcttattcatcttgcatgattgaaattttatacccattggcagcaactccccatttaccccattccccagaccctgaccgctaccattctagtctttgcttccatgagttggactattttagataactcatgtaaatgacattatgcagatttttgtctttttgtgattggcttatctcatttagcctaatgtcctaccaagtatagtggtgacagttttacttctatcttccacagttcactcgaatagctccttgaccaactgtaacccagaatcataaagataaaggcattcttagaaatataacttcttgtcctggctaagttaacttaacacaacccggtacgggatggattctcccaggttgaggcatctggtcacatacgagtttcaacctatcatggtctccaggatccatttttggcggcaccactgctgcccaggtgactgtggacacaacttagatgtctctgtcctagattttccaggccccagctactggcttttcttttaacctgtgccggcagtctccctccactcagacgcagggatctgcctcctgctcccatctccttcctgaacttccgccctgctggagttgcatggatatcagggcccctggtcaatgtgcggcagcccacggaggcactgggagggaagctcacctctagctgccttctggggcccagttctgttataccccaagcaagtgctctgttctccctttgggctccacagtatgagaaatgcacttcatggattcatagctgacccctagctcagtaatctgatgacaaactttgagtttcactcaaagtgaaactctcagagctgagggactagctctgcatttctctgatgagggtaagaatacagtgctgtagagatgccttcttccctgtgtagacctggcactaaacaggaaaaaccagacagggtaaaagtgcccaaatatgtctgagaagactgaaagaaaatttcctaagaaaatccttctcctgacttcattcagttcctagtaagacacacctcaccctctgacccccatatcagctggtccccccaggatatcacacgtcctagtatctaaccccacagcaactaattcagatactggcctctttccaacctccagaaacggtcttgccaatagagttttgttggccgggcgtggtggctcacgcctgtaatcccagcactttgggagcccgaggtctggtctggtcacctgaggtcaggagttccagaccagcctggccaacatattgtgaaactccgttccttccaaaaaaaaaaaattacaaaaattagctggtcatggtggcacatacctgtgggaagctgaggcaggagaattgcttaaacccaggaggcagaggttgctgtgagctgagatctcatcactgcacactccagcctgggcaacagagcaagactccatctcttaaaaaaaaaaaaaaaagagttttgtcctctgaccaccaggtctatctagatatctaggcagatttaatttacgattaatttgacctcttaatcccattaaagggagaatgaagagcgtatggtttcaatgtaaagtatattcattttattttgaatgagttggaactaagtagtaaactgaggatatcactccattatagtcttaaaacaacccatggtaaaacaaatctctttactaggactttctttttcacattttagttcctagttacccagagtccagaatagttaagagttgaagagtcatgactgagatggtctgtgggggtttataaatgagcattcacttgttgaacaagcctagggccactctctatggaagcagtttgtcagctggtttgggaatttttaatttaaaatatggtacgttctttatcttgtataagtataaagtctacaaatataatttgcatatataggctagtgcctgaagatttgggtaggacaaaaaggaaagaagagataatatttgcagatttaggaagtttcattatataaaacttcaagggctcaggggctctaatttgtgaagatagtataatgaagaagaattagaaaatcagaactctcttctggagcctacactggggttgtcctgagaaaagattatgatatgaggaacataatccatggtgtgcttagcagcccagagtgtagcagacagttcttgactcatgcagttgggggggtgagactggagacacttgtggaaggtactggctgttgaggctgtgctatagcctctccaaaaccccatagatgaatgtcagacaaatatactgccactatgaagaatattaaaagttagcagaattcataaacactcgcaataggcagcctgaaggtttaaattttagcatcatgacatatgacagtttgaagagctgtagttaaatgcacacaaaagagaattgaaacctgaacaagaaaaaagagactctcagaaatcattagataacttttttaaaagcattgaatgggatgtctagaaatgatccctaaaatgactgaaagaaagcagataaattgaagagcagattaaatgctcattgaagagattattattgacttcaaagacaaatcttaagaagttacccaaaacaacacaaaaaattaaatgtataatatgaaacagagaggaagcaacagagaagaaacaatggaggtttcagttatattcgaatatatgtaacatttcataagaattttccatttattcttatgtcattgaagtgtcagagaaagaaaataaggagaatgatatgaggtgatattgtgtgtgatgctagctgagaaatttccagagacatctaaagacctaaaacgtgagtttcaagaattcagataaatcccaggttaaatagttacctcagtgttaaaatagaagaatatgaatgatgaagacacaatttttcaagcagtccaagaaagacaaatatctcgcaaaggaatagactgagaccgacaggaacagtgaagaaagggagttaaaaatatctataaatgcagattatagtcctcattcatcaaagagacaaggagacctcggcagttcatattctgaccccttgggctggtgacctgaaatatatttggctgagtgttctcatttgtaaaccgaattcaatttgcagagatttttttttttttttttggaaatagagtctcgctctgtcgccaggctggaattcagtggcgcgatctcagctcactgcaacctccgcctcctgggttcaagcaattctcctgccttagcctcccgagtagctgggactaaaggcacacacaaccaagcccagctaatgtttgtatttttagtagagatggggtttcaccatgttggccagtctggcagagatttgagagaggtaactttaaaaattagagtcatataaagtgtaggttcaagaaatcttaggtccctataaattctctgacaaatctccaatctagcacagttatttactctctgaaattctggtaacaaagacaagcacagattacttttgcctgattcaatcatgtttcagacacaaagtcatctaaaatgcaaatatagtagtctgatagttcattatgtaaaattaacataaagagttgccgtttaaggaaatatgcaaatgttacctcttatgaacttcctgcttgataactgagtctgatgtgcatgaaggtgtggtgctcctagaaagatatggcttcagtgcaattgtccatcacacaagagagctgatagaagaaggcacagctttattggaaagaagaccacagaggagcctctagtggcttccatgacatcctctccgcccacctctgatttcagccttgctgctgtggacggtgccagttcccattcacctcttgctgacagtgcccttctgcagtgcctgcttggaatgttgctgcttcctgctctggggtcttctctggtatctgaatccacttgggctgtattcaaagacagccagaggtcctgatgctcctggtggaacaggacagggggacaaaagctccaacctgcccattcatgcagatactccagagagcaccctatgctcttggaggtcctgatggattccgtctcctgttgccccagcacaaatacaatattgcacctttatcctggtttctcccttccctattttgttttccttgctctcttacttcttcctggaatcatttcccaaataagctacatgcacccaagtctccccatcacagactttgtcttcagagacagactaaactgtggcagtgatggaatgaagcgaccatcaaaagaccctaccttttgaaggagacaactgtttatcttttattcatatggctacccattcatttaaaaagtcttatgatgatgtatataaactaatcttttccaaatccatttggattcatctggaattcccagcgttctcaggatggctctctgctcccttaaaacttcaaacctattttgaactgaataaacttggattctgtttacagaagtagaatctgcctggactcagataatcattcattcctttcttcattcaataaatatttaatgaattataggtgaagattagattcaagttttgtggcgcacaaagctgatacattttaggtagctctttgcaaaagagagtgcaaaatagcaaagagttgaaaagaccctgtgcaagtgagaaggcctgaggttattcttcatcggcttcatggcaaatacacaggtactgtccaggtacttgggaaacaccagtgcaaaaaacagacaaagcttcaagttgaggtagacaattttaacacataattgttataatttattatacttaataataaattaatttaaaagtagaaggatatattcctggtagatgcttatctccccggagaagttagagtgtcattgagaatatcaacattcttggtaaatcatacctgatttagggaatgatccttggagctctggaattctacatgccttaccttgcaaaatgaaggtcctgatctgaaaagttttttttttttttttttttttttttatgccctggcccaaccatgaggattggcttctttgctgtgtggctcttggtctcccaggatcaggtgagttctgggcatagatgagaaagtccttcctgggcttgtcgggccccaaccacggcctcctatgggggtgctcatgggcctcctccctgtctccacttctgattctgtgtcctctctcactggagcatgattgtgggaattacccatccaggttgcatcaagatgtgcaatagatagcctattgtatctgaaataactattgcagtgttatggactacatgtgagttttgcaccatagcacgtttacaaatccatcaaccttctcccatttggtgaatataagatctgctggatgggaatagaggattttcctgtgaccctagagactccaggtaggtgtagttcttggtgaacatttcatccatattcctaatgagcctcctcttttcttcacaggaagtacagtcactcaggggacttagatggggcagtgtttgtggcttcacctgaagcaaagggagaaaacacccccatgagaatacacagcagcctgagcttggatggtgacattcccatcaggtgtaatgaggtgctacagcatgtaacaagtcttcaagcggtcatgaccttgaacctggaacttggaacttggagacatttctggatgtcatttaaccgagggtatccctgtatgctggcatacaagtgtccagaggttaaacgaagaggaaaataattcaacttggagttgaattttgtgcaggaagtcataaaagtcaccaggactgctatgacaatgttctttagcctacagaaatattcataaaagtgaaaatagtattcaaataaagaatttctcatgatggaaataaaatatacatagaagaacaaattcccctattaaaatcagggaaagagcttaggagtttattagatttctttcaaaacagacctaaaaattattcaactctgttataaataatttgttcctgcggggaagagaaggggcatggcaggttagctccgcagttcaagcattcagcaggaacagtgacatcatcaagtcactgagagcccaacttcagtctgcccacagcagggctgggagacacaagatcctgccctggagctgaaatgggcacgaggctcttcttctatgtggccctttgtctgctgtgggcaggtgagggctggtcacaggagggcctccttccctggaattcccaaggcctcagtgcaggcttttctgttgggatgacagcatcagcatctgttgttctctattacaggacacagggatgctgaaatcacccagagcccaagacacaagatcacagagacaggaaggcaggtgaccttggcgtgtcaccagacttggaaccacaacaatatgttctggtatcgacaagacctgggacatgggctgaggctgatccattactcatatggtgttcaagacactaacaaaggagaagtctcagatggctacagtgtctctagatcaaacacagaggacctccccctcactctggagtctgctgcctcctcccagacatctgtatatttctgcgccagcagtgagtccacagtgctgcacagctgcctcctctctgcacataaagggcagttagaatgactgaggttgcctgtgctcccaagtcccagccttcacaggagtcggagagccctggctagcctgggggccatagagcaggggccatataaaccttgatgttgaggtccattcctaccccagtctcagaccaactggaggtcaccccaacacccttagcttctgcagttccctctttccttttgtaaaatggaaaaggcatctttagtcgagattcctaatttcgttgaaaatttgaaacccaccatattcttctctaccctaagggctgggtgacttttccacataccctttcccctaccctctactgcctttcaactcccaatcataaatctttgcccatgtggtctctgctcctgggggccctttattctaagggcaatagacccacgaggtcctatatcattagccatttacgtacctcttcatcatcattttgcaccatgttttccctggctctctgctccagccacactcccttacatgcagttatttcttcatatgtgtctgttgttttccaccctggggattgtttatataaattctttcttctgcactgagcatacataccacccacttagtcctacatctctacttcatttcttaaattaaagtgtatttcaggcacacttgctcttaattgtaaaaagcaaaaaagaaagtttactagaaaaatttaagaaaagcattttatgcattcagttgagggatgacatttttagaggagacaaaaagccacaagccaaaagaacaacattcataacgctagttgcattaaattgtttcaagccaaaacacaccataaaaaataaagttaagctacagcctgggaaaggcatgaggaatgcatacaaatgatgaaaaatcagtgtgacagagaacattcagtgtaacagagaacattcagaacatcactgaatacctgtagctcctccatggtttctggtctcccttgcagttggaggggtgggaacatgtcaccaggttctgaatagtgggataaaatgatgtcagctcatttcaagcctggcccttaaaaatattctgtggcaccatgttgagggtctctaaatgtactcccatgtttagagtgttggtatatggcatagagttgtactcatggctaagatttattaaagtgtcatagtaaatactctgcagcagaacatgtggagaaaacacacaggcagaatctggaggaattcacaggcaggcttccttatgctctcttcctctcaggaggggtcacacagagctctctctcctcccagcagcaaaaatgcattaacacacgtgcagtgtatctgccaagggagcccattacagacttagcacccaagaggttttagtagaagctggtcacacaggcacctactttttagcatgaaccaaaagtctagatcccaaaagaaaatctgatgttcagcataatattatttgcaacaccagcctaggaacgatgagccacccctgtcagtcaggagaaactttgcatcagttcagggcaccgttcaccagccaagctcccagatgtctgccagagtccaatcttgcaagcaggactttctaagcaccgcagtctccagcctcctgtcaactcttgtgcacagacactcttcaactctcttttgccatgtcctgaactcgggagctacacggtacagattgcctaatgataatatggaagcagcctggctcactgagtcagaatttggtggacaatcacagaagaaagctgctcatgccacactgggctttgtggtcatgggaagtaagacttcatagagctatgccagtgagattttaggatttgttttgtttgttttgttttctgtagcacagctgttcttgtctaagagaattagtatctagaatgagtaaaatattcttattacttagtattaagaagacagctcaataaaaatagcaatactgaggctgagtaggcaattcacacaagagtgaacataagttaccactaaacatgagaataacttcgcaaccttacttacaatcagaatattgcaacctgaaacagtaagttatgatttcaaaattactagattggatacttttccaaggaatgacagtcctacatttgagtagacatatgggctggtgaaaattgtttgtatatttattacaaaagataattacaactacatcagaaaacccactgtgggatatattgtgacaaaccacatttctggaaaatttatcaacgtatttaaatcacttgggttcctttcattgtctttaagttcaataatggagaatgcaactgtcagtgtttttcctattttgaaggtagtctttccatcttttaaaaagtatgataaaatgcacgtaacatataatttcatcactttattttttaaatgtacaattcaatgacattaagtacattcaccttgttgtggaattatcagcattatccatttccaaaattattttcatcaccccaaacagaaaccctgtacccattaagaaataacttcacattctccctcctctggcaaactctaatctattttgtatatgaacgaatttgcctattttagataatgaatttacatgaaaccaggcactatttttccttttgtttctggcttctttcacttagcataacgctttccaggtgtatccacattgtagcatttattagaacttcattctttttcattctcaataatattccattgtgtgtatataacacatttgtttattcattcattagtcaattgacatttgggtggtttccaccttgtagatattgagaacaatggtgcagtcaagactggcctggaaatatctgtttgattccttgttttcaattcttttgggtctatacctaggagtggaacttctgggtcctttggtaattctgtttctcgttttgagtaactaccaaaatatttctttgttgcagctgcacgattttggatttccaccagcagtgtccagtttcttcacaacatttccagaacttgttatttccttttctttttcttttttcttttcaaaaatatgatgatgatgattactgtttttatagccatcctagtaagtgtgaatgatatctcattgcggttttgatttgcatttccctaatgactaaagatgttaagtgtcttttcttgtgcctatgggcaatttgcataccttctttgaaggtaatatttattttatttgattgtgtttttagagtcgctattgactttagatttaagctggtgtacctgtgatgatactaaaggaaattgagattgagattaaacttctcttgggcgatttgttgttggctaagtgtttttaggtgcagtacttctgagacattttgggatactgtagagagagaaataagtaatttattgatatttctgggaattagattttttttacaaagagaagagagatataaataagaaacgggaagatgaggaagaaatctgtggtgctgacttgaattggagttattaatgcaaacttaaggttttaaagattatatatttcctaactttatccagagaagggtctaaaaaacaatacaaagtaaataaacgaatggctatatttgcttttttttgtgctccccagtaacaataggtacattattttattccaaatgttattccttataaaaggctgcttccatatcaagggaaggaaaagtgttagaacatcttttggtagaaatcaagaaaaaggtcagaaccaagaagacatgtccaaaatccacagaagcaatttcaaggggctccattagccaaatccgggtcaatgcaagctttaaagaagaataatgaggatactgaattgtaacaagttataaaaatctataaggctataatgacaatcaaaagagatagataagaatctcttcattacggaagaatgctagttgatatatctaatgagaaaatcaatgcaaccatccacataattatagacaaattccattagtagatgcctaaactaacagtttttgtttccttcaatactttgagttatactgttctactctctcctggcctgttgggtttctgctgagaaatctgctgaaggccatactggggctcctttaaatgtgatatgtttctcactgcatgctgcttttagtattctttctttgtctttgatttttggtaatttgattatattgtgtcttggtgaactcctttttgggttgaatttgattggcagcctccaagcttcctgcacctggatgttgctgtctttcctcagatttgggaaattttcaaccattatttccttatatatgtttttggggcctaacagcatatgtaccttgtttcaaagcatcaatacacagattattacttaattacaaagggtaaagggcacattcacaatggagagatcttggatcagtcatctcaaattaagcattgccaaaatgcataaaaatgacattccatattcttgtgattgaccagatgcaatgggaaatagacatcatctatggtgtatattttccaagtaattaacctctaataatatgaaaatttttatcgtgagctgttttacaagtaagctgaccaggacacttcaaaaatctatggtcatgaaaaacagaaaatataataagtgggtggaggagatgtatcattgaaaagtaactaaagagatccgacaacttcctgaaatacatgatctttgatattgtcccagaggaaaaagtaaatcaaaaccaagggacatggttttggtggggacaaaccacggccaaaccgcaggcggggctctggcaagacagtaggaatagatggagttgggaggaactccccccagtgccgcgcaaacactgtccaatattagccctgattctactgaggacagtgtagacatggccccagtatttctgacccatgaatggagggcctgagcctggtaactctgaaccattcattgaccagcaggcggcactagggtttgctggggttggcttgcttttaaatcagggctcagtgctgtctgaggagttaagtttaaaggaaaagtgtgacttcatcccagcatccagaatctagtttgcagatgtttgagtgtcctgtggaatgtgagccattaaacagaaactcttcatcttccagcaatgccagtatcctctgttcagcagggaaaccccaactgtagcaaatcattgagtgaataatgttctgggcttgcatcagggatagatggaggagagccaggagccagcctgcatgctcacagacccatataaagggagaaccacttcctcctcaggagaactcagagaaaccttagcaattcacctgtaccccacacctaacccattccagttgtgccctggatggtggacaggaggatgtaaagggaacataggagaggggagtggacaattccagacctctccagataggcttagctcaaataaccttgcaaatattctgaataagagccagatttcccagggctctggccttttcttccctgagcagcatgatgatgctccattcctgtcttgacaaggattctgtcatggatttcttggttgtgctgcccaggaagcaggtgaggcccaggaacaatgaggaatgtcgtccctggacttggcatgcctcactcgcaagcacaccatatgtgggtcctgtgattgataggtttgatagatggatacgtcctgtttccagccaccagcctctatcccctgaatgctgttgtcaactcagagccacaactctggtcacaaagatggagcaggtagtggcaccttaatgtgaagaaagtttccatcatgcaattgttacctggtgcctacatgagttagactcaaaccagcagctgtttacctcagtgatagaggatttatgacagaaacagagggctcttgtaattctatacccacaggtattcacctgataaccttcacatgtgtcccctaggttttggggactttgagcctgcctcactgaacacatatatcctcgttcccagctctctggacatgcatctccttgtattattgtcttatgccaactctcaggtgcttcatcccctaactcttcccatcctttaccccttaggcaatgaataaaagtatatttgtgactaatgttgccccattagaaaaaaaatgccagatactagccactgctgttcaattgtaacttatactaaatctgtaaggtttttttttttttaagatttcaacaaatctgattttagatttcttttttcttttgttttgttttttgagacggagtcttgctctgtcgcccaggctggagtgcagtggcgcgatctcggctcactgcaagctccacctcccgggttcacgccattctcctgcctcagtctccagagtagctgggactataggcatgtgccgccatgcccggctaattttttgtatttttagtagagacggggtttcaccgtgttacccaggatggtctcgatctcctgacctcgtgatccacccaccttggcctcccaaagtgctgggactacaggcgtgagccaccatacccggccgattttggatctcttactgtattcacaatgatattttcagggataagagagtccccacccatcttataagatatcagaactttcattacattgatgaccaagaaccataggcagaaccatgatgaagacttggtacacaatgcatcatgaagcttgataacagaaaagagaaagctggccattgaccttcaccaaaaatgaacccttccaactctctctcagggtattattttacccctttagcttagagcatgtcagctggttcaacatgcttctaggataaacctgtgtcaactaccccagctcccactctgtctaagctcatagcaatgagaaaatggagaacctggtaagacagaaatgcccagagagaaggatatacagataagacatagaggttactaattgttgtctgtattttgagttgcctttgacacattcaagtagaaacatgcagcagaagatggccctggagatgcagtgggtgatccaatcccccaagccctagagatgtgagtaaagacacttggatgaacttacacacagtccatgaatacgctaaagcaacttctagctctgttttagttcataacaactggtttctaagaacttaggcacttgtggagacaatgatgttactgtaggaactaccgtataaggacaggatgtcccacctcctctgctcctgttcacaaggaccctgaactggcaaagctcccatcctgccctgaccctgccatgagcaccaggcttctctgctggatggccctctgtctcctgggggcaggtgtgtcctaagaacaccatgatcatcccattggaaattccagtgatttcttcaatcatttctgtctttctgttttcaaattctgtctttttccccaacagaactctcagaagctgaagttgcccagtcccccagatataagattacagagaaaagccaggctgtggctttttggtgtgatcctatttctggccatgctaccctttactggtaccggcagatcctgggacagggcccggagcttctggttcaatttcaggatgagagtgtagtagatgattcacagttgcctaaggatcgattttctgcagagaggctcaaaggagtagactccactctcaagatccagcctgcagagcttggggactcggccatgtatctctgtgccagcagcttagccacagcgttgcagagactttctctcctgtgcacaaaactccagggctctctccgctctactcagctcacagcagcctttccttattcctcatcctctcagggaagaagtgagttttcagatatagctagggttcatatagtgggaggaaatgaactattttcttaaaacatgagcgctatagttgttggttgaaaacatgtcttagggatttgaaacacttctgggtgggaattcaagaaaccaaaactgaaagtgatttatcccagacctagtcctcaggggcagtgatggttgttcttctataaaaaatgcacacaatgttgtacgttaattaagaaaataaataaataaacttgaaaaataaaaacatttaatcaccaaaacgtgtgttaaactttaataatatagatattgattacatgcaagtgacaaacagcaggccctccttctgccgttgtcagcatctgaatgatgtgaatcttatctggctctggagcctcttcttgacctctcactggatgtttcatgcagtcaaatctcaacagacactgtgtgtttggaaatcttttccctctgtttttgtggaaatatgacaataataataatattgtaatgatgatgatgttgatcatttcagctatttcattcagcacactttaaacttcaaagaaatgcacacaaatggttatcctggaaacaattcccaaatcttaactcaaaatgaattttgcttctctggagtgctttaacttttcagtgtaacagacacagcccaacactataattaggcctgggccagctagttcagaggctggtgaagacacttccacctgcctgcctacttccttgtctgcccactaaaatagctccttagtgcattagatattcctgccagaacttcagaagcaatgaactgcccctggtccagttgtctcctctgataatgcactgtgtgtgtccaactctagtctctaccctaacttctgcccagattctcctgtactagaactcattctgaagtactggttagaatgtttgggaaggcagcttcctgggaatcctccgaaggaccatggctgtcagtgattccctcgtaacacttcttgagagcatcttgtatttcattgaacgtaggactcccatttatttcagtctgtctgctcctgttcacctctgagatctctgtggcttgtttgtgttgatttccttttgtgctgcttcttggtcatttgttcgtatttttccttataaacctgattatttttgacatcgtgccagacactatggttgtagaaataatttttggtctaggatggacatatctttctccagagataattttattgtgttttgtaaagtgcatggatacataaacaatccaggactccctgaaaaagaattaaaggcttgaggtgtcctggagcccctggagaacaggtttcctactagttccttgtttcaattcaagttcctcagtggtcaccctcagtaagttctggtcttagccattaccccccagcctgtgaatcagcttcctgagagctgggctgggatcagcaaatgcccctaagggcagtgactgctgtgttcactcccccaggctcctgccttctccaagattctggaccagttgtccctcataatgtttttgggatattaattagtttcagtttttgttagtgtggtaatttacccaactatttaaataataacagaagggttaattttgttacaagaaaggggtcctgatccaaccgccaagagagggttcttggatctcatgcaagaaagaattcagggtgattccacagtgaaaagccaaagcaagtttattaagaaagtaacatggtgaaagaacagctactccacagacagagtagggctttcccaaaagtaacaggaggagcgcatctaccctacgtacaatacttgtttatatataggataagaaaagatcgttgagagatgtgctctgctacaagggtttgtgataaaggattaactttcttaattactatgttttgcaagaatcagtattattatctttaaagagaaattaggaatgtttctgttctcaagatattggggtatcatgacactcccaagtctgggtctgtttagtaaacattattaatctgttgctttaaccataaacatctagaggttagggatacctgattttctgggaatgcagcccagcaaggcccagcctcattttttcacttaagatggagtcactctggtttgaacgcctctgacaatttgagtttcctcttctgtaattactcagatgaaggtcaaagaatttcatttaaagttttaattttctttgaatttcaatgtctgattcttagtctgtgatttgcttgatatttaacttaaatagcatagagaaatgttttactaaaactttaatttcgaggaaaggacttttttaaaaacttgaaggggatttataatcaaattgggacactcacttggttttgacattttatcatttagagtattattatgttgttaattacataaccttcgatgcttcattcgaacagggtaatgagaatagagagtaaatatttaaacttcatcagatctttgacacacctgacaaaaacaagcaatggggaaaggattccctatttaataaatggtgctgggaaaactggctagctatatgcggaaaactgaaactggaccctttcgttacaccttacacaaaaattaactcaagatggattaaatacttaaaagtaagacctaaaaccataaaaaccctagaagaaaacctaggcaataccattcaggacatagacatgggcaaagacttcatgactaaaacaccaaaagcaattgcaacaaaagccaaaatggacaaatgggatctaattaaactgaagagcttctgcacagcaaaagaaactatcatcagagtgaacaggcaacctacagaatgggagaaaatttttgcaatctatccatctgacaaagggctaatatccagaatctacaaggaacttaaacaaatttacaagaaaaaacaaagaaccccataaaaagggggcgaaggatatgaacagacgcttctcaaaggaagacatttatgctgccaacaaacatatgaaaaaaagctcatcatcactggtcattagagaaaggcaaatcaaaatcacaattagataccatcctatgccagttagaatggcgatcattaaaaagtcaggaaacaacagatgctggagaggatgtggagaaataggaacgcttttacactgatggtgggagtgtaaattagttcaaccattgtggaagacagtgcgacgattcctcagggacctagaaccagaaataccatttgacccagcaatcccattactgggtgtatatacccaaaagattataaatcattctactataaagacacatgcacatgtatgtttattgcagcactcttcacaatagcaaagactcgaaaccaacccaaatgcctatcaatgatagcctggataaaggaaatatggtacatatacaccatggaatactatgcagccataaaaaagaatgagttcatgtcctttgcagggacatggatgaagctggaaatcatcactctcagcaaactaacacaggagcagaaaaccaaacaccgcatgttctcattcatacggaggagctgaacaatgagagcatatgggcacagggaggggaacatcacacaccagggcctgttggggcgggggggtcaaggggagggatagcataaggagaaatacctaatgcagatgacgggttgatgggtgcagcaaaccaccatggcacatgtatacctatataacaaacctgcatgttctgcacacgtatcccagaacttaaagtataataaaaataaataaataaaataaagttgatcagagagcagagagtgaacatggaatttacttcattcctgcactgtcgtgactcatttgtgccatgttttgtgagcacacctgaggggcaggggtcagaattggagggagtcacaggtgtgtggctatcatcttttccttcccagtcccctggaaaggtgcttggttccacattttccatttgggggaacttccctaaagtgatacactggtttttgtctattatttgccaaatgtttcttatgggaagtgaaataagttatcttatttagtctcctcttcatctgaggttagtctctcttcatcatcatcctttcatcctggctactgagaaaaaaaagtagattcttttggtgctttttcaacatacactaagatcagtggagaactttctttccttacagggttggcctgtagtttgcaggggagagagaatggattaaattctgatacagaatagtgtgggttggcctatttgctctcctatctgagcactattagttattaacactgatattttatctccacttgtctgacttcaatgtccacctctcaggtggttccatcttaggccatagcaacattaagattgctttctgaccttctaacaccaacaaatcataattcccatatctccatgactcaacaaagcaaagcacaagtcccctgtgtcctggcaagagagcagatttgtgctgtttctgcctactggccacaaggaggcactgtggctttgttgtcatcagagtcaaatggggaggggcgaagatggctctctggaagattcttaagggaaaccctgggtttggccctagattcagggagctgggctgtctggaatgaaggctgggaatgaaggaattagagaccaaccaatttgcctgtattgttgtggagaagggttttgctctaaactgagctctgaatggggctgagtggcaggtgtgcttgcagtggatatatgtctgagcgcccttaagatgtggaggcacaagtagctggggtggtgcagtgcccaggttctgggctgggaaagcagagaagcagttttcatgttacaggagccttggagagcctggccccaaacccccaaaccagctcaggccagccctacctgctctgttaaaagtagaaggaagagcagggagagacggaggtgctaccctggaccatcggagggaccctgttccccagtgagggggcaatcacaattacaacaccagtagcatatacacttattaggcagacactagggtggagtagaacagagttttctccaccaagaccttttgctctcagcaggaaaatggcccagtctattaatagttcacctctgctactcacttcagactcctgtgtgtcccctggaagaaggtggggtctgggtagagatagtatcttttcttttggtttgaattaaagttctttccatatgactcgttcatttgcctctacctgtatcttgtatctagcttctgcctcttgtattcatgtgtgccttggacactataaagtatttgatttctactgctgctgtaatgaattaccactgattttggaggtttaaacaaaatacatttgctaccctacaatactggaggccaggagtccaaaatcagtgtaactgggccaaaatcaaggtgttggcaggcctgcgttctttcccagagctctaggggagaactgtttttctccccttttcagcttctagaggctaccagcgtgtcttggcttgttaccccattcaatcttcgaaaccaacagggactgactgagcctttgctcatgctgcatcactctgacactctttgtcctccctcttccacattttaggacccttgtgactacattggacccgcctggaaaatccaggacactctcccagtatgaaggtcagctgattgacaacctgactttgtgtggaactttaatttttcttttacaagtaacttaacacattcctaggttccagagattagacctggacgtggttggagggcctttgttctgcctaccaaacctaggaacttggtaagagggaggaaaacaaaatgatcacctggaaaccagaatactgaccaccgttttacatcccaggcctaacagacacaaaaagggatggagcccacaaggaaatagacacctcaggtctcacaagctcgtctgtaaactatttgctccttaggatcggaaagtactctggggtgcaggggactcagcagtatgcctctgtgccagcagcaaaaatgtggccctaaactgctccttcttggttagcaattaacccagttgaccaacccacagagcagaggcttctctcagctctgtacactctacaccctgagaggaagtcggcttctgagatgcaagactcttttataaggaaaagtccagttgtaaagattaagaaactttgagctttgctagaggtaaaaataggatgtaagtcaactctggagcatttaatttccaaatgtttatgaaaaagacaatcttcttcctgttttattgtatggatagagaatgagagagattctgtactctgggctttgcaaactcactagagttcaagaataaatacactcagagaggtctttcactgcaaagaagagctttgaaatcgaatgaactttcaggatatcagttcggctcctgtatctctaacaacgcagttgacatgcttgcccttcctagggatctcaggggccaactcctaactcacttgtggataattgaagtgcattcaaaggagtaggagcacagagacatcagggagaggaataggagagtttgcagagaatctggcttgctgtaagacaatgagttcatcttgaaataattggagtgtgaggtgcagatgaatatagttggcaagatcctaggtaagatatactatagagaaggctttatgaattggtaatatcaagacaaatccacagagagcctccgtaggtgtgcatttgtgtctcagatcaattatagttcagtcctgcctgattcatctcccagagatgcagcctccacttaaataaggagctttcaaattggaggtggtggcccattcagtgacgtcactgacagatgcatcttgtgtggataaaatgtcacaaaattaatttctttgttcatgctcacagaggccctggtctggaatgttccacttctgctctcactctgccatgggctcttggaccctctgtgtgtccctttatatcctggtagcgagtgagttctccgatatttattatggtcatgctggacctctgtctagatgactccttatattttccttattctttcccccaattctgtcttcttttatagcacacacagatgctggtgttatccagtcacccaggcacaaagtgacagagatgggacaatcagtaactctgagatgcgaaccaatttcaggccacaatgatcttctctggtacagacagacctttgtgcagggactggaattgctgaattacttctgcagctggaccctcgtagatgactcaggagtgtccaaggattgattctcagcacagatgcctgatgtatcattctccactctgaggatccagcccatggaacccagggacttgggcctatatttctgtgccagcagctttgccacagcactgcagaatctccccatctctgtgcagaaaccctggtgcttcctcttctccccacagctctcagcagtcgtcagcaaagtctttcctgctctctgctcaccatggctcacgcctataatcccagcactttgggaggccgaggtgggtggatcatgaagtcaggagatcgagaccatcctggctaacacagtgaaaccccgtctccactaaaaatacaaaaaattagccgggcacggtggcaagcgcctgtagtcccagctactcgagaggctgaggcaggagaatggcgtgaacccgggaggcggagcttgcagtaagccgagatcgtgccactgcacttcagcctgggcaacagagcaagactccatctcaaaaataaaataaaataaaaattaagtgggtttggagaatgacaaagacagaagatggtaggatattaacataaaaaaaatcatgtgtaggggataatgtagaaaatgtgttttgtgaatttctcacaaattgtctaaggagtcagaattcacaggcatgtaagataaaccttaattacccccactgtaggtttccttgtctccaggtatttgccatccgcattagcaagctgagagctcctgagaatggctatgtcttttgaactagtctgccctctgcattctattttcaccctaagctgtgaacagaaatttcccccacaagttttcttgattgtaaaagaaagttcttttctatggcattccttataatgttaatttcaacttaccatttatatagggattttgcattgcacttaaagagtaaacctcctgtgggtaatacaggcagtgaaataggttagatgtaagctgctcctcctggactctagggatctatttgtctttatcctgcttaaggagagccaagttctagctgaaggcctgtgccaactcacaggacactgacgtggtctcttccactgcctgcttggagctatccacatgtatccacacaggctgtctaaaagcacacaggcctggccagtcttactttgacctctttcctccctgatgctgtgtcctggacacgcatatctatatattttttctggtttatgccgcgtatttctacacagcacttgcaattcattctgaagaattataatttctttcttctatagtagtacttacatactgatcacttctcaacccctatcagggtatcattggcaggtgttgcaaactattcctgtattttgagtgcccaagacaatttgagtttacctgagttcttccatataggcctaggtttcacttgtcattgtctagttttgttatttaaaggccaaggttttcaagatcacaacagtacagaataaaattcaggaattttttaaaatgtacatcaaccgacctactctgtgtttatctattgtcctggtgtctcccttgctctttgggcttctctttgctgcctccagatcactttctttcctccttttttgaagcccagctccttacatacatgacgttagaacaggacccttcattgctgcacttgcttttttcccttcagaactctcttcccattcagtcctgtctgctactaatcctgtcatcattcttaacgactactcatcccacagaccatttttacattggtttggctcctcacttttgaggattttttttaacctactttttttttaagaattgcttccatgattacagtaaatatctactgaataaatgcatgtcttcctcagcttggagatttctgagggttgcaactttgtcgaatattttatccattaatcctaactgtgtatattagacaaggaaggtattaaaaatcatgttttaaatcagaaaatcaataaatagatttaaagagacaaatgcaaaacaaaactgtttagagctgctgttctgggctgaactacagatggactgtgtaagaaatagtaaaatcatctggtaatttcaacttatctttagaatctttggccggaacagctccagggaatcaagggatcataggtggaaagaaagacaaagaggttaaggaagtgagaactggctagggtagcattctctaccttaaggttttcaaacataatatcaaggtcctcagtttatttgtaatttttttgaggatgaaaggaaattatgcacgtgacccaaggtatacacaataaggaaactgacacatgactttgctgagatggaattatattaaagttctgtgacactcacaaactcatctcatgctgattagaaactgtgattggcaatgctgtgtgttacaaaaaaattaaaaaatgattcctttaaaaacattatttctttaaatcagcattttccaaaaatgggggaaatattaaatactatccaattttggtggtgcaaaaaataaaaaagcttaggggcttccagtacccctgacccagctgaccttcctttcccaggcccatgtcttttaatgtgcatttactcagggaaagggaagtgtggctgtgcaggaaaagtggcaatttagaaaacacaggctcaagggcttgatggagggtcccagaagagggcagggcactggtgatcagaggggattagagggcaagctgctagggtaagctgtgcatcagaagtggttccttttgtttccttcagcagtaaatttttattatcattattactttagctgtcctccatatctacttctttagtatggctggctacttctctttccaactctttatgcactaccgtggatctcaccctaggcagaaacaaatccccaaactctcaccagctgcgctcatgaaacaacccttcctggcaggctgtgatctcgccaagagcgatcaagttgatcaagctataaactgacttcatcactagtctaaagaggaaactgtggcaagaacagctgcaggagaaaccctaattacaatgggaggagagacataaggattttaaagcagttttcaaactagtccttctcaagaaccaaacatataagggatcactgggagctgtctctgaagtgggttaaagagaaaagaacagacaaagataaggttctgatgcctgctctctgttcctacagatctctccagaagtcactgtagacctgctacaatttccctcactttgctgtgacacagcctttcttcgttggttcctcctccctatgacttaaacctctctccctcccctcccctatctccattcttccagaaaattcctctgccattcccagagacttgcagaacactggggtttgaaatacattaaatagattttttttaattaataatgatctctgttaagtaacaaaagtttcatatgtgaattgtgcacaaaaaaattatagtaaacttctgagataatgttagaaggcttatgtaatgatcaggctagctttgatgaaggaatttgggactcagggtgagaagacaagataagttagtagacaataaaatgagttgatttattctgtagtagttgggaacttgtttaaaaaaatggagaaagaaattgttgaaaaccctaactccctcaagaggtctgggaatcctgtagcttacatggaatagaaactgaaagggaatcgcttgaacccaggaggcggaggttgcggtgagcagagaacatgccattccactccagcttgggtgacaagagcgaaactacatctcaaaaaaaaagcatgatcaaatttgaatcatagccaaatcttacaaaaattttatgtgaaatatttaattttgccaaaaaaaaaattgatgcaatgacctctacccttgttcacctttttttatcttcactatgtcacagagagtttggcacataatagatgataagtaaatttattttgactctattgagtaaatgacaataatatttcacattctctcaatataatagttgaattctatgtgtactttcttacttagcagagtttcacttcaaaaggggcttcgtcctccacatgaaatacaacagagagtcattatggctagtctcaattttccatacaacttctgcaatattccaagcaaatgtgtttccccagtcaggattaatgaccaatgttacacagtatcctaaccacatctaaagctggaatttgcaaacatccttttggaacaaagaaatttatgttataatagtatttatccagtctcatgatctggtaaaataaattcttcaccacaaccacattttcccaaaaccacattttttgaggctggaaacatcatcatctcagaaagcaccctaaaacactgtaagaaaaattcaccgtgctcggtaatagaatcttatcatccttgcaataagaagataccgtgtgtatgagtgcgagtgtgagagtgtgcatgtgtttatatgtgtgagtgtgtacacgtgtgtgtgtgcattttctcatggagactcatccacatgaaaatagtttctctttggatttcattactaagaggcactgggtgattggtggagctcataggcagttctggggagtgacaggaaatgtcagaccactcaatctgcctaagttatagctgatagggttgtttatttcaagactttctataaattaagaattaaatatgaaaaagcccagagacctccattataaaatgcactatctaaaattctgtaaataatccaagtacaaaatatgaagagatatgtgtctgatcaatcaaaaggagacatggaatatcgcgtttccaggctggatctgtttgatctcttcaagctgttttactttatgccctgtgttattcagggttctctctttcatcttatcatatgaattgcaattatgtaacatttatcagcaatcaaaatattggttaatgcacccttttgtctccactggctaagggtggatttgaagatcaaccctaaattggcctgcttgggaaagcattgaggttgtgtgtgtgagagggtagggtttgtaggagcggagatgcgggaatccctgttcctgatttggacaatcttgagcacatcagttcagaaagtgtgaatccatgagactctggacagttggccacgtggaggcactgtggcttcacaatgcagtggggaaccttggagagcggtgggagggtgacccaggagaggagggctgaagggaagcctggttgtctgctggcatcagcagggcaatctgagttcagagtggatcctgagttaaatactgccagagaagggtaggggtgccaaaggcctcaatttgccccaaggaaaaagtgtctctgtgtctgtatggacagtggagggtgctgaggctggggtgtcaagggctggggaatgcttctcaggacagggacagggtgggcaggcataggaaaataggggttgttgtgagcatgtgggcactgtgctgcacctgccccacctttcgtttaggggccctgcagaccaggaatggaacatggaatagcagagcctgaggcctgcctaagtatgcagtgagctcacagtgtcctgcagggccagtaactggaaaggccagtttcctatggaaatgccagaaatattcctgccctgactgaggttcaggatctggtggcagcctttcccaggcactctctgctgcttctttttttttttttttgagggcatcttgctttgctctgtcaccaaggctggagtacagtggcttgatctcagctcactgcagcctctgcctcctgggttcaaatgattctcctgtctcggcctcctaagtagctgggattacaggcacccaccacaacgcctggctaattttttgtatttttaataaagatggggtttcgccatgttggccaggctggtctcaaactcttgacttcaaacaatctgcctgcctcggcctcccaaagtgctgggattacaagtgtgagccactgtgcccggcccctctgctgcttctttatgtgacctgttttaattctgacagaaatcattcaaaataagtattatcttacctgtttatacatttgactgaagcagctttcctgggtctcacatacgcttagatggaagaaaccagacctggcattggatagatcagtagtagtgtgacagtagttaacatcagccaattatgcatttcaaaatagtgagaagagaataattcaaatgttcctagtctaaagaaaagataaatatttaagataatgcctatcccaatgaccatgatttgattatacaaatgtatcaatgatcatatctacctaaaaaatatgtacatctaatatacatcaataaatagtgaattaaaaaaaagataactggccgaagcctgttcctccaacacctctatccactgttcccactctgtagatttgtcctctcacctggccttccgtttccaggtccccattagcaggaggggaagattatgccacatatgtgatcattatagcctctccactgacaagtccaaggaggatatgacttccaggcaaaacatcttttcatctttcattgtgacaaaaatcaaggttcagttttctccactatagcagttctatgggtgaggccatgtgattgcttttatggaggctgtgtgaggagggaggtttctcagctgcacagcaaggaaataagatgttgtttaaggaaagcacagtcttccagtacctgatgcaatttaccatgagggaaaagacacaaataattgctattcattagttaattttattattttttaataagacacaaagtcatctaaaatgcaaagatagtagtctgataattaggtaaaactaacataaatggttgtgtcttaagggaaagtaaaaatgttgccccttacagcacttcctggttgatactgagtctgatatgcaagaaggtgtgatgctcccagaaagctgtgaattcagagcaatcagcaatcccacaaaagagctgatagaagaatgggcggttttattagaaagaagaggagcctctagtgccttccacgacatcctcactgcccacctctgatttcaggcttgctgtagtggacagttgtgtgcaagtccccattcgcctcgatctggcagtgcccttccacaggtgcatgctgggagtctctctgcttcttccccagggctgttccatgatattatctgagcccacctggcctgtactcaaagacagccagagctcctgatgcccctgctgagacagaggactaatgctccagcctgcccattcatgcagaaacttcagacagcattctgtgtgctcctgagaggccctgatggattccatctcctattgctccaacacaaactcttttgttgtttgtgcacttttatcctggcttcttccttccctattttatgtttcgttcctacttcttcttcctggaatcatttcccgaataagctacatgcacctaagtccccatcacagactttctcttcagggatagcctatactgtggcagtgatgggatgaagccaccatccaaagacccttccctttgaaggagacctttgtttttcttttactcataccgctacccattcgtttaaaaagtcttatgatgacatatataaactaatctcttccagattcatttggaattattcctgaattctcagcagcctcaggatggctctctgttcccttaaagctctgaacccaatttgaactgaatagacttgggttctctttacagaagcagagtttgcctggacccaggtaatcattcattccatttttcttccattcaacaaatctttaatgagctataggtgcagagtagattcaaattttgtggggcacaaagctgatacaattttaaggagctccttgcaaagaagaatgcaaaatgacaaagtgttggaaaggtcctgtgtgagtgagaaggcccgaggttattcttcattgatttcatggcaactacataggtactgtccaggtacttgggaaacaccagtggagaaaccagacagagcttcaagttgaggtagacacttccaaaaaattgttataacttattatactgaataataattaaaaagtaaaaggatatattccccatagatgcttatgtctccagagaagttagagtgctgttgaaagtactgacattctgggtagctcacacctcatttagggaaggatccttagagctctgggattctacgtgccgtatcccaaaaatgaaagtcctgcactgaaaagatttttttttcccctgccctggcccaaccacgaagattggcccctttgcttggtctcccaggaccagatgagttctgggcatagatgggaaagtccttccttggcttaccaggccccagccacggcctcccatggggatgctcatgggcctcctccctgtctccacttctgattctgtgtcctctctcactggagcatgattgtgggaattacccatccaggttgcatcaagatatgcaatagataatctattgtatctgaaataacaatagcagtgctattgactggatgtaagtttggtgccaaagcacgtttacacctcctccaatcttctcccatttagtgaatacaagatcttctgaatggaaatagaacatttccctgtgaccctagagactccagatagttgtagttctgggtgaacatttcatccacattcttaatgagcctcctcttttcttcataggaagtacagtcacttatgggacttaggtggtgagtgtttgtggcttcacctgaagcaaagggaaaaatcatcctcatgagaacacaccgcagcctgagcttggatggtgaggctcccatcaggtgcaatgaggtgctacagtgtgaaacaagacttcaaatgttaaagaccttgaatccacaactttgaaacctttctggatgtcagttgactcttttaaccaagggtatctctgtaggctgaaatacaaatatccagaggttaaacaaagtggaaaataattcaacttggagttgaattttgtacagagaagtcataaaagtcaccaggactgctatgacaatgctctttagactacagaaatattcataaatgttaaaacagcattcaaatgaagaatttagcataatgggagtaaaatacgcatagaagaacaaattcccctattaaaatcagggaatgagattacacattttaagatttctttcaaaacagatctacaaatttttcccaatctaagcttctcaagtatgtctataataaatgatttgttcctgtggggaagagaacagatgtggcaggttagctctgaggttcaagcatttagcagggacagtgacatcatcaagtcactgagagctcaacttcaatttgcccacagcagggctgggagacacaagatcctgccctggagctgaaatgggcaccaggctcttcttctatgtggccctttgtctgctgtgggcaggtgagggctggtcacaggagggcctccttccctggaattcccaaggactcaatgcaagcttttctgttgggatgacagcatcagtgtctgttgttctctattacaggacacagggatgctggaatcacccagagcccaagatacaagatcacagagacaggaaggcaggtgaccttgatgtgtcaccagacttggagccacagctatatgttctggtatcgacaagacctgggacatgggctgaggctgatctattactcagcagctgctgatattacagataaaggagaagtccccgatggctatgttgtctccagatccaagacagagaatttccccctcactctggagtcagctacccgctcccagacatctgtgtatttctgcgccagcagtgagtccacagtgctgcacagctgcctcctctctgcacggaaacggcagttagaaaaactgaggttgcctgtgcacccaagtctgggccccaccctgggacgtctcagcccccataggagtcacagagtcctgcccaggttgggggggtgtcttagagcaggggccatatgaccctcagtgctgtggctctattcctacccctgtctcagaccatctggagtttgccccaacacactaaccttgctgggtctttcttctgcagctctctttttctgcttgcagaatggaagagatattttgttgatattcctaattcccttcataatttcaaagccaacatattcttctctcccttatgggatcagtgacttcttcgtgtaaaccttaccgtatcctctactacccttcaactcacagacacaaatcttcccccatgtggtctctgctcctggctgcctttcttctaagggcaatagccctacaaggtcatctatcatttgcccttcacctgcttctccatcatcattttgtttttttttttttttttttttgagacggagtcttgctctgttgcccaggctggagtgcagtggcgcgatctcggctcactgcaagcccgcctcccgggttcgcgccattctcctgcctcagcctcccaagtagctgggactacaggtgcctgccacggcgcccggctaattttttgtatttttagtagagatggggtttcacggtgttagccaggatggtctcgatctcctgacctcgttattcacccgccttggcctcccaaagtgctgggattacaggcgtgagccactgcgcccagcctccatcatcattttgcattaagtttcccctggctttctgctttagccacactcccctacattcagtttacacgttcgcaggtgtagtgttgttttccaccctggggattgtttatgaataatagattatttctacttcactgagcatatgtgcctccaacttattcccaggcctccacttcattccttacataaaagtctatttcaggtacatttactcttaactgtaaaaagcaagacaaattttatgagagaaaaattaagaaatatatttttagcactcatttgaggaattagttttttagatgacacataagaaaaccactagccataaaaatatttgaggccgggcgcggtggctcatgcctgtaatcccagcactttgggaggctgaggcaggcggatcacttgaggttgggagttcaagatcagcctgaccaacatggagaaaccccgtctttactaaaaatagaaaattagctgggcatggggtgcatgcctgtaatcccacctactcaggaggctgaggcaggagaatcgcttgaacctgggaggcggaggttgctgtgagccgagatcatgccgctgcactccagcctgggcaacaagagcagaactccacctcaaaaaaaaaaaaaatttgtaactccagttgcattaaactaaacttttgtacaccaaaacatagcataagaaatgaaatgttaagccacagcacaggaaaaaaatgaggaatgcatgcagatgatgaaaaatcagtgtgacagagaagagtcaggctcacccatggctcctctatgcttcctggcctcatttgcacttggagggctgggagcatgtcaccaggttctgaatagtgggaggtgagtaaaaataatgttagcccaatttcaagtctggcccttaaaaatatcctgtaggtccatgctgagggtccctaagcgtactcccgtgtttagagatgtggtatatggcatagagttgtactcacagctaagattttctaacatgtcttagtaagttgtcagcagcagatcatatggagaaaacacaggtggaatctgaaggaatccaaactcaggcctccttatgctgtcttcctcccggggaggtcacacagggttctcgcttcactccgtagcaaaaatgcattaacacatgtgcagtgtttctaccaagtgagtccaacagagactcagcactcatgaggtttcagaggaggctggtcacaagcacatactgcctagcattaaccaaaaattcagactccagaaggaaatctggtgttcagtacaatactgtttgcaacaccagtttaggcacaacgagccgctcctctcagttaggagaaactttgccagtgcagggcatcactcatcagccaagtggccaaagatcagccaaagttcaatcttgcaagcaggcagtctcaagcctgctgtcaactcttttctgcacagacactcttcaactctcttttgccatgtgtggatgaatttgggaggtcatggcacagattataaactggaagcagcttggctccctgggtcataatttggtggacagccatggaaaaaaagctgctcatgccccactgggttttgtggtcatgagaggtaagacttgatagagttcagccactgagattttaggatttgttttatttatttttttttctgtagcataggtgtccttttctaataaacttagtacataaatgagtaaaacattcttattaataagacgacagcccaataaaaatggcaatactgaagctaaataggcaattcacacaagtgaacataagttaccactaaacatgagaataacttttcaaccttacttataatcagaatatagcaacctgaaataataagttatgattcaaaaattactagataggaaacttttcaaaggagtgacagtcctaaatctgaatagacatttgaactaatgaaaaccgtttatatatccactagaagagataatgacaaccacatcagaaaacccactgtgggatatattgtgactaatagcatttcttgagaaattatgagtgtatataaatcatttgggttccttttcttgtctttaggttcaatcgtagaaaattcaactttaagtatttatttttcctattgtaaaggtagttttttaaaacaatcttttaaaaaagtgggctgggcatggtggctcacacttgtaatcccagctactcaggaggctaaggcaggagaatcgcttgaacccagaggcacaggctgcaatgaaccaagattatgtcactgcactccagcctgggcgacagagtgagactccatttcaaaaaaaaagggtgggtggcagggggaaatatgtgtaacatataattttgtcactttatttttaaattgtacaattcagcagcattaagtacattcactatgttgggaaactgtcaccattatctgtttccaattttcttttcattgcctcaaacagaaactcaatacccactaaagaataactccacataccccctctttctgctaacctctaatctaatttctttctgaatgaatttgcctattgcagattatttatgtgaaaccatgcactatttttccttttgtgtcttgtatctttcacttagcttaatgctttcaaggtgcattcatattgtagcatttatcaaaacttcattccttttcatttctcaataatattttgttgtatgcatataccacatttgtttatccattcattaattgattaacatttgggttgtttctaccttgtagatattgggaataatggtgcaatgaatattggcctgaaaatatctgtttgatgccctgttttcaattcttttgggtatatacccaggagtgaaacttctgggtcctttggtaattctatgtttctccttttaagtaactaccaaaatggtttttttttggttgcagctgcacaattttagattcctaccagcaatgtcatttcttcacagaattgccagcatttatttcttgtttttcttttcaaaaatattatgatgatgatgattactattttgtatagccatcctagtcagtgtgaatgatatctcattgtggttgtgatttgcatttctctaatgactaaaaatgttaagtgccttttcttatgcctatgatcaatttgcacaccttctttggaggtaatgttttttgtctgattggcttttttggggtgtctcttgactttagaattatgttggtgtactgcgacaatgctaaaagaaattgagtttgaacttcatttgggaggtttgtggttggtagtgtttttagtgcggtacttcttaaacatttttaatataccatagaagagagaaaatgattacattttgatatgatttggctgtgtcccaacccaaatctcatcttgaattgtatctctcacaattcccacgtgttgtgggaggaaccctgtggggaggtgattgaattatgggggccgggtctttcctgctgtctcgtgatactaaatgagtctcttttagatctgatggttttaaaatgggattttccctgcacaagctctctcttttatgttaccatccaagtaagacatgacttgcccctccttgccttctgccatgattgtgaggcctccccagccatgtggaactgtaagtccattaagcctctttttcttctcagtctctggtatgtctttatcagcagcatgaaaatgaactaatacatatcgtgatttagggaactcctttttggattgaatttaactggcaacctctgagctttctgtacctggatattgctaactttttccagatttaaggaattttcaaccatgttttatatatgcttttgggactggaacaggatatggacatttttccaatgcatcactccacagattactactcagttacagagggtaaaagacatattaaaaatgaagagatccagtgtcagttacctcaaatatacattgacaaaactgcataaaaatgacattccacattcttgcaattgaccagatacaataggaaatacacatcatctgtggtgtatatttgccaagtaactaacctctaatagtatagaaattcttgttgtggctcattttacaactaagctgacctaggcacttcaaaaacttataatcatgaaaaacaggaaatataataagtgggtggaagagatgtataatttaaaagtaactaaggagaactgctaacctcatgaaatacgtgatctttgattttgttctagaggaaaagtgaatcaaaaccaagggacatgctgagacaactggagaaatttgaatgtgaagtatgtactagatgacaatgctatgtgaatgctaatgttttgagcgtaatagtgacatttgtggttatataagataatgccaattttttaggagactcattttattattaaggataaaatgcttcagaaattgagggcaaaatatatatagagagatcaagcaaaatcacaaaatgtacaatcggcacacagatatacattttaatattctgattgtttcattattctctcaccttttccatagatgttcagtttaaaaaaattgaagaaaaatattaacagaccaaaataaaatgttggtgttatttcagagtaataatgttgttgggtatttcttatattcatttttaatatatttgaaatactatgtcattaccataaaataaatatatcaaataaggtatcttttagtctagagtatacttttttaaataggagacaggctatgatttttaagaaagtcccaaaagaaaacaagagaatttgcagtctgaggacaaagcagcttggtatctctgagaccagtgcaaaacttagctagtaatgcatgtcaagaggccttttagcaaatatacaggactgttttctctgtatcaagagattctgagtattctacagtttggctgaaaactcaagaactttcaaaggtgactgaatgtaaagagaagagtagtgattttccaaagttagggctggacaatatgtatttgttcaacaaagagggaggctgtctcagtttatcctctgctgctatagcagaatacctgaggctgggaaaatgtataaagaaatttataaggaaaagggctttatttggcttgcaattctggaggctggaaagaccagtagggcatcaacatctactgaacttcttttgagggctttgtgctgtgtcacaacgtggaagagaagtgggagaaatgagcaggcctgtgcaaggagagccaggatgagcaagaccctcactttataacagcctgcttttatggtaactaatccagatgctggagagagagaactgactcctggcattaatctttgatgagggatctactcccatgacccaaacaattcccataaggctcacactaccccagaaaaatgtgagcaatgtgcctgtagcaacaccactacattgacgaataagcttcaacatgaattttggtgggaacacaccataactaaactataggacaggctctagcaagacagtaagaacaggtggaactaggaaaaaattttccctggtttctcacaaacactgtcctatattagccctgattctattgaagatagtatagaagtcccaccagtatctctaagccatggaccgaggacctaagtccagtgacactggccatcagaaggcactggggtttgatgatgctcaaatgtttttgaaacagggctcagtgctgcctgagatgttaagtttaaaggaaaagtgtgtatcctagtatccagtatcttgtttgcagaagttgtgagtagtcagtgaaatgtgaaatattaaaaaaaaaaaccctttatctttcattggtgctggcatgttctgctcagcagtaaaatctgaactgtagcaaatcttttgagtggagactcttctgggcttgcatgggaggtagatggaggaggaccaggagccagcctaaatgctcagagacccatgcaaagggaaaatgactggctcctcaggagaattcagagaaatgtgagcaatgcacctgtacctcacaccttacctattctagtcgtgctctggacaatgtatacgatgatgtaagggaaatataggagagtggacaattctagtttatgccagataggctattccaaattgcaggtagtaactacagatattcttaacaaaaaccggatttcccagggctctggccttttcttccctgagcagcacaatgaccagttcctgccttgacaagaattctgtcatagatttctcagttgcgctgcccaggaagcagatgaggcctgggaacaatgaggaatgtcttccctggacttgacatgcctcacttgcaagcacaccacatgcaggtcctgtggactgataggcttgatagacagataagtcctgtttccagctaccagcctccatcccctgaatgctgttgtcacccagaactgtaaacctggtcacaaagatggagcaggtagtggccccttaatgtgaagaaattttccatcatgcaattattacctggtgcctacatgagttggactcaaaccagcagatttttacctcagtagtaaaggatttatgacagaaacggatggctctggtaattctatacccacaggtattcacctgataaccttgacatgtgtcccctaggttttgcaggtttggtggaatatctctgagtgcacctcactgaacacatatatcctcattcccacctccctggacgtgcatctccttgtgttattgtcttatgccaactctgaggagcgccatcccctaactccttttatttcttattactcaggcaaggaataaaagtgcgtttgtgactaatgttgccccattagaaacaaaaaatagataatgaccactactgttcaactgtaatttacactagaggtatagctataaggttatttttagatttcagcaagtctctttgattttgcatttcttacaatatatactgatattttcagggataagagaattccccacctatcttcgataaaaatgagaacttactttcattgcactggtgacccaaaactacaggcagagccatgatgaaggcttggtacacaatgtatcatgaatgataacagtaaagaggaaactgttcattggccttcactaaaaatgaacccttccaactctgtgcccaggttattgttttatccctttagcttacagcgcgtcagctaattcaacaagcttctaggataaacttgtgtcaattaccccagcttctaagtgcataggaccaggaagatagagaacctagtaaaagagaaacacccaaagagaaggataattgctgataagacaaagaggtcactaactgatatctctgtttcgagttgccttcaactcgaaacatccagcagaggatgggcctagagatggagtaggagatccagtccccaagccctagagatgtgagtgaggacacttggctgaacttacacagtctgtgaatacagtaaagcaacttcgtgctctcttttagcttataataattggtttctaacaatgtaggcatttgtggaggcaatgatgtcactgtgggaactgccatgagaggacagggacgtccctcctcctctgcttttgctcacagtgaccctgattgggcaaagctcccatccttccctgaccctgccatgggcaccaggctcctctgctgggcggccctctgtctcctgggagcaggtgagtcctaggaacaccatgatcacattggatctctctgattatttcaatcatttccttctattttcaaattctgtctttttccttctcagaactcacagaagctggagttgcccagtctcccagatataagattatagagaaaaggcagagtgtggctttttggtgcaatcctatatctggccatgctaccctttactggtaccagcagatcctgggacagggcccaaagcttctgattcagtttcagaataacggtgtagtggatgattcacagttgcctaaggatcgattttctgcagagaggctcaaaggagtagactccactctcaagatccagcctgcaaagcttgaggactcggccgtgtatctctgtgccagcagcttagacacagtgtagcagagacacttccctcctgtgcagaaaaccagaaaaccgcaggactctctcctctctactcagctcacagcagcctttccttattcctcatcctcccaaggaagaagtgagttttcagatatagctaggactcatatagtgggaggaaataaactttttcttttcttttctttttttctttttgtttttgagatggagtcttgctccattgcccaggctggagtgcagtggtgcgatctgggctcactgcagtctctgcctcctgagttcaagtgattgtcctgcctcagcctccccagtagctgggatgacaggcatgtgccaccatgcccagctaatttctgtatttttagtagagacgggattttgatatgttggccaggctgatttcgaactcctgacctcaagtgattcgcccttctcggcatctcaaagcgctggaattacaagcttgagccactgtgcctggctggagataaactatttcttaaaacatgaaggctgcagttgttatttgaaaatatgtctaaggaatctgaaacacctatcggtgagaattcaagaaaccaaaactgaaagtgacttatcacagacttagtcttctggggtactaatagttgttcttgtatttaaaaaatgcatacaatattttatatcaattaaaaaatacgtaaatttgaaaaataaaaacatgcagtcaataaacatgtgtgataaactttaataatacagataatgattgtatgtgagtaacaatcagcaggttttctctctgcagttgtcagcatatgaataatttgaatcctatccttggtgacaccctggctctggagcctcctctagacctctcattggatgtattatgcaaccaaatctcaacaggtactatgtgtttggaaatctttttcccctgtttttgcagaaatatgctaataagagtaatgttaaagatgatgatgttgataatttcaactatttcattcggcaccctttaaatttcaaaaaaatgcacacaaatggatatcctggcaacgagtccaaaatcttagctcaaaatgaattctgctactccagagctttctaactcttccatgtaacaaacatatcccaacattatatggggctgggccagctagttcagagactgatgaggacactttcacttgtctgtcctcatatattaaaatagctccttagttgatatggtttgactgtgtccccacccaaatctcaacttgaattgtacctcccagaattcccacgtgttgtgggagggacccgggggatataattgaaccatgggggccagtctttcccatgctattctcatgatagtgaacaagtctcacgagatctcatgggcttatcaggggtttccacatttgcttcttcctcattttctcttgccgccaccatgtaagatgtgccttttgcttcctgccatgattctgaggcctccccagccatgtggaactgtaagtccaactaaacgtctttttcttccctgtcttgggtatgtctttatcagcagcatgaaaacagactaatacatcagtgcattagatattcctgaaagaacttcagaagcaattaactgcccctggtccagttgcctcctctgataatgcattgtgtgtgtccaactctagtctctaccctatcttctgcccagactgtcttgtactagaaattattctgaagtattggttagaatgtttggaaatgcagcttcctgggaatcttctgaaggactgtcactgtccctcagcccctcctgacttccctttccatccacctgactgcaggtcctaactgatggccatgaactcactacacatctcccttccttccctgcaatttactcagctaacaacacctcagccaggtggtgggtgaccatgaccatcctcctcttccttgccagaattttcatttggttctttttctgatctataaggtcatcttttacagtcagtcattccctcataaccttttttgagtgtatcttttatttcgttgagcataggacactcagttatttcagtctgtctgcttattttcacctctgtggtctttgtggacatttttgtatgtgtgctgcttctcagtcatttgtttgtatttttccttttaaacctgattatttttgacatcatgccagacactatggctgtagaaataatttctggtctaggatggatatatctttctccagagataattttattgtgctttgtaaagtgcatggatgcataaacaatccaggactccctggaacagaattaaaggcttgaggtgtcctggagaccctggaggacaggcttccttctagtgcattgattctattcaagtccctcaatggtcacattaagtaagttatggtctttgcctttacccctctggactgtgagtcagcttccttagtgctgggctgggatcagcaaatgcccataagggcagtgactgctgtgctcactcccgaggcccctgccttctccaagattctggcccagttattcctcatcgtatctttaggatatgaattagttgcagtttgttagtgtggttattttactcaagtacataaataataacaaaagcattaatctgagttccctcttctgtaattatacagattaaggtcaaaacattttatctgaagttttaattttctttgaattttaacgtcagattcttagtctgatttgtttgatatttgacttaaacagcgtagagatgttatacagaaactttaattttaaggaaagaactttttaaaaacttgaagtggatttataatcaaattgggacccttacttggttttgaggttttatcatttgagtatttttatgttatttattacataatctttgatgcttcactggatcataagacaagatgagaacagagagtgaatatttagacttgatcagagagcacaaagtgaacatggaattagtttctgttgatgaacagtccaactatgtaaaatatttaaagacatttattctgagccaaatatgagtgaccatggcctgtgaaacagccttctggaggtactgagatcagtgcccaaggtggtcagggtgcagcttggttttctacattttagggagacatgagacttgagacttcaatcaaacacaattaagagatacattgtttttggccagaaaggcagacacctggaggcaggagtggggagaggttccagcttaaaggtagatataaaatttttctggttgacaattggttgtctctcaggttaaattttaaaagagccctggctgggtaggaagtccattcagattattgggggccttttaattttatttgtggtttacacttcatttctgcattgttgtgatccatttgtgccatgttttttgagtacacctgagggccaggggtcagaactagagggagtcacagatgtgtgactatcatcttttcctacttaagcccaggcttctgggaaaacactttgctccacattttccatttgagggaacttgcctaaagcaatgctccagttttattctttctattgcttgccaaatcttccctatgggaagggaaataagttattttatttagtctcctcttcatctgaggttcctctctcttcattctctccctttcatcctggctactgggaataaaagcagattcttttggtgcttttttaaatgcactaagatcagtgggaaactttcttttccttatagggatggcctgtaatttggaggggagagagaatggattaaattctgattcaagacagtgttggtcggtctttttgccctcccatctgagccgggttgtttatggatattaaaactgatattatgtctccatctgtcagactgtaatgtccatctctcaggtggttccatcttaggtcataatgttgttttatgaccctccaacaccacaaattatggtatctcgtttccccatggctcaataaagggaagtgcaagtccttggtcttgacaaagagcacatttgtgctgttcctgcctactggccaccaggaggcactgtggcttcactgtcatccaaagtctatgggggaggggctgggattgctccctggaggatccttaatgaaaaccctggagttggacctagagtcagggagctgggttggaggtacctgcaatgaaggctgaaaataaagggattagagaccaacccttttgcctcttgatgcggagatgggttttgctgtaaattgagatttgaatagggctctgagtggcagatgggcttgcaagtggatgtaggtctgagctcactgaagacgtggaggcacaaggagctggggtggtgcggcgccgtgttctgggctggggaaagcagaaaagcagtgtttgtgtcacaggagccttgtagagcctggccccaagccggccgaggctagccctacctgttccgtcgaacgtagagggaagaacaggtagaaatggaggcgctaccctggaccatgtcagggggagcctgtcctcaggcagcttcaatcacaatgatgtaccagcagcatatacacttattagcaaggcttagggtggagtaggacagaattttctcccccaagaacctttgctcagggcgggaaaatgctgcagtctagttctaactctattactccagatgcctctgtgtccctggaagaaggtggggtctgggcatataaaagttttgtttgttttgcctgggttgatttcgtttttccatgtgatcgtgcatctgactctaccagtattttgtatccggcttctgcctctctctctcatgagtcccatggctactataaggtattcaatttctattgctgctgtaacgaattaccactaacttggtggcttacaaccacacaagtattaccttacagttctggaggtcagaagtccaaaatggatgttactgggctaaaatccaagcgttggcagggctgcattccttcctgaggctctagggaagaactgtttttctctccttttcagcttctagaggccaccagtgctccttggctcatggccccattcaatcttcaaagccagcaaggactggctgagactttgctcactctgcatactctgatgctcacttttcatcctccctcttccacattttaggaccattgtgattacattgggcccctatattaaggtcagctgattggcaagctcacttcacttggaacattaattcccctttatcaggtaatttaacacattccagggattaggcctgggcatggttgaaggggcattgttctgactaccaaacctaggcacctggtaatagggaggaaaacgtgttggtcaccttaaaaactgattgatgactaccgttttacattctggatctaacacacacaacaaagggatggaacccacaaggaaacagacacctcaggtcacacaagctcatctgtaaactatttgctccttaggatgggcaagtcccctggggcgcaggggactcagctgtatgcctctgtgccaacagcgaaaatgtggccttaaactgctccttcttctttgttagcaaataacctagttgaccaattcatagagcagaggttctctcagttctctatactctacaccccgagaggaagtcagttagtgagatgtaagattcttttataagaaaaagaccaggtgtaaagattaagaaatgctgagctttgctagaggtaagaataagatgtaaatcaactctggaacatttaatttccaaatctttgtgagaaagacaatcttgtttctgatttattgtgtggatagagaatgtgagagattctgtgctctgggctttgcaaactcaatagagttcaaggatcaataaactcggagagacccttcactgcaaagaagagctttgaaatctaatgagctttcgggacactgattcagctcctgtatctttaacaacgcggttgacatgcttgctcttcctgggtaactcagatgctaacttctaactcatttaaaggcatttgaagaactaggagcacagagtcaccagtgagaggaagaggagagtttgcagagaagctggcttgcaataaggcaatgagttcatctttaaatacttggagtttgaggtgcagatggatatagttggcaggctcctaggtaaggcatgttatggagaaggtgctatgaattgataatatcaaagcaaatctacagggatcctctgcaagtgtgcatctgtatctcagatcaattatagttgacttcagtcctgcctgattcatctcccaaaaatgtagtctgcctgattcatctcccaaaaatgtagcctccgcttaaaggagctttcaagttgggggtggtgggccattcagtgttgtcactaacagatgcatcttgtgggggtaaaatgtcccaaagtatcttttcttgcttatgttcataagggcgctggtctggaatgtgccacatctgttctcactctgccatggactcctggaccctctgtgtgtccctttgtatcctggtagcgagtgagtcctcatgtatttatcatcctcatgctgggcctctgtatagatgacttcctgtattttccttattctgtttcctaattttgcgttcttttatagcatgcacagatgctggcattatccagtcacccaagcatgaggtgacagaaatgggacaaacagtgactctgagatgtgagccaatttttggccacaatttccttttctggtacagagataccttcgtgcagggactggaattgctgagttacttccggagctgatctattatagataatgcaggtatgcccacagagcgattctcagctgagaggcctgatggatcattctctactctgaagatccagcctgcagagcagggggactcggccgtgtatgtctgtgcaagtcgcttagccacagcgctgcagaatctccccctccctgtgcagaaactctggtgcttcctcttttcctcacagctcccagcagtcctgagcaaagtctttcctgcctcaccctccccacaagaataattaagtgggtttggggcatggcaaagacataagatgatacaatatcaacatacaaaatcttgtgtaggagataatgtcgaaaatgcattttgcaaatttctcacaaattgtgtatggggtcataactcacacacaggtaggataaaccttaattacccacaccgtaggtttccctgccttcctgtatttgacactcccatccaaacagtgggagctcttcagaatggctatgtcttgtgaactactctgcccacttcattcccttctcactctaagccatgaacagaaatttcccctacaagtactctttattgtaaatgaaagttcttttctatgattgtggacattcctttataatgctaatttcaatttaccatttatatacggatttttacattaaacttaaagagatcttcagtgtggataatacaggcagtttaatacattagaagtaagctacccctcttggcctacagggatccatttgtttctatcttgcataaagcaagccaggtgctagctaaaggtctgtgtgcactcacaggacactgatgagatctcctccactgcctgttctggaactatcaatatgaatatacacagggtgtctaaaagcacacagggcctggtgtggtggctcatgcctgtaatctcagcactttgggaggctgaggcgggaggaatgcttgaggtggggagttcaagactaggctgggaaacagtgagattttgtctctaaaatatatatatattttaaaaattagcctggtatggcagtcttagctactcaggaggctgagttgagagggttgcttgagccctgaagttcgaggctggagtgagccatgatcatcgcaacagagtaagaccccaaatcacacacaaaaaataaataaataaagttaaaaaacatacacaggcctggccagtcttacttggccctctttcctccctgatgctgtgtcctgaacagccaaatctgtattttttttcttctggtttatgatacacatttctacacagcacttgcaatttattatgaagagttataatgtctttcttctatagtagtatttacatactgatgatttctcaacccctatcagtgtatcatcggcaattgttgcaaaatgtgcctgtattttgcatgcccaagacaatttgggtttacccgagttcttcgatagaggccctggtttcgcttgtcactgtcctatttttgttattcaaagactgagactttcaagatcagaatgatgcagaatgaaattcggggtatcctttaatgtacatcgagagacctactctgtgtttatatattgttttggtgtcttccttgctctttgggcttctctctgttgcctccagatcattttccttcctcctttgaagcccagctcctttacacacatgacattagaacagcacccttctttgctgcacttgcttctttcccttcagaactctcttctcattcagtccttctgtctgctactaatcttgtcatcattcctaatggctactcatcacacagaccatttttcattggttttgcttctcactttcttgacttcctcacttttgacattttatccattaatcctaacattgtatatctgacaaggaagatattaaaaatcacatgttttgaatcagtgaatcaataaacaggtttaaagagacaaatgcaaaacaaaattgtccagagctgctgttctgggctggactacagatagatcatgtaagaaataataaaatcatctggtaatttcaatttatctttagaatctttggacagaacagctccaggggagtcaagggatcatagatggtaagagagacaaagaggttaggaggtgagaactggctagggtggcagtccctaacctaaggttttcaaggataatatcaaggtcctcaatttcttttaaatattttttgaaagtgaaaggaaattatgcacatgacccaagctatacataataaggaaattgactcatgtctttgctgagatggaattatattaaagttctgtgaaattaacttatgggctcatctcatgctgattaaaaaccctgattgacagcgctgtgtgttacaaaaatgacaaaataaatgattactttaaaaacattattttaaaaaattagcatttgccaagagtgggggtaaaaaatgacatactgccagatggtacaaggaatggagacgtttgaggcttccagagcctctgacctagctcaccccactttcccgggcccgatgtcttctaaagttcatctgtgcagggaaagggaagtgtagttgtgcaggaaatacggcaggttaggaaatcacaggctctagagcttttacaggcttttacatcctgtgtatctgtgctatttccacagtctgcaacaaactgtattctccccaaacagggccagacactcctcatctatcaaggactgactcacatctaccttcctctttgcttcttaccctgacattccctggccactgcagtatatcattctgtttcctttacattcagaggaaaattcaggtatataattgatactactcgatgtttgtgaaatgaataaattaatgtccatttatacagagctctgaaatattatctattactgttttcccttcaaaaggggctccttttacttgaaatatgatggagagtcattatggctagtctcaattttccatacaatttctgcagtattccaagcaaatgtgttttcccagtcaggattaatgaccagtactacccagtaccctaactatatctaaagctggaattcacaaatgtccttttggaacaaagaaatttatgttataataatatttatccagtcctatgatccagtaaaagaaattcctcaccacaaccacacttttccaaaatcacatctttatgagtctggacacattatcaggggtgcatttcagaagtcaacctaaaacactgagagaaaaatttgttgtgctcagtaatagaatcttatccttgcaataagaagataccatgtgtgtatgtgtgtgtgtgtgagtgtatatgtgtgtatgagtgtgtgtgtgagagtgtatgtgtgagtgtgtatgagtgtgtgtgtatgtgcattttctcatgcagattcatccacatgaaaaagtttatctttggatcgcattacaaagaggcactgggtcacctggggagctcataggcacttctggctagtgatgggaaatgtcacaccactcaatctgcctaagttatagccaatagggttgtttatttcaagactttttataaattcagaattaaatatgtaaaaactagaagccccttttattaaatgcactatttaaaatttggtaataatgactctaaatacaaaatatgaagacacatgagatattaaatatttttccaagatcattctgctggatagcttcacactgtttaattgtatgtcctgtcttattcaggctcctctcttccaccttatcatatgaattgcaatgacataacaacgattaattttgcaatcaaaatgttggttaatacactcttttgtctccactggctaagggaggatttagagattaaccctaaattggcttatctgggaaagcttagagagggtgtatgtgagagggtgggggctgcaggagcgggatgcaggggtctctgttacggatttggacaatctagagctcatcagatcagaaggtgtgaatctgtgagactatggatctatagccacttggaggcgctgtgtctccgcaatgctgctgggaaccctggggaggggagggcaggtgacccagaagaggaaggctgaagagaatgcctggctgcctgctagcatcaggtgggggccatttgagttcagagtgagttctgagtttaacacagactcctcactgtccagagaagggtaggggtgcgaaaggcctcagtttgtaccaacaagagagtgtctctgtgtctgtctggccagtggatggtgaaggggctggggcatccagggcttgggaatcagtgtcagggcagggacagcggtgggtggagtaaggtgtgacatggacatgtggacactgtgctccacctttagtttcgggacccttcagggcaggaatgatacatggggtagcagagccaggcacccacctaagggtacagtgggcaaaggatggcctgcagaggaagtaaatagaaaggcaagtttcctatggtaatgccaaaacattcctgcccccactcagaaaaagaccatgaatgggatgttggcagccagaggggctcaggatctggtgatccgacaggcctttcccaggtaccctctgttgcttctttatgagacctgttttgattctaacagaaatcatgcaaaataagtattatttaactgtgtatacacttgactgaaataactttcctgggtcttgtacactcttagatggaagaaaccagacctggcgttggatagatcagtaatagggtgactgtagttaacatcaaccaattatgcatttcaaaatagctagaagagaataattcaaatgttcttaaggtaaagaaaagacaaatattaaagtgatgcctatcccaatgaccatgatttgattatattaatgtatcaaagatcacatctactaaaaaatatgtacatctaatatgtatcaataaatagttaattgaaaagaagataactagctgacgtctgttcctccagcacctctacctgctgtccccactctgcagatttgtcctctcacatggccttccctttccaggtccccattagcaggaggagaaagtcaggcattatatgtgatcactatactctctttgctgaaaagtccaaggaacatataacttccaggctaaacatattcattcatccttcattgtgacaaaaaagagaggtgcaattttctgcaccatagctgtcctatgaatgaggccaggtgatctctttcatgaaggatatgtgaggagagagatttctcagtgcacagcaaagggaatgggatgtttttaaaggaaagtgtagttttcctgtacctgatgtaatttattatgagggaaaagacacaaatcattattattcattagttaatttattgatttcataaacattttaagccccctgctttgtacaagggattgtgccacataaatttaaaagcgaaacaaaaaataaaatttagaaaaacagataagacaatttttaaaaacagtatgtttctcgcctttgacaatattaaggcaattaatatggaaatgtatttattgaattattttgaaatttatattttgctaattcaaaatactttaatgtttctgaattatacaaatgtcctttttaaaaatctttctctttagttacctacctccttttaccacctttttaaaaaaaattttagtgagaacatttaatatgagatctatcctcttaacaggcttttaagtatatagtagagtatcgtagtccacagacacaaggctgtacagtagatctctagaacttcctcatcctgcttaactgggaattttatacctgttgacagcaactccccattgccaccaatccctagcccttggaaaccaatgtttcagtttttacttccatgagtttgactatttaggttgcctcataaaagtagaaaaaggcacggtggctcacgcctgtaatcccagtactttgggaggccgaggtgggcacatcacgtgaggtcaggagttggagaccagcctggccaacatggtgaaaccctgcatctactaaaaatacaaaaattagctgggcacggtggcaggcgcctgtaatcccagctactcaggaggctgaggcaggaaaatcatttgaaaacgggaggtggaggttgcagcgagccgatattgtgccattgcactccagcctggtcaacaaggcgaaactccatctcaaaaaaaaaaaaaaaaaaaaaaaaagagtcgtgcagtatttgtctttctgtgtctggcttactcagttaccataatgtcctccaggtttatccacattgccacatatggtgagattttcttcttttttgatattatttccttgtgtgtatataacacatttaaggtctgtggtaataaatgcatagtatttgactgtttctataaaaccacacatcacacgagtaacagggtcatttgcagaggtgcaggctctgagtacattaatgcacctttatggttcaattatgctgcacggagaagattcagaaaaaaaaatcataattccatcctttattgtcattttactatacacaaaatagaagcccttcatttgcaaaattgcagttaattagaaattcaactgtcagaaaaagccttaagacacaaatgctattctcattttacagagaggagggaattgacccacaggttaaataacatgatcacattaaatggctattaggatgcagtaccgggggtccagctctgacctgtcagtctctaagccctgtgtttatagctctgtgctataaggcattttcatgaagagagacgcctacctttcaaaatcagagtatttgctctctacatccctttcagacctgctggctccaataacatcacagacagagatgaatgtatcctggagacagtatggggaaagaactctgaaaagatgccatggcacccagccctgactcccactctaacaccaccacatcactaactgagaccagctcttgacaggttaactttagtttggtttttgttttgttaatctataaaatgagactaatacagtctatctatagggctgtatatagaatttagtatcataaaatatctagcctataataggaatctaaatctcttgattccctttgttaatctcagacagcctcttccaccctcaccatgcacaaaggcagattcagacacactctgcctagaaatcttaagctgagaacttagaagtcacagaagtggaaatatatatacctgatgatccctcacatgaaattaactaaagaatgtagcatacatacctcctcagatagttaaaaatcaacttcattaatatatagattatataaacattacacattttaagtgaactgatgagtgattttggagcaatatatgtgtatagacccttcaatccccatccctattaagatgccgaacatttccatcacacagagagtgttctcattcctctctgcaatgcctccctccatccctgacaaccagtgatatttatcactagaaaattgttttgctcaggtacatttttaatggaaatttacaacctctaactattaaaacacttcctctttagtacacaggtaaatattcaagagagggaggtgctcccaaagatatttatggctattcccctcaatgacagaatggataaagaaaatgtgacacatatacaccatggaatactatgcagtcatatgaaagaatgagatcatgtcctttgcagggacatggatgaagctggaagccattatcctcagcaaactaatacaggaacagaaaaccaaacaccgcatgttttcacctagtgggagttgaacgaagagaacacatggacacagggaggggaacaacacacactggagcctgtcggagggcggagggtgagaggagggagagcattacgatgaatacctaatgcatgcggagcttaaagcctagatgacgggttgatgggtgcagcaaaccaccgtggcacatgtttacctatgtaacaaacctgcacattcttcacatgtatcccgaaacttaaagtaaaatttaaaaaatttaaaaaaagagagattttttatggctttagaagggtttcaaacccttccagaaccctgagagacacctgatccacgttagggataatcctgtctggagatagacaagatgatgaaatgacaccaaaaatcttcccacatggaagaggctatttccacataatttgttcattcattttcattattttttctcatacactcattcacttaaattattttataatgatattctgacaaaaactaatcatctccaagaacattattttgagtttccatcagacaatatttagctgtgattcagctctgcttcctgagcacatagagtgcactggggccaagtgaaccatgtgcaatagtgactaccttgagagataatgtcacattgagagaaggggtctctcttccttgaccgcaagtgtccaacccataaaacatgagccttgagctagaaaattcccctttctgttctggcgctgcctgggcaccaggctcttttgctgtgtgtccctctgttttctggaccagagaaatactgggcacatatgtggcatctactcattggtttgttggaccctagcttgcagataatagtaccaggtgttcctttgctgtgactttaacttctgtgttcttcacaggacacagtcccattgatgggatccaaagtaccattgatactgagtgacccagaccctggtcatgtacttgtgctaaaaaggaaaacagcacatggggaggtgagcagaatatgaaacacaattatggactcagaaacagccatacaacttattagcatcccgttgtttcaaaaaatcataagaatttgaagaacatgacaatgttatactgactgtggcgtcctaataagtgtgggactctgtgcaccaagatatgttatttgaattcctttttattgattactaaattaatggcaggaatcccacacaaagggatactccctatgaaacatgacaactcaaattaaaaaagagcactcttccttactctaaagtctgccctctctccccgagtccctcacgcataaggccacatttgtgcccctaggtcatgggcagcgctggttggccaccatcgtccacatgtagaaggcagtcagcaacgtgaagtggttctgcctactgcagtctcaccccagacatggaaagcaagagccctgggtggagctgaaggtgctcagctgggtttgtcagaagtctcatctgtcagtgagttgacaagaaacagagcaaaacgactcctccaatgttgacgagcctgcccctgggatttggaaacttcataacagaaaaaaccaatatagacaaaggattttaaacaggattaaggtcaattaagcaaattagaaaaggacacttgaaggagtatttgggacaggggaatcaaaagcaccaggaagacatgaggagtttccctaagactctagactacagcactagcactatgtagataactaacactaaaatattaattatatcattgaaaaaataaaatttacagtgaattacaaactgtttccaaaaggtcatgaaaatcttgtagacttgtttcaattcagacagatgtgttcttctcattctcagctgttcactggtgcatttattttggatttgaccatctggggaatgggtgtggcctctcctggcctctccctccctggggcccaggcagggagaatgtctcagaatgacttccttgagagtcctgctcccctttcatcaatgcacagatacagaagacccctccgtcatgcagcatctgccatgagcatcggcctcctgtgctgtgcagccttgtctctcctgtgggcaggtgggtcctgggcagagccccttgtgtgaatttcaaggcccagcgccttcccattggggctgcagcatcagctttgttctccttctctgcaggtccagtgaatgctggtgtcactcagaccccaaaattccaggtcctgaagacaggacagagcatgacactgcagtgtgcccaggatatgaaccatgaatacatgtcctggtatcgacaagacccaggcatggggctgaggctgattcattactcagttggtgctggtatcactgaccaaggagaagtccccaatggctacaatgtctccagatcaaccacagaggatttcccgctcaggctgctgtcggctgctccctcccagacatctgtgtacttctgtgccagcagttactccacagcgctacaaggccgtctcctctctgcacataaaggcagggaggttctgccctcctcccccacccaagactcagggatgccctgggcagagatctctgcgccaggaaccttggaacccacagtggccccaagtggcctggacagtatgagccttgctctgtgccaggtgcctctgcaggcatctcagccaggcctggactggtcccaggtcctcagatgtctcctttgttgctttctctggtctatccttggagctttccttttggggtggggccagggctttcccagctcctacttttctactcattatcctgagtccgaggcccccaggataaaacaggatttgcatttcagatccatctagactcccgtctctccctggtgaccctgttgcttcctctctctaatgtttcccccagcccccaccctcatgttttctctcctgtggcccacctttcccatctgggcagtcaccctccaaggcgttgctgggtctctcctccccccacctcctcgcccctctctactgcagccatgaggggagcccctgttctgtgcctccttccttcccatcacagagacttcaaaggccatttcctctgcccttgcatggagccttcctttctgcagtagccagctcctacctgtccttcatatctcagcatgatcaacccctcttgtgggaagcgctccctcccctcccatctgaaatcaactttcctctcataagctgtcacagattcatgtgtctgttagtaacctttagcacagcttggctttctcagatacttgtctggttatttttgtactccacccaatttttaagcccatgagagctaaggctgtgcctgctgcatttaccaacattggtgtctggcatgtagggagacccatttcacaaagaatggatgagtgaatgacaggctgagtgagtgatgagtgggtggataaaccaataataaaaacacactacatctactgtaacctggcagagatctagcattaagtacaagaaagcccatccctttgattgctgggctcaggtcggtcttggaaattgatggggaatcactatcatggcggccacacctggctcaaagcttcctcttgtggttgcagagcctgacctcctccaggtctctgtgctctccttcagggtctttccccacaacaaagcgagacagatcagagatccacttctagaattccatccttaaaggttgttccttgaaaccacttctggtaagaaaatctccattaagtttgcaacaaaacagggccgctacaagtttgagagtgtaacaaatttacgatcagaattagactttatgcatatgtgggaggagctgagaaagagaaggtctggaggagagaagtcagaaggcgagggagccagtcaatagccagggctcctgggggtctcggcaggacaggctggattggcagggacatgaaaggatcagagtatgccaggacatgcagtgggaccttgaaccgggggcacaggaaaaggccaaggaaacctgcttctggggaagctgttcccactctacgggggccacccctgcaggtgcactgccaaaacagcagcctggctgctgtttgccagcatttgggaagatgaactagacacagagtgcagaaggaacaagacttcctaggtctgttggatgcctctgtatctgctggtcacagactctcactgtctgaccacaatgacctgccaagtctaatagtgactgcttttcatctgtcttccaaattttaccaaatgtatccttgaccatctctaacccagaatgataagagaaatggcattctgggaaaggcaggctcttgcctttgcaaagctgacttaactcaattcagcccatgatggattcttccagattaaggcatcagatcacacaactgcctcaacctgccatggtccctggactcttctccatggacatctgtgttgcccaggtgaatgtggacacaatttgtatgtggatgttccagacactggctactaacttttcttttaatcctgtacctgaaatctccctccacccagagggtctataaatgtatgagatttattttttaaaaaatagaaatttgaattctattctgaatctttccttgggactggccagagagcatttttgacctactaacctatattgtgggtgtatttggccccccagagtgcagcagacacttcttgggcccatacatttgcgagttagactggagatgcctgtaaacatgacagattcttggtgttgttccctctcagtcccggcctctctggaatgtcgcagactaccatcaaacaaatagatccccagtatgaagtacataaggacacattaggagttagcaatgaggaaatgtgagcacaagcaacaaacgtttgaagtgcaaacccgaagactcaaaattttggcattataagatatgaaagtttggagagctacatttaaatgaacatgagagggaaaaagagaaacaaggaaaaagagaatgtctgaaaccatcaagtaactttcataaaaattgtcaaataatatatctagaaattcctcatacaaccactgaaaacaaaatggaaagtcaaacagttgattagctgctcctatgtcaaagatggatctgcaggagtgatctagaatgcagcacggaaaattaaaagtggaatatgaaaaagttaaagaacagggaagaaaagaaatggatgtttcccatatattagaatatgcaaatttttcataaattaccatttttttttgcatatgattgcagtttcaaatagataaaataggtagaatgttatgaggtgatatttatgagatgttagctgacaattatttagaggtgtttaaggacctaaattcagagtttccagaatcaaaatgaatctcaagtaagacaaatagtcaagtcatagggaaattgtataacatgagggacaaagagaagattttgaaagcagtcagaaagaaaagacagatacctcccataggaatagatggagaacaacagtaagtcaagatagtggttaaaaataaccattagctcaatcgtcattctccttcattagaggtgagattgattaaaaaaaaaacttttatacgtggaatatgaaaaaccaccactgtgagtttgctaccaagttatcttttctgaattacagttaacaaaggtgggaaatgatcccaaagaaaggcatgagggcagttcatgagggaacgcatgtgaggggacagtcctgttgggcacgtgtgactgggggaatggaggaggctggggcatgaatggggatggcagaggggaccctgacttgcaggaaagacaatgagctcacccttttgtgttctatgttaggggcactgttggtgcatcctacaggacatgcctagcagacagaagagcagctgtgggctggcaagatgaactcagagatgcagcgtgaggcctccgggtccagacagatctggagcccaaagcaatgagccatgcattgatgttgttaaaaaggagcttataaatatttaaagcagcacccaaatgtgttctaatagaaatgctggggccctgaggtcctggggattgacagaggaagtgatgtcactgtgggaaccgccctgtggagacaaggacgtcactcatcctctgctcctgctcatagtgacactgacctggtaaaacccccgtcctggcctgaccctgccatgggcaccaggctcctctgctgggtggtcctgggtttcctagggacaggtgagtccttagaacacaaagtagtttcagtttttttctgtgtgtaggcttgtgtgtgtgtgtgcgatgactacaaatattttccttattctgttgccaaattctatttccacagatcacacaggtgctggagtctcccagtccccaaggtacaaagtcgcaaagaggggacgggatgtagctctcaggtgtgattcaatttcgggtcatgtaaccctttattggtaccgacagaccctggggcagggctcagaggttctgacttactcccagagtgatgctcaacgagacaaatcagggcggcccagtggtcggttctctgcagagaggcctgagagatccgtctccactctgaagatccagcgcacagagcagggggactcagctgtgtatctctgtgccagcagcttagccacagcgtggcacagtcgcctcctttctgctcacaaacctcatccttctctctccttgcagctcctacaaacccttaacagaggcctctctttgctccttacttttcatgggaaaaaggtagatttggacctcagctgtcctttgggtagaaagagaccgcagattcattcctgaaacacagtgagtgcaaatgtaggtggtgaaaacaatcagagcccactgcgctctgggagtcctccgagccagctcactgttccaagcaaggagtcagtgtcttagccttggccttcagggcagacatgcatcttctataggtcttggaggctgctgtgctgcccacatccatgaggttgtcataggcaggaaacacgcctcttcttcatatgttggggcatttggaaggtctgaggctacatccccaggaacatctttcttcagaagcctgttctacccctgtcaccttggaagtttcttcaacaaaatatcaaacatctcttcctataaagtaaacgtctttgcaaatttgtggtccttattaataaatacaatggtgataacaataagacttcacttcttctgcctactttaagccaggtgtatcctttattttgtttgcatttgccattgctactgtcctgatagacagaagcgtgcattcaccaccgctgcccgttcaccttgattccctcaggaaatctaatttctagactctgagggttttcattgctgtcaaactcatttgatttgaaatcattttcctgaggcctttaactcaagaagtgttttatttataatattgaatatatttctttttcttttatttttcatattatattttattatacagtacttgttataaatagaagtacaatgattatattgtaatagaatcttcaactcgtctgtgggtgctgctgcagtttgtatctatgaaagcgaatgcactggtcagagctgatgtgattatggatcatgggtttcagggagtcttcggcatcagaccacttctccaagtctgggactcagtgtcccagatgcagccatgatagaggtgccctgagtctttcatagctgggaggggcatcatagccctcccaaattctctgatcagaaattgtggtggtacagacaccaaatttctttccccagagaatgatgatctctggtagggagctgctctagacccattttttattgtgccatcatcaaatcattccttgctcaggtaccctctgtctcctgggactgagtaaggccagggcacagatgggaattccttgtcttcctagaccttgtctctaactgctgccaccttcctccatgtgactcctgagacacctactcctaacagtggacaagctctgacactgaggctgaacagaacacagtccacaattgtaaccggtgctgcaacaacatgaaacaaaagcaatcaggacttccaacttatacagaaaatgaacatagaagagtagcaaagggcagatattactaatggacaaataggaaggaatcagtttctgctctaatgaaatcattcagttgtcttgagttaagcaggataaacatttcattgcaattacttcaagtcaaatgtagcagctccacaaccaaccagcatagctatttgctttgtgatcttggcagcttcaaaggactcagaaatcctttctctgcacaaacatccctttgtccattccaagacccaggatcacacactctgatcctatcatgaaaacaatgaggtgtgctatacttgctgcggcctcattttttgtgtgttgagtaggaagcactgaagaactttgaaagctttgctcttgagtctagggatgtgctggagccagcttgtatgagtcagaagaaccaaataggcatattactcttcccagctcccaagcagtgaagccatgttggccacttgaaatctaccatggtgggtatgctggtacaaccgaaattaggaaatgctaccagacatgcccccaccttcacagacaccccagtttatcagcacatccctggggtattttctgatgtccctgttatgccatttcttgtggggccaaaagggctcagaattcacctcccctctacttttgttcttagaagccatcacctaagggggcctcgattgttcctatttctattcaacctccagattctcttgctctgtaattctgtgtctcctgcaagcatgccagtctggaacatgacaactattttgaatgtaactaaaggtatcactgaaccagttcattatttacaaattatctttcctcgcatagaatattcagatgctggagtcattggcaacagagatggccaagtagcaactattcttctgtggcaacgagagaccctgtaaaaaggacaattttgctttggagactaagcacctccacaccagtcaggaatgactctgcttttactttaggctgagaggtcagaagggtcagaatactgagggtcagaggccctcagtattctcctttccaagacggagtatggccactctccatctcagtccctggaaggtgtccggagctccctgagaatccctgctctggggcagaatcaccaaggctcatcctcgccagctccccacaggctccagcagggctttcctgccaggtgcagggcacaggaatggctctatctgtctcttggttagagggaggctatgcaatgatgtttgtataagagggactgggattctgggtctccattaaagtatttgataatattttctttgttttttgttttattttgccatctcaccacttaggagagcaatcccttggtagttatattgtttttgcacttggtaaggtttttgtggttaagtcacattaagaaattgtgcctttttttcctgttcagctgtaacccaaggcagtgaaagaaacagcaataattttgaaagcagttacttatgcatcctatgataaaggtgttaagttccattgcccacatctaactttcagtctagtggaaatgaaaaggcacagttagggggcatgtgagcctgccatgagagaggtcaatgccaattgagaagtctgtgccaatccccagtactgtgggattgaaggggagggagagatgacctctccttcagaccatactcaacaaggagggagagggagttcatccatgggaacctgcggagaagcatatcccaggggcatctaactcagggtgcaggagcaaatcattggaaatgaaaatggtccacttcagctgtcacaggagacaggagaaagaaaagtcatacattccacagtcccctggctgattttcttccttatgatagtattttgcaccagcgtgtcctcatctcccgctgctcctctgcctctttcataatcatctcttccctctttgctgctcagatcagtggatgtgcattgtacaagctgatcatttcctgtagcagcacctttgctggtcttacttatgttcatccttattttgtgcattaggtattgctccctccaccattgcttatttccttgtaagaggtctcctttatatatttcaattttactttttattaatagacatttttaacttcatcttttgcttatctatgcttttggggtaacactgtcatttttggagggcatttttgtttatccttagtcattcagattaaataatctctttatacctcaacgtctgtgttttcttactatttaaaaccaaatattgtttcctttcattcctctccttctgttcctctttctttagatggtagttttaagggagaaaaagttagactataactggagctatgtgataagagttattcagaatgagggtgggatattaagattggtaactcaaagcaatagtcagggttagaagtagtgttgggatgagggtttagggaagctgctcataaaacctgcgggatggcacttctggaatattctggcagctcgctctgtagacatttctcagcagtccttgggccattgcagaagaaacaatgatgaaacttcacttattggccacaagatggcactgtggtccactgggaactaaagtactctgggcagtctgggagagcagcctaggagggaaagggttaagaaaaattcgggcttggatcccatattatgcagatgttgcagcagttttcagttattgctaggctacctacagctatgcaagaggcgggaagtccctctaatctttaatgacatctacagttgaagaatgttggctgggcagctttggtgtcagagcaggtgcagacagaggagcaactgcctcagaggaaaaggcgaaagaaaggggccggctgtgccctgagtccagtccatctctgctgcacttcatcttccctgcatgtctctccaggcaacagctttaacctccttgagtgatcagggattctacaagtttataagtcgtactgataacatcaccttggcttagattccattggataccaagcacgtgttctctggagggccaaaaatattgacaacaatttctaaaacacctaagtaaacaaactacagaaggaaaatattagtagatgcaccaaacagtgccgttagacctgaagataatcaatgagtagaattatcaaaaggagactataaataagtctctactaagtatttgtgggcatcgagcagtgtttgagtcctctcagggtagattaaggaaggaattcagctattatcttgactttggcttggatgaaaatccatgacctcctcaattgattttcttgtaaaatattacagaataatattgagcaaacattttatttttctccagcctgtatccctccttagcactaacaggtaaagcgaatacctagaggcaaggtttctttagttgggatccattaactgcaggactgggaggtccatagctaggcttcacagggagtgcaaaccccacgtgcagggaaccccgtgtgtctgtgctgtgcccaactcccctctgtgaggctgccaaagggggactgccgggtctcccaggaccccactcacaaagagggagaaagctgcttgctgggcaaaaaaatcaattcaccaattggccaatctgttgaaagccagaaagaaaagaaacgttcaattgtgagactgatgaatgcccaatttcccaagttataaaatgtatagcagctcatggttctcagaatgatttcaacagcatatgaagatatttttagaaagtttttgtttttctaaagcattccttgatattgatcctcacttgtttttcagcccactcatccgttgagcttaatttgatgccaaatttcaatgttgcctatttcagtcactgaccacttctcacattctccatatcttacacagatacgtgtgttcctgtcttttcttctttttgtgtgatgcatttttaaattgggctgtacagaatacaagcatacatttgtaaatgactgccatcttttatgcagtttagctgtttaatttttagtaacactttttattaaggtataattgagagtaaaacacaagtattaatacaaaaacatcctggtacattttgacaattgcatacaccagtgcaacagtaactgaaatgattataaaaaaaatttccatcactcaagaaagtgtcctcatgctcctttccaatcaatttctatcccagagataaaaacttttctgtttttatcaccattgactagctttgtctattcttcagcttcatataaatggaatcatattttattagttatttttctccaaaattagtatttctgaagtgtattcatattgttgtatcagtaggtcattctttcttatgactaatattccattgcataaatataccacaaattttttgtgcattctcttgttgatggatatccatgttattcctgtcttcaactattatgaataaagttgttgtgaacattcttgtggaaatctttcttttggacatatgcattcttttttcttcttttaaaacctacacttaagagtggaaatactgactcatagtgtagatgtgtgtgctatgcttgcgtgtccccacaaaagctcatgttgaaatttgtcagtggaatggtattgggaggtgggacagctatgactaggtcataagggatctgccctcagaaagaaatcaatgcccttattgggcgagtgacttagttttcccgggaatggtcttccaataaaaaggatgaattcagctgttttctctgtcttaagtgcttgcttccccttccttctgccttggataacagcaggaggacctcaccagctgtggccctttgatcctggacttcccagtctccacatctataagccaaataaacctcttgtctttatacattgcccagtccgtggtatttctctatagcagtaggaaagaaattgaaagaaaatatggcaccatgaggctgttgttataatacctgaaaatgtagaagcagctttggttaatgggaagtggctaatggatagaggttgaaagaattgggaggagcagactagcaaaagcctagactcctgaaaacagagcattaagggcaattctggtgaagtgtcagggggaaatgagggacaagctatcggaaattgaagcaaataccatccttgttataaatagcaaaaaccttggcaaaattgtgtcctgttctaggactttatggaatataaaattatgagccattcactaggatatcaactgaaagaaatatctaagcggcaaagcattcaggctactgtgtgactactttcgggcaccaggaaatttcacccagcaagaagggagccatgggaatagattttgcaaaccagcacagatggtaaccctacctccctctgctgtcctgtctcccataagccaaaccctgtgctgtgagctcttaaaatcctagaattatttctggggaatctatactcttaataatttatagacaacccaggtctgctttggatctgatcagacggactaaatcttggggactctgcaccactggccactgaagaaaggggctgggaatgttgatgggacaggaaaatataataagaaacattggtgtgaatctagtatcagaaagatgatgtgaggacaacaaggaagagctggaatgtgagggtttaatcacaggctcctcaccctccgctgatgggtaggtgtgttagctccagcatggagcaccaccgcactaggtgggggaagggtgagagggcaatggggcagcctgtgagctggggcaacgtaggcagagaaggaactgtgtcaccacagaaacttctgccttcacccatcccttcagctctgcaggacaggtagagactccaggatcatccactgagcactggacataaggaaggctgcatggggaggactcaggacagtgacatcacaggatacccctcctattaggaaaatcaaggcccagaattcactcggctcttccccaggaggaccaagccctgaatcaggtgcagtgctgcctgccccactgtgccatgggccctgggctcctctgctgggtgctgctttgtctcctgggagcaggtgagtcctgggcacaggacagcagccccattctcagctttcccacccatgtcctccactttaccttggggaggacctccaggctttctgctgtgctcatcctccatctgcttttcccacaggctcagtggagactggagtcacccaaagtcccacacacctgatcaaaacgagaggacagcaagtgactctgagatgctcttctcagtctgggcacaacactgtgtcctggtaccaacaggccctgggtcaggggccccagtttatctttcagtattatagggaggaagagaatggcagaggaaacttccctcctagattctcaggtctccagttccctaattatagctctgagctgaatgtgaacgccttggagctggacgactcggccctgtatctctgtgccagcagcttggcacagcccggcagagtctctgacattctatacataaacttcctgccttagctttgacttgagagctgcaggccccacccaggtttcactcctgcaagggaagcttttagttgtatggaaggcatgtgttgtgtcctactgagcacagagctctcccaaacagagcccaggtttcctatgccctgagtgtgccggcttctgtgcagcatcttcttgcagcttgtcacttcctgggtaacttcagtagaagagtgactgcggagccccagatgtgtgctagattctttgaatttgttatatagcttaaagtctttcaacaaccttgcacatcaatcattcttattcttccttgacagatggaagtctcagggacattcagtcattttccccagtgtctcctggcttgtaaggaccagaagtaggaaacaaagtagtgcatccattttccacctacccccctgctccatcatcaccttctgtgtcctggtcagtaagtcagagccctcaaactgccatctagtgaccagcagggcctcactagaggcttacatgtcttcaggggtcattactctggcctcttcattagaaactttgaggaatgttaaatttaacactttttaaaaatcatttatatgcattccctttgtctatccccagtctgcagcctacactttcatttttatggtgttttacacaagtttaatttaatgcaacaataactaaaaacaattttgtttgtgtgtagacaaaaactgctttctcatataaatgtctaatgatatttttctcaatttattctactaaaatttaagtttggattttcaccaataagaataaatgaacctgaaatatatctcatgtgagaaataagatagagacctaggaattggagggaagcacatatgttcagtgaagaagcaatcgtctgtcaaaaagagctctaaagtggacacctcgtgctgacagtggagagataattggaaggcaaattatcatgaaccttgtctgtctattgtcttgtagaagaaagacagccaggagcagagacaacatgggcgaatgtttatgactggacttcaggttgaaggttgcagcaggtagagggaggagttgcaggcagagggcagaatcactagctggcaggggcagtggcatcaccagtgactctactgacatccaggaattatgtccccaacgcacaagctgaaaaacctcccacaattcgccgaattttccctgaccctgccttggccaccagatttctcaatggtgcggccttttacctcctgggggcaggtgagtcccctaaagccttttccttggcttaccacatcctagcctaagcctttaccacaggtctacattattgaggtccctctttgggcactcaacttccttctatcatagacttcatagaatctgggataaccagatcccaagataccagagaacaaaggcaggatgcgaagcaacatggagatgcctaagactgtcatccatgacatgtgtaggtgttaataggagctgaagctggtgcacagctgatccgtcccagcacacactacagagaaattgctgagggtctgtaactttctctcaaagctaaatatgtggccttggtgtcagacagcctctcccagacctctgtgccctcttgcaccagcagtcaccccacagccaccttcctctgcacacaaagctcagtggaagatataggtggcctcgtcttcacgagactgcgatccaggcagcggaagacgttgtcccatagaagtctccccaacactgcccaggctggggccctcagatttctgagcagctctgtgcatgggaaactctgccctgtgctgagcttctcttccaggccagtctcagctggacgacggaatgtactttaccatgatgtgagtggatgcagcctctcttccaggcccctcctgcagctctggcctcagaagtccttttcttcagttattctcgaaaggaaagctcatttgaagttgtatatttgcagacagcattgacaacacaggtctatgttcttttccctgtcagcattcacaactccatcttccccacaccacgctcatatcagtcctcagcctcctccacgtgatgtccgctcccagctgtcctctcccttcctctgcatcctcacctccaggtcaaccacagatgcctcagttcaggccattcctcacgcgtcatgctcctcctaccaaagccctttccactccacgctgtatcctctgggtcaacacaagtctcttcttttttgttcttgctccaaatctcagtttaaccactaccatctctagggatacgctccttcaacagttttcctaggctgcacctccttaatataaatcctcacagctcataatgtgcgttagtattcatagatttaacaccattgtcattttccatgacttcgggtgactaatggactcttctcttgctctctagactgtaaaacgcatcattttagaaattgtggatgttttgttcctgattttatcatcagtacaaacagcggttccaggtgccagtggccaatcttgaaagaataaaggatggatagtgaaaggccctctgggttcccacgtagagtgtttcagaagtctggacgcattaagcgggaacctctatcccttcatctcctaggatctaatgagtcctggaaacagaggagaaatccctgtcatggatgagtaactggatccaagcctttctgcaggactgaatttcctaactgcccaccgccttcctggcttttctcctccaatgtccttccctcacaggtgtcctggatttgggagtctcacagacacagcacacctaatcattggcagagtggtgtgaaatatagcattaaatactggcattaaaaggtgatggaggctgggtgcagtggctcatgcttgtaataccagcactttgggaggtcaaggagggcagatgatgaggtcaggttagcctggctaacatgtgaaaccccaactctactaaaaatacaaaatcaaaattaaccagccgtggtggcagtcgcctatagtcccagctactcagtagactgaggccggagaatggcgtgaaccagggaggtggagctcacagtgagctgagatctcaccagtgtactccagcctgggcgagagagcaagactctttctaaaaaaaaaaagttcatggagaaaaaaacaaagggcttctccattctttgggtggctttgaggccatggtggctgctacactgaactatatcattagtctccatttccatgaattggtgggcaatgccagagacacagagttcatggtcaccagcttcctccagcccacacctgattttggttcagggcactgaagagagacctttgcttgttcccctcctttgccagttaggaaaggctggttgtgaggcagaggctccacatatagagcagggctatgtgttagtccctgaagaattgtgagagccattctgggtggaaataatcaaatatacaatcaccaaggatggcctacagatagaccgaagccccaattttgctggagtgatttgcatctatgctttaaagacaaatgcagttttatctctttaggcaataaagaccaaaaatagactagctattttaaataattgaaccttaaacagaccacagtcagaacatcttccctagggacagcattttcttccacccactcactaaagctctatttgagaaagctgtgtgctgttgataaacactggaatatcgttacaatcgacattgtaataatactgctacttggatcagaaacaaagagcatttctaaagcttgaacaatgtaaaactggaaacgagctctcactgagtttggaaatgcaggcactagagggtgctcatttctcttccttttccaatcaggggctattcaaaggctgttctagaacaaggggtgagatcctccacttccccgtggtgatcaggctttcacaggtagaagccttattagttcataatcagccaagctgacctcaccatcaaatgtatcgacctcgatgcttaccctcctcagcagtcagagactgtctgtgttcaccaggagctcgtgtgcttttacagagcacactttctcctcggtttagtaaaaaaaataaatgggccattatagggggttccataaacagaagctttctgtactttgcccatttagacactacaaattctgatgtctgacgaatagtgtaaacttaaagcttgcatgtggttaagaacttttaataaacaaattaaataatatatataatgaaaatgtcaataatgttctccaatccaatcccaccttccactcataaccaatattaacgctctggtgtgcttcttttcacccctcttttctgtgttcatgcacacctttctacccaagtacacctacagaaaatgggttcacctgtacactttacctgccacatgcatactcttttctgttaatatatcctggtctttattgttccagattggttgatatagatctaacttgctcctattagctgcttcacattgcataatgagggtagacaggtacatttgtgctctattgtctgattcctaaattctgccagatcttttccaaagtgactgaatggcctctttgtgcttccgagttcctctcaccccagcacccagttgatgattccagcgtttccatcactcatagtcctggcaggtttgagagctccattggttcctcctgcatgaggagacagggacggataaaaggatagacctttatcaaacctaacagagactacacggtatctcagttcaacctcataaagcattgaggggaatgttagtcttgttttatagatgagtctagatgaggctagaatccaggaaagttaatgaatggccttgcccacggtctcagagctaataaatggtggaggcagatgaagggcagtcagcctgcttccatgtggaattgatagaggggtcactggactttgacagaggggaagtctagaaccatctggggctgtcttcagatcggacaccagagttaagagagcctgtgtaccctacagcactgcagatagaagcatcatggtgttggcagtggggaggtactagagtgtgtaagtggttagtggcctacaaccagaagacctgagttttgagaaaattattcccatcacaagatgtagcagagacagtgatatggatatactagaccagagagctctgtgaggagctctgtgaggagctgtggcctaatcatgcatcaggccacgtttgtgtccataggtcatgggcagtgctgggtggccaccatcattcatacagagagggcagtcagcagcgtgaggtggttctgcctgctgtggtctcaccccaggcatggaaagcaagagccctgggagcagcggaaggtgctcagctgggcttgtcaggagtctcatctgtcagtggattgacaagaaacagagcaaaatgattcctccaatgttgatgagcctgcccgtgggatctggaaagctaataacagagaaaaccaatatagacaaaggattttaaacaggattatggtcaattaagcaaattagaaaatgatacttgaaggagtatttgggacgcagtagtcaaaaacaccaggaagacatgaggaattgccctaagactctagactacagcactatgtagataactaacaccagactattaattatatcattgaaaaaataaaatttacagtaaattacaaactgtttaccaaaggttatgaaaatcttgtagacttgttttaattcagacaaatgttttcttctcattgtcagctgttctctggcgcatttattttggattgaaccatctggggaagaggcgtggcctctcctgactggaaggctctggggcccaggcagggagaatgaggtctcagaatgacttccttgagagtcctgttcccctttcatcaatgcacagatacagaagacccctccgtcctggagcacctgccatgagcatcagcctcctgtgctgtgcagcctttcctctcctgtgggcaggtgggtcccggacagggccccttgcatagatttcaaagcccagcccctttccattggggctgcagcatcagctgtttccttctctgcaggtccagtgaatgctggtgtcactcagaccccaaaattccgcatcctgaagataggacagagcatgacactgcagtgtacccaggatatgaaccataactacatgtactggtatcgacaagacccaggcatggggctgaagctgatttattattcagttggtgctggtatcactgataaaggagaagtcccgaatggctacaacgtctccagatcaaccacagaggatttcccgctcaggctggagttggctgctccctcccagacatctgtgtacttctgtgccagcagttactccacagcgctacaagaccatctcctctctgcacataaaggcagggtggctctgcccttcctcccccacccaagactcagggatgacctgggcagagttttctgcaatggggaccttggaaccccgagtggccctaagtggcccggacagtatgagcctcagtctgtgccgggtgctcctgcagccatctcagccaggcctggactggtcccaggtcctcagatgtctcctttgttgctctctctggtctatcctctgagctctccttttggggttgggccagggcttccccagctcctacttttctactcatcatcctgactccgaggcccccaggatgaaacaggatttgtatttcagatccatctaggctgtcctctccctggtgagcatgctgcttcctctatctagagttttcccctcccccaccccacccatggtctgtcctgtggcctatctttcccatctgggcagtcaccttccatcccccgcctccccgcccctctctactgcagccatggggggagcacctcttctgagactccttccttcccatcacagagacttcaaaggccatttcctctgccctggatggagacttcctttctctagtggccagctcctacctgtgcttcagatctcagaatgatctgccctcccgcaggaagcaatccctcaccgcccagctgagatcaattttcctctcataagctctcatagaatcatatgtctcttagtaacccttaggacaattaggctttctcagatacttgtctgatgatttttgtgctctacccaattttttttttttttctgagacagtctcactctgtcaccaggctggagtgcagtggcatgatttccgcttactgcaacctctgactctgattccagtgattctcctgcctcagtctcccgagtagctgggattacaggcatgtgccaccatgctcagctaattcttttttgtatttttagtagagatgcggtttcaccatgttggccaggatggtctcgatctcctgatctcatgaaccacctgcctcggtctccgaaagtgctgggattacaggcgtgagtcaccgtgcccggcctctccactcaatttttgagcccatgagagctaaggctgtgcctgctgcattaacaacatcagtgcctggcgtgtggggatacccatttcacagagaatggatgagtgaacgagaggctgaatgagtgatgagtgggtggacgaaccaatagtaggaacacactacatctactgtaaactggcagaggtctagcattaagtacaagaaagcccacccctttgattgctgggctcaggtcgatcttggaaattgatggggaatcactatcatggcggccacatctggctcaaggctttctcttgtggctgcagtacctgacctcctccaggtctctgtgctctctttcagggtctttccccacaacaaatctagacagatcagagatccacttctagaattccatccttaaaggttgttccttgaaaccacttctggtaagaaaatctccattaggtttgcatcaataaaacagggccactacaagtttgagagtgtaacagatttatgatcagaattagactttatgcatatgtgggaggagctgaggaagacaaggtctggaggagagaagtcagaaggtgagggagccagtcagtagtcagggctcctgaagctctgggcaggacaggctagagtggcagggacatgagaggatcagagcataccaggacatgcagtgggaccttgagccgggagcacaggaaaaggccaaggaaacctgcttctggggaagctgttccttgtctatgggggccacccctgcaggtgcactgccaaacactgtgggcagcctggctgctgttggccaacatttgggaagatgaactggacacagggtgcagaaggaacaggacttccaaggtctgttggatgcctctgtatctgctggtcactgactctcactgtctgaccacaatgacttgccaattgttatagtgactgttttatatctgtcttctaaattttaccaaatgtatccttgaccatctctaaccagaatgataacagaaatggcattctgggaaagtcagactcttcatttgcaaagttgacttaacacaatccagcacaggatggattctcccagattaaggcatcagatcacacaactgtctcgacctgccacggtccatggactcctctccgggggacacctgtgctgcccaggtgaatgtggacacaatttgtatgtagatgttccagacgctggtgactaacttttcttttaatactgtgtctgaagtctctctcacccagagggtctatatatgtatgagtatatatgtatttataaatatgtatgtgtaatttctccttagaagaaaatgtcatgatgactacatggcttaatggcatttatttatgaaagagctttattaaaaataattagaaaatttgaattctattctgaatttttccttgggagtgtcctgagagcatttttgaccctaccgacttttgtcatgtgtgtatttggcagcctagagtgcagcagttattggcgccatacattagggagttagactggagatggctgcaaaatgactgactcttagtgttattcactctcactctgggcctcactggaatgtcacagactaccatcgaacaaatggattcccagtatgaagaatattaggagatagcaatgaggaaacatgagcacaagcaacaaacatttgaagtgcaaacctgaagactcgaaatgttggcattataagatatgaaagtttggtgagctacatttaaatgaacatgacggggaactgaaactaggaaaaagacaatgcctgaaaccatcaactttcataacaattgtcaaaaaatatatctaggaatgcctcatacaatcactgaaaacaaaatggaaagtcaaacagttgattagctcctcctacagagatttttagtgatttcaaagatggatctgcaggagtgatctagaatgcagcacggaaaatgaaaagtgaaatatgaaagaagttagagaacagggaagaaaaaaatggatgtttcccatatattagaatatgcatatttttcataatttcccattttttgttgcatatgattgaattttcagacagataaaataggtagaatgttatgaggtgatatttatgagatgttagctgagaagttttttgaggtgtttaaggacctaaattcagagtttccagaatcacaatgaatctcaaataaggcagtcaagtcataagcaaattgtagaacatgacggacaaagagaagattttgaaagccgtcagaaagaaaagacaaatacgtcccataggaatagatggagaacaacagtaagttaagacagtggtaaaaataaccattagctcaattatcattctccttcatttaaggtaagattgattaaaaaaaataacttttagaaggggaacatgaaaaatgactgctgtgagtttgctatcaaggtttcttttctgaattacagttaagaaaggtgggaaatgatcccagaagaaaggcatgagggcagttcgtgaggtaacccaagtgatggggctgcccgttgggcacgtgtgactgagggaatggaggaggctggggcataaatggggatggcagaggggaccctgaattgcaggatagacaatgagctaatgccttggtgccttgttttggggatgctgttggcacatcctacaagacatgcccagcagacagaggagtggctgtaggatgagaagatgaactcagagatgcagtgtgagcctctggctccagacagcacgggagcccaaagcaatgagccaggcattgatgttgttaaaaaggagcttataaatatttaaagtgtgttctaatataaatactgtgaccctgacatcctggggattgagagaggaagtgatgttactgtgggaactgccctgtggagacaaggacattcctcgtcctctgctcctgctcacagtgacactgatctggtaaagcccccatcctggcctgaccctgccatgggcaccaggctcctctgctgggtggtcctgggtttcctagggacaggtgagtcctcagaacattaagtagttttattttttctctgtgtgtaggtgtgtgtgtgtttgtgtgtgtgtgtgtgcgatgactacagatgttttccttattctgttgccaaattctatttccacagatcacacaggtgctggagtctcccagtccccaaggtacgaagtcacacagaggggacaggatgtagctcccaggtgtgatccaatttcgggtcaggtaaccctttattggtaccgacagaccctggggcagggccaagagtttctgacttccttccaggatgaaactcaacaagataaatcagggctgctcagtgatcaattctccacagagaggtctgaggatctttctccacctgaagatccagcgcacagagcaagggcgactcggctgtgtatctctgtgccagaagcttagcacagcgtggcacagtcgcgtccttcctgctcacaaacctcatccttctctctccttgcacctcctagagacccttaatagaggcctatctttgatcctcacttttcgtgggaaataagtagatttggacatcggctgtcctttgggtagaaagagaccacagattcattcctgaaacacagtgactgcaaatgtaggtggtgaaaacaatcacgtcccactgccctctaggagtgcttggagccagctcactgctccaaacggagtgggtgtcttagcattggccttcagggcagacatgcatcttctataggtcttggaggctgctgtgttacccacatatatgaggttgtcaagggcaggaaacatgctcttctcctgcatattttggggcatctggaaggtctgaggctacatccccaggaatatctttcttctaaagcctcttctattcctgtcaccttggaaatttttgcaacaaaatatcgaacctctcttcctgtttaaagtaaaggtctttgcaactttcgtggtctttacttgataaatacaatcatggtaacaataagacttcatttcttctgcctactttaagccacttgtatcctttattttatttccatttgccattgctactgtcctgatagacagaagcatgcattcaccactgctgcctgttcacatcgattccctcaggaaatctgatttttagactctgagtgttttcattgttgtccaactcatttgatttgaaataatgttaccgaggcctttaactcaagaagtgttttatttataatattgaatctattcctttttattttatttttcataatagatagtactatatagtacttgttataaatagaagtacaatgattatattgcaatagaatcttccacctatctgtgggtgctgctgcagtgtgtatctgtgaaagcgaatgcactggtcagagctgatgtgattatggatcgtgggtttctgggagtccttggcgacagaccacttctccaagtgtgggactcagtgtcccagatgcaaccatgatagaggtgccctgagtctttcatagctaggaggggcatcatagtccttccaaattcactgatcagaaattgtggtgtggtacagataccaaatttctttctccagagaatgatggtcactggcagggagttgctcttgacccattttttcttgtgtcgtcatcaaatccctccttgctcaggtgccctgtgtctcctgggactgagtaagtccagagcacagatgggaattccctgtcttcctagaccctttgtctaactgctgccactttcctccatgtgactcctgagatagctggtcctaacagtggacaagctctgacactgaggctgaagaaaacacagtctatagttgtcaacggcgctgcaagaacatgtagcaaaaacgagcagggcttccaatttatactgagaatgaacatgcaagaggagcaaagggtagaaggtactaatgaacaaatagcaaggaatgcagtttctgttctaatgaagtcattctgttgtcttaagttaagtaggagaaaactttcacagtaattacatcaagtcaaaggctagcggctccccaaccaaccaacatagctatttgctctgtgatcttggcagcttcagaggactcagaaatcctttctctgcacaaacatccctttgtccattccaagatccaggatcacacactgatcctatcatgaaaacaatgaggtgtgctatagttgctgtggcctcattttagtatgttgagtaggaagcattgacgaactttgaaagctttgctcttgagtctagggatgtgctggagccagcttgtatgagtcagaagaatcaaataggcatacttttcccagctccctgttcagtgaagccatgctgggagcttgaaatctgccatggtgggtatgttggtacaacagaaattagcaaatgctaccagccatgcccccaccttcacagacacccagtttatcagcacatcactggagtattttctgatgtccctgttatgccatgtcttttagggacaaaagggctcagaatttatgtctcctctactctgttcttagaagccatcatctaagggggccttgattgctcccatttctatccagctcccaaattctcttgctctgtagctctgtgtctcctgcaagcacgccagtctggaacatgacaactattttgaatgtaactaaaggtatcactgaaccagttcattatttacaaattatctttccttgcatggaatattcagatgctggagtcattgggaacagagatggccaagcagcaactctgggttgtgaaacacttacagccccgctattcttctgtggcaacgagagaccctgtaaaaaggacaattttgctttggagactaagcagctccccaccagtcaggaatgactctgcttttactttaggctgagaggtcagaagggtcacaccctcaatattctcctctccaagacggagtgtggccactctccatctcagtccctggaagttgtccagagctccccgagaatccctgctctggaggcagaatcaccaaggctcatcctcaccagctccccacaggctccagcagggctttcccaccaggtgcagggcacaggaatggctctgcctgtctcttaggtagagggaggccaaacagtgatgtttgtataagagggactggggttctgggtctcctttaaagtatttgacaaaattttctttgtttttgttttattgtgccatctcaccaatgaggagagcaatcccttggtagttatattgtttttggcacttgggaaggtttttgtggttaagccacattaagaaattgtgcctttacaggaaattatgctgtacaggaaagttcagctgtaacccaaggcagtgaaagaaatagcaataattttgagagcagttacttgggtatctatgataaaggtgttaagtttcattgcctacatctaactttcagtctagtggaaatgaaaaggcacagttagggggcatgtgagcatgccatgagagagatcgatgccaattgagaagtctgtgccattccccaatactgtgggattgaaggggagggagagatgacctctccttcagactgtgctcaacaaggagggagtgggagttcatccatgggaatctgacgaggagcaaatcccaggggcctctaactcagggtgcaggagcaaatccttggagaggaaaatggtccagttcagctgtcacaggagacaggagaaagcaaagtcatctaatccacagtctcccggctgatttgcttccttatgatgctattttgtaccagcgtgtcctcatctcccgctgctcctctgcctgtttcagaatcatctcttccgtgtttggtgctcagatcagtggatgtgcattgtacaagctgatcatttcctgtagcagcccctttgctagtcttagttatatccatccttattttctgcattaggtactgctccctccaccattcattgcttattgccttgtaagaggtctcgttttatatatttcaattttactttttattaatagatatttgacttcatcttttgctgatctatacttttggggtaacattgtcatttttggaggacgatttgtttatctttagtgattcagattaaataatctctttatacttcaatgtctgtgttttcttcctattttaagccaaatattatttcctttcattcctctccttctgttactctttctttagatggtagttttaagggagaaaaagttaaactataactggacctatgtgataagtgttattcagaatgagggtgggatattaagattggtaactcaaagcaataatcagggttagaactaatgttagacttagggtttaagggaagctgctcataaaaccagcgtgatggcacttctggaatattctggcagcttcctctgcagacacttcccagcattccttgggccattacagaagaaacaatgttgaaacttcacgtattggccacaagatggcagtgtggtccactgagctcgaaagggctctggggagtctaggagagcatcctaggagggaaagggttaagaaaaattagggcttggatcctgtattatgcagatgttgcagcagctttcagttattgctaggctacctacagctatgcaagagacgggaagtccctctaatctttaatgacatctacagttgaggaattttggccggggcaaattttggtcaggggcaggtgtagaggagcaactgcctcagaggaaaagggaaaagcgaggggtgggctgtgtcctgagcccagtgcgtctctgctgcacctcatcttccctgcaggtctggccaggcaacagctttaacctgcttgagtgatctggaattctagaagttcagaagtcgtactgataacatcaccttggctgagattccattggacaccaggcatgtgttctctggaggacaaaaaatattgagaacaagctctaaaacacctaagtaaacagactacagaagaaaaatgttagtagatgcaccaaactgtgccgttagacctgatgataattgactagtagaattaccaaaaagagactataaataagtctccactaagtatttgtgttattgagagcagtgtttaagtcttctcagggtagattaaagaaggaattcagctattatcatgactttggcttggatgaaaatccatgaagtcctcaattgattttcttgtaaaatattacagaataatattgagcaaacattttatttttctccagcctgtatccctccttagcactaacaggtaaagcgaatacctagaggcaacgtttctttagttgggatccattaactgcaggactgggaggtccagagctgggcttcacagggagtgcaaaccccacgtgcagggaaccccgtgtgtctgtgctgtgcccaactcccctctgtgaggctgtcaaagggagagggccgggtcacccgggaaccccactcacaaagaggggagcaggctgcttgctgggcaaaaaaatcacttcaccaattggccaatctgttgaaagccaaaatgaaaggaaagtctgaatgtgagagtgatgaatgcccaattttccaagttatgaaatgtatagcagctcatggttgtcagaatgatttcaacagcatataaagatattgtaaacagcttttgtttgtctatagctttccttgatattgatcctcagttgtttttcagcccacgcatcagttgagcttattttgataccaaattttaaagttgccacttcagtcaccaagcacttctcacattctccataacttacagatatgtgtgctcctgtcttttcttatttttgtgtgattcatttttaaattgggctgtacagaatacaagcatacatttgtaaatgactcccatattttatgcaattaactgtttactttttagtaacaattttatttaaggtttaactaatagagataaaaacagaaatattaatacaaggacaacatggtaaattttgacaaatgcatatgccagagcaacggtaactgaaatgattataaaaaaatttccgtcatgcaggaaagtgtcgtcatgctccgttccaatcaatttctatcccacagataaaaacttttcttagttatttatttattttgagacagtctcactctgtcgcccaggctggagcacagtgctgtgatctcagctcactgcaagctctgcctcccgggttcatgccactctgctgcctcagcctccagagtagctgggactacaggcgcccgccaccatgcccggctaatttttgtatttttaatagagacggggtttcaccgtgttagcctggatggtctcgatctcctgacctcgtgatccacccacctcggactcccaaagttctgggattacaggcatgagccacggcgccaggccaaaacttttcttatttttatcaccattgactagcttggtctattcctgcactccgtataaatggaatcatataacatttttattgagttattttcctccaaaattagtatttctgaagtgtattcatattgttgtatcagcaggtcattctttattatgactaatattccactgtgtaaatataccacaacttgtttatccatgctcccgttgatggatatccatgttactcctgtcttcaactattatgaataaaattgttgtgaatattcttgtggaattctttcttgtggatatatggattcttttttttttattttcttttaggtatagacttaagagtggaaatactgactcacagtgtagatgtgtgtgctatgcttgcgtgtccccacaaaagctcatgttgaaatttgtcaatgtaatggtattgggaggtgggacagttatcactaggtcatcagggatctgccctcagaaacagatcaacgccctattgtgggagtgaataagttgtcttgggaatggtcttctgataaaaagtatgaattcagccactttctctgtcttgggtgcttgcttccccttctttctgccttggataatagcaggaggccctcagcagttatggccctttgatcttggacttctcggtctccagatctataagccaaataaatcccttgtctttataaattacccagtctgtggtatttctctacagcagtaggaaagaaattgaaagaaaacatggtgctgagagtggcgctgttgctacaacaaggacctgaaaatgtagaaacagctttggttaatggcaaatgggtaatggatagaggttggaagaattcggagaagcagacaagcaaaagcctagattgctgaaatagatcattaagggtaattctggtgaaggctcagggggaaatgaggaacaagatatcggaaatcaaagtaaatgctatccttgttgtaggtagcaaaaaccttggaaaaattgtgtcctgttctaggactttctggaataaaaatattatgagctattagctaggatatctactgaaggaaatatctaagcagctaagcattcaggctattgtggactactttcaggcaccaggaaatttaacccagcaagaaaggagccaagggaatagattttgcaaaccagcacagatggtgacactacctccctctgctgtcctgtctccaataagacaaactcgctctggagttagagaaaagaggagccagttaacataatacactggggtcagcttctgaaggcagggtggatctgaagggaataacataaactgtccagagcactacgtataggatgaccttgagggtgctgagtcccaagctggctaggtctgtgctatgagctgagaaggccctagaattatttctggggaatctgaactcttgataatttacagacaacacaggtctgctttgattctgatcagatggactaaatcttggggactctgcaccgctggccactcaggaaatgggttgggaatgttgcctgagacaggaaaatatgataagaaacatggtgtgaatctagcatcagaaagatgatgtgaggacagcaaggaagaactgcaacttgaggtttaatcacaggctcctcatcctcccctgatgggcaggtgtgtgagctccaggatggagtaccacagcactaggtgggagaagggtgatagggtggtggggctgcctgtgagctggggcagtgtaggtagaggagcaactgtatcaccacagaagcttctgccttcacacattcctccagctctgcaggacaggttgagtccagggtccgtagtgcgctagacttaaggaaggctgcatggggaggacacaggacagtgacatcacaggatacccctcccatcaggaaaatcaaggctcagaactcactgggttcttccccaggaggaccaagccctgaatcaggtgcagtgctgcctgccccactgtgccatgggccctgggctcctctgctgggtgctgctttgtctcctgggagcaggtgagtcctgggcacaggacagcagccccattctcagcttttccacccgtgtcctccactttaccatggagaagacctccaggctgtctcctgagctcatcctccatctgcttttcccacaggcccagtggacgctggagtcacccaaagtcccacacacctgatcaaaacgagaggacagcaagtgactctgagatgctctcctatctctgggcacaagagtgtgtcctggtaccaacaggtcctgggtcaggggccccagtttatctttcagtattatgagaaagaagagagaggaagaggaaacttccctgatcgattctcagctcgccagttccctaactatagctctgagctgaatgtgaacgccttgttgctgggggactcggccctgtatctctgtgccagcagcttggcacagcccggcagaatcactgacattctgtatataaacttcctgccgtaactttgacttgagagctgcaggccccacccaggtttcactccttcaagggaagcttttagttgcttggaaggcatgtcttgtgtcctactgagggcagacctttcccaaccaatagagcccaggtttcctgtgccctgagtgtgcctgcttctgtgctgcatcttcttgcagcttgtcccttcctgggtaacttcagtataagagtgactgctgagcgcttggtgtgtgctagatttttgtatatgttacatatcttaaagcttttccacaaccttgcaaatcaaacattctcatccttcctttacagatgggaggctcagggacattgagtcattttccccggtgtctcctggcttgtaaggatcagaagtgggaaacaaactagtccatccattttccacctacccccctgtttcatcaccaccttctgtatcctgttcagtaaaccagagccctcacactgccctctagtgaccagcagggccgcagcagaggctcagatgtcttcagggggttattactatggcctcctaattagcaattttgaggaatgttaaatttcacactttttaaaaaatcatttatatgcattccctttatctttcccatgtctgtagcttacattttcatttttatggtgttttttgatgtacaagagtttaatttaatgccacaaaaatgaaaaacaattttgtttgtgtgtagacaaaaacttctttctcatataaatgtctaaacatatttttcttaatttattctagtaaaatttaagtttggcttttctccattaagaagaaatgtacctgaaatatatctcacgtcagaaataacatagagacctaggaatgggagggaagcacatatgttcagtgaagaagcaacagcctgtcaaaaagatcccaaaatggacaccctgcgctgacggtggagaggtagctggagggtaaatgatcacgaactttatcaagctgttgttgttagaagagggacagccaggagcagagaccacatgggtgaaggtttatgacttgactctaggttgaaggttgcagcaggtagagggcggaattgcaggcagagggcagagtcactggctggcaggggcagtggcatcaccagtgactctactgacatccaggaattatgtccccaacacacaaagtgaaaaaactcccaacaatctgcacatttttccctggccctgctctggccaccagactcctcagtggtgtggccttttgcctcctgggggcaggtgagatctttaaagacttttccttggctcaccacatcctagcctaagcctttacatcaggtctgcattattggggtccctccttggtcactcaacttccttctatcatagacttcacagatgctggaacaacctgatcccaagataccagagaacaaaggcaggacgcgaagtgacatggagatgcctgagactgccatccatgaatacaggtgcagatgttaataggagccgaagctggtgcacagctgatctgtcccagcccacactacagagaaatccctgaatgtctttgacttcctctcaaagccaaatatgtggccttggtgtcagacagtctctcccagacctctgtgccctcttgcaccaggctttaccccacagccaccttcctctgcacacaaagttcagtggaagatataggtggccttgtctttacgagatcgtgatctgggcagtggaaaacattgtcccataggagtctccccaacactgcccaggctggggccttcagagctcggagcagctctgtgcatatgaaactctgccttgtgttgagcttctctgccaggccagtctcagctggacaaaggaacgcacatcaccatgatgtgagtagatgcagcctctcttccaggcccctcctgcagctctggcctcagaagtcctctttctcaattgctctcaggaaggaaagttcatttgaaattgtatatttgcagacagcattgacaacacaggtctacgtatgtccaatcccatcttccatttgtaacaaatacaaacactgtggtgtgcttcttttcacccctcttttctgtgttcatgcacacctttctacccaagtacacctacagaaattgggttcacctgtacactttactggccacatgcatactcttttctgttaatataccctggtcttattgttccagattggtcgatatagatctaacttgctcctattagctgcttcatattgcataatgagggtagacaggtacattcatgctctattgtctgagtcctaaattctgccaaatcttttctaaagtgactgaatgacctctttatgcttccaagttctcctcaccccagcacccagttgatgaatgcagcttttccatcactcataatcctagcaggtgtgagagctttatcagtttctcctgcatgaggagacagggagagataaaaggatagatgtttatcgaacctaccagagcctacacagtatctcagttcatcctcataaagcatggagaggaatgtgcgtcttgttttatagacgagtctagatgtggctagagtccaggaaggttaatgaatggcattgcccatggtctcagagctaataaatggtggagccagatggaggacagttggcttgcctctgtgtagaactgatagaggggtcactggagtttgagggaggtgaagtctagaaccatctggcgttgtcttcggatcagacgccagggggcagtagagtctgtgtaccctacagcactgaaggtaaaagtatcatggtgttggcagtggggaggtactagagtgggtatgtggttagtggccaggaaccagaagatctgaactttgaaaaaatttttcccatcacaagacgtagcagagacactgatgtggataatctaggccagagaactgtgtgacgagctgttcttaaaatgagggagggaggagaagcaactaagggtcacttcctctacatgaaatggagaggaaaacaatgttaactagaatctcatctgattttagtcagttttgctttgtaagtagttgcaaggtgggacaatttatttttgacattaagtaaacatctatacggcttctttaccttatgaagtctggtggtgaaggcaaaaatggtacggccaatggagtcacagtttgtttaataaataactcagagttcaaatggagactctcatgggccagaaattggtaaatgttcctgcattctaaaattaggaggatcttattttctttgaatcaacagagaaggaagcacaggcagtggggagggacagtagggaactcggcagagtggccacagaatgtggaagacaaaggacatgtaataccaaattctaagctgtgaagttgtgatgcaaccctcctccttctcctaatgtttttcaggtctcagcacagatgcacacctgagggagtaacttctttggaaatgaaggacaaatagctgtgtaataataagtccaccttacaaagcacaactggaaatggaaacaagattatttctaaggccttttctactctaagagtaacttagtagcaagctgagaggtgaggatggggggatgttcatccacacgcaatgagtaccatgaggctctaccatgaagcatatagtcctcagtgtgaatcagagccctaagaagaataatgccctttacattgctttgccctctgccatcctaaacccatcccacccataattaagcagccatggaaatgaagggagccagaaggaatcaaaccctgctgcttggttcagtagacagagggacctgggggcagggtgttggctgggtctaggagaagatgatgagctcagaaaatagacaaggagaaaccccaggggaaagcttgtaaaatcctggaggaatcacaagatatattatttgagctcctttttatttattactaaattaatggcaggaatcccatataaagggatattccttatgaaacatgacatctaaagtacaaacagaggattcttccttaccctaaatcctgccctctctccctgagtctcttacgcatcaggccacctttgtgcccataagtcatgggcaacgcagtgtggtcaccttcatccacacctagaggacagtcagcaaagtgaggtggttctgcctgctgcggtctcaccccagacatggaaagcaagagccctgggtggagctgaaggtgctcagctgggtttatcaggagtctcatctgtcagtggattgacaagaaacagagcaaaacgactcctccaatgttgatgagcctgcccctgggttttggaaacctgataacagagaaaaccaatatagacaaaggattttaaacaggattatggtcaattaagcaaattagaaaaagatacttgaaagaatatttgggacacaggagtcaaaaacaccaggaagacatgaggagtgtccctaagactctagactacagcactgtgtagacaactaacaccagaatattattatattatcgaagtaataaaatttacagtgaattacaaactgtttccaaaaggtcatgaaaatcttgtagacttgtttcaattcagacaaatgtgttcttctcattctcagctgttcactggtgcatttatcttgaatttgaccatctggggaatgggcgtggcctctcctgacaggaaggctctgggggccaggcagggagaatgatgtctcagaatgactcccttgagagtccagttcccctttcatcaatgcacagacccagaagacccctccgtcctgcagcccctgccatgagcctcgggctcctgtgctgtgtggccttttctctcctgtgggcaggtgggtcctgggcagggccccttgtgtggatatcaaggcccagcccctttccactggagctgtagcatcagctttgtccttccctgcaggtccaatgaatgctggtgtcactcagaccccaaaattccacgtcctgaagacaggacagagcatgactctgctgtgtgcccaggatatgaaccatgaatacatgtatcggtatcgacaagacccaggcaaggggctgaggctgatttactactcagttgctgctgctctcactgacaaaggagaagttcccaatggctacaatgtctccagatcaaacacagaggatttccccctcaagctggagtcagctgctccctctcagacttctgtttacttctgtgccagcagttactccacagcgctgcaaggctgtctcctctctgcacataaaggcaagggaaggtgctgccctcctcccccacccaagactcaaggatgccctgtgcagagatctctgcaccaggaaccttggaacccagagtggccccaagtggcccggacagtatgagcctcgctctgtgccacgtgcctctgcaggcatctcagccaggcctggactggtcccaggtcctcagatgtctcccttgttgctctctctggtctgtcctccgaggtctcctttcgggttgtggccagggcttccccagctcctacttttctactcatcatcctgagtccgaggcccccagggtggaagaggatttgtatttcagatccatctagactcctgtctcttcctggtgaccatgttgcttcctctctctagggttttcccagcccccaccctcacgtagtctctcctgtggcccacctttcccatctgggcagtcaccctccaaggccttgctgggtctctcctcccctcacttccccgcccctttctactgcagctataaggggagcctctcttctgtgcctccttccttcccatcaaagagatttcaaaggccattccctctgccctaggctagaggctaccttttctactggccagcgcctacctgtgcttcagatctcagcataatctgcccctcctgcaggaagcactcccccgcctcccagctgagatcaactttccactcaaaagctctcatagaatcatgtgtctgttggtaacctttagcacagttgggctttctcaggtacttgtctgataatttttgtactccacccattttttttccctatttttccttttttttttgagacagagtctcgctctgtcaccaggctggaatacagtggcactacctcggctcactgcaacctccgactctccgactctctggttcaagcgattctcctgcctcagcctcccaagtagctgggattacaggcacacaccaccacacccagctaattctttttggtatttttagtacagacagggactcaccatgttggtcaggatggtcccgatctcctgacctcatgatccacctgccaaggcctcccaaagtgctgggattacaggcatgagccactatgcccagactctccaccgaatttttaagcccatgagagctaaggctgtgcctgctgcatttaccaacatcggtgcctggcatgtggggagacccatttcacagagaatggatgagtgaatgacaggctgagtgagtgatgagtgggtggacgaaccaatagtaggaacatgctacacctactgtaacttggcagagatctagcattaagtacaagaaagcccacccctttgatttttgggctcaggttggtcttggaaattgatggggaatcactaccatggcggccacacctggctcaaggcttcctcttgtggctacaacacctgaactcctccaggtctctgtgctctccttcagggtctttccccacaacaaatccagacagatcagggatccacttctagaattccatccataaaggttgttccttgaaaccacctctagtaagaaaatctccattaggtttgcatcaataaaacagagccactacaaatttgacagtgtaaccgatttatgatcagaattagaccttatgcatatgtaggaggagctgagaaagagaaggtctggaggagagaagtcagaaagtgagggagccagtcagtagccagggctcatggagctctggcaggacaggctggagtggcagggacatgacaggatcagagcatgccaggccatgcagtgggaccttgacctgggagcacaggaaaaggccaaggaaatctgtgtctggggaagctgttccctctgtgtgggggccacccatgtacgtgcactgccaaacactgggggcagcctggctgcttttgggaagatgaactgtacacagggtgcagaaggaacaggacttccaaggtctattggatgcctctgtatctgctggccactgactctcactgtctgaccacagttatctgctatgtgtaatagtgactgttttacatctatcttccaaattttacacaaatgtatccttgaccatctctaacccagaatgataacagaaacgtcactctgggaaggcagactcctacctttgcaaagttgacttaacacaatccagcacaggatggattctcccagattaaggcatcagatcacacaactgtctcgacctgccatggtctgtggactcctctccaggggacacctgtgccgcccaggtgaatgtggacacaatttgtatgtagatgttccagacactggtgactaagttttctttaatcgtgtgcctgaactctcactccacccagaggcagggctctgcctcctgcttctgtctccttcctgagcttccgtcctgctggagttgcatggacatcagaaccctggtcagagtgcagcgacctgtggagacagtgggagggaagctcacctcttgctgtcttcctggacctagttcggttatacccaaagcaacttctctggtctccctttggactctgcagtatcagaaatgtgcttcatgaatttgtagctgatcagctcaatgatttgatggccaacccaaagtgaaatcctaagatctgcagaaattgccggcatttctgtgaagatggcaagaatactgtgtgctagagatgccttctctccatgtagagacctggccccaaaacaagacagagcagagagggccaaagagcccaaaacatgtctcagatggttgaagggcaatttcctaggacaatcctgctgacaaaatttcatccctcctattacacgcctgaccacccttctccccagatcagctgagtacccaggatatcacacatcccagcatcttctaacaagggaaaattcttcacatgccagccttcttcctgcaccacattgactaaccctggaaacttcgcctttccagaaaaaagctgtcttctcttggcccagtctagcccagtaggtttaattcatgatttatgtgaccttttaatttactcagaggagaacatatgatttcagagtaaagaatattcattttactttgtataagttggacctaaacagtaaactgagtacttctcttccatcagtgtcttaaattagacaacggtaaaacaaatctttgatgcaagaactttaggtcctggtgtttttcatatggaagatcccagctatccagtccagggcatggaatagatgagcgttaataagtcactctatgcctgagatggttttctattggcatcttttctgagttacagttaacaaaggtgggaaatgatcccagaagaaaggcacgagggcagttcttgagggaatccatgtgataggacagtcattgggcacgtgtgactgggggaatggaggaggctggagcatgaatggggatggcactggggaccctgacttgcaggaaatgcaatgagctcaccactttgtgccctatgttaggggcggtgttggtgcatcctagagtaaatgtccagcagacaaaggagcaagaagcggctgtgggatgacaaggataaactcagagatacagcatgagacctccgggtccagacagctctggagcccaaggcgatgagccatgcattgatgttgttaaaaaggagctgataaatatttaaagcagcacccaactgtgttctaatagaaatgctgtgatcctgaggtcctggggattgagagaggaagtgatgtcactgtgggaactgccctgtggagacaaggacatccctcatcctctgctgctgctcacagtgacactgatctggtaaagccctcatcctgtcctgaccctgccatgggcaccagtctcctatgctgggtggtcctgggtttcctagggacaggtgagtcctcagaacacaaagtagtttcatttttttttctgtgtgtaggcgtgtgggcgtgtgtgtgtgtgtgtgtgtgtgtgtgtgtgtgtgtgtgctgacgacaaatgttttccttattctgttgccaaattctatttccacagatcacacaggtgctggagtctcccagtctcccaggtacaaagtcacaaagaggggacaggatgtagctctcaggtgtgatccaatttcgggtcatgtatccctttattggtaccgacaggccctggggcagggcccagagtttctgacttacttcaattatgaagcccaacaagacaaatcagggctgcccaatgatcggttctctgcagagaggcctgagggatccatctccactctgacgatccagcgcacagagcagcgggactcggccatgtatcgctgtgccagcagcttagccacagtgtggcatagtcgcctccttcctgttcacaaacctcatccttctctctccttgcacctcctagagacccttaacagaggcctctctttgctcctcacttttgatgggaaagaagtagatttggacatcggctgtcctttgggtagaaagagaccacagattcattcctgaaacacagtgactgcaaatgtaggtggtgaaaacaatcacgtcccactgccctctaggagggctcggagccagctcactgctcgaaacagggagtgggtgtcttagccttggccttcagggcagacatgcatcttctataggtcttgggggctgctgtgctgcccacatacatgaggttgtcatgggcaggaaacatgcctctttttcatatgttggggcatctggaaggtctgaggctacatccccagtaacatctttcttctgaagcctcttctatccctgtcaccttggaagtttctgcaacaaaatatcaaacctctcttcctgtttgaagtaaaggtctgtgcaacttttgtggtccttacgtgataaaagcaatcatgataacaataagacttcatttcttctgtctactttaagccaagagtatccttcattttgtttccatttgccattgctgctgttctgatacacacaagcatgcattcaccactgctgccggttcaccttgattcgctcagcaaatctgattattagactctcgagtgttttcattgctgtcaaactcatttgatttgaaataagtttcctgaggccttgaactcaagaggtgttttacttataatattgaatctattcctttttaattttcacattatatattgttatatagtacttgttataaatagaagtacaatgattatattgcagtagaatcttccacctatctgtgggtgatgctgcagtttgtatccatgaaagtgaatgcactggtcagagatcatgtgatcatggatcatgggtttctgagagtcctcagggacaggccatttctccaagtgtggggactcggtgtcccagatgcaaccctgatagaggtgccctgagtctttcatagctaggaggggcatcatagtccttccaaattcactgatcagaaattgtggtggtacagacaccaaatttctttccccagagaatgatggtcactgaggtggagttgctctggacccattttttcttgtgtcatcatcaaatcgcttcttgctcaggtgccctgtgtctcctgggactgagtaaggccagcacacagatgggaattccctgtcttctgagaccttctctctaactgctgccactttcctctccgtgactcctgagacacctggtcctaacagtggacaagctgtgacactgaggctgaacagaacacagtccactgttgtaaatggcgctgcaagaacttgtagcaaaagtgagcagggcttccaatttatactgagaatgaacatgcaacaggagcaaggggcagatgtttctaatgaacaaataggaaggaatagggtttctgctttattgaaatcattctgttgtcttaagtaaagcaggagaaacatttcattgcaattactctaagtcaaaggctagcagctcccaaccaaccagcataactctttgctctgtgatctcggcagcttcagaggactcagaaatcctttctctgcacaaacatccctttgtccattccaagattcaggatcacacactgatcctatcatgaaaacaatgaggtgtgctatagttgctgtggcctcatttttagtgtgttgagcaggaagcattgaagaactttgaaagctttgctcttgagtctagggatgtgctggagccagcttgaatgactcagaagaaccaaataggcatactactcttcccagctcccctttcagtgaagccatgttggctgcttgaagtctgtcatggtgggtatgctggtacaccacaaattgggaaatgctaccagccatgcccccaccttcacagacacccagtatagcagcatatccctggggtattttctgatgtccctgttatgccatttcttgtggggccaaaagggctcagaattcacctcccctctactcctgctctgagaagccatcatctaagtgggcctcaattgtacctatttctattcgacctctaaattctcttgctctgtagctctgtgtctcctacaagcatgccagtctggaacatgacaactattttgaatgtaactaaaggtatcactgaaccagttcattatttgcaaattatctttccttgcatggaatattcagatgctggagtcattgggaacagagatggccaagcagcaactctgggttgtgaaccacatacagccccgctattcttctatgtcaccgacagaccctgaaacaaggactattttgctttggagactaagcagctccccaccagtcaggaatgactctgcttttactttaggctgagaggtcagaaggatcatgccctcagtattctcctctccaagacagagtgtggccactctccatctcagtccctggaagttgtccagagttccctgagaatccctgctctgggacagaatcaccaaggctcatcctcaccagctcccaacaggctccagcagggctttcctgccaggtgcagggcacaggaaatggctctgcctgtctcttagttagagggaggccatgcaatgatgtttgtataagagggactgggattctgggtctccattaaagtatttgataacattttctttgtttttgttttatttggccatctcaccaattaggacagcaatccctttacagttatattgttcttggcacttgggaaggtttttgtggttaagtcacattaagaaattgtgcctttttttcctgttcagatataacccaaggcagtgaaagaaacaacaataattttgaaagcagttacttatgcatcctatgataaaggtgttaagtttcattgcccacatctaactttcagtctagtggaaatgaaaagtcacagttagggggcatgtgagcatgccctgagagaggccgatgccaattgagaagtctgtgccaatccccaatactgtgagattgaaggggagggagagatgacctctctttcagaccatgctcaacaaggagggagagggattttcatccatgggaagctgaggaggagcaaatcccagggtcctctaactcagggtgcgggaacaaatccttggagaggaaaatggtccagttcagctgtcacaggagacaggagaaagcacagtcatctaatccacagtcccctggctgatttgcttccttatgatgctattttgtaccagcatgtcctcatctcccgctgctcctctgcctgtttcagaatcatctcttccgtgtttggtgctcagatcagtggatgtgcattgtacaagctgatcatttcctgtagcagcccctttgctagtcttagctatatccatccttagtttctacattaggtactgctccctccaccattgcttattgccttgtaagaggtttcattttatatatttcaattttactttttattaatagacatttgacttcatcttttgctgatctatacttttggggtaacattgtcattttaggaggatgtgtttgtttatctttagtgattcacattaaataatctctttatacctcaacgtctgtgttttcttactatttaaaaccaaatattattttctttcattcctctccttctattcctctttctttagatggtagtttaagggagaaaaagttaaactataactggagatatttgttaagagtttttcagaatgacggtgggatattaagattttggtaactgaaagcaatagtcagggttagaactagtgttggtatgatgatttagggaagctgctcataacacctgcgggacggcacttgtggaatattctgccggctcactcagcagacacttcccagcggaagaaataatgatgaaacttcacttattggccacaagatggcactatggtccactgggctctggggagtctgggcgagcagtctaggagggaaagggttaagaaaaattagggcttggatcccatattatgcagatgttgcagcagttttcagttattgctaggctacctacagctatgcaagaggcgggaagtccctgtaatctttagtgacatctacagttgaagaatttttgccttcgtatcaggggcgggtgcagaggagcaaatgcctcagaggaacattggaaattgtctgaccaggcaacagctttaacctgcttgagtgatctgggattctgcaagttcataagtcttactgataacatcaccttggctgagattccattggacaccaagtatgtgttctctggagggcaaaaaatattgagaagttctaaaacacctaagtaaacagactactgaaggaaaatgttagtagacacatcaaactgtgctgttagagctgaatataattgactagaagaattatcaaaaatagactataaataagtcactactaaagtatttgtgggcatagaacagtgtttgagtcttctcagggtagattaaggaagaaattcagctattatcctcatgaccttggcttggatgaaaatgcatggactcctcaatttattttcttgtaaaatgttacagaataatattgagcaaacattttatttttctccagcctctatccctctttagcacttacaggtagagcagacacctagacgcaaggttttttagttgggatccattaactgcaggactggagatccacagctgggctttacagggattgcaaaccccacatgcagggaaccccgtgtgtctgcgctgtgcccaactcccctctgtgaggctgccaaaggcggagggccgggtgtcccaggaccccactcacaaagaggggagcaggctgcttgctgggcaaaaaaatcacttcaccaattggccaatctgttgaaagccaaaaagaaatgaaagtctcaattgtgagactgatgaatgcccaatttcccaagttatgaaacggatagcagctcatggttctcagaatgatttcaacagcatatgaagatatttttagagagcttttgtttgtctacagctttccttgatattgatcctcacttgtttttcagcccactcatcacttgagcttattttgtggccaaatttcaatgttgtctatttcagtcactgagcacttctcacattctccaaatcttacacagctatgtgtgttcctgtcttttcttctttttgtgtgattcatttttaaattgggctgtgcagaatacaagcatacatttgtaaatgactcccatcttttatgcaatttagctgtttaatttttagtaatactttttattaaggtataattaatagagagtaaaacacaaatattaatagaaggacatcctggtacattttgacaaatgcatacgccagtgcaatagtaactgaaatgattataaaaaaaatttccgtcactcaagaaagtgtcatcatgctcctttctaatcaatttctatcccagggataaaaacttttctatgtgtatcactgttgagtagctttgtctattcttgagcttcatataatggaatcatatttttattgaattgtttttctccaaaattagtatttctgaagtatattcatatcgttgtatcagtaggtcattcttatgactaatattccattgcataaatatactacaacttgtttatccatgctcctgttgatggatatccatgttactcctgtcttcaactattatgaataaacttgttgtgaacatttttgtggaattcttcctgtggacatatgcattttttttaaagaaatagacttaagagtggaaatactgactcatagtgtagatgtgtgtgctatgcttgcatgtcctcacaaaatctcatgttgaaacttgtcaaggtaatggtattgggaggtgggacagctatgactagggtcatgagggatctgccctcagaaacagatcaatgccctttattgtgggagtgaattaattatcttgggaatggtcttctgataaaaaggatgaattcagtcattttctctgacttcggtgcttgcttccccttccttctgccttggataacagcaggaggccctcagcagttattgcccttctatcttggacttctcagtctccagatctataagccaaataaaactattgtctttataaattgcccattccatggtatttctctatagcagtaggaaagaaattgaaagaaaatatggtacctgagagtgaggctgttgctataatacctgaaaatgtagaagcagctttggttaatgggaagtggctaatggatagaggctgaaagaattgggaggagcagactagcaaaagtctagattcctgaaaacagagcataaagggcaattctggtgaaggctcagggggaaatgaggaacaaggtattgaaaatcgaagtaaatgccatccttgttgtaagtagcaaaaaccttggcaaaattgtgtcctgttctagaactttatggaatataaaaattatgagccatttgctagtatatctgctgaaagaaatatctaagaggcaaagcattcaggctactgtgtgactacttttagccaccaggaaatttaacccagcaagaagggagccatgggaatagattttgcaaaccagcacagatggtgactctacctccctctgctgtcctgtctcccataagccaaactctgtgctgtgagctgttaaagtccaagaattatttctggggaatctgtactcttaataatttacagacaacacaggtctgctttggatctgatcagacagactaaatcttggggactgtaccagtggccactgagaaaaggggctcggaatgttgtcttggatagaaaaatataataagaaacattggtgtgaatctagcatcagaaagatgacgtgaggacagcaaggaagagctggaaactgaggtttactcacaggctcctcaccctccgctgatgggcaggtgtgtgagctccagcatggagcaccacagcactaggtgggagaacggtgatagggtgatggggcagcctgtgagctggggcagtgtaggcagaggaggaactgtatcaccacagaaacttctgccttcacacatccctccagctaggcaggacaggtagagagtccagtgtcctggagcactagacctaaggaaggctgcatggggaggacaaaggacagtgacatcacaggatacccctcccatcaggaaaatcaaggcccagaactcactcggctcttccccaggagaaccaagccctgaatcagatgcagtgcttcctgtccctctgtgccatgggccccgggctcctctgctgggcactgctttgtctcctgggagcaggtgagtcctgggcacaggacagcagccccattctcagctttcccacccctgtgtcctccactttaccttggggaggacctccaggctgtccctgtgctcatcctccatctgcttttcccacaggcttagtggacgctggagtcacccaaagtcccacacacctgatcaaaacgagaggacagcaagtgactctgagatgctctcctaagtctgggcatgacactgtgtcctggtaccaacaggccctgggtcaggggccccagtttatctttcagtattatgaggaggaagagagacagagaggcaacttccctgatcgattctcaggtcaccagttccctaactatagctctgagctgaatgtgaacgccttgttgctgggggactcggccctctatctctgtgccagcagcttggcacagcccatcagagtcactgacgttctgtatataaacttcctgccttagctttgccttgagagctgcaggccccacccagatttcactccttcaagggaagcttttagttgtttggaaggcatgtcttgtgtcctactgagggcagagctctcccaaccaataaagcccaagtttcctgtgtcctgagtgtgcccacttctgtgctgcatcttcttgcagcttgtcacctcagtacaagagtgactgctgagccccagatgtgtgcttgattatttgcatttcttacatagcttaatgcctttcaacaatcttgcacatcaaacattcttattcttcctttacagatagaaggctcagggacattgagtcattttccccaatgtctcttggcttgtaaggatcagaagtaggaaacaaactagtccatccattttccacctacccccctgctccatcatcatcttctgcatcctggtcagtaaatcagagccctcacactgccgtctagtgaccagcagggccgcagtagaggctgaaatgtcttcaggggtcattactatgtccttttcattagctcctttgaggaatgttaaatttcacacattttaacaatcatttatatgcattccctttgtctttccccagtctgcagcttatattttcatttttatggagtttttggtgcacaagagcttaatttaatgcaacaaaaactaaaaacaattttgtttgtgtgtagacaaaaaccactttttcatataaatgtctaagcatatttttctcaacttattctactaaaatttaagtttggattttcaccactaagaataaatgtacctgaaatacatctcatgtaagaaataagatacagacctaggaatgggagggaaggacatatattcagtgaagaaacaatagcttgtcaaaaagagccctaagtggacacctggagctgacggtggagaggtaggtggagggcaaatgagcatgaactttgtcagtctattgtcttgtagaagaaagacagccaggagcagagaccatatgggtgaaggtttatgacttgactgtaggttgaaggttgcagcaggtagagggagaattgcaggcagagggcagagtcactggctggcaggggcagtggcatcatcagttgactctactgacatctaggatttatgtccccaacacacaagctgaaaaacctccccacaatttccccatttttccctgaccctaccatgaccaccagactcctcagtggtgtggccttttgcctacttggggcaggtaagatctttaaagccttttccttggctcaccacatcccagcttaagcctttacctcaggtctccattattggggtccctccttgggcactcatcttccttctatcataaacctcacagaagctgggacaatcaaatccttaagataccagagaacaaaggcagtacatgaagtggcacggagatgcctgagactgtcatccatgactacatgtgtaggtgttaataggagctgaacctggtgtacagctgatctgtcccagcccgcaatacagagaaatccctgagggtctgtgactttctctcaaagccaaatatgtggcctttgtgtcagcctctcccagacctctgtgccctcttgcaccagcagtcaccccacagccaccttcctctgcacacaatgttcagtggaagatataggtggccttgtcttcacgagaccatgttctaggcagtggaagacgttttcccataggagtctccccaacactgcccaggctggggccctcagatttctgagcatccctgtgcatgggaaactctgccctgtgttgagcttctctcccaggccagtctcagctggacgagggaacgcacatcacagtgatgtgagcagttgccgcctctctcccaggcccctcctccagctctggcctcagaagtcctcttcttcacttgctctcagaaaggaaagttcatttgaaattgtatatttgcagacagcattgacaacttttccccgtcggccttcacaactccatcttccccacaccatgctcatgtcagtcctcagcctcctccacatgatgtctgctcccagctgtcctctccctctgcaccttcacctccacgtcaaccacagatgcctcagttcaggacattcctcatgcatcatgctcctcccaccaaaggcctttccactccatgctgtattctctgtgtcaacacaagtctcttcttctttgttcttgctccaactgtcagtttatctacaaccatctctagggagacactccttcaacagttttcctaggctgcacctccttattgtaaatgctcacagcttataatatgtattaaaattcatagatttagcaccatagtcattttccatgactttgtgtgactatttaattgacactactcttgcattctagactgtaacatgcatcattttacaaattgtggatgttttgttccccattttattgtcaggaccaacagcagttccaatcttgaaactggccaatcttgaaaaatgaagagcagatattgaaaggccgtctgagtacccacttagatgtctggacgcattaaatcggaacctctatcccttcatctcctaggatcaaatgagtcctggaaacagatgagaaatccctgtcatggataagtaactggatccaagcctttctgcacgactgaatttcctatctgccctatcgccttcctgcctaatctcctccttcaatctccttccctcacaggtgtcctggatttgggagtctcacagacacagcgcacctaatcactctgagagagtgatcagaaacataatgtcaaacactgacattaaaaggtcatggagaagaaaacaaatggcttccccatgctcttatggagagttttcccaaggcacaaatatctctttgggtggctttgaggtcatggtgcctgacacactgagcgatattatgggtgtccatttccatgaattggtgggcaatgtcagagacacagagttcatggtcaccagcttcctccagcccacacctgattttggtgcagggcgctgagcagagacctttgcttgttaccctcctttgccagttaggaaaggctgattgagaggcagaggctccatttacagagcagggctatgtgttagtccctgaagaattgtgagagccattctgggtggaaataatcaaatatacaatccccaagaatggcccacggatagacagaagtcccaattttgccagaatgatttgcatctatgctttgaagacaaatgcagttttatctctttaggcaataaagaccaaaaatagactagttattttaaataattgaaccttaaacagaccaaagtcagaacatcttccctagggacagcattttcttccacccactcactaaagctgtatttgagaaagcagtgtgctgttgataaacgctggaatatcgttacaatcgacattgtaataatactgctacttggatcagaaacaaagagcatttctaaagcttgaacaatgtaaaactggaaacgagctctcactgagtttggaaatgcaggcactagagggtgctcatttctcttccttttccaatcgggggctattcaaaggctgttctagaacaaggggtgagatcctccacttccccgtggtgatcaggctttcacaggtagaagccttattagttcataatcagccaagctgacctcaccatcaaatgtatcgacctcgatgctcaccctcctcagcagtcagagactggctgtgttcaccaggagctcgtgtgtttttacggagcacactttctcctcggtttattaaaaacaaatgagcctttatacggggttccataaacagaagctttctgtactttgcccatttagacactgcaaattctgatgcctgatgaaaagtgtaaacttaaagcttgcatgtcgttaagattttttaataaccaatttaaataatatatataatgaaaatgtcaataatgctctcgaatccaatcccatgttccattggtaaccaatattaacgctctggtgtgcttcttttcacccctcttttctgtgttcatgcacacctttctacccaagtacacctacagaaaatgggttcacctgtacactttaactgccaaatgtgtactcttttctgtatatcttggtctttattgttccagattggttgatatagatctaacttgctcctattatctgcttcatattgcataatgagggtagacaggtacattcatgctgtattgtctgtttcctaaattctgccagatcttttctaaagtgaccaaatggcatctttacgcttccaggttctcctcaccccagcacccagttgatgattccagcttttccatcactcatagtcctggcaggtctgagagctccatttggtttctcctgcatgaggagacagggagggataaaaggatagacctttatcaaacctaccagagactacatggtatctcagttcatcctcataaagcattgaggggaatgctagtcttgttttatagatgagtctagatgaggctagagtccaggaaatcaataaatagccttgcccatggtctcagagctaataaatggtggaggcagatgaagggcagtcggcttgcttccatgtggaattgatagaggggtcactggagtttgagggaggggaagtctagaaccatctggcgttgtcttcagatcggacaccagggttgagacagtctgtgtaccctatagcaccgcaggtacaagcatcatggtgttggcagtggggagatactagagtgggtaagtgattagtggcctggaactggaagatctgagctttgacaaaattattcccatcacaacatgtagcagagacactgatgtggataaactaggtcagggagctgtgtgaggagctgttgttaaaataagggagggaggagaagcaactaagtggtcacttcctaacatgaaatgtagaggaaaccaatattaactagaatccatctgattttagtcagttttcctttgtaagtatttggaaggtgggataatttattttcaaggttaagtaaacatctatacatctcctttatcttttgaagactggtggcgaagcgaaaaatggcacggccaatggagtcagagtttgtttaataaatatctcagagttcaaagagagactctcatgggccagaaattggtaaatgttcctgcattctaaaattaggaggatcttattttctttgaatcaacagagaaggaagcacaggcagtggggaggaacagttgggaacacggcagagtggccgcaggatgtcaaagacaaaggacatgtaatatcaaattctaagctgtgaagctgtgatgcaaccctccaccttctcctaatggattttttaggtctcagcgcagatgcacagctgagggagtaatttctttggaaatgaaggacaaatagctgtgttaaatattaataacaagtccacattacaaagcacgcctggaaatggaaacaagattatttctaaggccttttctactctaagagtctctaacttggtggcaaggtgagaggtgaggttggggtgggtgttgatccacacgcgatgagtaccatgaggctctaccatgaagcatgtagttctcagtgtgaatcagagccctaagaagaataatgccctttactttgttttgtcctgtgccatcccaaacccactccacccataattaagcagccatggaaatgagggtagccagaaggaatcaaaccctgctgcttggttcagtagacacagggacctgggaggagggtgttggctgggtcaaggagaagatgatgagctcagaaaatagacaaggagaaaccccagtggaaagcttgtaaaactctggatgaatcacaagatatgttattagagctcctttttattactaaattttatttattactaaattaatggcaggaaccctgcacaaagggatattccctatgaaagatggcatctcaaataaaaacagagcattcttccttaccctaaagtctgccctttctccccaagtccctcatgcatcaggccacctttgtgcccacagatcatgggcagcgctgggtggccatcatcatccacacagagagggcagtcagcagcatgagctggttctgcctgatatggtctcaccctaggcatggaaagcaagagacctgcgttgagctgaaggtgctcagctgggtttgtcaggagtcccatctgtcagtgaattgacaagaaacagagcaaaacgactcctgcaatgttgagaagcctgcacctaggatctggaaacttgataacagagaaaaccaatatagacaaaggattttaaacaggattatggtcaattaagcaaattagaaaaggatacttgaaggagtatttgggatacaggaatcaaaaacaccaggaagacatgagaagtttccctaagagtctagactacagcactgtgtagataactaacatcagaatattaattatattattgaagaattaaaatttacattgaattacaaactctttacaaaaggtcatgaaaatcttgtagacttgtttcaattcagacaaatgtgttcttctcattctcagctgttcactggtgcatttatcttgaatttgaccatctggggaatggcgtggcctctcctgactggaaggctctggggcccaggcagggagaatgatgtctcagaatgactcccttgagagtcctgttccccttttatcaatgcacagacccagaagacccctccgtcctgcagcccctgccatgagcctcgggctcctgtgctgtgcggccttttctctcctgtgggcaggtgggtcctgggcagggcccttgcgtggatttcaaggcccatcccctttccactggggctgcagcatcagttttgttcttctctgcaggtcccgtgaatgctggtgtcactcagaccccaaaattccacatcctgaagacaggacagagcatgacactgcagtgtgcccaggatatgaaccatggatacatgtcctggtatcgacaagacccaggcatggggctgagactgatttactactcagctgctgctggtactactgacaaagaagtccccaatggctacaatgtctctagattaaacacagaggatttcccactcaggctggtgtcggctgctccctcccagacatctgtgtacttgtgtgccagcagttactccacagcgctacaaggttgtctcctctctgcacataaaggcagggaggctctgccctccaccccgacctgagactcagggatgacctgggcagagtattctgcaacgggaaccttggaacccgaagtggccccaagtggcccagacagtatgagcctcgctctgtgccaggtgcctctgtaggcatctcagccaggcctggactggtcccaggtcctcatatgtctcctttgttgctctctcctacaagctctacttttggggttggggccagggcttccccagctcctacttttctactcatcatcctgagtccaaggcccccaggatgaaacaggatttgtatttcagatccatctagactcctgtctctccctggtgaccatgttgcttcctctctagggtttcccccagcccccaccctcctgtggcccacctttcccacctccgcagtcatcctccaccccccacttccctgcccctctctactgcagccatgaggggagcacctctctgtgactccttccttcccgtcacagagacttcaaaggccattttctttgccctgggccagagccttcctttctctagtggccagctccttcctgtgcttcagatctcagtatgatcagcccctctgcgggaagcactccctcccctcccaggtaagatcaactttcctctcataagctctcaatgaatcatatgtctgttagcaacctttagcacagttgggctttctcagatgcttgtctgattatttttgtgctccacccaatttttttttttttaagacacagtctcactccgtcaccaggctggagtgcagtggcatgatctctgctcactgcaacctctgatactctgattcaagtgattctcctgcctcagcctcccgagtagctgggattacagacatgtgccaccacgcccagctaattcttgtttgtatttttagtagagatggggttttaccatgttggccaggatggtctcgatctcctggcctcatgatctgcccttctcggcctcccaaagtgtggggatacaggcgttagcagcacgcctggcctctccacccaatttttaagcccatgggagctaagactgtgcctgctgtatttaccaacatcggtgcctggcatgtggggagacccatttcacagagaatagatgagtgaatgacaggctgagtgagtgatgagtgggtggacgaacaaatagcaggaacacgctacatctactgtaacctgccagagatctagcattaagtacaagaaagcccacctctttgattgctgggctcaggtcggtcttggaaattgatggggaatcactatcatggcggccacacctggttcaaggcttcctcttgtggctgcagcacctgacctcctccaggtctctgtgctctccttcaggatctttccccacaacaaatctagacagatcagagatccacttcaagaattccatccttaaaggttgttccttgaaaccacttctggtaagaaaatctccattaggtttgcatcaataaaacagagccactacaggtttgtgagtgtaaaagatttatgatcagaattagactttatgcatatgtgggaggagctgaggaagacaaggtcttgaggagagaagtcagaaggtgagggagccagtcagtagccagggctcctggagctcgggcaggacaggctggagtggcagggacatgagaggatcagagcatgccaggccatgcagtgggaccttgagccgggagcacaggaaaaggccgaggaaacctgcttctggggaagctgttccctctgtgtgggggccatgctgcgggtatagtgccaaacactgggggcagcctggctgctgttgggcagcatttggcaagatgaactggacacagggtgcagaaggaacaggacttcctaggtctgttggatgcctctgtatctgctggtcactgactctcactctctcaccacaatgacctgccaattgttatagtgactgttttgtatctgtcttctaaatgttacaaaatgtatccttgaccatctctaacccagaatgataaatggcattctgggaaagtcagactcttacatttgcaaagttgacttaacacaatccagcacagtatggattctcccagattaaggcatcagatcacacaactgactcaacctgccacggtccgtggactcctctccgggggacacctgtgctgcccaagtgaatgtggacacaatttgtatgtagatgttccagacactggctactaaattttcttttaatcctgtgcctgaaatctcgctccacccagaggcagggctctgcctcctgcttctgtctccttcctgagcttctatcctgatggagttggatggacatcagacgcctggtcagagtgcagtgacctgtggagacagtaggagggaagctcacatcttgctgccttcctccatccagttcttttataaccaaagcaagtgttctggtctcccttttgactgtgcagtatgagaaatgtgcttcatgaatttgtagctgatcagctcaatgatttgatggccaacctaaagtgaaatcctcagatctgcagaaattgccctgcatttctgtgaagatggcaagaatacagtgtgctagagttgccttctctccaagtagagacctggcccccaaacaggatggagcagagggggccaaagagcccaaaacatgtctcagattgttgaaaggcaatttcccaggacaatcctactgatgacatttcatcccttgtattacacacttggccacccttccccccagatcagctgagtacccaggatatcacacatcccagcatcttctaacgaggaaaaatacttcacgtaccagcctccttcctgcaccacattgactaaccctggaaacttagcctttccagaaaaaagctctgtcttctcttggcccagtctagcctggtaggtttaattcatgatttatgtgaccttttaatttactcaaaggagaacgtatgatttcagggtaaagaatattcattttatttttataagttggacctaaacagtaaactgagtacttttcttccatcagcgtcttaaattagacaacggtaaaacaaatctttgatgctagaacttcagatcctagtgtttttcacatggaagttcccagttacccagtctagggcatggaatagatgagcattaataagtcactgtatgcctgagatggttttctatgggcatcttttctgaattacggttaacaagggtgggaaatgatcccagaagaaaggcatgagggcagttcttgagggaacccatgtgatgggacagtctcattgggcacgtgtgactgggggaatggaggaagctggggcatgattgggatggcacaggggaccctgacttgcgggaaagacaatgagctcaaccctttgtgcccctatgttaggggcgctgttgttgcatcctacaggacatgcccagcaggcaggggagcggctgtaggatgagaagatgaactcagagatgcagtgtgaggtctccaggcacagacggctctggagcacaaaccaatgagccatgaattgatgttgttaaaacggaggttataaatatttaaagtgtcacccaagtgtgttctaatagaaatgctgtgaccctgaggtcctgaggattgagagaggaagtgatgtcactgtgggaactgccctgtggagacaaggacatccctcatcctccgctcctgctcacagtgacactgatctggtaaagcccccatcctggtctgacactgtcatgggtaccagtctcctatgctgggtggtcctgggtttcctagggacaggtgagtcctcaaaacacaaagtagtttcatattttttctgtatgtaggtgtgtgtgtgtatgcatgtgtgtctgtgtgtgtgtgtgtgtgtgtgtgtgtgtgtgagatgactacaaatgttttccttattctgttgccagattctgtttccacagatcacacaggtgctggagtctcccagtctcccaggtacaaagtcacaaagaggggacaggatgtaactctcaggtgtgatccaatttcgagtcatgcaaccctttattggtatcaacaggccctggggcagggcccagagtttctgacttacttcaattatgaagctcaaccagacaaatcagggctgcccagtgatcggttctctgcagagaggcctgagggatccatctccactctgacgattcagcgcacagagcagcgggactcagccatgtatcgctgtgccagcagcttagccacagcatggcacagtcgcctccttcctgttcacaaacctcatccttctctctctttgcagctcccagagatcattaacagaggcctctctttgctcctcacttttcctgggaaagaggtagatttggacctcggttgtcctttgggtggaaagagaccacagattcattcctgaaacacagtgactgcaaatgtaagtggtgaaaacaatcacgtcccactgcactctaggagggctcggagccagctcactgctccaaacaaggagtgggtgtcttagccttggccttcagagcagacatgcatcttctataggtcttggaggctgctgtgttgcccacatacatgaggttgtcataggcaggaaacatgcctcttcttcatatgttggggcatctggaaggtctgaggctacatccccgagaagatctttcttctgaagcctcttctatccctgtcaccttggaagttttctgccacaaaatatcaaacctctcttcctgtttgaagtaaaggtctttgcaaatttgtggtccttacttgataaatacaatcatggtaacaataacacttcatttcttctgcctactttaagccaagagtatcctttattttatttccatttgccattgctgctgtcctgatagacagaagcatgcatcaccaccgctgccacttcaccttgattcactcaggaaatctgattttcagactctgagtgttttgattgttgtccaactcatttgatttgaaataattctcccaaggcctttaactcaaaaagtgttttatttataatattgaatctattcctttttattatattttttcataatatatagtgttatatagcacttgttagaaatagaagtacaatgattatattgcaatagaatcttccatctgtctgtgggtgatgctgcagtttgtatctatgaaatggaatgcactggtcagagctgatgtgattatgcattatgggtttcggggagtcctcagcgacagaccacttctccaagtctgggactcagtgtcccagatgcaaccctgatagaggtgccctgaatctttcatagctaggaggggcatcatagtccttccaaattcactgatcagaaattatggtgtggtacagacaccaaatttctttccccagagaatgatggtcactggcagggaattgctcttgacccattttttcttgtgtcgtcatcaaatgactccttgctcagccgccctgtgtcttctgggactgagtaaggccagcacacagatgggaattccctgtcttctgagaccttctaactgctgccactttcctccatgtgactgctgagacaactggtcctaacagtggacaagctctgacactgaggctgaacagaccacagtccactgttgtaaatggtgctgcaagaacatgtaacaaaagtgagcagggcttccaatttatagagagaatgaacatgcaagaggagcaaagggtagatggtactaacgaacaaatagggaggaatgtggtttctgttctaatgaaatcattctgttgtcttaagttaagcaggagaaacatttcattgcaattacttcaagtcaaaggctagcggctccccaaccagccagcataactctttgctctgtgatctcagcagcttcagaggactcagaaatcctttctctgcacaaacatcccgttgtccattccaagacccaggatcacacactctgatcttatcatgaaaataatgaggtatgctatagttgctgtggcctcattttagtatgtttagtaggaagcattgaagaagtttgaagcttttctctttagtctatggcttgtatgactcaaaagaagtaaataggcatacttttcccagctccctgttcagtgaagccatgctgggagcttgaaatctgccatggtgggtatgttggtacacagaaattaggaaatgctaccagccatgcccccaccttcacagacacacagtttatcagcacattactggggtattttctgatgtccctcttatgccatttctgagctaggccaatatagctcagaatttatttccccactactcttgttcttagaacccatcacctaaggggccgtcaattgttcctatttccattcaactcccaaattctcttgcactgtagctctgtgtttccttcaagaatgccagtctggaacatgacaactattttgaatgtacctaaaggtatcactgaaccagttcattatttacaaattatctttcctcacatggaatattcagatgctggagtcattgggaacagagatggccaagcagcaactctgggttgtgaaccacatagagccccgctattcttctatgtcactgacagaccctgaaacaaggactattttgctttagaaactaagcagctccacaccagtcaggaatgactctgcttttactttaggctgagagatcagaaggatcacatcctcagtattctcctctcctggactgagtgtggccactctccatctcagtccctggaagttgtccagagttccctgagaatccctgctctggggcagaatcaccaaggctcatcctcaccagctccccacaggctccagcagggctttcctgccaggtgtagggcacaggaatggctctgtctgtctctcaggtagagggaggccaaacagtgatgtttgtataagagggactgggtttctgtgtctccattaaagtatttgacaatattttctttgttttttttttttttttggtttatttttccatctcgccaatgaggagagcaatcccttggtagttatattgtttttggcacttgggaaggtttttgtggttaagtcacattaagaaattgtgcctttttttcctgttcagctgtaacccaaggcagtgaaagaaacagcaataattttgaaagcagttacttgtgtatcttatgataaaggtgttaagtttcattgcccacatctaactttcagtctagtggaaatgaaaaggcacagttagggggcatgtgagcatgccatgagagaggtcaatgccaattgagaagtctgtgccaatccccagtactgtgggattgaaggggagggagagatgacctctccttcagaccatggtcaacaaggaaggagagggagttcatccatgggaacctgaaaagcagcaaatcccaggggcatctaacttcaggtgcaggagcaaatccttggagaggaaaatggtccagttcagctgtcacgggagacaggagaaagcaaagtcatctaatccacagtcccctggctgatttgcttccttatgatactattttgcatcagcgtgtcctcatctcccgctgctcctctgcctcttccagtgtcatctcttccctgtttgctgctcagatcagtggatgtgcattgtacaaggtgatcatttcctatagcagtccctttgctactcttagttatatccatccttattttctgcattaggtactgctccctccaccattgcttattgtcttgtaacaggtctcgttttatatatttcaattttactttttattaatagacatttgacttcatcttttgctgatctatacttttggggtaacattgtcatttttggaggatgtttttgtttatctttagtgattcagattaaataatctctttatacttcaacgtctgtgtcttcttactatttaaaaccaaatattatttcctttcattcctctcattctgttcctctttctttagatggtagttttaagggagaaaaagtttggctataactgaagctatgtgataagagttattcagaatgagggtgggatatcaagattggtaactcaaagcaataattagggttagaactaatgtaggacttagggtttagggaagctgctcataaaactgcgggatggcacctctggaatattctggcagctcactctgcagacacttcccagcattccttgggccattacagaattaaacaatgatgaagcttcacttattggccacaagatggcagtgtggtccactgcgaatgtaaagggctctgggcagtctgggggagcagcctaggagggaaaaggttaagaaaaattagggtttgtattcaatattatgcagatgttgcaggagttttcagttattgctaggctacctacagctatgcaagaggcaggaagtccctctaatctttaatcagatctacagttgaagaattttggccaggcagccttggtgtcggggcatgtgcagacagaggagcaactgcctcagaggaaaagggaaaagtgagaggcaggctgtgccctgagcccagtgggtctctgctgcacctcatcttccctgcaggtctggccaggcaacagctttaacctgcttgagtgatctgggattctccaagttcataagtcttactgataacatcaacttggctgaggttccattggaaatcaagcacatgttctctggaggacaaaaagtattgacaaaaatttctgaaacacctcagtaaacaaactattgaaggaaaatattagtagatgcaccaaactgtgccgttagagatgaagataatagactagtagaattttacaaaggagactataaataagtctctactaagtatttgtgggcatcaagcagtgtctgagtcctctcagggtagattaaggaaggaattcagctattatcatgactttggcttggatgaaaatccatgaagtcctcaattgattttcttgtaaaatattacagaataatattgagcaaacattttatttttctccagcctgtatccctctttagcactaacaggtaaagcagacacctagaggcacggtttctttagttgggatccattaactgtaggactgggaggtccatagctgggcttcacagggagttcaaaccccacgtgcagggaactccgtgtgtctgtgctgtgcccaactcccgtctgtgaggctgaaaagggggagtgccgggtctcccagtaccccactcacaaagtggggagcaggctgcttgctgggcaaaaaaatcaattcaaaaattggccaatctgttcaaagccaaaatgaaaggaaagtctgaattgtgagactgatgaatgcccaatttcccaagttatgaaatttgtagcagctcatggttctcagaatgatttcaatagcatatgaagatattgtaaaaagcttttgtttgtctacagctttccttgattttgatcctagttgtttttcggcccactcatcagttgagcttattttgatgccaaatttcaatgttgccacttcagtcaccaagcacttctcacattctccataacttacacagatatgtgtgttcctgtcttttcttatttttgtgtgattcatttttaaattgggctgtgcagaatacaagcatacatttgtaagtgaatcccatattttatgatttagctgtttactttttagtaatactttttattaaagtataatagagagtaaaacagaaatattaatacaaggacatcctggtacattttgacaaatgcatatgccagtgcaatagtaactgaaatgattataaaaaaaattctgtcatgcaggaaagtgtcgtcatgctcctttccaatcaatttctatcccagagataaaaattgtatttatttatttatttagagacaagagtctcactctgtcacccaggctggagtgcagtggtgtgatctcagctcactgcaagctctgcctccccggttcacgccactctcctgcctcagcctttggagtagatgggactatagatgcttgccaccacacccggctaattgtttgtatttttagcagagacggggtttcatcgtgttagtcaggatggtctcgatctcctgaccttgaaatctgcccgcctcagcctcccaaatttttgggattacaggcatgagccaccgcgcctggccaaaacttttcttatttttatcaccactgactagcttggtctattcttgaactccatataaatggaatcatataacattttattgagttattttcctccaaaattagtatttctgaagtttattcatattgttgtatcagtaggtcattttttcttatgactaatattccattgcataactataccacaacttgtttatccatgctcccgttgatggatatccacattactcctgtcttcaactattatgaatacagttgttgtgaacattcttgtggaactctttcttgtggacatatacattctttttttttattttattttaggtataaacttaagagtggaaatactgacttacagtgtagatgtgtgtgctatgcttgcgtgtcctcacaaaagctcatgttgaaatttgtcattgtaatggtattgggaggtgggacagctatgactaggtcatgagggatctgccctcagaaagagatcaatgccgttattgtgggagtgaattagttgtcttgggaatggtcttctgataaaaagtataaattcagccactttctctgtcttgggtgcttgcttccccttccttctgccttggataacagcaggaggccctcagccgctatggcccattgatcttggacttcccagtctccagatctataagccaaataaatgccttgtctttataaattacccagtctgtggtatttctctatagcagtaggaaataaatggaaagaaaacatggtgctgagagtgacgctgttgctgtaacaagtacctgaaaatgtagaaacagctttagttaatgggaaatggctaatggatagaggttggaagaattcagagaagcagactagcaaaagcctagattgctgaaaacagagcattaagggcatttctggtgaaagctcagggggaaatgaggaacaaggtatcagaaattgaagtaaatgccatccttctcataagtagcaaaaaccttggcaacattgtgtcctgttctaggactttatggaatataaaattatgagccattagctaggatatctgctgaaagaaatatctaagctgcaaagcattcaggccactgtgtgactacttttaggcaccaggcaatttaacccagcaagaaggcagccaagggaatagattttgcaaaccagcacagatggtgacactacctccctctgctgtcctgtctcccataagccaaactcactctgaagttagagaaaagaggagacagttaacatgatacactggagtcagcctgtgaaggcagggtggatctggagggattaacataaactttccagagcactacatataggatggccttgagggtgttgagtccaaagctggctaggtctgtggtgtgagctgataaggccctagatttatttctggggaatctgcactcttaataatttacagacaacacaggtctgctttggatctgatcagatggactaaatcttggggcctctgtaccgctggccactcaggaaatgggttgggaatgttgcctgggacaggaaaatatagtaagaaaccttggtgtgaatctagcttcagaaagatgatgtgaggagagcaaggaagagctggaaactgatggtttaatcacaggctcctcaccatctgctgataggcaggtgtgcgagctccagcatggagcaccgcagcactaggtcagaggagggtgatagggtgatggggcagcctgtgagctggggcagttaggcagaggagcaactgtatcaccacagaagcttctgccttcacccatccctccagctcggcaggacaggtagagagtccagtgtccgtggagcactagacctaaggaaggctgcatagggaagacacaagacagtgacatcacagcatacccctcccatcaggaaaatcaaggcccagaactcactcagctctttcccaggaggaccaagccctgaatcaggtgcagtgctgcctgccccactgtgccatgggccccgggctcctctgctgggtgctgctttgtcccctaggagaaggtgagtcccgggcacaggacagctgctccattctcagctttcccacccctgtgtcctccactttaccttggggaggacctccaggctgtctccagtgctcattatacatctgcttttcccacaggcccagtggacgctggagtcacccaaagtcccacacacctgatcaaaacgagaggacagcacgtgactctgagatgctctcctatctctgggcacaccagtgtgtcctcgtaccaacaggccctgggtcaggggccccagtttatctttcagtattatgagaaagaagagagaggaagaggaaacttccctgatcaattctcaggtcaccagttccctaactatagctctgagctgaatgtgaacgccttgttgctaggggactcggccctctatctctgtgccagcagcttggcacagcccagcagagtcactgacattctgtatataaacttccgccttagctttgacttgagaactgcaggccccacccaggtttcactccttcaagggaagcttttagttgtttggaaggcatgtcttgtgtcctactgagggcagacctttcccaaccaatagagcccaggtttcctgtgccctgagtgtgcctgcttctgtgctgcaacttcttgtagtttgtcacttcctggataacttcagtagaagagtgactgttgagccccagatacgtgctagattcttcgtatttgttacatagcttaagggctttccacactcttgcacatcaaacatttctattcttcctttatagatagaaggctcagggacattgagtcattttccccagtgtctcttggcttgtaaggatcagaagtaggaaacaaactagtccatccattttccacctacccccctgctccatcatcaccttctgcatcctggtcagtaagtcagagccctcgcactgccctctagtgaccagcagggctgcagtagacgctcagatgccttcaggggtcattactatggcctcttcattagcaactttgaggaatgttaaatttaacactttttaaaaatcatttatatgcattccctttgtctttccccagtctgcagcttatgttttcacttttatggtgtttttttgatgcacaagagtttaatttaatgcaacaaaaactaaaatcaattttgtttgtgtgtagacaaaaaccgctttcttatataaatgtctaagcgtagttttatcaatttattctagtaaaatttaagcttggattttcaccactaagaataaatgtacctgaagtatatcttatgtaagaaataagatagagacctaggaatgggagggaaggacatatgttcagtgaagaagtaatagcctgtcaaagagagccctaaagtagacccccagagctgatggtggagaggtaagtggagggcaaatgatcatgaaccttgtccgtttgttaccttgtagaagaaaggcagccaggagtggagaccacatgggtgaaggtttatgacttgactgtaggttgaaggtggcagcaggtagagggaggactagcaggcagagggcagagtcactggctggcaggggcagtggcatcatcagttgactctactgacatccaggaattatgttcccaatgcgcaagttgaaaaactccccacaatttgcctattattccttgaccctgccatgaccaccagactcctcaatggtttggccgtctgccccctgagggcaggtgagtcccctaaagccttttccttggctcaccacatcccagcctaagcctttacctcaagtctacattattggggtccctctttgggcactcaacttccttctatcatagacttcacagaagctgggacaaccagatcccaagataccagagaacaaaggcaggacgtgaagtgacatggagatgcctgagactgccatccatgactacatgtgtaggtgttaataggagccaaggctggtgcacagctgatccgtcccagcacacactatacagaatccctgagggtctgtgactttttctcaaagccaaatatgtggccttggtgtcagacagcctctcccagacctctgtgcccccttgcaccagctttcaccccacagccaccttcctctgcacacaaagctcagtggtagatatagttggccttgtcttcatgagattttgatccaggcagtggaagacattgtcccataggagtttccccaacactgcccaggctgggactctcagatttctgagcagccctgtgcaagggaaactctgccctgtgctgagcttctctcccagggcagtctcagctggacaagggaatgcacatcacggtgatgtgagcagatgcagcctctcttccaggctcctcctccagctctggcctcagaagtcctcttcctcagttgctctcagaaaggaaagttgatttcaaaattgtatatttgcagacagcactgacaacacaggtctatgttcttttccctgtcagccttcacaactctatcttccccacaccatgctcatgtcagtcctcagcctcctccaagtgatgtctgctcctagctatcctctcatcactctgcaccctcacctccatgtcaaccacagacgcctgagttcaggccattcctcatgcatcatgctcctcccaccaaaggcctttgcactccacactgtattctctgtatcaacacgagtctcttctttttgttctttctccaaatctcagtttaactaccaccatctctagggagacactccttcaacagttttcctaggctgcacctccctattgtaaatgctcacagcttataatatgcattaatattcatagttttagcaccatagtcatttccctgactttgtgtggctatttcacacttctcttgcattctagactgtaaaatgcatcattgtagaaattgtggatgttttgttccccattttattgtcagtaccaacagcggttccaggtgccagtgaccagtcttgaaagaataaagaagagatattgaaaggccctctgagttcccacagactattccagaagtctggatgcattaaatgggaacctctatcccttcatctcctaggattaaatgagtcctggaaacagatgagaaatccctgtcatgcatgagtaactggatcccaagcctttctgcacgactgaacttcctcactgcccatcgccctcctggcttgtctcctccttcaatctccttccctcacaggtgtcctggatttgggagtctcacagacacagggcacctaatcactctgagagagtgatcagaaacataatgtcaaacactggcattaaaaggtgatggagaagaaaacaaatgccttccccattctcttaggcaaagttttcccaaggcacaaatatctttttgggtggctttgaggccatggtgcctgacacactgagctatattatgggtgttcatttccatgaattggtgggcaatgccagagacacagacctcatggtcaccagcttcctccagcccacacctgattttggtgcagggcgctgaacagagacctttgcttgttaccctcctttgccagttaggaaaggctgattgtgaggcagaggctccatttacagagcagggctatgtgttagtccctgaagaattgtgagagccattctgggtggaaataatcaaatatataatcaccaaggatggcccacggatagacagaagccccaattttgccagaatgatttgcatctatgctttaaagacaaatgcagttttatctctttaggcaataaagaccaaaaatagactagctattttaaataattgaaccttaaacagaccaaagtcagaacatcttccctagggacagcattttcttccacccactcactaaagctgtatttgagaaagctgtgtgctgttgataaacactgcaatatcgttacaatcgacatcataataatactgctacttggatcagaaacaaagagcatttctaaagcttgaacaatgtataactggaaacgagctctcactgagtttggaaatgcaggcactagagggtgctcatttctcttccttttccaatcagggggctattcaaaggctgttctagaacaaggggtgagatcctccacttccccgtggtgatcaggctttcagaggtagaagccttattagttcataatcagccgaactgacctcaccatcaaatgtatcgacctggatgctcaccctcctcagcagtcagagactgtgttcaccaggagcttgtgcgcttttacggagcacattttatcctcggtttattcggaaacatgggcctttatagggggttccataaacagaagctttctatattttgtccatttagacactacaaagtctgacaccagatgagaggtgttgcttaaagcttgtatgtggtgaagattttttaacaaataatatataaagaaaatgtcaataatgctctcaaatccaatcccaacttccatcggtaaccaatactaaagctctggtgtgctttgcacctctcttttctgtgttcatgcacacctttctacccaagtacatctacagaaaatgggttcacctgtacactttaccggccacatgcatactcttttctgttaatataccctggtctttattgttccagattgatcgatacacatctaacttgctctatttgctgcttcatattgcataatgagggtagacaggtacattcgtgctgtcatctgattcccaaattctgccagatcttttctaaagtgactgagtggtctatttatgcttccaagttctcctcaccccagcacccagttgatgattccagcttttccatcactcatggtcctagcaggtctgagagctctatcagttctcctgcatgaggaggcagggaaggataaaaggacagacctttatcaaacctaccagaaactacacagtatctcagttcatcctcataaagcattaaggggaatgtttgtcttgttttatagatgagtctagatgaggttagagtctaggaaagttaatgaatggccttgcccatggtctcagagctaataaatgttggaggcagatgaaggacagttttcttgcttctgtgtggagttgatagaggggtcactggattttgagggaggtgaagtccagaaccatctggggttgtcttcagatcagatgccagggtgcaggagagtctgtgtaccctacagcactgtaggtacaagcatcatggtgttggcagtggggaggtacagggggtaagtgtttagaggcctggaaccagaagatctgagctttgagaaaataatccccatcacaagatgtagcagagatactgatgtggatacactaggccagggagctctgtgaggagctgttgttaaaatgagggagggaggagaaccaactaattggtcacttcctatatgtgaaatgtagaggaaaacaatattaactagaatcctatctcattttagtcagttctcctttgtaagtagttggaaggtgggataatttattttcaaggttaagtaagcatctatacatctcctttaccttgtgaagtctggtggcgaagcgaaaaatggtacagccaatggagtcacagtttaataaataactcagagttcaaagggagactcttatgggccagaaattggtaaatgttcctgcattctaaaattaggaggatcttattttctttgaatcggcagagaaggaagcacaggcaatggggagggacagttgggaacacggcagagtggccacaggatgtcgaagacaaaggacatgtaatatcaaattctaagctgtgaagctgtgatgcaaccctccaccttctcctaatggattttttaggtctcagcacagatgcccacctgagggagtaatttctttggaaataaaggacaaatagctcggttaataacaagtccaccttacaaagcacacctggaaatggaaacaagattattcctaaggccttttctactctaagagtctctaacttggtggcaaggtgagaggtgaggatgggggtgttttgatccacacgtgatgagtaccatgaagctctaccatgaagcatatagtgttgagtgtgaatcagagccctaagaataactccctttacgttgttgtgccctctgccatcccaaacccaccccacccataattaagcagccacgaaaatgaggggagccagaaggaatcaaaccctgctgcttggttcagtagacagaaggacctggaggaagggtgttggctgggtctaggagaagatgatgagctcagaaaatagacaaggagaaaccccaggggaaaacttgtgaaaccccggaggaatcacaagatatgttatttgagctccttttaaattttatttaatactaaattaatggcaggaatcctgcacaaagggatattccctatgaaacatgacatctcagataaaaacagagcattcttccttaccctaaagtctgccctctctccccaagtccctcatgcatcaggtcacctttgtgcccataagtcatgggcagcgctgtgtggtcaacatcatccacacctagaggacagtcagcaaagtgaggtggttctgcctgctgtggtctcaccccaggcatggaaagcaagagccctgggagcagcggaaggtacacagctgggtttctcaggagtctcatctgtcagtgaattgacaagaaacagagcaaaacgactcctccaatgttgatgagcctgcccctgggatttggaaacttgataacagagaaaaccaatatagacaaaggattttaaacaggattatggtcaattaagcaaattagaaaaggatacttgaaggagtatttgggacacagaagtcaaaaacactaggaagacatgaggtgtgtccctaagactctagactacagcactgtgtagataactaacacttaactattaattatatcattgaagaaataaaatttacattgaattacaaactgtttccaaaaggtcatgaaaatcttgtagacttgtttcaaatcacacaaatgtgttcttctcattctcagctcttcactggtgcatttattttggatttgatcatctggggaagaggtgtggcctctcctgaaaggaggctctgggcccaggcagggagactgaggtctcagaatgactcccttgagagtcctgttcccctttcatcaatgcacagacccagaagacccctacgtcctgcagcccctgccatgagcatcgggctcctgtgctgtgtggccttttctctcctgtgggcaggtgggtcctggcagagccccttgcgtggatgtcaaggcccatcccctttccactggggctgcagcatcagctttgttcttctctgcaggtccagtgaatgctggtgtcactcagaccccaaaattccacatcctgaagacaggacagagcatgacactgcagtgtgcccaggatatgaaccatggatacttgtcctggtatcgacaagacccaggcatggggctgaggcgcattcattactcagttgctgctggtatcactgacaaaggagaagtccccgatggctacaatgtatccagatcaaacacagaggatttcccgctcaggctggagtcagctgctccctcccagacatctgtatacttctgtgccagcagttattccacagcgctgcaagcctgtctcctctctgcacataaaggcacagaggctctgccctcctcccacccaagactcaaggatgccctgggcagagttctctgcaccaggaaccttggaacccagagtggccccaagtggccaggacagtatgagtctcactctatgccaggtgccacttcaggcagtctcagccaggcctggaagtggtcctaggttctcagatgtctcctttgttgctctctctggtatatcctccaagctgtcctttttgtgtagggccagggcttccccagctcctactttcctactcattatcctgaatccaaggtgcccaggatgaaactggatttgtatgtcagattcatctatactcccatctctccctggtgaccctgttgcttcctctctctatggtttcccccagcccccatcctcacgtgatctctcctgtggcccacctttcccatctgggtagtcaccctccaagtccttgctgggtctctcctcccctcacctccccgcccctttctactgcagccattaggggagcccctgttctgtgcctccttacttcccatcacagagacttcaaagtccatttcctctgccctgggctggagccttccttcctctaatggccagctcctacctgtgcttcagatctcagcatgatccgcccctcctgcgggaagcacaccctcacctccctgctgagatcaactttcctctcataagctctcacagaatcatatgtctgttggtaacctttagcacagttggactttctcaggtacttatctgattatttttgtgctccacccaatttttttttttttttttagacagagtcttgctctgtcaccaagctggaatgcagtggcaccatctcggttcactgcaacctctgactctttggttcaagcaattctcctacctcagactcccgagcagctgggattacaggcacacaccaccacacccagctaattcttgtttgtatttttagtagagatggggtttcaccacgttggccaggctggtctcgatctcctgacctcatgatctgcctgcctcgggctcccaaagtgctgggattacaggcttgacccaccgcgcccggcctctccacccaatttttaagcccatgggagctaagagtgtgccggctgcatttaccaatattggtgcctggcatgtggggagacccatttcacagagaatggatgagtgaatgagaggctgagtgagtgatgagtgggtggacgaacaaatagtaggaacaagctacatctactgtaaactggcagagatctagcattaagtacaagaaagcccacccctttgactgctgggctcaggtcggtcttggaaattgatggggaatcactatcatggcatccacacctgtgtcaaggcttcctcttgtggctgcagcacctgacctcctccaggtctctgtgctctccttcaggatctttccccacaacaaatctagacagatcagagatccgcttcaagaattccatccttaaaggttgttccttgaaaccacttctggtaagaaaatctccattaggtttgcatcaataaaacagggccactacaagtttgagagtgtaacagatttatgatcagaattagactttatgcatatgtgggaggagctgaggaagacaaggtcttgaggagagaagtcagaaggtgagggagccagtcagtagtcagggctcctgaagctctgggcaggacgtgctggagtggcaggaacatgagaggatcagagcatatcaggccatgcagtgggatcttgagctgggagcacaggaaaatgccaaggaaatctgtttctgggaaagctgttccctctctatgggggccacccctgcagatgcactaccaaacactgtgggcagcctggctgctgttggccagcatttgggaagatgaactggacacagggtgcagaaggaacaggacttcctaggtctgttggatgcctctatatctgctggtcactgactctcactgtccaaccacgataacctgccaattgtcatagtgactgttttatatctgtcttctaaatgttacaaaatgtatccttgaccatctgtaacccagaatgataaaagaaatggcattctggtaaatacaggctcttgccattgtagagttgacctaacacaatccagcacaggatggattctcccagattaaggcattggacctaacacaatccagcacaggatggattctcccagattaaggcattggatcacacaactgccccaacccgccacaatccctggtcttctatccgggggacacctgtgctgcccaggtgaatgtggacacaatttgtgtgtagatgttccagacgctggtgactaacttttcttttaatcctgtgcctgaagtctccctccacccagagagtctatatgtgtatatctgtctgtctatctatctctatctctatctctctctctctgtaatttccacttggaagaaaatgtcatgatgactacatgttactgggatttatttatgaaaaggattttattaaaaagaattagaaaatttgaatccttttctgaatttttccttgggactgtcctgagagcatttttgacatgaccaacctttgtcgtgtgtgtatttggcagcctagagtgcagcagagagttattggccccacatatttgcgagttagactggagatggctgtaaaaatgactgactcttagtgttattcactctcagtctgggcctcactagaatgtcacagactaccatcgaacaaatagattcccagtatgaagaatattaggacatagcaacgaggaaacatgagcacaagcaacaaacgtttgaagtgcaaacctgaagactcgaaattttggcattataagatatgaaagtttggagagctacatttaaatgaacatgagggggaactgaaacaaggaaaaagagaatgtctgaaaccaacaacttgcataaaaattgtcaaatagtatatctaggaatgcctcatacaatcactgaaaacaaaatggaaaggcaagcagttgataagctcctcctatagagatttttagtgatgtcaaagatggatctgcaggagtgatctagaatgcagcacagaaaataaaaagtgaaatatgaaagaagttaaagaacaaggaagaaaaaaatggatgtttcctatgtattagaatatgcatatttttcataatttctcattcttttcttgcatatgatttatgtttcaaaaagataaataggaagaatgttatgaggtgatatttatgagatgttagctgagaatttttagacgtgtttcaggacctaagttcagagtttccagaatcaaaatgaatctcaaataagacagtcaagtcatagggaaattgtagaacatgagggaaaaagagaagattttgaaagcagtcagaaaggaaagagaaatacgtcccatagaatagatggagaacaacagtaagtcaagatagtagttaaaaataaccattagctcaattatcattctccttcatttaaggtgagattgattaaaaaaacttttagaagtggaatatgaaaaatgactgctgtgagtttgctaccaaggtctctttactgaattacagttaagaaaggtgggaaatgatcccagaagaaaggcatgagggcagttcgtgagggaacccatgtgatgggacagtcccattggacacgtgtgactgtgggaatggaggaggctggggcatcagtgaggatggcagaggggaccctgaattgcaggatagacaatgagctcatgccttggtgccttgtgttgggggtgctgttagtgcatcgacaggacatgcccagcagacagaggagtggctgtaggatgagaaggtgaactcagagatgtagtgtgaggcccacgggtccagacagcatgggagcccaaaaaatgaaccatgcattgatagtggtaaaaagctgatacatatttaaagcagcacccaagtgtgttctaatagaaatgctgtgaccctgaggtcctggggattgagagaggaagtgatgtcactgtgggaactgccctgtggagacaaggacggcccttatcctctgcttctgttcacagtgacactgatctggtaaagcccccatcctggcctgaccctgccatgggcaccaggctcctctgctgggtggtcctgggtttcctagggacaggtgagtcctcagaacaccaagtagtttcattttttctgtttgtaggtgtgtgtgtgtgagagagtggttgtgtgtgtgtgtgtgtatgatgactacaaatattttccttattctgttgccaaattctatttccacagatcacacaggtgctggagtctcccagtcccctaggtacaaagtcgcaaagagaggacaggatgtagctctcaggtgtgatccaatttcgggtcatgtatcccttttttggtaccaacaggccctggggcaggggccagagtttctgacttatttccagaatgaagctcaactagacaaatcggggctgcccagtgatcgcttctttgcagaaaggcctgagggatccgtctccactctgaagatccagcgcacacagcaggaggactccgccgtgtatctctgtgccagcagcttagccacagcatggcacagttgcctccttcctgttcacaaacctcatccttctctctccttgcagctcctagagaccctaaacagaggcctctctttgctcctcacttttcatgggaaagaattacatctggacttcagctgttctttgggtagaaagagaccacagattcattcctgaaacacagtgactgaaaatgtaggtggtgaaaacaatcatgggagtccttggagccagctcactgctccaagcaaggagtgggtgtcttagtcttggccttcagggcagacatgcatcttctataggtcttggaggctgctgtgctgcccacatccatgaggttgtcatgggcaggaaacacgctcttctcctgcatatgttggggcatctggaaggtctgaggttacatcccaaggaacatctttcttctgaagcctcttctatccgtgtcacattagaggttttctgcaacaaaatatcgaacctctcttcctgtttgaagtaaaggtctttgcaacttttgaaatccttacttgataaatacagtcaggataacaataagacttcatttcttctgcctactttaagccaggtgtatccttcattttatttccatttgctattgctgctgtcctgatagacagaagtatgcattcaccaccactgccagttcaccttgattctctcaggaaatctgatttctagactctgagggttttcattgctgtccaactcatttgatttgaaataatttttctgaggccgttaagaagtgttatatttataatattgattctattgctgtttatttttcatattatatattgttatatagtacttgttatagatagaagtacaatgattatattgcaatagaatcttccacctgtctgtgggtgccgctgcagtttgtatctatgaaagcgaatgcactggtcagagctgatgtgattatgaatcatgggtttctgagagtcctcggcgacagaccacttctcccagtctgggactcagtgtcccagacacagccatgatagaggtgccctgagtctttcctaggtaggaggggcatcatagcccttcccaattcactgatcagaaattgtggttgtacagataccaagtttctttcctcagagaatgacggtctctggcaggcagttgctctggacccattttttattgtgccatcatgaaatccctccttgctcaggtgccctgtgtctcctgggactgagtaaggccagggcacagatgggaattccctgtcttcctagaccttctctctaatggctgccaccttcctccacttgactcctgagacatctggttctaacagtggataagctctgacactgaggctgaacagaacacagtccacaggtgtaaatggtgctgcaaggacatgtaataaagtgagcagggcttccaatttatactgagaatgaacatgcaacaggagcaaagggcagacattactaatgaacaaatagggtttctgctctaatgaaatcattctgttgtcttaagttaagcaggagaaacttttcattgcaattacttcaagtcaaaggctagcagctcccaaccaaccaggataactctttgctctgtgatctcagcagcttcagaggactcagaaatcctttctctgcacaaacttccctttgtccattccaaaacccaggatcacacactgatcctatcatgaaaacaatgaggtgtgctatagttgctgtggcctcatttttagggtgttcagtaggaagcattgaagaactttgaaagctttgctcttgagtctagggatgtgctggagccagcttgtatcattcagaagagccaaataggcatactcttcccagctccctatttagtgaagccatgttggcggcatgaaatctaccatggtgggtatgctggtacaaccgaaattagcaaatgctaccagccatgcccccaccttcacagacacccagtttatcagcacatccctggagtattttctgatgtccgttatgccatgtcttgtgggcccaaaagggctcagaattcacctcccctctagtcttgctcctagaagccatcatctaagggggcctccattgttcctatttctgttctacctccaaattctcttgccttgtggttgtctcctacaagcatgccactttggaacatgacaattattttgattgtgactaaaggtatcactgaaccagttaattttttatgaattatctttcctagcatggaatattcagatgctggagtcattgggaacagagatgagcatgcagcaacatgcaagttgtgaaacacttacagccccgctattcttctgtggcactgacagaccctgaaacaaggactattttgctttggagactaagcagctccgcaccagtcaggaatgactctgcttttactttaggctgagaggtcagaaggatcacaccctcagtattctcctctccaaggcggagtgtggccactctccatctcagtccctggaagttgcccagggctccctgagaatccctgctctggggcagaatcaccaaggctcatcctcgccagctccccacaggctccagcagggctttcctgccaggtgcagggcacaggaatggctctgcctgtctcttaggtagagggaggccatacaatgatgtttgtataagagggactgggattctgggtctcctttaaagtatttgacaggccaggcagggtggctcacgcctgtaatctcagcactttgggaggccgaggtgggtggatcatgaggtcaggagatcgagaccatcctggctaacatggtgaaaccccgtctctactaaaaatacaaaaaattagccgggcgaggtggtgggcgcctgtagtcccagctactcgagaggctgaggcagcagaatggcatgaaccccagggggcagagcctgcagtgagctgagatcgcgccactgcactccagcctgggcaacggcgagactccatcttaaaaaaaaaaaatttgacaaaattttctttgatttttgttctattttgccatctcaccaatgaggagagcaatctcttggtagttatattgtttttggctcttgggaaagtttttgtggttaagtcacattaagaaattgtgccttttttccctgttcagatataacccaaggcagtgaaagaaacagcaataattttgaaaacagttagttatgcatcctatgataaaggtgttaagtttcattgcccacatctaactttcagtctagtggaaatgaaaaggcacagttagggggcatgtgagcatgccatgagagaggtcaatgccaattgagaagtctgtgccaatccccagtactgtgggattgaatgggagggagagatgacctctccttcagactgttctgaacaaggagggagtgagagttcatccatgggaacctgaggaggagcaaatcccaggggcatctaactcagggtgcaggagcaaatccttggagaggaaaatggtccagttcagctgtcacaggagataggagaacgcaaagtcatgtaatccacagtcccctggctgatttgcttccttatgatcctattttgcatccgtgtttcctcaactcccgctgccccctgcctcttccagaatcatgttttggctctttggtgctcagatcagtggatgtgcattgtacaagttgatcatttcctgtacaagcccattgctgctcttaattatatccatccttattttgtgcattaggtactgctccctacaccactgcttattgccgtgtaataagtctcattttgtgtatttcagttttactttttattattacacatttgacttcatcttctgcttatctatacttttggggtaacattgttatttttggaggacatttttgtttatctttagtgattcagattaaataatctctttatacttcaacgtctgtcttttatttctatttaaaaccaaatattattttcttttattcctctcattctgttcctctttctttagttgatagttttaagggagaaaaatttagactataactggagctacgtgataagagttattcagaatgaggctgggatattaacattgttaactcaaagcaacagtcagcattagaactagtgttgggatgagggtttagggaagctgctcataaaacctgcagaatggtacttctggaatattctctcagctcactctgcagacacttcccagcattccttgggccattgcagaagcaacaatgatgaaacatcacttactggccataagatggcactgtggtccactgggatctaaagggctctggggagtctgggagagcagcctaggagggaaagggttaagaaaaattagggcttagatccagtattatgcagatgttgcagcagttttcagttttgccagactacctacagctatgcgagaggtgggaagtccctctaaactttaatgagatctacagttgaataattttggctggacagctttggtgtcagggacaggtgcagaggagcaactgcctcagagaaagctaggggcaggatgtgccctgagcccagtgcatctgcgctgcacctcatcttccctgcaggtcttgccaggcaacagctttaacctgctcaagtgatctgggattctataagtttgtaagtcgtactgataacatcatcttggctgagattccattgggcaccaagcacgtgtactctggaggacaaaaaatattgataacagttctaaaacactcaagtaaacaaactactgaaggaaaatgttaatagatgcaccaaactgtactgttagacttgaaaataatcaactaatagaattatcaaaaagagactacaaataaatctttactaagtatttgtgggcatcgagcagtgtctgagtcctctcagggtagattaaggaaggagttcagctattatcatgactttggcttggatgaaaatccatgacctcctcaactgattttcttgtaaaatgttacagaataatattgagcaaacattttatttttctccagcctgtatccctccttagcactaacaggtaaagcggacacctagaggcacggtttctttagttgggatccattaactgcaggactcggaggtccatagctgggcttcacagggagtgcaaaccccacgtgcaaggaaccccgtgtgtctgtgctgtgcccaactcccttctgtgaggctgccaaaggcggaggtccgggtgtcccaggaccccactcacaaagaggggagcaggctgcttgctgggcaaaaaaatcagttcaccaattggccaatatgttgaaaaccaaaaagaaaggaaaggctcaattgtgagactgacgaacacccaatttcccaagttatgaaatttgtagcagctcatggttctcagaatggtttcaacagcctatgaagatatttttagaaagtttttgtttgtctacagctttccttgatattgatcctcaggtttttttcagcccactcatcacttgaccttattttgtggccaaatttcagtgttgcctatttcagtcactgagcacttctcattctccaaatcttacacagatatgtgtgttcctgtcttttcttctttttgtgtgattcatttttaaattgggctgtgcagaatacaagcatacatttgtaaatgactcccatcttttatgcaatttagctgtttaatttttagtaatactttttatttaaggtgtaattaatacacagtaaaacacaaatattaatacaaggacatcctggtacattttgacaattgcatgcgccagtgcaatagtaactaaatgattattaaaaaactttccatcactcaagaaagtgtccttatgctcctttccaatcaatttctatcccagagataaaaacttttctatttttatcaccactgactagctttgtctattcttcagtttcatataaatggaaacatatttttattatttttcttcaaaattagtagttttgaagtgtattcatattgttgtatcagtaggtcattctttcttatgactaatattccattgcataaatataccacaacttgtttatccaagctcctgttgatggatatccacgttatgtctgtcttcaactattatgaataaagttgttgtgaacattcttgtggaattctttcttgcgaacatatgcattcttctttttttttttgatatagatttaagagtggaaatactcatagtgtagacacgtgtgctatgcttgcgtgtccccacaaaagctcatgttgaaatttgtcagtgtaatggtattgggaggtgggacagttatgactaggtcatgagggatctgccctcagaaagagatcaatgcccttattggaggggtgaattatgtcttgggaacggtcttctgataaaaaggatgaaatcagctgttttctctgtcttgggtgcttgcttccccttccttctgccttggataacagcaggaggccctcatcagttatggacccttgatcttggacttcccagtctccagatctgtaagccaaataaacctcttgtctttataaattgcccagtctgtgatatttctctatgtcagcaggaaagacattgaaagaaaaaatggtaccaagagtgaggctgttgctataatacctgcaaatgtagaagcagctttggttaatgggaagcggctaatggatagaggttgaaagaactgggaggagcagactagcaaaagcctagactcctgaaaacagagcattaagggcaattctggtgaaggctcagggggaaatgaggaacaaggtatcggaaattgaagtaaatgccatccttgtggtaagtagcaaaatccttggcaaaactgtgttctgttctaggaatttattgaatataaaaattatgagtcattcgctaggatatctgctgaaagaaatatctaagtggctaagcattcaggctaacgtgtgactactttcaggcaccaggaaatttaaccaagcaagaagggagccaagggaatagattttgcaaaccagcacagatggtgaccctacctccctctgctgtcccatctccaataagacaaattctgtgctgttagctgttaaagccctagaattatttctgaggaatctgtactcttcataatttacagacaacccagctctgctttggatctgatcagatggactaaatcttggggactctgcaccactggccactgaggaaagggaagagaatgttgcctgggacagaaaatatagtaagaaacattggtgtgaatctagcatcagaaagatgatgtgaggacagcaaggaagagcaggaacctgaagtttaatcaggctcctcgccctctgctgatgggcatgtgtgtgagctccagcatggagcaccgcagcactaggtcagaggagagtaagagggcgatggggcagcctgtgagctggggcagtgtaggcagaggagtaactgtatcatcacagaagcttctgccttcaaccatccctccagctctgcaggacaggtagagagtccagggtctgtggggcactagacctaaggaaggcttcctggggaggacacaggacagcgacatcacaggatacccctcccatcaggaaaatgaaggcccagaactcactcggctcttccccaggaagaccaagccctgaatcaggtgcagtgccgcctggcccactgtgccatgggacccaggctcctcttctgggcactgctttgtctcctcggaacaggtgagtcctgggcacaggacagcagccccattctcagctttcccaccccagtgtcctccactttaccttggggaggacctctgggctgtctcctgagctcatcctccatctgcttttcctgcaggcccagtggaggctggagtcacacaaagtcccacacacctgatcaaaacgagaggacagcaagcgactctgagatgctctcctatctctgggcacaccagtgtgtactggtaccaacaggccctgggtctgggcctccagttcctcctttggtatgacgagggtgaagagagaaacagaggaaacttccctcctagattttcaggtcgccagttccctaattatagctctgagctgaatgtgaacgccttggagctggaggactcggccctgtatctctgtgccagcagcttggcacagcccagcagaatcactgacattctgtatataaacttcctgccttagctttgacttgagagctgcaggccccactcagtcttcactccttcaagggaagcttttagttgtttggaaggcatgtcttgtgtcctactgagggcacagctctcccaaccaacagagcccaggtttcctgtgccctgagtgtgcccacttctccgctgcatcttcttgcagcttgtcacttcctgggtaacttcagtagaagagtgactgctgagccccagatgtgtgctagattctttgtatttgttatgggcttaaagccttgcaacaatcttgtacatcaagcattcttattcttccttgacagatgggatgctcagggacattgagtcattttccccgttgtctcctggcttgtaaggatcagaagtaggaaacaaagtagtccatccattttccacctacccccctgctccatcatcaccttctgcatcctggtcagagtaagtcagaaccctcacactgccctctagtgaccagcagggccgcagcagaggctcagatgccttcaggggtcattactatggcctcctcattagcaactttgaggaatgttaaatttcacactttctaaaaatcatttatatgcattccctgtgtctttccccagtctgcagcttatattttcatttaatggtgttttttgatgcacaagagtttaatttaatgcaacaaaaactaaaaacaattttgtttgtgtgtagacaaaaaccgctttcccatataagtgtctaaatatatttttctcaatttattctaggaaaatttaagtttggattttcatcactaagaataaatgtatctgaaatatatctcatgtaaaaaataaggtggaaacctaggaatgggagcgaaggacatatgttcagtgaagatgaaatagtgtgtcaaaaagagctggaaagtagacacccggagctgatggtggagaggtaggtggagggcaaataatcatgaaccttgtcagtttgttatcttgtataagaaagacagccaggagtagagaccacatgggcaaaggtttatggctggtctgtaggttgaaggttgcagcaggtagagggaggaatagcaggcagagggcagagtcactgtagggcaggggcagtggcatcatcagttgactttactgacatccaggaattatgtccctaacacacaagctgaaaaacctcccacaatttgcctatttttccctgaccctgccatggccaccagactcctcagtggtgtggccttttgcctcctgggggcaggtgagtgccttaaagccttttccttggctcaccacatcccagcctaagcctttacctcaggtctacattattggggtccctccttgggcactcaacttccttctatcatagatttcacagaagctgggacaaccagatcccaagataccagagaacaaaggcaggacgtgaagtgacatggagatgcctgagactgccatccatgactacatgtgtaggtgttaataggagccaaggctggtgcacagctgatccgtcccagcacacactatacagaatccctgagggtctgtgactttttctcaaagccaaatatgtggccttggtgtcagacagcctctcccagacctctgtgcccccttgcaccagctttcaccccacagccaccttcctctgcacacaaagctcagtggaaaatatagatggccttgtcttcacgagaccgtgatccaggcagtggaaaacattgtcccataggagtctcccaacactgcccaggctggggccctcagatttctgagcagccctgtgcatgggaaactctgccctgtgctgagcttctcttccaggccagtctcagctggacgatggaacgcacataaccatgctttgcgtggatgcagcctctcttccaggcccctcctgcagctctgacctcagaagtcctcttcctcagctgctctcagaaaggaaagttcatttgaaattgtatatttgcagacagcattgacaatacaggtctatgttcttttccctgtcagccttcacaagtccatcttccccacaccacactcacgtcagtcctcagcctcttccacgtgatgtctgctcccagctgtcttctcccttcctctgcaccctcaccttcatgtcaatcacagatgcctcaattcaggcccttcctcatgggtcatgctcctcccaccaaagccctttccactccatgctgtatcctctggctcatcagaagtctcttctcttttgttctttctccaaatctcagtttaactaccaccatctctagggagacactccttcaacagttttcctaggctgctcctccctattgtaaatgctcacagtttataatatgcattaatattcatagacttagcaccatagtcatttccctgactttgtgtgactgtttgacacttctcttgcattctccactgtaaaaggcatcattctagaagttgtggatgttttgttccccattttattgtcagtaccaacagcggttccaggtgccactgaccaatcttgaaagaataaagaacagatattgaaaggccctctgagttcccacatagactgttccagaagtctggacacattaaatgggaacttctatcccttcatatcctaggatcaaatgagtcctggaaacagaggagaaatccctgtcatggatgagtaactggatccaagcctttctgcactactgaacttcctatctgcccatcgccttcctgcctagtctcctccttcaatctccttccctcacaggtgtcctggatttgggagtctcacagacacagcgcacctaatcactctgagagagtgatcagaaacataatgtcaaacactggcattaaaaggtcatggagaagaaaacaaatgccttccccattctcttaggcagagtgttcccaaggcacaaatatctctttgggtggctttgaggccatgctacctgacacactgagctatattatgggtgttcatttccatgaattggtgggcaatgctagagacacagacctgatggtcaccagcttcctccagcccacacctgattttggtgcagggcactgaacagagacctttgcttattcccctcctttgccagttaggaaaggctgattgtgaggcagaggctccacttacagagcagggctatgtgttagtccctgaagaattgtgagagccattctgggtggaaataatcaaatatacaatcaccaaggatggcccacggacagactgaagccccaattttgctggaatgatttgcatctatgctttaaatacgaatgaagttttatctctttaggcaataaagaccaaaaatagactagctattttaaataactgaaccttaaacaaaccaaagtcagaacatcttccctagggacagcattttcttctacccactcactaaagctgtatttgagaaagctgtgtgctgttgataaacactggaatatcattacaattgacatcgtaataatactgctacttggatcagaaacaaagagcatttctaaagcttgaacaatgtaaaactggaaacgagctctcactgagtttggaaatgcaggcactagagggtgctcatttctcttccttttccaatcggaggctattcaaaggctgttctagaacaaggggtgagatcctccacttctccgtggtgatcaggctttcagaggtagaagccttattggttcataatcagctgaactgacctcaccatcaaatgtatcgaccttgatgctcaccctcctcagcagtcagagactgtgttcaccaggagcttatacgcttttacatagtacactttatcctcggtttattccaaaaaatgggcatctataaggggttccataaacagaagctttctgtactttgcccatttagacactataaagtcagacaccagctgaaaggtgtaacttaaaagcttgtatgtggtgaagattttttaacaaataatatataatgaaaatgtcaataacgctctcaaatccaatcccaccttccactggtcaccaatattaacactctggtgtgcttcttttcacctctcttttctgtgttcatgcacacctttctacccaagtacacctacagaaaatgggttcacctgtacactttacctgtcacatgcatactcttttctgttaatataccctggtcttattgttccagattggtcaatatagatctaacttgctcctattagctgcttcatattgcataatgagggtagacaggtacaattgtgctctattgtctaattcctgaattctgccagatcttttctaaagagactgaatggcctctttaggcttccaggttgtcctcaccccagcccccagttgatgattccagcatttccatcactcatagtcctggcaggtttgagagctccattggtttctcctgcatgaggagacagggagggataaaaggatagacctttatcaatcctaccagacactacacagtatctcagttcgtcctcctaaagcattgaggggaatgttagtcttgttttatagatgagtctagatgcagctagagtccaggaaggttaatgaatggccttgcccatggtctcagagctaataaatgttggaggcagatgaagggcagtcagcttgcttccatgtggaattgatagaggggtcactggagtttgacagaggggaagtctagaaccatctggggttgttttcagatcagacaccacgggtagtatggtctgtgtaccctacagcactgtagatacaagcatcatggtgttggcaatggggaggtactagagaggtaagtggctactggcctggaaccagaagatcatagctttgaaaaaaattattcccagcacaagatgtagcagagacatcaatgtggataaactaggccagggagctctgtgaagagctgttgttaaaatgagggagggagaagcaactaagtggtcacttcctatacattaaatgtagaggaaaacaatgttaactagaatcccatctgattttagtcagtttttcgtttaagtagttggaaggtgggataatttattttcaagtttaagtaagcatctatacatctcctttaccttgtgaagactggtggcgaagggaagaatggcaaggccaatggagtcacagtttaataaataactcagagttcaaatggagactctcatgggccagaaattggtaaatgttcctgcattctaaaattaggggaatcttattttctttgaatcagcagagacggaagcacaggcagtggggagggacagttgggaatacagcagagtggccacagaatgtcgaagaaaaaggacatgtaatgccaaattctaagctgtgaagctgtgatgcaaccctcctccttctcctaatggtttttttaggtctcagatgcgcacctgagggagtaatttctttggaaatgaagaacaaatagctgtgttaaatcttaataacaagtccaccttacaaagcacaactggaaatggaaacaagattatttctaaggccttttctactctaagagtctttaacttggtggcaaggtgagaggtggggggtggggatggtgttgatccacatgcgatgagtaccgtgaggctctaccatgaagaatacatttctgagtgtgaatcagagccctaagaataatgccctttacgttgtttgggaccaaacccacctcacccataattaagcagccatggaaatgaggagagccagaaggaatcaaaccctgctgcttggttcagtcgacagaaggacctggtggaaggatgttggctgggtctaagagaagatgatgagctcagaaaacagacaaagagaaatcccaggcgaaagcttctgaaaccctggaggaatcacaagtcaaatttctcccagaagatggtggcagtgactcaccttcaggtacaactggctggtgctacagagctaagatggacttagtgtgttggcagtttgcaaaatctgggccatttggtcattttcttcagtgactttttaaagtgaagttttacttccaacattggcctgatgtgtgggtctgttcttatgggggttagggttagagttgctccattacttgagtacccatgaagtattattggtcatagaatgagcaggattatcaggagtagaaggggtagggagagggagaactgttaagtgaagcagtagggttgagtgaagagtattttagacatatgagtacatagagggatgaaagcccagctagcccccagcccccatagaaggaagatcaagatttgacaactaggagaggcatgattacaccatgcagcttgatcaaggactgagaaagctttctagacaaatgacaggtaatgacccacactgtgaatcggtattgaacgtgagatgtcaatatatattcatatatccacttatatatctaaaataagaagtccttacaaaccctgaaaacataaaccctcactattacaggatgtgcaggtgatttggatcctgtgaagaccctcaaacaggattaaaatccagtaggcagaggtctctgattctttgttagctacagaggaagatgtgctatgatggacacctagggggtctgggggtcttcccatccccttcccagatccacacctagaggaatgtcaggcagcacaattcagagaaccaccagaaaagctgtgagaataggactccaatctgaatccagcttctctcagctctgcaccccttgctgtgtaggagtcagtgcaggagaaagctgactgggtgagaagagaagggatcctgaaccatgccagaggagacctgtgaactgggaaatgagcagcaacagcaccaccacagacacacactcgccaggcacagggagaggacagatcctggcctcttgtagcaccagagctctgaacgccctctacctgctcagtctcccatgggatctaggctcttctcctgggcgctggacatgccttggtttctcaaaaccaggtgtgtcctggatgcacctgggggaatctcagctctgaatatgccaagccttgccagaggaaccatgtattttgaaaacccacggggtctgtgttaaaaacaacaatttccctctcagagcatgatgggattccatgttcctgcttagttgtgctttgtctcctgggagcagatggctctggaaacctctgagggaaatccctgtccctgcaactgctgtgcctcagttccaaacattccccatgcagtctcctacgtcctagctccaggttctatctccattcatgaaactgtgctcacacagacctcttgaaagcaggtaatgggtatggagcagcaataggtgtgaatacatcctactttatggcatcatctatgggaagcaatgtcagctggaaatgcaccagcatgaattttatactattgtgatgtagcacttctgagattgaaggtacaatggcatattccaagctggtcaaccaaacatctcactccatcagctggacacacatcccctagtggggtgggattctgtgggtctccttttgccagcagcaaagaccttgctgaaccatctcctctgctttgcttcaaacttttcctccactttgcaggatcttctcaaatctgggtctaacttgcctgcagtgagaggaattgtgactattgtccctcatatgaaagagggtgcccatgaagttttaagagttaagttaggaatgaaaatgagaaattaattgctcataatgcagactgttaggaaccccaaggattaattcaactccctattttttaattgtactactcccatcacaatgtcaagggtaaaacagttctgactttttctaaaggctatggaacatttattgatttcagaggtgacttagaaacacaggaggtgtcgtgataagtagtagagacaaaaaagaaaaagtattgagattaatgaattcatatggggaattgtttaactgttctttttttaacctttagaatgagttgaagatcccaacttagcttggtgcctgctggaggcaacgtttcttcccttgcccctctgagctgtgaattgaaactctttcgggaaaaagacgcggcaattctctccacttcccaaacacctcccactcctacccagaccgtggatgggcaggaaatgcaggaacagagccagaaacaggagatctccaaggaaggttgacagtcagcactgggatcgtctgtgtaaagtgctgctgaagcagccaggtggcatgtccagccgacaatgcgaaaggaaaaagtgagaagacttcccgaaggcggagggtggaatgcgggcagcagccccctggagggctgagtggggaaaacaaaatggacctcacagaagctgtgtgtgtggaaacccacttctgacttatcacttgtcatgaattctatgcttcatggtgttacaccgtttattgtttctgatgagtgacagtaattattttctttcttgctggtacataataaagtggtgcacatcagagttgctgccatcttagacttaactcatcagtatcaggtgatcctgaggctcagtgatgtcactgtgggaactgctctgtggcgacaaggacgtccctcatcctctgctcctgctcacagtgaccctgatctggtaaagctcccatcctgccctgaccctgccatgggcaccagcctcctctgctggatggccctgtgtctcctgggggcaggtgagtcctcagaacaccaagcaatctcattgtgtctgtgtatgtctgtgtgtgtgtgcgtgtgtgtgtgtgtgtgtgtgatgactacaattgttttcctcctgttcccaacttgtatctccacagatcacgcagatactggagtctcccagaaccccagacacaagatcacaaagaggggacagaatgtaactttcaggtgtgatccaatttctgaacacaaccgcctttattggtaccgacagaccctggggcagggcccagagtttctgacttacttccagaatgaagctcaactagaaaaatcaaggctgctcagtgatcggttctctgcagagaggcctaagggatctttctccaccttggagatccagcgcacagagcagggggactcggccatgtatctctgtgccagcagcttagccacagcatggcacagtcgcctccttcctgctcacaaaccctcaggcacttacttctccttccagctctcagaagccctgaacaaaggagctgccctgctctttcctcagcaaggagaatgaatgcatttggaactgcaggtgttcttctgatactaggaggtcagaaaataacctctgaaatacaggaacagggaatactgggtagtaataattttgacttatggatttctgggattccttatatatagttcaaatttccataattaggatataacagagcttagtctcatggatagtgactaagtaaatattcttttatagaactatgaagtttcagcacatttatattaaactactgttaccacatgtcaccaactcagacctataatctaccaaggagtggggaagccaaacgcaaacactgctaaggccatttacagctaccacccttggaagaaaattggaatctttagtaagaatttccatcaaaatcaattttttagaaataactattacccacaataatgcacattaactcatgttcatacattgctttttttccttctgaaaatcttgtagtcattctatgtttaatttccttcttctccagtctaacttaaaaaaatagaaatacaaattgagattgtttcataagataaaccccacctgggaaggtgttaaaaggacacaattcaaagaaaacctgaataaaattatatcaaccacgtaggattctttgaggtttccaaagaagatgtaccagtttacattcccacgagaggtatatgagttttggatggaatttttttttttctctctctctctctgtagattagtttttccctctactaatagtttctcttgacaaacagaagttcttaagtgacaatcattccatgtttctcccatttcagttagtgttttgtattttggtgtccactttaggaaatccttgcttacttcaaaatgatcatgttttcttacatttccttctaaaatctttatattttccacttttcatacttagactcacaatcgaactggaattaattctttgtaggtgatatgaggaagaggtcaagttctatttttccaaatgattattcaatttacccaatactatttaagtggtaatagtttcaccatcactcgataatatcacttttgtcataaatccgtcattatacatgtgtggccttttttctcggatctctattctgttacattggtctgttctgtcagttctcgcactgataatatgctgtcttactacagcttcatccttattcttaatatctggtagaataatttctcaagcttcgctcctttttatcaagtgttcttgagcactcttgacactttttttccatatacattttagaatcagcttgctaaattattcaggaaaaagataacaactgctgggattttttttgtttttgtttgtttccaactgatttaagtgcatcacagaacaaagctaaaaatattaatagaaatataaaaatatctaccacccaaaaatataaaatacaaaatatctggcatcaatcaaaaattacagacctgcaaagaagcatgaaaataggatctataaggaaaagaaggattaattaataggaaccaactcagaaatgacaaattggcagacaaagacagtcaaacagttactataactctggtctgtaagttcaaagttttgttgagatggggaaaggcataatgagatccaaacaaagcttctagagataaaaattacaatgtctgtgatgaaaaatacgctggatgaagttaccatcagattagacattacaggataaaatattaataaacttgaagaaataacacaaacaattcttaatgaaatacagagaataagtgggggtcatcagtaaactgggggacaactttaagtagcttaatatgtaattagagtcccaaaagcaaatttttaaacttgaatgaatttctttaaaggataattggctatttacactgaaataattccaaaacagtgcagggattctaatatatgcaaacataaatctataacaagactagcataaagacaggtgaggaataaatgaacacatatatcattggaaggtttccataatctgagtgaagtcacttgaaggcagactgcgttaaagtagagatgcaactgaaaatcatagagcaaccactaagatgacaaaacacagcattatagttaataagccaacacaatacagagttataaaaatgctcaaataatccataaaaacaacataaaaagaaaaaaggaatatagaagagatgggattgatagaaaacaaatagaagatgatagacccaaaagtaaccacatcaacaatcacatcaaatctaaatagtctaaaagcacagattgtactattgaatattatcgaatcatatcaaaaaaacaactatatgctgcttatcagaatactatgaagactcagaatgtaaaaaaatataaaagtatggaaaaagatgtactatgccaacaccaattaaaggaaagccagactagtaacgttaatatcaaacaaaataaatttcaagcagagaatatcatctgagataatgaaagtcatatcctaatgacaaaagtattggtctatcaagaggttgtaacaatcaaatatttacgtacctgaaaatggatcttcaaaatcccaaggcaaaaacagaactgcaaggagaaacagacaaatccacaattataatcagagatttcaatagccctcttttagtaactggtttaacaagttgacaaaaacaaaagacaactaaggatacagaagatatgaactacaccaacaaccaacttgacttaattgacgtttacagaacacttcatccaacagcagcagaatacatgttctcttggagtgcgcactgattgtgtgccagcatggactacgtacactgggccataaaacaagcatccatgcattaaaagtattcaagtcaaaccaagtgcactcgctggtcacagtgaaacttcattaaaaatcagtaagagaaagatttctggaaaagtcccgaatatttcaaaattagataatagttgtctaaataactcataaagcaaaaaataaatcaaaagataaaagataatttacaattattttaatagtatattttggtcattttttttttctttttgaccaaatactggtgagaatgaagataagtaagacctttcttttttattttttttttaagacggagtctcaatctgtcactgaggctggggtgcagtggcatggtgttggctcactgcaacctccgtctcctgggttcaagcaattctcctgcctcagcctcccaaatagctaggattacaggtgcccaccaccatgctcagctagtttttatatttttagcagtgacggggtttcatcatgttgggcagcctggtctcgaactcctgacctcaggtgatccacctgcctcggcctcccaaagtgctggggttacaggcataagccaccacgcctggcccaaatctttcttttttggggtgagagtaaattgtaaaaccgtttttgatgagtaatttagcagcatacatcaaaagagttaatactgctaacactccttgacccagagtgttttttatttaatgaatttatttcaaggaaattgctatatatgcataaaatgtttgagaatgttcaacagaaaagaaattattttaaactgaacaaatataaaaatatatcaaagttggtatgatgctgccaaagcaggactgaggggaaactgaagaacaggggataattttctattcattctgaggccagaactactctgataccaaaacgagactaagagattccaagaaagctgctgactaatatctctcaggaacacagattcaatgatccttttaccattacagcctagagaatctgacaatatgtaagagggatagtacaacatggtcaagtagggtttatctcagtaatgcattgttggtctgacattcaaaaaacagactatgtcatttaccttatctgtatgaaaaatatgaaaagtatatgatcatatctatagataacttaaacatttgataaaattccatatcctttcttgaagaaaactgttatcaaactcagagtaacaagaaattttcttcacctaaaaaaggacatttatgacatcctatggttaaatagaatatttttgcaagcaaactgataagtcaaagatgcatatgtaattcccagatcaaatactagaaacagcaaaaagaggataaaatagccttttcagcaaatggttctagaaaatgggataatatggaaaaataatgaatctctagccttatctcactccataaccagatgtgggcaaactatggcctccgggcaaatttggcctttgtctgttttcatacagcccagaaactaacaaaaattttacacttttaaatgattgaaaaaaagtaaaaagtattttgttacatataaaaatctaagatattcaaatttcagtaaacataaatgaagttctattggatcatggccacagtcattcgtgtatatattgtcaatggttgcttttgcactacaatgacagaattgagtagtcgagacaaatactgcatgatgcacaaaactaaaaaatttattatttcaccctttacaggaaaactgctgacccttcccataaacaaaatttagtaagagacacaaaaaaaatcccagataatcgaaaaactagaaactgaaagcttcctggaagaaaacatagcaagctctcttcatgatcatggggtaggcaaagatttcttaaggacaaaagaatgttctaaccataaaaaaagcaaattgttctttatgcaaatcccaaaaagttcttcaaaatacattacgaaaaaataaatgtatatctgagaaagggctggattcatattataaagaattcctacacatcaatcataaagaaggcaattcactaaaaacaaaaagttgactagagaattaaaaaaaaaagatatataagtaggcagtttcttttcatgagactaatgtgtttatttctccagacttagatgattgtttcactgatagcatgtcactgtcagctgcctccaggaattatctttggttaaagggaatgctttgcccaggtctcaccccattcctatggcagctggcatttaatgactggctgatatctcccttcctacaccattatttgatgaaatttaaaatttaaattaaaatgaaaaatttttctttcttgtttagaaagacatttgctttatgtctccctcaccaacctgtgcaaaatttgagtttgaggcaggtaaacctgaaatcagcaagagctgtgctgtgtcctgagagatcccgatggtctaatttaggaagcacccagtctccctagtcagggtccttagagcttcctcatagtgactacacactggccacttgggggcactgtggatccactgagtgggtcactgatagcgctgtctgagagagagagggttaagggagacagtcttgatttcgtctctgtatcagggatattaccagatgaaccagaggtactgctggcacaggaagagttaatcatagtcttatcagatcaactgatatgcaacgtgtatttgtcatgacaggaagccatgaactgaagccttgtgtggcctctctagcaacctaggtttgatggggagtgtgatgagggtttcagcagggcagcctggataacccaagccaggtggagataaaggagcatctgcctcagatgaaaatctcagaagctgtgcggatggctgtctgcccggaagcctgccccctctgctcagcacagctagcttcccctgctctgcaggaagctggacaggatgggggaaagcctgagttagctgagctagtcctggagtacagggtgcctatgggagcctacaggacgatgacatcagaacagtgacatcacagtaaaaacctccaaaaaacggtgaggaggagcaaaagccctgctttctcaccccaggagaccagcaacctgagcagggagatgcttagtcctgacctgcctgactctgcctggaacaccaggctcctctgccatgtcatgctttgtctcctgggagcaggtgagtcctgagtacaggtgggacatccctgtatccacagtgttcaattgttgctgaagtgtcaaactctcccgagctgagtcttcagcttctgtctccttcctccacagtttcagtggctgctggagtcatccagtccccaagacatctgatcaaagaaaagagggaaacagccactctgaaatgctatcctatccctagacacgacactgtctactggtaccagcagggtccaggtcaggacccccagttcctcatttcgttttatgaaaagatgcagagcgataaaggaagcatccctgatcgattctcagctcaacagttcagtgactatcattctgaactgaacatgagctccttggagctgggggactcagccctgtacttctgtgccagcagcttaggcacagaccctggagaattactggctttctgtacccaaaccctcctatctcacttgaggatgtaatagggagaaggaggtgggggctgccacacaactttagccaagccccagagatgcttctattcttttctaacattttcccctgccctgctgagctcagtgagagctcctgcacttgtgggctccagacccactggaagttctcacatcttagccagtactttttaattcctagcaagtggcgggagcttctactctgtgccaacataggggtatatgttttagtgtgtttcctgttgccatacagaatacctgagactgggtattttataaagaaatgaaatttgtttcttacagctctggaggctgggaagtccaaggtcaaggacccacatctagtgaggaccttcttgctggtgaggactctgcagagtcccaggtggcatagggcattacatatgagggggctcatgaaagatggtcaaactggcttttataacagacccaacctcataactaactaattccttctataacccattaatccatgaatggattaacctttatgagggcagagtccttaagatccagtcaccttccaaaggtcctacctctcaacgctgctgcattgggaaccaagttttcaatatataaattatttaggaacacagtcaaatcatagcagtacacattgcgggttttttttttttttcttttttgagacagggtctcactctgtcacccaggctgaagtgcagtggtgctgtgatcatggctcattgcaaccttgagcgcgtgggttcaagcaatcctcctgcctcagtggcctgagtagctatgactacagggacacatcactacaaggtgtgtccccagttcctcagttcctacaaggtgatgtgtccccttgcctggctaattttttttaatttttatttttgtagagatgaggccttgtcatgttgtccagattagtctcaaactcctcaaatgatcctcctgagtttatgtgttttaatgcaaagatagacattagcatatccactttatacatgtagaagatttcagtgtaccattttatagataggaagctgtggctcatgaacttctccagtatttcatatttccaaggatcaaaggcaggatccaaacctacgactccatgcctccaaaataaaatttctaaaattctatagtgtttcctgggccttggtcaatgagctacagcagagcactattcttccatctcaagactagccaagcagtagaagaaggtcacatattatggaatgtggttactatggcttatggcctgccaacctccaggacatataacttccagccagagaatatttgtcctgttttagttccatatagaatggggccacaatatgtcctaatatagacatatagtgacaaggggcatttctaatacatcacagggttcagtcaaggaaacagaatcctctaggaattccaaggagaataggagttaatacagggaattagtggttataaaccactggaaggctgaaaagtgggagggtctcagaaggttgaaacttgcgctcaggtccaccactagtgatcacaaagactgaagttgctacttttgcccaggtcagggactgctggaaatagctgagagtcatagtggtcttgcagtgaccaagagggtgattcacaggaaagtatccagaggtcattgcaaatccacctgtctgttgctgtcagataaaagtctttattctgcttctaacttttccacaagtatagcttactgggggaaacaaaactgttttcagaaacttgctctcaggagaatctaggaaatgtctttttcttttttttcttttttttttttttttttttgagatggagtctcgctcagtcgcccaggctggaatgcagtggcgcgatctcggctcactggaagctccacctcctgggttcatgccattctcctgcctcagcctcccgagtagctgggactacaggcacccgccactaagcccagctaattttttttgtatttttagtagagacggggtttcaccatgttagccaggatggtctcgatctcctgacctcatgatccacccatctcagcctcccaaagtgctgggattacaggcgtgagaccatgcctggactgggaaatgtactttcaagtcttctagctcttgcaataagagagagagagagattgttggaggacatttaagggtactcagtgccaaaagacaatcatcagcacacccagctatgcagcagagaaatggaaagcaggagaataaattttatattttctgtcaaattgttacatgaaaatttattttatatatatagctttgctgttgtcatttagttgttgtttacttgttaatttattcagtagatattcctggaatacctattatgttaaaaatttccttggaatacagaaaatgagatgtaatttttcaaattacacattctgtctttaagaagtctaaagtctggcaagataatatatccctaattattcacacatgcatttacaatgtatgaaagtcatttcaatcagtcagttttctggcaaggaacagatgacacagtcaaaaaggctgaagtgaaaacaatttaatcgaaggactatgtttagaggggtaaacagacttagggacaccaagaagtgtttgagggaccaggggtttccagcacattgggaagccagtacaactaactgtggggcctatggaaaaaggggtgggagggaaattctgtgttactggaggtgcatgcaagtaatgagaaaagtttcccaaaggaaggaattcaggaccagagctaggaaggggaagcccagatatgctgaactttctcttcactacccttcaatgtccagctggtgtcttccattggaaagcccagctgaaagcctggatagcaccgtttgctgacatcagtcttcaggggcacagtccagggcagtaaggggcaggcaggcgagagtcggttgtggggaactttgggtgtgcatgtagaacagccagcacagcagctaccaagtgtatgatgtgccatttgcagatgcatgtgcaagtacacggtggacagagaccaacttaattctacatcttttatgtgaacttagagaaaattgccttgttgattgctaataacaagcaacatcgttaatcccattttctctgggccatataccaagtacattatttcaattaatttcttaagaacttcaaaagggagaacaatttactcccatattacaggtaaaaaactgttagagaatttagattttctaaaggaggtacagctaacaaatatagaacttagactcacacctaggccatactgactttcaacctatgcttgaaggttactccaccctatacattttggtagaggaagataccttcaacattggaaatctaaatgtctcttttagaaacaatgcatctgacacaaaccatttgaataacatctttcatgtgggaggctgcacgctaaagaggaagatcctcagagatgaggagacctcagtagttcatcttctgatcccttgggtcagtgactttgaaaacatttggctaaactgaggccaatcatatatgtcttacagagattttatacatgtaaataaaacagagtctaatacatagtataggctcaataagtcttaggtccctatgaattttctgacaaatctctagtcaagcagttatttactttggcaatctggtaacaaaggcatacacgaattacttttgtctgattcacctatgattcagacacaaagtcatctaaaatgcaaatatagtagtctgataattcattggcaaaagtaacacaaacagttgtgtcttaagagaaagtgaaaatgttgtaccttacagcatttcctgcttgatactgagtctgatatgcaaggtgtgatgctcccagaaagttgtgaattcagagcaatcctgatggattccatctcctgttgctccagcacaaactcaatattgtacctttatcctggtttcctctctccctattttattctcccatctctcttattcctaattcctgagatcctttccaaaataaactactttcaccaaagtccatgtctcaaactttgccttcaggggcagcttaaaactttgacagtgatagaatgagatgaccctctaagacacttctctttgaaaaaggccgtggttttcttttagttacactgccatgcattcattcagaagtcctataatgatatatgaactatctcttccaagttcattttgactcagtctgagtttccaacagactcacatgggtctctgctcagttaaggctctgagcttatttgtaactgaatagactaagtttatgtttcacagcttcagggtctgcatggactcagagaaccattcatttctttcttcagtcattcaacaaaaatttaacaagagtatgtgcggagtagatccaagttttgcggaacatgaggcttataaaattttagggatcgctttgaaaaagagaatacaaaatgagaatgtcttgaaaaaattctgtgcaaggccaggcacagtggctcatgcctataatcccagcactttgggaggccgaggtggttggatcatttgaagtcaggagttcgaaatcagcctagccaacatggtgaaaccctgtctctactaaaaatacaaaaattagccaggcatggtggtgggcacctgtaatcccagctacttgggagactgaggcaggagaaccacttaagcccaggaagcggaggttgcagtgagcagagatcacgccattgtactccagcctgggtgacagagtgagactctatctcaaattaaaataaataaataaattctgtgcaagtgagaaggcctgaagttattcttcattgacttcatggcaaatccacttctagctagttaccgtgtgtaggcaccatgtaagtgcttgagaaacatcagcacagaaaacaggcaaaagctgcaaaataaggtgtatgttttcaacaaaagaaaattggtaaatcaataatgatcaagtaatacaaatgtaaatacaaggaaaatattcctggtagatgtttatctccccagagaagtcagagtattgttgagaattctattggtggatcacaccttatttattgatggatcacaccttattttgataacaattctcagagctcttggattccatgtgccctactctaaagaatctgagccctgagatggaaagctctcctttcctgtcctgactcaaccatgggcaatgatctctttttccgtgtgccttttggtctcccaggaccaggggagttctgggcatagatgggaaagctcttcctgggctttccaggccccagccacagcctctccatcggggtgttcatgggtcccctccctgtctccacttcagattctgtatccattctcactggagcatgagtgtaggaattacccacccaggttacatcaagatgtgcagtcacaaaaagggatcctcacactgagatgtgtcctgtatctgaaataacagtagtaccactattgactagatgtaaattttgcaccacagcacatttatggttcaatcaatatcctcccatttgtatttataagaccttctgaatggacacagggcatttccctatgaccttaaaggcaccaggctagtgtacttctgggcaaatatctcatatacatccctaatgagcttcctcttatttttacacaaaagaaaaaaaggagggtgggttttccccacatagtccatccactcacaagccaatctcctgcagaaataccctcacagatagaccaagaaatgctgttgtaccagctacctaggtatgccctagcctggtcaggttggcacctaaaattaaccatcacaaaactcatgagaacacagaggtctgagttctgatgatgagactcctattaggtgatggagactcaggtggcctcccctaaaacaaaaggagaagtcatatctgtattagtcatacatatgtgtatatgtacatacatgtatgtattctgttggttctgtttctctctgaggacgaggtggcctagatccttccctttctgggtaaagggtggaagcagtgtggatcattacttagtgtgttctgatagccatgtgtcactatgtacttgttctttgtgtcttcacatctcttcctgttgcattttaaagcattttcatagtatgtggtgttgcctagcagagcattctcatagcaaaaaaatgtatatatatatacatatgcatatatatattctattggttctgtttctctggagaaacggtatatatatatatatatatatatatatatatatactctccctgtatatatagtatatatatatatatatacactctctctctatatatagtatatatatatatactctctatatatatactctcctatatatagtatatatacactctcctatatatatagtatatatatatatacactctcctatatatatagtatatatatatacactctcctatatatatagtatatatatatacactctcctgtatatatagtatatatatatactctcctatatatatatatatatatatatatatatacacacactatatatatatatgggaagagagagagagaaaaagaaagaagagaagagaagagaagagaagagaagagaagagaagagaagagaagagaagggaagagaagagaaggaaagagattagggaaattggctcacgtgattatgaaggctgaaaagtcccccagtatgccagccatctgcaagctggagatgaagcaaagccagtagcatgactcagtccaagtttgaagccctcagaccacagaagccaatgttgtgtctctcagcctgagaccaaaagcctgacaacccaggggattgctagtgcaagtcccggaatccaaaggtaggagaatctagaattctgatatccaagggcagtagaagacacatgtctcatctctgagagagaatgcaaattcaccctttctgtgcctttttgtttcatccaggcccccagctgactggatattgccatacacattgagagtagatctttcccacacagttcatcaatttacaagccagtctcctccagaaataccctcacagacataccaagaagtgttgctgtaccagctatccaggtatgccttaatctagtcagattaacacctaaaattaaccatcaaactaccagcgggaacacacagaggtctgagctctgatgaggagtctcctgtgaggtgaactaatgtgacagggcataaaacaatatacaaattgtattgatcctgaccttaagactttttgaaaccttcccagatgtcaggtggctcttttaacagaggccagcactgtaggctgacatccagttatccagagtttgagaaaagataaaatctagtaaaaggtacttagaggcaaatttgaggagatgagttataaaggacaccagactgccacgagaatgtcccttagactacataaatattagaaacaattaaaacagcatataaatgaggaattgtatcctaatgggaataaaatatgcagagaggaatgcattttctttctaataacctgcaaagagcatatgcacttatgtctttaaaaatagtctacaaattattcccattctgagctgttaaattgtatatatgtcctataaaatattgttgtatataccataaattacatatatgtatatatttgatttatttttttggagaatgtaaggggtgtggcaggttaactttccagctcaactatttgtcaggggcactgatgtcatcgagtcactgagaacctaagttctatttccccaggcagggctgggagagatgagatcctggcctggacctgaaatgggcacaaggttgttcttctatgtggccctttgtctcctgtggacaggtgagggctggtcacaggtgggcttccttccctagaattcccaaggcctcaatacaagtctttttcttgggattacaacatcagggtctgttgttttctattacaggacacatggatgctggaatcacccagagcccaagacacaaggtcacagagacaggaacaccagtgactctgagatgtcaccagactgagaaccaccgctatatgtactggtatcgacaagacccggggcatgggctgaggctgatccattactcatatggtgttaaagatactgacaaaggagaagtctcagatggctatagtgtctctagatcaaagacagaggatttcctcctcactctggagtccgctaccagctcccagacatctgtgtacttctgtgccatcagtgagtccacagtgctgcatggctgcctcctctctgcacgtaaacagcagttagaaagactgaggttgctctgtgtctatccccacccttggaagtccaggcctccatagaagtcagagggccctggccagcctggaagccatagagcaggggccttatgaccctcagtgctgacgtccattcctaccccagtctcagaccaactggaggtcaccccaacacacttagcttgccaagtctctcttctgcagctctcttttgctgcttgcagaaaggaaaaggcatcattagttgaggttagcgatgattctcttaaccccaaagcctggactcccttctctcccctttgggcttcagtgacttcttcatctgcccctttccccagctccactatccttccactcatagtcatgaaccttcactcctgacctctgttcctggctgcctttcttctatgggccaatagcctcatggggccctctatcatttgctcttcacctacatctccatcatcattttgcacaagtctcccctggctctctctgctccagccatgctcctttatgttcagttatttcctcatatgtgttatgctgtttcccaccctggggatgtgtgtttttacagattatttcttctacactgaacatatgttcctccctcttattcctaagtctctacttcatttcttacatgaaagtatatttcaggtacatttactcttaactataaacagaaaaacttaaatttcactaaaagaaattaaggaaaatatttttatcctttgagtgaagacttttttagtggaaacacaaaagaacacatgccataaaaaaataatactggatgggcatggtggctcacacctttaattccagcactttgggaggcctaggcgggtggatcacttgagcccaggagttcaagaccagcctgggcaacatggcaaaacctcgtctctactaaaaacacataaattagctgggggtagtggcgtttgcctgtaatctcagctactctggaagctgaggcacgagaatcacttgaacttgggaggcggagggtgcagtgagccgagatggcaccactgcacttcagcctgggtgacagagcaaaactccatctcaaaaaataaaacaacaacaacaaactgacattagttgtattaatcatgtatcgaaacacatgataaaaaatgaaaagtcaagccacagcctggaaaaggcataaggaatgcatgcaaatgaggaagaatcagcatgacaccatttatgttcacaaaagtcccttggctcccctacagttccaggcttcacatgcagttaaagtgctgggaacatatgaagaggttctgaataactggatgtgtgcagaactgatgtgggcaatcccaagtctggcccttagaaataacttgtggcagccacgcgcggtggctcatgcctgtaatcccagcactttgggaggctgagatgggcggatcacaaggtcaggagattgagactatcctggccaacatggtgaaatcccgtctctgctaaaaatacaaaaattagctggatgtggtggtgtgtgcctgtagtcccagctacttgggaggctgaggcaggagaatcacttgaacccaggaggcggagactgcagtgagccaagattgcgctactgcactccagcctggcaacagtgtgagattctgtctcaaaaaaaaaaaaaaaaaaaaagaaataacttgtggcactgtgaagggagtcctcaagtagacacagaaattagctgcaaagactcatgggatatagcatacagttgcacttatggttaagatttattacagtgtcatagtaaatattcagcagcggatcatatgaagaaaacacacaggaggaatctagaggagttcacacattggcttccttatgctctcttcctcccgggaggggtcacacagagctcacttcttccagcaacaaaaatgcattaacacgtgtgcaatgtttctgcctgtggagctcatcagagactcaacaccccagaggctttagtggaggccagtcatggaggcactcactgcctagtatgaacccaaaatccacagcccagaaggaaatctcggtattcagcacaatactgtttgcaatatcagtctaggccacaatgagctactcctctcggttaggagaaactatgtcagtgcagggcactgctcaccagccagcttcccagatgtcagccaaatgccaacctcacaagcaggactttctaagcaccacagtctcaagccttgctgttgactgttttctgtacagatcccttcaattcttttgccatgccctaataaacctgggagctacgcaatacagattgactaatgataatatggaagcagcctggctcactgggtcataatttggtgaaaaaccatgaaagaaagctacttatggcctgctgggctttgtggacatgggaagtaagacttcatagaattaagccaatgagattttaagatttatttttatttttttttctgtagcatagctgttcttatctaatagagttagtatctacaatgggtaaagcattctcataacttactaagacaatccaataaaatggcaatacttagtctaaataggcatttcacagaaaagtaaacataaattaacactaacataaaaataggttcttgggctaggtgcagtggttcattcctgtaatcccagcactttgggaggctgaggtgggcagatcacttgaggtcaggggttcgagacaagcctggccaacatggtgagaccccatagctataaaaaatacaaaaaattagccagtcatggtgggatgtgcctgtggtcccagcagctactcgggagactgaggcacaagaatcacttgaacctgggaggcagaggttgcggtgagccaagatcaccccctgcactccagactgggtgacagagcaggactccgtcttaaaaaaaaaaaaaagaataggttcttaacctcacttagaatcagagtattccaatctgaaacagtaaattatgaatgcaaacttatcagattttgaagactggaaagtcttcaaagaaatgatagtcccaaatatgagaaaagatgtggactagtggaactgtattatactacagaagaaaattataactgatatggttttgttctgtgtcgccaccctcatctcaaattgtaatccccatgtgtcaagggagggaactggtgggaggtgattggatcatgggggtggttttccctgtgccgttctcctaatagcgagtgaattctcacagggcctgatggtttatgagtggcagttttcccttctctttctctgtcctgctgccatgtgagacgtgccttgcttcccttctccttctgccatgattgtaagtttcctgaggccttctcagccatgtggaactgtaagtcaaataaacctctttcctttataaattaaattacccagtccctggtatttcttcatagcagtgtgaaaacagactaatacaataattatatcagaaaaccctttctgagatatattctgacaagcaacattttgaaacaaattagcaatatagttgaccctctatatcagctgatttggaacccaaggataccaaaggctgacggtaaggaaggtgggcacccttggattaggatatcagcagggtttcctggaaccaatcccctcaggatactaagagatgactgtgtgtttaaattacttgagttcctttcattgtctttagggtccatcatggagaattgagttgtcaatatttattttagccattttgaaggttttaattgatatttaaaaattaacacttaaaaactgtggttatacatatatgtataaccatggttttacatatatatatataatatatagtatatacattaccacagttttatatataaatataaaatacatattaccacagtttttaaatgttaatttttaaatgttttatatgtacataaaacatacaatttttcaccttaacaattttaaaatatacaattaagtggaatcacgtacattcacaaggttgtagaaccatcactgctgtttccaaatgtttttcatgatctcaaagagaaactacacccattaagcaataactccatctttcccatgcttctcagcttctggtagcctctaatctaccgtttgtttatatgaatttaccaactctagatagttaattgatgggaaattataaaatatatctccctttgtgtctgtcttctttcacttagcctaatgctttcaagattcatccatattgtagcatgtgtcagaattttactcctttatatagctgaataatacttcatcgtgtgtatagaccacattttgtttatctcatcatcagctgatggacttgtgggttgtttccaccttttgactattataaataatcttgcaataaacactggcctacaagtatctgtctgctttcctgctttcaattattctgggtgtatacctaggggtggaattgctgagtcacatgggtattctacatttgacattttgagcaactgcccaacagtgttttacagcagcctcagcattttatattcccataacagtgtaaaagccttccagtttcttcacagccttgccaacacttaatttctgttttgttcttctttttaaaaattattacagccatgctggtaaatgcgaagtgatacctcattgcggttttgatttacatgttcctaataattaatgatgttaagcatctttttttgaacttttactttaaatttgaaaattgtattatgtatacttcaggtacataacatgatatgatgagatacacacctataggaaaatggttactatagtgaaacaaattaatatagccatcatctcacatagttacccatttactccctgtggcaataacagatataatttactcatttagaaaaaattctgaatatatgaactatagttttcatgtggcacattagatctttagacttcttcatcctgcctatctgctatcttgtatcatttggcctaaatgttcccatttcctattccctccccctgccatcctcccattaaccactatttcattctctctgtatatttgagtttttacaaatttcacatataaataatatacactatttctctgtgtctggcttatttcacttagcctaatgtcctccaggttcatctatgtttgttgtggtaaatggcaagatctcattttttttttaggatcaaataatactccattgtatatgtatgccacagtttcttcatccatttgtccatcagtagacacttaggttgtttccatatcttggctattgtaaataatgctgcaatgaacatgggagtgcagatgtctccaaaaggtgggatttcattttctttgtgtatataccaagaaaagagattgctgggtcatataattctatttttaatttctttaggaacatctacactaattttcttaatgagtgcatcaatctacttttccaccaacagtgtataaaagttcctttttctctacactcttgcaacttatctttttaataatagctatcttaatgggtgtgaggtgctatctcatagcagttttgattttcacttttctaacatttagtgatattgaacatcttggccatttttatgccttcttggtagaaatgtctgtttaggtcctttgctcagtttaaatagggttatatgttctcttgccaaagagttgtatggggtctttatatatttggtatattaatctcttatctgacatatggtttgcaaatattttttccaaatccataggttgccttttcatgttgttgattgtttaatttgctgtgcagaagcttttcagtttgatttagtcccatttatttttgcttttgtagcctgaactttttgtatgatatcgaagaaatcattgccaaggccaacgtcaaagagcttttccaacatgttgcatgtaataaactgaacttagatagaagacctaaacattagatattaagcatcttttcatatattattgatcatttgtatatcttcttaggaggcaatggcttttcttttccagttgttttttagtttttctttgtctttagattttagtagttttatgattgtaaggctaaatgaggttggggttgaacttcacttgggagatttgtcgctgttagtgtttttagtgcatattctgaaacatttttaatagactgtacaacagagaataagtaaattcattgacattactgggaaacagagttcttacaaagggaagagagatacaataagaaatagggaaagacaaggaagaaatctgtggtgtttatttgaattggaggtatcaaatatgaactattatttaaaaattatgtatttcctaactctaaccatacaatatgtaagaagcaatatgaagtcgatggacaattgctttatttctttgtacttgtgttcccagtagtaatgggcagaattattgcatgttatttaatttctaaatgtttctaaaagaaacaaagcagaaatggcttcttctagatccagagcagggaaagtcaaaaacatcttttggcagaaatcaaggaagtttcatgacccagaaaacatagaaaaaagccacagaaccagtttcatggggctcccactagccaaacacgagtatctaaacattagagcataataatgaggacactaaattataacaaattttaaaaatctataaggctataatgacaataaaaagatgtaggtaagaatgtcttcattacagaataatgctagttactaaatttcattagaaaatcaatgtagccattaatgtagttacagacagagaccatcagttgatgtcaaaaccaacatctgaaaggttattggagaccaagatatctatattgtgtcaaagtatcactccactaattgcttattaactataaaatataaatgatatctttgcaatggagagatctgatgtctgtgatgttaaatttagtatcgccaaaaatgtgtaaagacagcattatatgttcttgtaattgatcggatgcaatgggaaacacacatcaactatggcatggtatttgccaaaatatttaacctctgataatgtggaaattctgattgggggtcattttaccagtcagctgacatggactcttacaaaaatcaagaccatgaaagttggaaaatataagtgggccaaagagatgtctagtttaaaagtagctaaaaagacctgacaaccaaaagaaatgcataatctttgataatgtcctgtagaaaaaaaattaaaaccaaaagacacattggtacaactggagaaaggggaatgtgaagcatatatgagaaaataatgttatatgaatattaagtttttgagtgtaataaaggcatttgtggttttctaagataatggcctctttttaggagagacatactgaatcgttaagaataaagtgttttatttcagaaattgagggtaaaatacacaaaaagagataaagcaaatgtcaaaagatgttaataattgaaatacattttaatattctctttgttgtatgattcagctcttccaaaagtgtcagttttttaaataaaattagaagaaaaaaatcttaagatcttgaaatgttggcatgatttcagttttgtggtggctatttattatattcattttcaatatctttgaaatattctataattaccataaaacaaacacacaagataaggtttcttttagccctatagtgtactttttctatagggacaggctatgatttttaaaagtccccccaaaagataagagaatttatagtctgaggacaaaatagctgatatctctgagatgagcacaaaacttagctaacaatgcatgtcaagaagctgtttagtaaatacacaggactgttttaactgaaacaggagattctgagttccctacaggttggtcaagaactcacagatgttggggaattgcctgaatgtaagcagaggagtggtagtgcttgtcctaaattgtggttggataatatgtgtttgtgtaacagggagggggctctagcaggactgaaacactgtctgtggggaggagtctctagcaggacagaaggatcacatggagctggaatgaattcccttcagtcccccacaaacactgtctgatagtagccctgatctaatttccattgtttagaagtcccaccactctccctgagccatggctggagggcctaagcccagtggctctgaaccattggccatcaggaggcactgaggtttgatggcgtccaaatgtttttgaaacagggctaagtattgcctgagaagttgagtttaaaggaaaagtgtggcttcatcctagcattcagtatctagtttgcaggtgttttgagtggtcaatggaaactcatctttctccactgatgccagtgggttctgttcggcagtgaaatctgaactgtagcaaaccattgagtggagaatcttctgagcccacttgaggggtagatggaggagagccaggagccaacctgaatgctcacagacccatgcagaggaacaagtgcctccttgggagaacatcagagaaaccttagcacctaacctattctagtgtgtcctggacgatggacaggagaatgtaaggggaatgtagaagatgggagtggacaactgtagatgtttccagatatctcaaattgcagtaacaccacaaatattcttaacaagaaccagattttccagaactctggcatttccttccctgagcaatgagacggccctttgggccctgacacaatcatgggtgttttttgttcatttgttttggtgctcaggaagcaggggaggcatgagaatacctggggaatgtctttcctagaaataggatgccccaatttcaagtatttcacatgcagcttgataggtcctgtctccagccacccagcctccactctctcaatgctgttgtcatccagggccctaagctctggtcacacggacggaagaggtagtgacactgtgatgtgaagacactttccaccatgaaattattaattggtgtcaatataaggcaggctccgactagcagcttttctaccacaatgatagacaatttatatggaaaagagatggttctgataattctacactcacaggtcttcacctgataaccttgacatgtgtcccctaggttttaggaacttggatttctttaggctgagttgtactattccctttctctgaacacacatgtcattggttagttcattcatattgattctcagggcttctccaatccctcaagccttcccactctaccactcagataaggagaagtgtgtcttaactaatgttgcataattttttaaaaattgctggatactaacactgcaattcaattgtaaaatatgatagaggtgtaagtgttttagatcccagaagtcctgctcaattttgcatttattgttggatattcaccctgatattttcaggaattagagtgttcttcacccatttgggttaagatatcagaacttactttcaattcattggtgaccagagactacaggcagaatcatagtgaaggcttgatacataatacataatgaagattgataacagcaaaaagggaactagtcattggccttcagataaaatgaaacctcccaactttgtgctcagggaattattttacccctttaggttagagtatgtcagctagttcaatgcagttctaggataaagctgtgtcaattaccctagaggactgggagcatggaggacctggtagaaaagaaatacccaaagagaaggaaaattacacacaaaatcaagaggtcactaattgatatatctattttgagttgcctttgagacttccacgtagaaacatctagcacaggataggcctagagatgtagtgacagatctaatcccccaagccctgaatatgtgagtgaggacgcttggatgaacttccagtctatgaatacattaaacaaacttttagctctgttttagtttacaacaactgttttctaagaacttaagcatttgtggagacaatgatgtcactgtaggaacttctctgtaaggacagcaacatcccacttcctctgctcctgctcacagtgaccctgatctggcaaagcttccatcctgccctgaccctgccatgggtaccaggctcctctgctgggtggccttctgtctcctggtggaaggtgagtcctaggaacaccatgatcctcacataatctcccagtgattattctagtcatttccttctattttaaaattctttttcccccacagaactcatagaagctggagtggttcagtctcccagatataagattatagagaaaaaacagcctgtggctttttggtgcaatcctatttctggccacaataccctttactggtacctgcagaacttgggacagggcccggagcttctgattcgatatgagaatgaggaagcagtagacgattcacagttgcctaaggatcgattttctgcagagaggctcaaaggagtagactccactctcaagatccagcctgcagagcttggggactcggccgtgtatctctgtgccagcagcttagacacagtgtagcagagacacttccctcctgtgcagaaaaccgcaggactctctcctctctactcagctcacagcagcctttccttattcctcatcctcccaggaaagaagtgagttttcagatatagctaggattcatatagtgggaggaaatgaactatttcttacaacatgagcgctataattgttgcttgaaaatgtgtctcagggatttgaaacacttcttggggacaactcaagaaacctaaagtgacttatcagagattgagtcctcaggggtagtgatggtttatctcccataaaagtatgtgatcatgaaacatgtacaataaacttaataatacagatagtgattataccaagcagcaaacagcaggctccccttatgtagttgtcagcatgtgaatgacttgttacccttagtgacaccccggctgtctagcaaagtctcaacacacagtatgtgtttggaaatctttttccttctgttttatttttggtaaagtatgctaataatgatgttgttaatgatagtgattataatttcaggtatgttattcagccctttttccagttcaaagaaatgcacacaaatggataccccggcaaccaggtgcaaatcttagctccagatgaattctacttctcctgaactctctaactcttctatgtaatcatcccagcccaagaatatatctagacctggaccagtcagttcagaggacatttctacgtgtctgccttgtatattaaaagttccttagtggattgaaatattccttgtaagaacttctgaagcaatcaattgccctctctgataatatacactctgtgtgtctagctccatattcattactctacttctgcctaaactctctaatactagaaatctttctgaagtattggttagaattacttaaaaagcagcatactggaaattgtctgaaagcactgtcactgtccatttgcccctcctgacttccctcccctccttatccaatctaatacctgatggcaagtcaggctttatttccatttgttcattgcacatctccctgtcctttattcctgtaataaaacctcactgatgtgatggattaaaatgaccactcactcaccatctccttgtcaaaatttctatttttttcttttcccaatctgctatgttagttatagttaataactccctcataacattttctgagatcactttttattatttgaatataggacacacagttgtttcagagtctgtctgatcattttcacctctaagatcttcataggatatttttgtgattttctttttgtgctgcttctcagttatggtgcttgagttttcatggcatttgtatttctccttaccaatctgatgatgtttgacactttgccaaacactatagttgtagaaataattttgggggtaggatggatatttttctgcagagatcatttttctgtgcttctgaaagtgcatgtagatataaacagtcaggctccctgaatcacagtttaaggcttgaggtgtcctggagcatctggagaacaggtttgtctctggcttattgttactagtggaatttggcaatgacacgttcggtatgttctgggctttgctttacccccgtggcctgtgagtcagcttcctgagtgctgagtcaggatctgcaaatgcccgctagggcaaatggactgctgtgctcacctcccggagctcttgccctcaccaacattccagcccaattattattatttttttaggactttaactaaaatttttaatgttgtttttgatattttttttccaactatgtagataacaacagaaagagtgagtgccattatccttaattattgggattaaggtgaaaataactttacctggaattctaattttccttgtattttaatgttagattctttgtgatttgtctaatattcaacttaaatggtatagagatgttaaactctgatatcaaatactttaaaaaaacttatcaagaccattcataatccaattgagacatatctttgtttggggcatgttgtttttagagtattcttctactgttatttatttctatcacataacctctgtgttccattggaccatatggcaagatgggaaagacaatcaagagaatgctgagatctggtcaaatagtacagattgggcttcaaattaatttaattactgagttctgggggtggatttgtgctgttttatgagtatttcctggggcaatggtcaaaattagagggagtaactgatatgtggctattgttttaccccgtttaaagccaatctcctgggacaacacaccccattttgtggggcaccccgaaagtaataatcctgttttaatcttcctattccttgccaaatcttctctacagaagggaaatcagttatactatttcctctcttcattttagtttagtctctccttattttcccgttttcctcctggttccctagagaaaagtagattattttcaacatgtgctaagatcagtgaggaactctctcttccatgcagggtggcctgcagtttggaggggatagggaatgggttaaattctgtttcagcatcatgttagccagcccatcgagtttcacaatgagacctgctgcttatcagtattaaaactgacattatgtttccacctttctgactgcattgtcaatgtctggggtgtttctgtcctaccccatagcactaatattatttgttggccttttaacaccaactaatcataatatcctatatcccttgtactcagtgaaataaagctcaagtccctgtgtcctggcaaaagagagcacatttgtgctgttctgcctactggccactaggaggcactgtggcttcgatgtcatccagagtctatggggaggagctgagattgctccctggaagatggttaagaataaccccgaggttggacctaaattcagggagttggtttgcagatgtcttgaatgatggctgggaataaaggaattagtaaccgacgcttcctccattgtagaggtgggttttgctttaaattgtgctttgagtggggctgagtgacaggtgtactttgcagtgcatatacctctgagctcgcttaagatgtaggggcacaaggagctgaggtggtgcagggcccatgttctgagcttggaaaaccagagaagcagttcttgtgtcaaaggagccttggagagcctggccccaaaccagcccaggccaaccctacctgctctgtgagagtagaacagcaagaaagggaggtgctacccaggaccacagcagagggaccctgtcgccagggagatgaaaatcacagtgatgccacgaccatatccacgtatgaggcatagtccagtgtgtctcctggaagaagatgaagcctgggcagacataagaatatgtttttgaataggcttcccttggcctgattttaaattccttccatgtgatcatgcatctgtctgtacctgtattttgtacccggcttctgcctctcacccatcagtcccatggctactagaaggtattaaatttctattgacaaaaattaccactaatttggtggcttacaacaataaaaatttattatcttacagttctggaggttagaagtccaaaaccaggctaaaatccaggtattggcagggctacattccttcccgaggctctcagggagaactatttttctctcctattcagcttctagaggccaccagtgttccttggctcatggccccattcaatcttcaaagccaacaaggactgggtgagcctttgctcactctgcatcactctgacactcactcttcatcctccctcttccacattttaggacccttgtgattacattgggcccatctggaaaatccaggacacgctccccatattaaggccagctgattagcaaccttcattccatttggaacattcgtttctccccttgccacataatttaacacattcccagtttctgggaattagacatgtacatctttgagaggtcgtcacgctgcctgccacacttgctacctggttacacgaagtagtaagcaattaactttttgaaggcagaattatggccatagttttatatcctggatccaacagaccctgcaaaaggatagagcccacatggaaatagcccctccagtaacacaagctagtctgcaaactaatgcccttttactttgggaagtgcttttgactgcaggggactcagaagcatgcctctgtgccaacagcaaaaatgtgcccttctcttttgttggcaagtaacttaaccaaccaacccaaaaaaaagatctttctctcagctttccataatctctgagacgaagtaggtttggagaagtggggttacaggggaaaaagccaggtgttaatgatgaaaaaacattgaacttttctaggggtagtaataagatttaattcaagactagaacattttagctgcaaatcttcaagaataagacaatattatcccctttctgttttattgtgggactagagaatgtgagagaggttacattccatgggctttgggaatttaatatggttcaaggataaacacacccaggtttttcactgcagagaagagcttcaaatataatcagttttcaggtcatcagctcagctcttgtatccctaacaatgcagttgacatgcgtcttctcagatgtctaactcctaactcactgagggatactttaagtacatataaaggactagaagcaccaagctaccagtgagaggaagaggagagtttgcagagaagctggcttgaaataagacaatgagttcatctttaaatacttgccatttgaggtgcagatggatatagttggcaggctcctatgtaaggcatgttatggagaagctaccgtgaattgataatatcaaaacaaatatccagggagcctctgcaagtgtgcatctctatttcacaccaattatagttgagttaattcctgcctgattcatctcccagagatgcagcctcctcttaaagaagttgggggtggtggcccattcagtgatgtcactgacagatgcattctgtggggataaaatgtcacaaaattcatttctttgctcatgctcacagagggcctggtctagaatattccacatctgctctcactctgccatggactcctggaccttctgctgtgtgtccctttgcatcctggtagcgagtgagtcttcagaatatttgccatcatcaggctgggcttctgcatggatgatctcatatattttccttattctgacgcccaattctgtcttctttcatagagcatacagatgctggagttatccagtcaccccgccatgaggtgacagagatgggacaagaagtgactctgagatgtaaaccaatttcaggccacaactcccttttctggtacagacagaccatgatgcggggactggagttgctcatttactttaacaacaacgttccgatagatgattcagggatgcccgaggatcgattctcagctaagatgcctaatgcatcattctccactctgaagatccagccctcagaacccagggactcagctgtgtacttctgtgccagcagtttagccacagcgctgcagaatcacccctttcctgtgcagaaaacccggtgtttccccttctccttctacctcccagcagtcctgggcaaagtctctgctgttcctccctccctatgagaaaaaagtggtttgggggtatgaaaaagacagaaaatgagaagggatcaacataggaaaccttatgttggtttgaggattacaaaatgggttttgaggattccttaaaaattgtctctgctcaaaacacataggagtaagataaaccttggctactgacactggagatttccctgccctcctgcatttgccatcccatgagaatggtgggggctcttgagaagggctgcattttctgaactgtgaggccctcttcattctctcctaactctaagctgcaaacagaaatttccctcacacgttttctagattgtaaaagaaagttcttctttactatgattgtggacgttcctttataatgccaatttcaactttacattacttcaggatttttcactactcctaaagagtgtctcaaatgtggctagagcaagcaggttagtacactagatgtaagctacctggcctggaatctaaggatccatttgtctctgttctgcgtaagatgagccgggtgctggccaaaggctgtgcacactcacagagcactgatgacgcctcctggtaaggacccacactggggtatctaaaagcagacaggcatgtccagtcttctgttgccctgtttcctttctgattatatgtccttaacacacaaatttacattttccttcttatttatatgagaagtttctatacaatacctgcaatccattctgagtggttataatttctgtgtgatattcatatttacatgctgattccttctaaatacctatcatggtatcattgacaactgaggcaaaagacccctatattttgagtgcccaaggccattgaggttttttggagctctgccataagcccaattccactgtgtcattttcctatttttctttccttttttgttttttgattagtgggtcctgactttcaagatgaaaatagtgcagaattcctccctgctgcttccagatcattttccttcctacttctctaaagcccagctgcattataggcttcctttagcctgattttaaattccttccatgtgatcatgcatctgtctctacctgtatcttgtatctggcttctgcctcttacccatcaatcccatggctactagaaggtattcaatctctgttgacacaaattactactaacttggtggtttacaacaaaaactaattatcttacagttctgcaggtcagaagtccaaaaccgggataaaatccaggtgttggcagggctgcattccatcctgaggctctcggggagaactgtttttctctccttttcaacttctagaggccaccagtgttccttggctcatggccccattcgatcttcaaagtcaacaaggactggctgagctttgctcactctgcatcactctgacactcactcttcgtcccccctcttccacattttaggacacttgtgattacattgggcccacctggaaaatccaggatacactccctatattaaggccagctgactagcaaccttcattccatttggaacattcctttctccccttgccacataatttaacacattccagtttctggaattagacatggacatctttgggaggttgtcatgctgcctgccacacttggtacctggttacaggagtggtaagtaattaaattttttaaaacagaattatgaccacagttttgtatcctgggtccaacagacctgcaaaaggatagagcccaaaggaaataggccctccagaaacacaagctagtctgcaaactaatgccctttaacattggcaagtgctttcaactgcatgggactcagaagcatgcctctgtgccaagagcaaaaatatgcccttttatggcaagtaagttaattgatcaactcaaaaaacaaacatttctctcagctttccagaacctctgagaggaagtaggtttggagaagtgggattaaggggttggcagggggcggagaaaggtcaacaggggaaaaagccaggtgttaatgatgaaaaaacattgaacttttcttttctaggggtagtaataagatataattcaagactagaacattgtagctgcaaatcttcaaaataagacaatcttatcctctgttttattgagggaatagagaatggagagaagttccattccacgggctttgggaattcaatatggttcaaggataaataaacccaggtttttttactgcagagaagagcttcaaatataatcagttctcagggcatcagctcagttcctctatccctaacaatgcagttgacatgcatcttctcagatgcctaactcctaactcgctgatggataatttaggtacacatagaggactagaaacaccaagccaccagtgagaggaagaggagagtttgcagagaagctggcttgcaataagacaatgagttcatctttaattacctggaatttgaggagatgtatatagttggcaagctcctaggtaaggcatgttatggagaagctaccgtgaattgataatatcaaaataactattcagggagcctttgcatgtgtgcatctctctttcacaccaattatagttgagttaattcctgtctgattcatctcccagagatgcagcctcctcttaaagaagttgggggtggtggcccattcagtgatgtcactgacagatgcattctgtggggataaaatgtcacaaaattcatttctttgctcatgttcacagagggcctggtctggaatattccacatctgctctcactctgccatggactcctggaccctctgctgtgtgtccctttgcatcctggtagcaagtgagtcttcagaacatttaccatcatcaggctgggcttctgcatggatgatctcatatattttccttattctgacgcccaattctgtcttccttcatagagcacacagatgctggagttatccagtcaccccggcacgaggtgacagagatgggacaagaagtgactctgagatgtaaaccaatttcaggacacgactaccttttctggtacagacagaccatgatgcggggactggagttgctcatttactttaacaacaacgttccgatagatgattcagggatgcccgaggatcgattctcagctaagatgcctaatgcatcattctccactctgaagatccagccctcagaacccagggactcagctgtgtacttctgtgccagcagtttagccacagcgctgcagaatcacccctttcctgtgcagaaaccctggtgtttctccttctccttctacctcccagcagtcctgggcaaagtctttcctgttcctccctccccatgagaaaaagtggttttgggttgtgacaaagacagaaaatgaggtttcaacataggaaaccttatgttgatttgaggattatgaaatgggttttgaggattccttaaaaaattgtctctgctcaaaacacataggagtaagataaaccttggctactgacactggagatttccctgccctcctgcatttgccatcccatgagaatggtgggggctcttgagaagggctgcattttctgaactgtgaggccctcttcattctctcctaactctaagctgcaaacagaaatttccctcacacgttttctagattgtaaaagaaagttcttctttactatgattgtggacattcctttataatgccaatttcaactttacattacttcaggatttttcactactcctaaagagtgtctcaaatgtggctagagcaagcaggttagtacactagatgtaagctacctggcctggaatctaaggatccatttgtctctgttctgcgtaagatgagccgggtgctggccaaaggctgtagcacactcacagagcactgatgacgcctcctggtaaggacccacactggggtatctaaaagcagacaggcatgtccagtcttctgttgccctgtttcctttctgattacatgtccttaacacacaaatttacatttttcttcttatttatatgagaagtttctatacaatacctgcaatccattctgagtggttataatttctgtgtgatattcatatttacatactgattccttctaaatacctatcatggtatcattgacaagtgaggcgaatgatccctgtattttgagtgcccaaggcacttgaggttttttggagttctgccatatgccaaattccactttgtcattttcccattttttttttttttttacgtgtagggatcctgacttttaagatgaaaatagtgcagaattcctccctgtgcttccagatcattttctccctcctactttaaagcccagctgctttgtacatattactttataatattaccccttctcattgtacctaccttattaccttcagaaattttcttttttttaatccttctgcctgctactaatccagtcatcattcttaatactattcatcacatagacaatttattcactcgcgaggcttctaagtttctcgacttcctatatcctgagtctttttcccctctaatcattttcagacttgtttccatgattatagaccattaaggaacaacaaagatctttcaatatttctatttaaattgtcctgtcgttctaccactacctcccttctgtctatatcagtaactcctacaattcttctatttctctgacctctccagttcatagagcccataacttttatttttttaatttttttttggtctttctaggatgttatttattaaaaatagattctctgtccctaccctcacccctgctggcaaaatggcctttcccaacatcttttcctgcatggataacaggtcttgaggacgcagatgtgcatcctacctaaactacaggctcaggcttttctgggacagtgaggcagcagctctgccagagccaagggtggaacagcacaagacgacatcagcaaaccctggtgcacctaactgtgggctgctatggagtctgggatggactggagttcctcctgctccaggcctcgggagacaaaatccacaaagagagacccagtggcccagcagcagccccctgagagcccacaactttttaactcttacgctttaattcttacattcttttaattatattttaagatttaagactataatatcaaccccgattaaagccaactccccgtaggttcctatgaatggcagagttgggaggggcactaaaaaatccccgtgggaactcattcgatttatcttctgtagttgtcatagactcctcttaggttcctctacttctaatcttggcctccctcattctagccaccaacccagggtctactctcaatacagaagtcagagtgatcctttaggttagatgttgtcactcgtccactaaaccatacagtagattcccgtttcactcagagaaaagcctacagcctgcataggcctacgaggtcctcggtgatccccctccctgttgtatttcttgcctcctgtctgttcctctttcccttgcttattttttcacaacacagtggctttctggccattcctcgaatacacaaggcacacttctgccttagaacctttgctcaagctattccctttgcttggaacatccttctcccaagtatcccagtcaggcctgcaagaagcctgaattattctaccagtgacacaatcattttcctaaaaccacttttcaatttttatacattcaacaattctccattgttcaccagataaaaatgtcacctcgggagggcatttgaattttaaaacatttggaccatatcttatcttatttttgactactgagtaagataaatgttactttatcaagtgcacttcatacccttacaaaacagtcttacacaatttaatgcctgttcatacatttgttcttgcaatttctgctaccttcttcatattgttcaatacttctagtcactcaagacactactgaatgcttctttctctatgaagcaggaaatggttctatatactctattttcacagtggagtaaaatagatacacattttaggaacaaaacaaccatgcagattatagaaattaaactattttttacatactttcgaaggtgaggaagttcagaagctcaaatatggttaagatatgttttgcttctatttaagtccacattccccaccactttaaatcttccaagaaagatttccctcattcaaattaaaaacattttgatacaagactgggggcagggaagtgctgggtagagaagggcggggtccctggtgagggctccaccctcgggcctgtgcccacagacctaaatgaggacaggcgtttctgtttttgcactcaaaaagttgccttttggcccgccacgcctcccatcctgtgcccatataaacccgagaccttaagcggacacggacacaagaggctggacatctagaagagcagaagaatacagcagcagacaccggcagatcagcgatggcggaaggacacgaatgcgaggggagttcagccaggggaagtctgcgagagtcctgccactgggcagccaactgcaggggaaaaccaccgttccactccatccctcgacttctggctccccatctatctcactgagagccacttacaccacttaataaaagcttgcactcaacctttcagcccacatatgatctgattcttccagtacactggtcaagagctcaggctgtcacattggccccctgtccttgcaataagcagagggtctattgagttgactaatgcaacgagacggcagacggcatagctgaaagagtgcactgtaagtcctagacgctgccatcccttggagcccaaaagcactccccatggcctctgcacctgcccgtctgcatgctcccctaggggtttgagcactggggcaccagtgaagtgagccatccccctgtcacatgtcctgcgaggagaataagggaattctccggttttaacttaatctgtaaaagaccttgttaagaggatgaaaaagaagccacagcaatggataaaacatttgtaaactacatatccaacaaaggaatattatgactgtttcgagatttgcagaactgtctatttaacccatagactcatgagcaataataaattattattgctttaaccagtgagatttgagtgaggcttgttatacagcattactgtgcaggtgtcaattgatatactctatattgcaatatcgattcttaaattgtctaaccataatcctatagaccattactaattccaagcttgttctttttatgaagagtgtcgctcaactctgatgtctttgttctgtttaatattttgatttacacatgaacacagttcccagcagctttcaaacctccagaagcccttaacatttctgattctgaaaaatatcttttcttgttttcagcattttttattgttattttttattcttttgtatgggaaggtactcagtttaccatcctgaattagtaattctttaaacatttttgcaattccagtaattagagatattactgcattaggcattgaagataccatggtctttgcatttcctgcttgcatatcgagtcctatgaactatttctggtgtctctgagtcacttcccagtgtggtcattggcttttactgagtctgattcaccgacctttactgagcctcactcaccaacctttggtcattcttggacatagaagcacaaattcaacagtgttgtttcccaaaatatgtaatatgcagggaaaattacttttcatgtaaaatagacgtgtccttttagtattaccagtagattattctaattatagactagtaacatccaacagacttatttgggtttagtgacagacctattactgtgttcgctcctcagttcaaatacagagtgtgtattttgcatcgtgtggctgcaagttttggggttctccatcatatacttagctatacaatgccagctactcttgtctggatattttcccaaatcctggatgattacaaacttctccttcactggtgaaattttttttttttttttttttttgagatggagttttgctcttgttgtccaggctggagtgcaatggcacaatcttggctcactgcaacctctgcctcccaagttcaagtgattctcctgcctcagccttctgagtagctgggattacaggaatgtgccaccatgcccggctaatttttttttttttttttagtagagacagggtttctccatgtttgtcaggctggtctccaactcccgacctcaggtgatccacctgctttggcatcccaaagtgctgggattacaggcatgagccacagtgcctggccaatttttttttttttaatgaagggtcaaacctgatattaagtctttcagacagtaagaagataactattcagggtctacaagatggccaattagaagcagctgtggtccatggcactcagggagaggaatgaaacggggtgagtgaatttagcactgtcaattgagatattcaggttctcacactgggactgtctaggcaaacaactcaacccacagagaacaaagaaaagcagggggtgtggggcatgatggcccaccaggagcagcacagagccaaaggaacccccacccccagccaaaggaagcagtgagtgattgtgtgaccctgcccaggaaacgactcttctcccacagatctttgcaacacatggatcaggagatcccctcacaagcccacaacaacagggccttggatccagtacacagagctgcatggagtcttagcagagcagctgctcaggcacacacagagacccaggagttttacacattccagcctcaggatccccagcaaggcaggaaatctgtccacatataaccctaggaagggagctgaatccagggagccaagcagcatcattctgcaggccccacttccatagcacctcacaagttaagacgcactggcttggaattccagatagccaatagcaacagcctagaatctgcctgagataagtatgaattcctggggaaagggggtggccaccatctctgcagtccagtagacttagctgtttaagcctgccagctttggagaatacaaatggtctggatgaggaaaggttccccataatcagcacagctgccttgccagatcatggccagactgcttctttaagcaggaccttgatccatcccttctcagtgggcaggacctccctgtggaggcttcagccattctagccagtgttctacattgagagctctgatctctccctaggatggagctcctggcagggaggggcagcctccatctctgcagttcagtcaactcagtccttctagcctgttggctttgcagaatcccaaaatggtctggacgagaaagcctcctcataatgcagcacatttgctctaccaaaaagcagacagactgcttctttaatcaggcccctgatcctgttcatcccaactggatgagacctcccaacagggtctccagccacctcctacaggtgtgttctggccagcaacaggtcagtaccccccagggatggagcttccagaggaagaagctggctgccatctttgctgtttcacagccttcactgatgatacctccagtatgggaaaaaccgaggcaactaaggtctggagcggacttccagcaaaccacagcagccctacaataaagtggcctgactagtaaaggaaaaacaaaaaacagaaaacaacaagaacagtatcaatgaaaaggaccccacaaaatccaaggtcaaaggtcagcaagctcaaagattgaaggtagataagcccacaaaaatgagaaagaatcaacacaaaaatgttgaaaacttaaaaagcaagagtgccttttctcctccaaatgactgtaacacctctccagcaatggcacagaattgagctgaggctgaaatggctgaattgacagaagtagggttcagaaggtggtaataatgaactttgctgagctaaagaagcatgttgtaatccaatgcaaagaagctaagaatcatgataaaacaatacaggagctgacagccagaataaccagtttacagaggaacatgatcaacctaatggagctgaaaaatacaacacaagaccttcacaatgcaattacaagtatcagtgggagaacagaccaagtggaagaaggaatctcagagtctgaacactatctctcttaaataagaggggcagacaagaatagagggaaaagaatgaacaacaccccccagaaatttgggattatgtaaagagactgaacccatgactgactggggtacctaaaagagataaggataatggagtcaaattggaaaacatacttcaggatatgatccagaagatctttcccaacctagcaagacacaccaacattcaaattcaggaaatgcagagaaccccagtaagatactccatgagaagataaaccccaagacacataatcatcggattctccaaagttgaaatgaaaaaaaaatgttaagggcagccagagagaatggccaggccacctacaaacggaagcccatcagactaacagcagacctgtccgtggaaaccttataaagtacagtggttggaagctattctttaacattcttaaagaaaagaatctccaacccagaatttcatatctgaccaaactagcttcgtaagtgaagaagaaatacgatccttttcagacagcaaacacttaggaatttgtaccacaggactgccttgcaagagctcctctaggaagcactaaatatggaaagaagaaaaccattaccagccctacaaagcacactgaaatacacagaccagcaacactatgaagcaaccacataaacaagtctgtgaaataaccaggtagcatagtaatgacaggatccaacttacccataacaatactaacttttaagtgtaaacagggtaaatgccacaattaaaagatatagaattgcaagctgagtaaagaaccaagactcactgatatgctgtctttaggagacacatctcacatgcaaagacaaacataggctcaaaataaacggatggaagaaattttaccaaccaaatggaaaacagaaaaaagcaggggttgcaatcttagtttctgacaaaacagactttaaaccaacaaagaacaaaaaagacaaagaagggcattatataacggtaaagggttccattcaacaggaagagctagctatcctaaatatatatgcacccaatacaggagcacccagattcataaagcaagttcttagagacctacaaagagagacctggactcccacacaaaaatagtgggagactttaacaccccactgacagtattagaaacatcactgagaccaaaaactaacaaatatattcaggacccaaattcagctctggattaagtggaactgatagatatccatagaattcttcacctgaaaacatcagaatatacactcttctcatcatcatatggctgttgctcaaatcgatcacatatttggaagtaaaacattcctcagcaaatgcaaaacaactgaaatcatgacagtctctcagatcacagttcaatcaaattagaactcaagatcaagaaattcacttaaaccacacaactacatggaaattgaacaacctgctcctgaatgactcttggataaataacaaaattaaggcagaaatcaagaagttatttgaaactaatgagaacaaagagacaatgtaccagaatctctgggacagataaatcagtgttaagagggaaatgtattgcactaaaggcccactacaaacctctgctcaaagaaatgagagaagatacaaacaaatgaagaaacattccatgctcatgggtaggaagaatcaatattgtgaaaatagccatactgtacaaagtaacttatagattcaatgctattcccattaaactaccattgacgttcttcacagaattaggaaaaaaaactattttaaaattcatatggaaccaaaaaagagcctgaatagaaatagacaagacaatcataagcaaaaggaacaaagctagaggaatcatgctaccagacttcaaactatactttaaggctacaataaccaaaacagaatggtgctggtacaagagcagacacatagaccaatggaacagaatagagaactcagaaataatacgacacacctacaaccatctgatcttcaacaaacctgacaaaacaagcaatggggaaaggacttcctatttactaaatggtgttgggagagttggctagccaaatgcagaaaattgaaactggactccttccttacaccatatacaaaaattaactcaagatggattaaagacttacatgtaaaacccgaaactatgaacaccctagaagaaaacgtaggcaatctcatttaggacataggcacaggcaaagatttcatgacgaacatgccaaaagcaattgcaacaaaagcaaaaattgacaaatgcaatctaattaaactaaagagattctgcacagcaaaataaactatcatcagagtaaacagacaccctgtagaataggagaaattttttttgcaatctatctatctgaaaaaggtctaatatccagagtctgcaaggaacttaaacttacaacaaaaaaacaaccagacaaccccattaaaaagtaggcaaaggacgtgaacagacacttatcaaaagaagacatacatgtggccaagaaacatttaaaaaatagctcaacatcactgatcattagagaaatgtaaatcaaaccacaatgagattccatctcatgacagccagaatggctattataagagtcaaaaaacaatggatgctggtaaggttgcagagaaaaaggaacacttttacactgttgtgggagtgtaaatgagttaaaccactgtggaagacagtgtggtgattcctcaaaggcctagaggcagaaataccacttgacctagcaattctattatggggtacatacccaaaggaatataaatcattctattataaagatacatgcatgtgtatgttcattgcagcactgttcaccatagcaaagacatggaatcaacctaaatgcccatcagtgatagactggataaagaaaatgtggtgcatacaacatggaattatatgttggcataaaaagaaatgagatcaggctgggcacggtggctcatgcctgtaatcccagcactttgggaggccgaggtaggcagatcacgaggtcaggagattgagaccatcctagctaacacagtgaaaccccatctctactaaaaagacaaaaaattagctgagcgtggtggcgggcacctgtagtcccagctactcgggaggctgaggcaggagaatggcatgaacccgggaggcgaagcttgcagtgagctgagatcgtgccactgcactccagcctggatgacagagcaagactccatctcaaaaaataaataaataaataaataaataaataaataaatagaaatgagatcatgtcctttgcagggaaatggatagagttggaagccattacactcagcaaactaatgggaacagaaacccaaacactgcatgttctcacttataagagggagctgaatggtaagaacacatggacacatcacagggaacaagacacactagggcctgtcagaagacggttagtgggagggagagcatgaggcaagaaaaggtaatgaatgctggcttgatacctgggtgatgggatgatctgtgcagcaaaccaccatagcacatgtttacctatgtaacaaacctgcacttcctgcacaggtgccctggaacttaaaataaaagtcgaagagctccctctccctctccctctccctctccctccccctccccctccccctccccctgcctctgcctctgcctctgcctctctgtctcccctttccacggtctccctctgatgcggagctgaggctggactgtactgccgccatctcggctcactgcaacctccctgcctgattctcctgcctcagcctgccgagtgcctgggattgcaggtgcgcgccaccacgcctgactggtttttgtattttttggtggagacggggtttcgctgtgttggccgggctggtctccagctcctgaccgcgagtgatctgcctgcctcggcctcccgaggtgccgggattgcagacggagtcttgctcactcagtgctcaatcttgcccaggctggagtgcagtggtgtgatctcggctagctacaacctccaacctcccagccgcctaccttggcctcccaaagtgccgagattgcagcctctgcccggccgccaccccgtctgggaagtgaggagcgtctctgcctggccgcccatcctctgggatgtgagaagcccctctgcccggccgcccagtctgggaagtgaggagtgcctcttcccggccgtcatcccgtctaggaagtgaggagcgtctctgcccggccgcccatcgtctgagatgtggggagcgcctctgccccgccgccccgtctgggatgtggggagcgcctctgcccggccacgaccccgtctgggaagtgaggagccctctgcccagccgccaccccgtctggaggtgtacccaacagctgattgagaacgggccatgatgacgatggaggttttgtcgaatagaaaagggggaaatgtagggaaaagaaagagagatcagattgttactgtgtctgtgtggaaagaagtagacatgggagactccattttgttctgcactaagaaaaattcttctgccttgggatgctgttaatctataaccttacccccaaccccctgctctctgaaacatgtcttgtgtccactaagggttaaatggattaagggcggtgcaaaatgtgctttgttaaactgatgcttgaaggcagcatgctccttaagagtcatcaccaactccctaatctcaagtacccagggacacaaaaaccgcggaaggccgcagggtcctctgcctaggaaaccagagacccttgttcacatgtttatctgctgaccttccctccactattgtcctatgaccctgccaaatccccctctccgagaaacacccaagaatgatcaataaatactataaaaaaaataaaaaataaaaaaaataaagttgaatcaaagaaaaaaaaagtcgaagaaaaaaaaagaagataaccatttgaattgcctcatcaggtggcttgttatgggagaatgtatatttccaagactcttgaaattaaagagagtgagctatcataaacagtgagctcctagacagaaataatttagagtatgtgatagtaagcacacctgtcaaggctctctcctttgaagaaaatgtaatgaggaggactctgaaagaaattagagcatgtacacacaaagattcaaaatcaatcaacattattattacaaaagctgagagcagaattaaaagaatgcctgtgcttggaatacttgttatggagaattttaatttgctaagaaaatggatgagacactacagtattttgaagtgatacttccttctgatcatcagaacaggagcaaaggaagaatatttaaaattgaaagcttttatataattcttactgtgttttgggcatttcaagtgggttcattttccaagtagaaaatattcagcatctacttagaatgccttattttatggaagagtaaactgaagtagagagaagatacataattttcttcatgtcacatggctagtaaatggaggaaagagggattcaaacacaagaatttggggactggattccttttaaccatttataaactattataaccaaaattaaaaatataggttcattaaaatggaagaggaacaagacttccttaggaatagttctaacttcttagaagacatatttctcatatgaaagaaagaggaggttctcggccgggtgtggtggctcacacctgtaatctcagcactctgggaatttgaggcaggcggatcacttgagctcaggagtttgagacaagcctcggcaacatagtgagatcccatcactactaaaaataaaaaaaaattatctggggattggtggtgcatgcctgtggtcccagctactcgggaggctgaggtgggaaaatcacttgagcctagggggtaggggttgcagtgagccaagagcatgctactgtattccagcctaggtgacagagtgagacctcacccccaattaaaaaaaaaaagaaagaaaagaaaagaaagaaagaagaggctctcatatccaggaaagatcaattttagagggaagaggaaatgcactcagggtcaactgctctcaaggagttattagaagagatttattttggttgttactaaggcaggcaagataactggatgtaaagaatcttcatggaggaaaaacaaagatacaggatctcagaggggagactagataaactttacagaggaagacaggatttggggatttgttaaggaatgacttaaaatcaacactatataaagggttatatgcaatttggacatttttgagaagagatgccctgagacatcaattgaagactctcaaattatttgatgttcagctctagcctgtgcttgaaaggagcctgcttaattatttttaaaattatgagtcttaagaaagtgtaagaaagatggaacatattaaaggaaaagcaggcaaacaaaaaatgagaataccttttagatacaattgctcaaccaaggaaattaaagatattcaatatttatcttaatagtgcttgctttagaggatccagacattgttaattgcacatctctcaatagagaagaccacagagatcaaatctagaatattttgaaaagactagtgacaagtacaaacataaaatttaagaaggaatttaattctagtgaatattgctaatactacatgtgcttgagaaagaacaggacaaatttacaaagcctttcaaacttctagaaattcagcttaagctagaccaggcccagtggctcacgcttgtaatcccagcactttgggaggccgaggcgggtggattacctgaggtcaggagtgagagaccagcctggctaacatagtgaaacctcgtctctatgaaaaatacagaaattagcttggcatggtggcacaagcctgtaatcccagctacatgggaggctgaggcaggggaatcacttgaacccaggaggtataagttgcattgagccgagaccacgccactgcactccagcctaggcaacaaaagcaaaattccatctcaaaaagaaaaaaaaaaaaagtagtgagccaactctttattcagtaggggatcctgtccgctaaggaaaaggtaatggaagggcatattcgattcaggagaatgctagctagcccaataagctgcaaagctcagccccttctttaccagaatcaaagctcacatttccacttcagttgatctgacatgagtatttttctctcaggtgttttgaatcttaggtcagaaagagtggttacccctgcgcatgaccactgtgccaatgtaacacagcatatattactttgggtcttgacaaagggctcatttttagtgactgagtccttctggccaccaggagacacttcagtgccacaaccactcactgacactttagagttgctaagaggactgtcaggccatgggaaactaagaagaagctcaggcttggtacctgaatcatgagtcctacctgttgagcactgaaaaagcactggaaagagaagggaggacccaaaaacttctaaacctgtgcgaatgggctaagaccaatagtgaggttgggattttaggcaagtttgggatggttgtcagacaaagaagccactgatataccactagtacaatgcagttcgaattacaataaaaagttatagggggtttttttgggtcagaaagagaagaagtaaaagagcacacatgattcctatctccttttatcctccaaactaactctcactaacccacagaaatgttttcataggtggcacaaaggtaggctgcaacaattgtggccaatattatggtagagaaggaccctgccctgtaatgctcaacatattaatgttacgtgagagtgggacagggtcatctctgtgacagtatagtcacagaagcctcttcctgctcaaataagtggccttcattaaaagaaacacagaagaatcttgtttcataagctaatgccaatcactgagacagcaacggtttcaggaacatgagggaagctgttggaatgggctttcctttaaacctagcctggttccatcatgctgagtggtgggggctttaagtcagggcctgagaaggacagcctaactgtggtataagtcagagggctcctcattcctcataagccgacaaatacattaatatcatcagaaaaattaccagggcctgtggtgtcccaaattctgatttcattttccattgaagatcagagcacagaggaaggagatacctcactcatgtgctcttcttgttatatgctcacagtttctttgtttcaatgactctgtaccctggaagaggttagacctggatatgctaaaaaaaaatttttttaatccctatcctagaatattgtggccttgaatcaaagtgttttctatgtttgtgttttcatcttccttcctaagccctatatctaggttttgccttctccatccacaaatctcaggatgctatggagtctgaagacacctgattgcagaaagcacaagaccccccaccagcgcgcgcacatacacaaacaaatacaggaccagaaaggagtggttactgctgattctctaacattacaaaaatatcacggttgtaacttctcaccctgccagtcatatgtttctctgtcacttgacatactcccctctttggggtgttggaggaaaaaatctctgtgccaacagcagagacatggaactagtgtgtcacatccactctatgaacagaattcttactactatttataccctaaaaagcaggccattttctagagtttcaccccctcaccagaaagaatttatttgtgagtattggttgacttactataacaagagactcaagtgttaatcattaaaggaacctgttagtgctttcttagaagtaagaggaagatcacatttaactggagagtgccttattgtggttttcaaggaaggtcaaagctcttacttatcactgctcaatcttcacccgatgcccaaagaattaacataattttgaaccttaccctggagaagcgaaatgggaccttgtcctccagaaatgcagaagacactgtgctgtgggctgggggagtcacggagcacgagagtatccatctccagccctcactggaaataaaatctgcacagttctatctctttccagggcagccaccttgttctctgcatgaggagcatggaggtccagatgcttccaggagggatctggggcaaagctctaactaagcaacacattattttgattttgtgtgtctgggatataaggatggccggtaaggggaacaataaagttcttgagatttcacaagtaatttattgatgtccagaatttgaggtgctgatggtacacctaagtggcaatatgcaccaggcagatcaatatgtgactcgtcagagaaagcagaatgggtgatgtgatgtgcaatgccacagaagcactgcagccaggagaggtgacagctaatggggatgtttggagtctttgagtgaaccaaacacatcccagagtaattgtaatttatttcagtcaatcttctgtacagacttagcattcacctttggaggaaggtcctttgagcagggacagagatggtgatgtcactgacagtcccccttttactctgggtgagaggtctagaatcctcagctcctgtattcgtgcccacaagggcctcatctaggtgaaggctccacctgccccaccctgccatggccaccaggctcctctgctgtgtggttctttgtctcctgggagaaggtgagtccccacaaataaagcacctgcatttttggatattgccagttatgattccaattatgtttcttattctgtccccaaattctatctcttttcacagagcttatagatgctagagtcacccagacaccaaggcacaaggtgacagagatgggacaagaagtaacaatgagatgtcagccaattttaggccacaatactgttttctggtacagacagaccatgatgcaaggactggagttgctggcttacttccgcaaccgggctcctctagatgattcggggatgccgaaggatcgattctcagcagagatgcctgatgcaactttagccactctgaagatccagccctcagaacccagggactcagctgtgtatttttgtgctagtggtttggtcacagcgctgcagaatcacctgctccctgtgcagaaaccctggtgcttcctcttctcctccagtacccagcagctctcagcagcctttcttgctcctcccctagcacaggaagtacataggtttcgtgttccacatgtcctaggcaaggcaagaacaggtcataaggacacatcacgttaggaaacttttggtaggaagtcagtgggtgtgatggttcctgggattccacacatacttctcacaagggtgcctgagtccaagtttgagggcgagtgtcacagactggagctttcaagtgattgagtgagcttaaaactgtgcagccattgcacatggatgcttatctcctttgctgctttccgttatggcttctttgccatttcttttctcttctaccttaaaactttcaacatctttgatgacttccaacatcaatattggcttcccagttttttcacttgctcacttcaaatgatcatttccttcaccttgtgtcagatattcatttccactttctttttctagattccaatgacaaattatttgaattacccccaaatagtttcctcaagcatcccattgtctcatgcgggcttctcttttcatctctggtactacttctgcagcaattcttcaacccatcaggaccactaattgacttctcctgcaaatattgcaccatatatcatctcctcatgtactatattccttatctgacttagactatgtgttccaaggtgattgtgaaattttgcctatgtcttcagctcttttctttttctgtttcttacctggaaaataaaatggggcctactctgtgcccctttcaatgacacagagaacataaaatgtcccttacccttgtcaagcagtattataacgatacagtgtgtcttgaggtctgtaagtccctctatgcatataaaattatatacttttcttctattaaaataatttgttaccttttaatgagttcatcagtttcatctttcaattatagttatacttttgacaattatagaagtactaaaaaaagttatgcacccagaatgtatgattctatcacttttatgtgtgtgcgcacttcacttcatacgtacaaaaaagttaaaagaatgccgaataggcatatttatccattctcttgtaggaatgataaagatgaacttccaaggggaaaatattttcaaaataatccatggcacataaaattatttaagaaaaaataaatcaataaatatccctgttaagtttatatatagttttatatgcttgggtaaggaagaaaaaaagttgtgatatattttgctggttatttggagagataaaatatagaaagagcagaaagaacatgattagctttgtctttgtttaaaatttttgctttttaaatttgatacactatttaccatcaaaatttaaaacaacaccactgctataaaacaatatacagacaaactaaaaagaaaaaggaatttactatgtaaaaaaaaaaaaaaaagcgagagcttataggcagagtattaaggggaatttaaaattataaagacctgtaagttttcagagaggtataggcctcacagctggagctgggattttaatgtccatatgaaagagatgacagaaaacagccagaattacattgcttgccttaatcctggagcttcaaaatgctcccaggctttataaagtaaaagtattacaccccaaagacccagaaacataattggaaactggatgtttggtcaggcctttgggtgatagataaaaaggaaaagttaggagagaaaaattgaatcttcagactgtgtctcacatgtgtttggaatgaaatatactctgcatggaatgtacaccatatacccaaaaactgacaaaaaggtccataaccattaaaacccttggagaccctggcattaagagattcaatacggttctggagtaaacttctgcttccaaccaagatagattaacgggaattagatttaacttcttgcttgaaacagctaacaccccaacccccaccctgtccccctgcacacacacattcacacaacatgtggaataacggttgtcaagacattggaagtaggcaacagaagacagtgatctctgagagatggaaacaaccaagctgagaactatgactgtcttaatacctggagggagtttccaggccctgggccagaaagaggaatccaagcagagctgggtgatctcactgagctgagtcagagttggaaatacaagatcaaagcagctagatttcacatgacaggccattgaaaaggcgattgctgcacagagagaatcctggagaccttcctagggtctcccttaacccttcagctgtgctgtaagcagtacatgtgtgaggaaactccctaaggttggagaaagagccactcagcaagattagaggaaacaatgcctggagctcacaaagggctgagagtaatatatacatatattactctcatatatatatgtatatgtatatttttgcattgagaatgggaaacttaataattcatgggtcaatcagtagaggtttcagatgacttatgcctcagtataaaagcaaaataagcccttcactaaataagccacatttggctcctggcctatgtgggtgagacttcaaaatatcaaactgtttccgagtaacttaagtctcagagcaaaactaaagaatatttctaatgtacaagaatacctgttcggagatatcagtatgaatttattgtttttaaacgtatagatacaatggtaaagaaatgaatacatacctgtgtgaataatgggttggtatatatacatgtatttcatacttctgtccacttagaagaccactagtgcacagatgtttgttgccaaatattattctccaattaaaaaaaaatgaaaggtggttctaggaccctgaggtaaaaaatacaagaatgttgtaatgaggttttccaaaaaaaaaaaaaaaaaaaaaggatgggacatatctcaaaaggacagaggaatcaatctgaaagagcttccccaatgactaaggctggaacaatttgtaaaagaaaattcacaagttcacactgagaatgaaacgattaaataaataaataaataataaaaaatgtgagaaaggacaatctcttactgaagaattccaaattgcatatgtagaagaaacagagggaaatagaaaagtcactgtgacaacaccactgtgagtaactgccacacataaaacccaatagtgagtgctaaaattagtgggtgtagctaattttaattactaattaataactaataactttaataactaattaagaagaaatggatcatttgtacagtcacaaagtgtcatccccaaaatattaattaatatggtggttttaacatatgcccacacattcttttatactcatccctctagattcccctctcctggattcagtggcctgcctctaatgaacagacatgggaaatagaaaaatggtaaccgagtgatccaaagtaaataaactgacccataataagtcttgttaacctcatgtgcattctcttatgatgcaatgttgtgatgttatcatgtgactacatatctgtaatattcctcccccaaatctataattcctgtctaataatgagaaagcatcaaacaaatcccaaactgaaagagattctacaaaacacctgaccagtaatcttcaaatgtcaatatcgttaaaaacaaggaaagagctgtcacaaattgaaggacactaagaagatatgacacttaaatgcagtatgggatcctggattaggtgctagggcaggaaaaggtcattattagaaaaactggggaaatctgagtacagtctagcttagttgtgccaatgtcaaattcttagtttgtgtgatgttagcactagtgggtgttggatgaaggatataaagtcacttggtagtattgttatagctacaggacatcaattctccagctttgggtcacctgagtccctatcaagccaatttgtgaagctgctgttagttgtccttactccccagtcttggagctctcagttagacctagaatcaacctcttcttcctcttgacctctgcttcactgcatcctaaacgtggtgaggtggaggggtggtgagggaggctgagcagaagcccatcattcagaagcccatcactagagcttctctgatgattctctgagacaggggctccctctgtagtctcctttgtgcacaatcccaagcacgctgggccacacagactccaccaaagctagttttgtgaggaggcaaatattgaggctccattgtgaagagaatgtccatgtcagatttaagtacaaaagattaaagttgatgcattactattgcaggaaaatgatacctgtgagaatttccaaaagccagattttgtattgtgtggctggctgagtaatacccctccccacaaagacattcacatcctaatccctgggatctgcctctgttaccttagatggtgagagtagactttacagatgtgatgaagttaaggatctggagataaggagattattttggattagtctggtggccctcaatgcaattacatgtgtccttataagagatagccagggggagatcagacacaaatggagaagagaaggcaatgtgaccacaggagaagagattagagtgaggtgaccacaagccaaggagtgaggcagccactagaaacagaggcaaggaacgaatcctctcctatagcctccagggggaatacggtcctgatgacacctggattttggtccattgatactgattttggacttttccagaactgtgagaataaatctctgtcattgtaaaccagcaactttgtggtaatttttatagcagccactcaaaattaacacactccaatatgtccagttaacctgagactaggccaagaaactcatgttcttataatattttctgcaaaccttgctgtcatgtttttatctgacacccatctcaaactataatgaaagaaaataattttgagacttcaatgtccccctgtctggggtgtgccttccatagttcattggaaaagtctagtctcctttcaagattttattccagcagtacctcctcttgaaagaattttaggcattgttttctgttctcagtgcacatactaaaaagaaaaagacaaagactcatgtctacttgatgtttacatttttgcggggagggagagacagagataaacaaataagtaaggcatatagtgtattagcaggtgatacctgcaatgcagaaaaagaaaaggcagactaaggtgagggagaccaggactgtcagagtaaggagcgttgaaatgacaatacattgttcagagtagggcccaatgaggaagtgacctttgagcaatgatttcaaggagatgaaggaaagagacatgtaggtatctgggggaaaagaattccaggcagagggaggagccagtacaaataccctaaaaaaatattttaggaccaatgaggaggcccatatgactgaaaaattaaggaagggagtggtagactttatttccaagcggtaatggggcaggatggatcatttaagaccttgatggccttaagtgctttgttgttttgttttcttattccaaataaaactgggagctagtagatgatttggagatgagtgacatgatctagcatgttctagagggctgagtttgagagctagttcagaagtaggtgaaagcagggagatcagttaggaatctattgcagtaatccaggaaaaagatgatggtggccttgtcctgagggttagcaaagaaggtgatgaaaaaatggatggattctgagtgtattttcatgatagagccagttgaatttcctaatggattggctatagggtgggatagaaaaagaggatttgggaaccactctaaggttttcagctggaaggctgttggtggagtaaagttgaggataatctttcatgtttagagcatgctgtttgagagtggtggggggaaaatgttgattggagtgcattagagagataatgggaaaagagaatttggaggtaagtattgatcattagcaatagcaacaatagctaccgtagattaaaatgccccacagtctatggggatgtgatacatgagggaagacagggccagatgggatgaggtaggatccagacatcagactcaggagctacgagtggtatatataaggttaacacctagtcaaatgcataaacaggttgattttaattgatgtcagtttttctccattgccccctctagaggcaatcttcttcagagaaccctggctaggtcttctatgtttcatgtccgtagagggagctcctgagactgtggacattggctaatatgctgatgtcactggaggccacatcttacagggccaagagacagatttgctttcctttttctcatacttgtaagctccttcatctggaaatgtgatttacctgggtcctgccatggtttccaggcttctcagtttagtgtccctttgtctcctgggagcaagtgagtcttcaggtacttaaatatctgtgctgtaccctatcccagtctattcatgtcatgtattctgtttttgtctcttcccacagagcacatagaagctggagttactcagttccccagccacagcgtaatagagaagggccagactgtgactctgagatgtgacccaatttctggacatgataatctttattggtatcgacgtgttatgggaaaagaaataaaatttctgttacattttgtgaaagagtctaaacaggatgagtccggtatgcccaacaatcgattcttagctgaaaggactggagggacgtattctactctgaaggtgcagcctgcagaactggaggattctggagtttatttctgtgccagcagccaagacacagtgcttcacagtcgtgcccttgctgtgcaaaaccatagccttctcctctcaactcacagctgcccaaaaggaaggctttccctgtgccttctcccccaaggaggggagataaagaaccagaattaactcatgaaatacaagagtattccaagaagatttgggtgaaaatacttgtggtttgggggatctctgaagttttttaaacagaactcaaactatgtgtttctcatatttatttttattttttaaagtgtatgttgcctggttataaagcagacttcttgcctatcttgctgctctgaaaggtttgtgactctgactgtgaggccacatctttatatcccttcttatagtaagagaaacaagtctttctgatgaaaataaaaatagtgaataaaaatgcatttactactggcttttaggatgctcaatgatgatgctagcaatggtggtagtggtgacgttggtaatggtggtgatgagtttaggttgcttttgtctagcatttataaatttccaaccactttaaaacaatctcattttagagtggaatagctaagtccattatcagaggttaatgctaattttctgttcacatagggtctgagtttttaatgtaaaaaatatagttagcactataaatagatatctgtcagccgatacagaacattttttaagatcacttccagttgctgcaataggaatatgtattcctattttttttcttttttctttttctttttttgagacgaagtcttgctctgtcgcccaggctggagtgcagtggcaaaatctcagctcactgcaacttctgcctcctgggtttaagcgattctcctgcctcagcctaccaagtagctgggattacaggtgcctgccaccatgcctggctatttgttgtatttttagtagagacgggatttcaccatgttggccaggctggtcttgaactcctgacctcaagtgatctgcctgcctcagcctcccaaagtgctgggtttacaggtgtgagctactgtgcccggcctttttttctttttgagacagggtttcattctgtcaccccggctggagtgccatggcagtgtgatcacggctcactacagcctcgacttcctgggctcaagcagtcctcctgcctcaggctccctagtagatgggactataggtgtgcatgaccacacccagctaatttttgcattttttgtagggacaggtctcactatgttgcccaggctggtcctaaacttcttggctcaagtgatcttcctgccttggcctcccaaaatgctgggattataggcataagacaccatgcctggcctggaatatgtaatttttaatgagacctaatggtataatacattctacctggttcaactgccttcttttaatatctggattccaatattctgctcatgtttcagccatgtttttgcaaacagtcctgaaattcactctaataataagtttcattttcccagtctgattgttatttagcacctcaaattattattgaactcatcctaatcctgattaggcaaatggatagtgagaaaatattacaagtgggcttggattttaattttttcaaacaatttaaaacccattttccttttctaatgatcaagatccaatttttagataatcagtactctctctttctatgtggacatgtaatatgaataggtatattgtttctgtcacaggcatcgcaaactcatatcttgcttgaaacttgtcgatgaactcctttagtatgacaagaacaaagagaaatagatttttaaagcatagccacatattggacatgagtttttcttcaaaatttcagctgcagaaccctaactggtgcctttccttttattgtgttatgtaatctaaggtcataataagtaactaaattattgatttatttttccactctgtaatctctccattatatttaaaaatagcagctatgaagcaaaacaagttcctcgttgggtacattgcctcaactccaaaatctaacaagcagaagtttaattcagtgctttgccatttcatactatagacaccgaatgtcctatcctataaggggcacacagtggttctctttatagttctgttagctcaagtggtatctttaggtacaatttttagaatttttttatttgttaatctttcttaaggtatgattgacagaaaaaaattgtaggtatttaaggtatacaaggcgatgttttgatatacatatacattgcaaaatgattaccacactcaagttaattaacatatccatcacctcacaaagttacctttgtatgtatatgtatggtgagaatgatctactctcagaaaatttcgagtgtacaataatcattaactatagtcaccatgctgtccattaggtctccagaactttcgagcacactccaaaacatcaacttttattctgattaagcctcaaatatgtcttcttgttgcaaatattagctatttttagattagctataaataatgaaaaatgctagcataaaagatggaaagaataaatgcagataagggctctaaggtctttacactttccaggaagtgataaaagctgcaatttaaattatacatgaagaagtcaaggatggcaactcctataaacagctgatacttcaaacctggaatgtctagtgctaagcagcccggacccctgcacccagcacacctctctttggcatgataggaggatgagggatccaggtcttctcctcccatgctgcccttggcctttatgttttgcctttcattagtaaggcttctcccttaattatcaccctatgacaggaaattcatcctaagcctggacacgtgagagatggtaactctgaagcagccccctgcggatgacaccaaatgaggccacacccagaacaaattgcaagaaataacaaggtatttcttacagaatccctaagagaacatgtctgtctgcatttaagtgtctacagtcataaatgcacagcatatgattggatcagatggaactgaaagactttcagtgcttcatggtgcccataactctcattgtcctgaagtggtgttggcagtggactcagcagggtgccgtgagatggtgaggctacacacatacgatcgtgaccaagctggctacacagatgggccaaactcaccctgtgatggtagacagagcttaccaatgggttccatgaatggacaatgggcatgctgctgtaataatcccttcgaccatgatggaagtcaggcaagacccaggccatgggaacattgaaaacagtcacctctagcctcaagtatttcctactgtttgccacactgtgcctacaaatatcatttatgatacagcttaaaattttcatgtttgtgaaaattattatcagccttatccaatctgatattttgaatgaaatcacattaaaaccatatattaatttaagaactggcatcttcataatagtgagtcttctacagtttcctagaccactaaaaaatcatggattgctatctcagacttgaaatgggtgatccttattcttctctcagtcagaacagtgaaaggtacagattcatggcagctagtccagcttctaaaagtcaacttctaattgtctactttaggacaaaaaagaaataatatccttaggaaggccaccatggaattcattctatctgaacaatccttacataatatcatttcttataatatgtcctcaacatcgtgctctgcatatatttctccaccatctctaaaaatcctcttagcccaggcctcctcaaactttaatgtgcatgtaaattatgaccttgttaaaatgcagattctaatccaatcagtcagggttggagctaaggttccctgtattttgaacaagagtccgtccaagtgatgccaaagctgccagtccatggaccacaatgagcagccaagctctagatgacacctacaataattacaggtgtaaggcccctcttctcaagtatcattttgcacagttcctggactaggtcagatacagaccctacttaccacatgtatctctgtattccaagtattacgtaatcatcagttttcctaaatctaggcaccaatattttaacatatattttcatggtataaatagaaattaattttctatagtaaatacactaatacctaatcacattcatgcatctttaatgtgagtagcaaaaagccaaggcactatcttaatggttattgagtgagactttagcaaatactatctttatggagaaacctctgggctgctttttaggatgtgagaaaagtgaggtaaagtgaggagaactggatgaacacgggacagagacagggacaggggcaaatatggggacacctgtctcaaggaagcagcaaatgatatagaaaataaatatctgttccatccctgttccagacaagcccatgtacctgccaagtaggaagctgtgtatcacattgcaacaaggaatgaccccggccctggtaaagtcaacagcaacagtcatcacaggccaatctgcctatcagggactggagactctctaaactcccacctctcaacccaggaatcagagcctgagacagacagatgcttcattcctgtatggggtggtattcctgccatgggtcctgggcttctccactggatggccctttgtctccttggaacaggtgagtactgggcagaaaggaaatctttgagcaaagctatcttgtcctcagtctgcacctttcattcacagcagtaacactgttctccttaactctgactccaaatttgtcttctttctctacaggtcatggggatgccatggtcatccagaacccaagataccaggttacccagtttggaaagccagtgaccctgagttgttctcagactttgaaccataacgtcatgtactggtaccagcagaagtcaagtcaggccccaaagctgctgttccactactatgacaaagattttaacaatgaagcagacacccctgataacttccaatccaggaggccgaacacttctttctgctttcttgacatccgctcaccaggcctgggggacacagccatgtacctgtgtgccaccagcagagacacagagctgcagtgcttcctgctctctgttcataaacctcattgtttcccagatccaggtgctttctctaggacttctccctcaccacctcttacaacaataggaagtgggttggtggctgtcaatatctgtagacagaagttgagcacaaaccaataaaaaccattgacagttatgccaagagtggaaaagtggttacacatgcctggcattcagttggtggtattttcccaggatcacatttagaacccatgctgtccttttcagaagacaaataagaactttttctttctttttttcattgttttaatctaagtcagaggcttagaaatataagaggtgatatgtgaagaattatggacacccaatgtctatgaagtccagtctctggcattcgatgaactcttataggatttaatcctcctggagaatccacatgtttttagcctagacctggagcaactacctcattaatgggagaatgaaagcacaagtatcccaagataaaaatttctcagaggtaaaaccacattggagagaaaaaaagagaagaccatacattaatctgctcatatctggagttggaggtactattgagatgagcaaatggaaaccataaatacataaagaaatgatattgaaaatagagtacatttggagatgaagatcatggagccatctgtatagaagagagtaataatgtcattaaggtgcataagagtgccagcaaatgtcaataagaaaaactacaggagggaagaagatgggagatcctgctccccttaacaaagataaataaaatgctgagtgagaaatattgcaacctcataaattgtcacatggaagtatgtatttataaattaccattataattaacatccctcaatgagaacgatattctgagaaaaaaaagcagaaaatatagttatatggctatctaaaaatgtaaaattttgcacattaaattaagataatctaggaaaaatatgacaagacctattacaaaagagcttttacaaattgtttgctttaatgatattaataacataatgatagctaacatttactaagcacatattacatgctagaccttaagtcttcttcacatatatttatagttcatgttagttttataacaacctcagaaagttaatactatagtaacctcactcatttatccatgaggaaactgaggcacagacaagtaactagccctttatcacgtatctcgtttgtggtggagccagtatcaaaatgtagacaatttactgctggagctcattctgtcttcggagtttacatggattctaagtcagaccttcagataggaaggtaaatggttataagccagaagatttccacactctcaccaacattgcactggcttttctttgggtcttggccagagggtgagcccttgtgactatgcttcactggttgactaggtttgagttgcaccgaggaccaacatagagaaagaaggtctttgggataaacctgggaggatgaagggtaaaaaatgcagaacttaaatcttgatcccaagggatcatttaaagatgaatgagtctcccttagaggatgagaaattaaacataaactctttaacttgcagagatgctgaagtgttttcctcaagtagtaaactttgaatcatggttatatgcatgggagggagcctatggggatggaacatggatgaaaaagtgacaggatgttcagggggcaggtgcgggcagaaaatcagctgcctccaagagtggtgagagaagctgtagagcatcctttatccagactggcacaacatgcagtccagaaggctgtgagatacgaggaaagggtcaccataaactgcaacctgactatgtcaaaaatgacacttggaatccgagagtgggtacgtgtggtggtatcacagatatacacccaccccatccccgcccaactgggagataagagacttacaggtttagcactttcaccactgggactagaaccctggatttagctagaggctggcttagaccttttcatggttcttctgtatgaaccacacaatttagaaccatactatttagagatgatcaatttatacgacctgcataaagcctgtctttccagaagaagctcaggttcaaaaaaaaaattgattcctctcttgtccttctcaatcttccctccttccttctttcctttcttcctgcctgcctgccttcctcattaaggatagacatgaactagtcacctgtatactctctgaggtatgctgttagtgctgacaacacattagttcaacctagaaaaactaaccctgttttattttatcttatctgagagtctgagacccctctttgatccttaaaaacttgccaatttcttgccaagcaaatatgtgcagggttttagagagccgtaggtaacagagacaaaatagaaacaacacacagaatttggagcaaagcctttagatctctaaagcttgaggccccactgctgctctaagcctgcctatggcaccaggttcctctgctatgagtccctctgcctcctgagggcagtgagtcctgggcgtagatagtctgtctgccttgggcactcacactgtagtctgtttccacaccttcctctggtagtccaatattcacccccattttcctctctagcccctgctcctacactctagtccacagactctgtggatatcctaatcacagagacagaaacagaggtgacactcagatgtgagtgatgaaacttacaatgctgtaaacaagactcaggacttagactgcctactgatgttcattcttgtgccatttgttcagcaaatatgtatttaggaactcctgtataacagaccttgtttccggttctggaaataaggtaataaacaaaccagagagacttgttttaaactcctggaatttataaaccaaagagatgtatgtgatgagaacagtacgactctggataagaaggaacctgttaccttaacactggccagtgcaaacccagtctggcagacatctgtgatcctctagacttgtaaggaatcctatagctgtatagctctttgcatttaagggcaaaactagacaagacagaacctcactctcatgaatccatgccctaagaaagagaagaaacttccctcataggaacattggtgcagtctcgcagttttcttatcaagtaggaaaattagaactgctaaaactttgtgccagaatttaagacaaataaattgcctggatcatgcattatttacaattatatttacaattatatacagatattttccctaatataaatctgttgatgaaccacttatgtggcatataaataggacttattaaaagttagatgcggtgctttagaagatatattaaaattattagagtctgacttaaatttttaatagtaatacaaaatataaagtaccacagccttgttcagaagaaacaggatttctgaaatccaccagaatagctttctaaaagccagtatcttatggcctttagtgggctgaaatacttataatgatggattggaaaaatggatgtttgagtgcataaggttcacgagtataagaaacaattggtacctcctaactatagattgtcagtttcagaggatgagaatgaatgtgccctcatcctcattttaattttgaaagacaatgcagatatccctactatagaatcattttttacatcaccacctatagagattaacaacatagatgtttccagctccctaagaggccaagaagtattaacccaaggtcagattcaggtaattgatcgtgactcacgaattttcagagatccacaatggttgtttttaaattttcagcagttatgtctttttctctggggagagggtattcaaagctcctcatgaggccattctggactacttttcccctcctgccccctgcccataaaacagtttacagaaataggtgtccagaccgtgggctgtagttcaccaactcctgctctagcctaattttgtctcattactagagcatggccattctgtggatgccagtgaagcctttctggggtttctctccaatgccttttaaagctttttcctacacagacacagtttactgtttagccaaaaaattaagataattcctccagacatctggagttcttgtgcagcttcctcctctctggtggtctttccttaaaaattctagctgcctcagcccccgctgattttgtaacctgtttccgcaactcaaaatttgccatgctctgttgctctcttccccattgtgtatgtgcagaaattgcccccatgttttggtgttttggcagaatcccagtcctgtgctgtctgctttccagtggctgaatacaattgtttcacatattctcttaatttgtgttacttgtatagagcaggatgctaaaggcaattggattctacaaagtgatcacgtcacagagaagccgccgacagaggtggagagagccacacagatagccagctgcctgtgctgcctgctcttcccctaattctgccatgagcccaatattcacctgcatcacaatcctttgtctgctggctgcaggtaagtccctgttctgcagttgtcagctccctgctctaagcctttcatccatgtcatcgaactccctcatgggctcagtctccaactcctgtctgctttctttacaggttctcctggtgaagaagtcgcccagactccaaaacatcttgtcagaggggaaggacagaaagcaaaattatattgtgccccaataaaaggacacagttaggttttttggtaccaacaggtcctgaaaaacgagttcaagttcttgatttccttccagaatgaaaatgtctttgatgaaacaggtatgcccaaggaaagattttcagctaagtgcctcccaaattcaccctgtagccttgagatccaggctacgaagcttgaggattcagcagtgtatttttgtgccagcagccaatccacaatgttaaatattagctaatcttaggacacagactcatcacggactcagctcaggaagcaggtggtatactaggttggaaggaaataacagaaactagagctagcttaagccaaaggggaatgtattataaggctaaatgtatgtcccatagaaccacaaagcaagaacacaggaacttcccagaaataaactgcaatgaaaccttagaaccggtggtcgcgcctgtaatcccagagctttgggaggccgaggcgggaggatcacaaagtcaggagatcaagaccatcctgactaacacggtgaaaccctgtctctactaaaaaaaaaaaaaaaaaaatagccgggcctagtggtgggcgcctgtagtcccagctactcgctactcgggaggctgaggcaggagaatggcgtgaaccgggaggcggagcttgcagtgagccgagatcgtgccactgcactccagcctggacgacagaacgagactccatctcaaaaaaacaaaaaacaaaaaaaaaccttagaaccatggcatggctgattgacaactcattttttatataccttgtcggcctcattattctcttttattataagttgtcttttctgtttcttaggtcttacagtgattagaaaattgcagatttaggtgttagccctccagtcaattgagaccaacgtgactttctctcatgctagattacaaatccagggtgcagggggaaaaaatgtgatcctgctttactcaagaatgggctcgtggaaatccaagggaattgaattattttgaacaagatagtatctgggagtctgtccctctgaccttgtggaccaaggatttcaaggggtggaatccagtcagaacatccaataggcacccatcacaagtgagaagttggggataatacattttctggaatatagagaccttgggaaaagagaagagtttggagaggggatcaaaaccttattatttagaacaatatcagaccacgtaaagagtctggttaatctctctttaagaaattaaaccggccaggtgtggtggctcacggctataatcccagcactttggaaggccaaaagcaagcagatcacctgaggttgggagttcaagatcagcctgaccaacatgaagaaaccccatccctactaaaaatacaaaattagccaggtgtggtggcacatgcctgtaatcccagctacttaggaggctgaggctgaagaattgcttgaacctgggagggggaggttgtggtgagccgagagcgcaccactgcactctagcctgggcaacaagagcgaaactctgtctcaaaacaataaataaataaataaaatagaaggaataaaaagaaattaaacctagataacacaaaaagcatgttcattttaagtgtgacaacttcagatcctacaaattcactaattggcctctatggcactgaaggagaacagattaatgtactcttggtgtaaaacatattaatgcacagagaattaaaagatcttcaggtatatgattcaaattgtaatgaggggcaatgtactcaacatcaatattcctaatgaggcattatggtatcaactgtacctaggcaggagactacacttatgttgagcagttatagaattcaaaataactctgttaaaatttgataatccattctgttcacagatctggtcaccacctagcattcgctttgagagaagttcctttattctctccagttacatctgctcttatttcagtataagttgaacccagttgtcttacttccagaagtccaaagttacttcttttcttgggaaaaaaatttactgtgactcctggaaacagaagttctcactttatcatttttctgatctatttaatattataccttctcattttaagttccttttcccgctctccagaagtgagtgttccttagcgttctgttctcggtccccctcaagcccagtcttgctgttggtggtctacatctttgcttttgtcacagggaagtcactcctctagatgctatcttcagctttttcttgaaatatttccattctaccaaaactgttctcctaaagattaaaattacgtatttcccagaccaaaagacgcatgtgtgtttctttgcctgcttgatctctttgaagctcttgacaatactgaccatgccctaagtcctgagcattaatttttgctcagtttcatttacatcattttcaactagtttctcattttctctctattctttttgttttcaatgcagctcccagaaactaaatctatccatttaatattctttttcccaggaaaattcttctcattctatttaaagtgtaatattctagtttaatgggaaagttttttgttgttgttgtttagccttttaaaaatctctactgaaaaaattttggatatgaaaattagccaggcatggtggcgggagcctgtaatcccagctactcaggaggctgaggcaggagaatcgcttgaaacttggaggcggaggttgcagtgagctgagactgcaccactgtgctccagcctgggcaatggagagagactccatctcaaaaaaaaaaaaaaaaagaaaagaaaagaaaaaattgtgaaatgtggtctgagacaacttttctcagtgtcacctgaggcatgggttaaacaggtatattctaggacaggttcagaatttcagagtcgaaatttcttgttggtggactttaggaatacgtatcattgctcctgagtatttctgttagtgctgaagttctgccccaaggacttcataagattaataacatcgcaaatcttctgtagtgctttaaaattttgttcttcatttttttattctcactttcttctctttccttttccacttcctcttatgttttccttaatcttcaactttcctaagcacctgcaagtgggattggagccttgtttaacatcgtccatgtagcaaaataaggatgaggccaaatatttgaaccaaggatccccatctcctatggaaggtgccctgaggttgtgggtgttgctggggacatgatgtcatggccagatcctacatcatgcggccaagggaacccagaactttcactgctctttgctactgcacatcagaacccatcgctgggagtgtcttgcactgcctgacctcaccatggatatctggctcctctgctgggtgaccctgtgtctcttggcggcaggtgggtccaggtatacttaaacatttgcataaagatgtttttggctgggcgtggtggctcacagccgtaatcccacctttttgggaggttgaggtgagtagatcaccagaggtcaagagttcgagaccagcctggtcaacgtggtgaaaccccttctctaccaaaaaatacaaaaattagccaggcgtggtagtgtgctcctgtagtcccagctacttgggaggctgaggtgggaggatcacttgaatctgggaggtagaggctgcagtgagcagagatcacgacatttcactccagcctgggcaacacagagagaccctatctcaaaaaaaaaaaagatgttttctttgggcttcccttcaccttctatggcttccgtcttcttccacaggacactcggagcctggagtcagccagacccccagacacaaggtcaccaacatgggacaggaggtgattctgaggtgcgatccatcttctggtcacatgtttgttcactggtaccgacagaatctgaggcaagaaatgaagttgctgatttccttccagtaccaaaacattgcagttgattcagggatgcccaaggaacgattcacagctgaaagacctaacggaacgtcttccacgctgaagatccatcccgcagagccgagggactcagccgtgtatctctacagtagcggtggcacagcatggctgagtcagttccctccagggtgcaaaccctctggctgctcttctcccagttgaactccaagaaaacatttgaaaaagcctcttccttatcttcctaccccagaagaaagaagcgagttgattgttgtggctgcagctgctaccgggagagtacaagaccatgaattaaggtcttaaatggtcatgatgggcacactggacaatgggctcctgaaactacccaaatacaaaatgagacattctgtggatcaggaggaatccacatgtttagaaggaagggccccagaccaatttccaagttcagagaccagctatctgaggttgatattacttaccaaaacacaaaaacattcctactgattttatctcaaacacagttctcctgcaaactcttcccccaccaacgtaccccagcagaggcaatgacatgtacatttatggaacagcctgttgactactgcagatccatctcttcaataagaccaactttccctggaggtcagtgactaaaccaaaccgcaaggcagacggcaacacgaccctcttaggggatggatgccagagaaacactgactaaaatccccactcggggactgtcctagcacattcagttcctcacacagctgcacaggggagcgcgacgttttattctgttacttcaaacactcatctgttcctctctctctcttgcaggccctagactcacagacactggaattagagtcagaaaaattgctttctaatcccaaaactggttttgtttactccccttcagctgtgaaatcttggcaaatgctcttacttctctgggactcagtgtcctcctcttcaaaattagagacttgctccacttagtctctaagatctgatacaaatatgattatttgacttgctatttatttatttatacaaatattagaatatttatgtatacatttaacataaatatatttatatttaataaaaacataaaatttataacattttatataaatttatatcaataatatatatttattgatatacttatatcacataagagatatataaatatatgcaaatatattttatgtaaattttaatacaaatataaaaaatacattttctatataagtatatataaatacttatatataaatgtattttatacatttatatataaatatatatataaatatatatttatatataaatacaaatacttatatatatttatatataagtattaatatataaatatatgtgtttatatattattatatataaataatatataaatatatgtgtttatatattattatatataaataatatataaatatatgtatttataatatttatctatttatctatctacagctattttacacatgtgacaatcagggttgcgatggaagacatcactacaagctggaaaatatgaacataattacatatgcagataacacagatccagagactatctgattgcaaggaacattatagatcacccctatataccataactttgaagctaatttgaaatgtggtttgtgaaagtattatacatttcctgcaatcccctccactgctgctagatggcagtaaaggaacgtgttagaaagtctggggaggggacctcatgatttatttaccgcgcagtcatgatttaccacgcaatcacggtttagtcttgttgtcctgtcataattaatagtatcctctttcacatacaaaagtgtctcaatttgaacattaaactatacggtcattgtagataatgacacaaatgatagcatctctgttgaaagtaaattgtttattaatgttgcagtaccttcatttctttgtttcggtttaatgaaatagattttttaaattatagaataaataaactcgaagctatagcattggtctgctttttgtcattttactatttaaatatatctcagccctacttacagtttgtattagcgatatgtggtgtatgaagcctcaacttaaaaactcagcttggtcttcgtagtgcttctgtcactgtctgcccagcacccactgcctctcaatgtgttccaacgtttcccaattcctacctgctaataaacctaccaggatatttccagacctattttctctgtgaagaaaaccaagcgacattgactttccctcattcatctactaatacataaatgtcaccacatgccagtgacaacggggtaaaataagtaataaaagtgaaataggataaaagaattgttatacatttattggctccggagaaatccaccctcttctctctagtctcctgcgcaccctgccaacaatgtcattggctgtaaaaatacctcatgttcatttaacactctacagtttactgagtaatttgttgtttcattttcatgctttaattatatgtttccaggttctctgagcttttgagctcctgctcttcccagatgggctttcataacaaggccagcccctttctctctccccttccgccagtgcccatcatttgaaccaaattttcttcctgtctctcttacttgattctttcccaacctgtgccttctgtttggtctcttaaaatatttccctattcagtgataactcccttaatgaaggcatctttattgactgccttggaaatcctcagaattatagaaacatctttcatgtccaccttggcatgttttatatgtttcacatatattttcataaataataaaaaagttatatattttccatacgtaataaaaatgtcccttcaacatgcgtaatatataacaagattagtgatcttccacctaatgtcttggacaatgtgacttctgtctgataggtatagtctttgacccctacttactcatgattaaagaaatacctttctctcaaaggaactatctgtgttcacagcgttaagtctcatcctggatgctgcaagaagacgttcaaatgtccactgcccacccaggtatgtgatgctgcctgccatgggtcactagaaggtgatagttaaaagtgtaggctctggaatcaaacaatgcagaccacaattctggctcctctgctcaaatgctatgtgaacgtgagcaagactgtgaacctctctatgcctcacttcctcacctctaaaatgaagataatagtacctacctgaggctgagcacagtggctcatgcctgtaaatcccagcattttgggaggccgaggtgggtggatcattccaggttgggagttcgagaccagcctgaccaacatggagaaaccctgtctcgactaaaaatacaaaattagctgggcgtggtggcacatacctgtaatcccagctactcaggaggctaagacaggagaatctcttgaactcgggaagcggaggttgtggtgagccaagattgcaccattacactccatcctggatgacaagagtgaaactctgtctcaataataataataataataataataataataataatacctacctgatagtattgggttaaataagataattcatgaaaatccctagtgtggtgcctaaaactcaaacgctaatatacataggtttggcctaatattatgaggtgttattatttaggattgctgtgcttcagctttttgttgagtttcacggtttggctcttactggaccactgacagaagcaactccatgactggttattctgtcattacccccagatactgtgcgataccttccaaatctactacaaacaacgagtgtgcatttctcttgcttgttccatccaagaggaaagagatctgtccagagatgtcattctgcttcagtcaacccagccgtgccagacaatatcagcataaatgtcaaaattaccatatgtggtcaacatatgctgatactgtgaccatatgctacatgggacttgttcccttaattgtgaataagagaactattcgtgtaggtgttattatccccaattttataggctcagaaagagtaataattggtccaatgtctcacaactgtatgtttcatggcaaagattggaaatgaagcaataacttttttctagtaaaattacaagaatgaccttaatttctttctaagcaaacgtagcgtatcatcacaacagttatgttaaatcagctcaataatctcctagaagaacatattataatattcattagaggtggtatgggctttaagagggagaaaaaactaggcaggatattgctatatgtgaagtaccatgctagatatttcacatatggtatttcatttcatccataccagcaacccaaaattatgttatttatccctgttttactaacaaagaaattgaagtttaaggagggtaagtgcaggatgaacactaagccaattgtagagctggcttttgtaatcagggattttatttaattcgatttgctctactatcatcatgttgaattaagaatggcaaagggctgggtgcactggctgacacctatagttctagctactcgggaaactgaggcaggagggttgcttgatcccaggagttcgaggctgcagtgagatatggtcatgccaccgaactccagcctgggtaacagaatgagaccctgtctctaaaaatttaaaaaaaaaataagaaattttcaaaaaagaataaaaattaaaatatatatatattttaaggctgggtgcggtggctcacgcctgtaatcccagcactttgggaggctgaggcgggcggatcacgaggcgggaaatcaagaccatcctggctaacatggtgaaaccccatctctactgaaaaatacaaaaaattagtcgggcgtagcggcgggcgccggtagtcccagctactcgggaggctgaggcaggagaatggcattaacccaggaggcggagcttgcagtgagctgaggatcatgctactgcactccagcctgggcgacagagtgagactccctctcaaaaacaacaacaacaacaacaacaacaaaaatttaaaaaaatgtgtgtgtgtgtgtgtgtgtgtgtgtatacatatatatactttttttttttttttaaagaatgagaaaggaactagaacaagcagagagaaaaagcccaggggcacgacagctaaaggatgactaatggaagttgaaaataggaagctgaaaggtacagaaatactgcgggaagacaaactacaaattatgtggagaaagacaagaataagaacagttcccagaggtctgaacacagcacattatgtcttcttgctatacagtggccaccaaacttgtcaatactgtaggcaaatgctagtgtcattgcttgtggctaagcagaaattttgacacttgggaaggttggcatgagattgaacagttgccatggtgacctgccatagatattttgattgatgatgagtagacacaaagtgccaatgcttaagacctagcttcagatacttaggatttagtggagaggctgttttgactatttcttttcttttcttttcttttgagacagagtgtcgctctgtctcccaggctggatggagtgcagtggcacgatctcggctcactgcaagctctgcctcccgggtttacgccattctcctgcctcagcctcccgagtagctgggactacaggcgcccactaccatgcccggctaattttatgtacttttagtagagaccgggtttcaccgtggtaaccaggatggtctccatctcctgacctcgtgatccgcccacctcggcctcccaaagtgctgggattacaggcgtgagccaccacgcccggcctgactatttctgacatctgacttaggctgcacaggaggtggggtttcttgacagggaggagctaatgtagggactgtgatgtgccaggctatttgggttggggtggagaaaccacagagagacagacataagctctctcccttatttataggacatacctactggtcctgccctaggccccagattctttgttagtggccttttctactgggagcaggtggggcattccagtttcaggtgttctgggacctggcttgaagtttttcactgatggctgcatcattaggctcgctcttttgccctttcctcagttcctgtctttttttcactttcagtcacctagaaacgacaatatccaatcagaagttgagaatgagacaagtttgggaagacattgaggaatgtctcatattgtggtattgataaatctagagatggggccacagcttgcttatagctgcttagagtaaaatgattaatcagaaaaagtaatttccaaggatttgtagtcagtctgcctgaggctaatacatttattcacagcaaaatatctgctgcctaaaatgactctgcaagttacccctacaataccagctactcagagtgatgcaatcacctggttgcaataggaaattatcctggcttcagttatctagtagaacaggtgtacatatcaatcttagagctcttgagaagacccagtagccccagacccgtgcaattatattataagcactcaagtaacttctcagctaaaggaagaatgatgaagcaggaaagagagaaaaatgatttgtattttttgtggttaacttgcttagaaattttagggaggataaactcaatcttgactaataggaaatttaattaatttagagagttattaaataatagctcctccacatcagggactatgataaatgttattaacaacacaaagaagaataagactttcccttctaggaacataccatttagtgggaagaaagacagacagatacacacacacatacacacacacatgcacatacacttaaacagaagtggtagaggctgagggaaatcccataagatagacataaagaaagtgctccatttgctcagagttagaggtgaaaaccaagaatattggcagaaaagaatgttttaaagcaactttgaatgattcttccaatgatattggaattagaaaatgaaggtttaggcagagtggggagcaggacagtcactgaagtgggaaggcacacatgggctcagcaaaaccggagcacagtgtaatatcattaggggtgaagtcaagaaaagtagcttaaaattaagccatagagaatccaaagattttaaattttcttttgatttcaaaaatgatcttttcatattattgagccagaaaataattaagtcatctatatattagacaaagttgtcaaaagcaactaaatggagggatgttaaaatgggaaagaaaaaagctagcacatttaacctatagctaacaatactgtattatacacttaaaaatgtgttagcagggtaagtctcatagcacaaacaataaaataaatttcttaaagaaaaagttaactattggaatagcctagacaagaaattatgaggctttgaactgaaacaacaggaacagaatttgaaagaggagaataaacccttgggatacagaatgaacaaaattttaacactgtctgctgtaaaaagtgagggagatcagagggattaaggtgacccttggatttcaagaataaaaatatggccaacaaatccagggaacacagatgaaagagaatattcaataaagaagacatacaaattcaaatggggtcattctgaaattgtggcacatttgagatatcctcatatctatccttataatcaaaacaaactcactatctgctcattctatgaccagtgacctcactcactgctgccttatacttcagggcttacacgtagacacacacacacacaggcacacacacacacacacacacacacacacactaagaaaagtagcttaaaattagaccatagagaatctaaaattttaaaatttagaacagatcttcatctgagccaggaaccattcatctatggcttctgtcatttaatagaataaacaaaatctgcatatgaatccatgcagaactccaagttcagcatggtttctcactgttctcagagctggtacctgaagctgcaggtgtgcattctctgccacactctgtaatggatgagtggaaattcttccataaagcttttgtctattgggagcaggtaagtctaggcaaagtatgcacaatttttttttctgggatacccagtggaaaaaaatagaaaagcatcatttttaaagtactgaaagaaaaaaagtcaacctgaaacaacctcattctagccagggaaaattagtcatttcaagaaaataagagacaatcagactagaaaggaagatataaaacaatctctaactacagttgacacttgacataatcttgtatatagaaaatatgaattctcatacacatacacatgtacacagacaactccactagatttaataggcaagctcagcaaggtgcagaataaaagattgataccaaaagttctattgtatgtctgtatgttagcaatgatatgaaaatgaaattaagagcagaattatgtgtataattccaacaaaataataaaatatcttggcataaattaaacaacaacaaaaaaaaaaaacagaaaagacttgtgggctgaaaggtgcaaaatattgttgaaattaaagacctaatagaaagatactccatgttcatgggttggagggcttaacattgttaagtggcaacactccccaaattgatttatagattcatctctgtcaaaatttcaaaattctagttgtattttttttttggaaactgataaaccaaagtaaaaattcatatggaagtcccaagtaccaagatcagccaaaacaatgttgtaaaagtagaaaaaatgttgggcaactcacacttcacaatttcaaagcttattactaaactacattattcaaaacagtatggttctggaacaggataaacatataaatcaatggaatagaattgagaaccctcaaataaattcataaatttatgggcaattaattttagacaagagtgccagccaagaccattcaatggggaaagaatggtaaatggtaccaggaaaactgtgtatgtatgtgtaaaagagtgaagttgtatcttgtctcataccataaacaaaaaataactcaaaatgaattaaagacctaaatgtagaagctaaaactcttggaagaaggcataggtatacatctttgtgaccttggtgtgtatgtaaccagcagcaaatccatatgggtctgcagtaaactcaattctagctcctaggaggagagaatttggccaaggggcagaaagaagtttaaggcagaggaaaagacccgggcaagttttagagtagtagtaaaaggaagcaaagtatacttggaagagggccaagcgggtgacctgagagacctaagggccctgtttagcccttgacttagggttttacacatcaccatggttctagggtttgtgtttctcctcccttgatgttttcaccttggggcaagctgtctgtgtgctcagtggcctgccagcacttgggaggggctgctcatgtagtgttcttactggagttgcgcacatgctcacttgaggcatttttcccttaccagtggggtgttcctagagtcatatgttagttaaactccgtcatttagcctctgtgcacatgcttgagcccactcgcccaactccagagatcttatcgggaagctgctgattacaagctccagatgtttttttatctatgtggaaactgtctttcccggatgctggttgtgactaattatcatctttgagagacagtttaacaaccacctgaccatcacctgatgatcacctgacattctggagtgtgtgtggtgggggtcggggggaggggggagagggggtctcttctcgtgccctcttcatatctgcctacctattctaacaggtatacatgaagcagattcgctgtgcactgttactaattccaggggattgtgttaattttccagggagaaatgcatgaaggatagtggaggtcatcaccatgccaaccaccacttcacagcccactgcatcttgaactgcaatttccatcacttgcctgattcatataacaagttgagcaaagcaaatttattactcacagacaggcagcaaaggacagtagaagcttaggattcatggtgagtttgtctctcaaggctcagaaaaactacacaggatggatagaatcttgcctgcatatgcctcatgttgcattgcagctgagtggctctgaaagtgcactctgtcctgggttttaaacccaggggctacatttaatgggttaaagcactgtgggacatcctgttccaggagagacaagaacagaggccaggattttcctgccagttcctcattatcacaggatgtggtattgctagcacatcctacagttattcttaagaactataaaagagaaaagggagatccacattgccaaggccatccagggacttatccttcagagtaggcagtgacttcttaaatatgaaactcaaaacacaggcaaccaaagaaaaagataaatttgacttaataacattttttaaagtctgtgcttcaaaggacactttcaagaaagacaaccccaaaatggatatatacttgcaaatcatatatctcacagggaattgtatcaaggatatataaagaactcttacaactcaataatataaagacaaataacctaatttaaaaatgagaaaggatctaaacatgtctccagagaagatctgcaaatggccaaaaaatacatgaaagatgctcagcatcattagtcgttagtgaaatgcaaatcaaaatcacaatgagataccacttcacacccagtaggctgtaataaagatacccagacaatagcaggtgtaggcatagatgtgaggaaattgggaccctcaagaattgctggtgccattgtgtaaaacagtccagcagttactcaaaagttaaacatagaatgaccatgtaacccagccatccctctcctaggtatacccctcagacaataaaaaatatgttcacgtaaaaaatttatacacacacttcaaacagtattattcatattactcaaaaagtggaaatatccatcaattgatgagtggattaactaaataggttttatttctaaaataaaactggtgataaaaaggaacaaagcactgatacatgctataccatggatgaacattgaaaagctatataaagtgaagaaggcaggcacaaaggggcacatattgttggacttcatttatataaaatgtctagaatagaccgggtgcagtgactcacgcctgtaatcccagcactttgggtggctgaggcaggcggatcatgaggtcaagagatcgagaccatcctggccaacatggtgaaaccccgtctatactaaaaatacaaaaattagcttgtagtggtgcgcgctcgtagtcccagctactcaggaggctgaggcagaagaatcacttgaacccgggaggcagaggttgcagtgagccgagatcgcaccactgcactccagcctggcaatagagcaagactcagtctccaacaacaaaaacagagtctaaaataggcaaattcttaaagacggaaaatagattaatgattgccatgggctgtgggaaggaataaaagtgaaatgacatctaatgataaagaatttctttctggggtgatagaaatattctggaattcatggtgacagttacagctttgtgaatatactaaaaaccacttaattatatatttgaaagggtggatgttatggtatgcaaattatatttcaattttaaagaaaatgtcaacactcaacatgaaaatattcaaaattacagctccaacatcagaataaagactatatttttggatctctaggattctgatatgagtaagaccatgagtcattattatttggacactaaatgttaacatgatcttatttattattcaagtcatacacctaactcctctggggtgcctatccaatggagtgagattgtgccttgtttcctgtatctttctttcactactcctgggacaaagtagactttcacataatttttattcaatgctgcaggatgagaaaggacagaaaaatgggaggaagaggctgggcgtggtggctcacgcctataatcccagcacttcaggaggccgaggtgggcagatcatgaggtcaggagatcgagatcatcctggctaacacgatgaaacccagtctctactaaaaacacaaaaaattagccaggcgtggtggtgggcgcctgtagtcccagctactcgggaggctgaggtaggagaatggcgtgaacccaggaggtggagcttgcagtgagccgagatcacgccactgcactccagcctgggtgacagagtgagactctgtctcaaataaataaataaaaaataaaaagggaggaaggaagatctctcaaacacaggcatcccatgcatgactacagagaatgatacagataggtatgcagaataacgggacctgaggtcagagggggaagtctttttagagtttgttctttgaatcacttatattgaaaattcaagtggaataagtgaaggtgacaaaagtgaattacaaatcttaaagttccctgaaaatgcttgaagccatcccttagctgaggtgtgggagtgaaaaagcaaactgagacaatgtgaaatcattttctatctcgaattttccctccagcaatgttggtgtccacttccctgtctcttaatgggtgcatctatatatcacctcttgtcaatacctctactcagcaacagccagaaaatagaaagattatataagccaataaaaggaaaataaaggaacaaaaaataagaatagtggagagatcatctacttgggaggctgaggtggggaggattgcttgagcccaggaatttgggaccagcctgggcaaacagcaagaccccatttatgaaaaaaatgaataacattatctgggtatggtggcttgtagtcctagctacttaggaggctgagatgaaggactcacttgactgatcctaggagattgaggctgtaatgagatatgattgcactgctgcactccagcctgggcagcggagctagatccagtcttgaaaaaaaaagaaaaaaaaggtgaagagggaaaaaaaagaacgagtaatagaggtgcttacttcacaacactaacctcacaaacacacactaagctaggttgtgtgtataggtcagaacaaaagatctaccatttaactgacatataagattggttctcgaaaccataggacccactggaaatggtgacctcacaggaagatgcatcttgtaggaggcagctgtgaggtctggttccccgacgtgctgcagcaagtgcctttgccctgcctgtgggctccctccatggccaactctgctatggacaccagagtactctgctgtgcggtcatctgtcttctgggggcaggtgagttttcagctaaaggatcaccatcactgggctttgttttgggctctacagcagattctcaaatataccctggacctctgtgttgaccaaatattttgtgaaaggtattgacatttatatgaaaacaaataattgcattatggagtaaaaagcaaaattcatgtgagtttttaaatgaacgcaggagacttcaaacaggctccttcactgtaagacattcatccttctgccattacaactctgtctcatgcagtctcttctcctctgaggtctctcaaatgccggcgtcatgcagaacccaagacacctggtcaggaggaggggacaggaggcaagactgagatgcagcccaatgaaaggacacagtcatgtttactggtatcggcagctcccagaggaaggtctgaaattcatggtttatctccagaaagaaaatatcatagatgagtcaggaatgccaaaggaacgattttctgctgaatttcccaaagagggccccagcatcctgaggatccagcaggtagtgcgaggagattcggcagcttatttctgtgccagctcaccacccacattgatgcagagccacatcctctcagtccacaaacatcctccagacctgccttggaaacagcggtgggccaggaagggaaacgcgttacctgtacagtgaacaggtcagctctacggtattctgcaagttgagggtggaaataggggaggattgtaggaatagcatgaaacatcccaggctacgctcagaaactaagactctgtcatccaaagaacataaagatttttaagaactagacataatttttcagtttcaacattgacttaatttgtcagtttcaaaacacttagcagtgtaactctgttttttactccacactgtatgtcaagttctatatttcatgctttacatcaataattttatttaatcaccaagacacacaagcaaaggaagtgctttcttccttttcaccaagagaaattatggtcctaggagttaatttttagaaagaaagagacagagagatgggggaagaaaggggaggggaggggacaggaggagaagggaagggaggggaagggaggggaggggaggggaggggagggaagggagaaggaaacctagtaggtggcaaaaagcatttggctcaaagggttatgatttttatctcacatcatgctgcttagcattcttttaggcataatccttgttctgttccttgctgagtacccgtgcaggtttttacggatgctaggttcaagaattcctgctataaaattatagaacatctgagagatgatggaaatagagttggataaatttgtctagaatttagggaaaaggtctggcccacagatattgttcattagaaatgtgtcacctcaactttttgtcttaatgtttgtttttattctcatcactcaacagatataggccacctacagaaaaagatttgttataatttgctttgatgaaacaatttcataaaatcaaaaggcagacaaaagcaaagtcatttcaaatatatgtgcagactaagtccagcctcaccagcttggagtataaaccatgtgattccactgcagtttttgccctttgattttctaaaatcatttaatgtactcctgcccctccctcactttacccaaaaggagaaaaacccagaaaatcttccaggaagacagaagagggacaccggcttgggagcctgagaaagatccagagagatttccagaaaaagaccaaccctgagaccccagcaaggctgcagagaagatggattccaaacttcatgccatttaaagcaccagacatgtaatttaaagaaacagtcttccaaaggtagtgctttacagggaggggaaaaaaaggcaaagaggaagaaagagggtcttctggcaattcaatagtgaggagaaaaagaggaaaaaggggaaaactgagaattctgcaaaacaaaaggaaatcacaaatcaagaggacccacaaccagccccactacgaaaacaaacaaagctcactaaggagtctggattttgctagaatgatggccaaaggaacattagactaggaattttgtaaaacacctcaataacacgaaaatgagcaagatgaaagtaatacccgtacaacaaaggaaaacatctcacctctgttccctgttccctcatctcaaaagcaatcatgagtcagaagataatgtaagtctacactccaaacagaaataaatacactcaaggaagcagctgaggatataagtgaccataaccagaccaggactttaaaaactcagactacaaatggccaaaatgggaagacatcagaaaaaaacacaaattgattgaacccaggagggacatgaaagaaaaagacaaagttatcccagtcatgcaaaataaaagatgaccaagggagaataaacccaaatgaaaatttagtcaggacattgaacaaaggcaaagaaacaagtagcagaatgagaaggacatgagtgaaaccagccagttagaaggcggtcaaagaaggcgaggtcttggtatgattgcatgaggggcctggaacagcagcactgggctctgtgcagcaggacggctaagcagcaggttgtcacagtggccacagcactactggccagaccccaggagtcacagtttccctgagagagctgagggcataaacaatgataagttctccaggggatggacttcttaaatactctgagttcatcattacacattctatgcatgtagcaaaataccacaggcacccacaaataggtacacatattatgtatcaatgtttttttaaaaaaaggaaaaataaatgaattccacattcttgtataatcagagtatctacagcgctcctggagtaacccaaaccttatggttgctggaaagataaaaaaccaatgggccaattggggtgaaactctggcccggaaacgtggggtgccagccccctcagcacagatgcaatgcagagttatgggaggtgcgaatgactctgctctctgtcctgtctcctcatctgcaaaattaggaagcctgtcttgattatctccaggaacctcccacctcttcattccagcctctgacaaactctgcacattaggccaggagaagcccccgagccaagtctcttttctcattctcttccaacaagtgcttggagctccaagaaggccccctttgcactatgagcaaccaggtgctctgctgtgtggtcctttgtttcctgggagcaagtgagtcctgggttcagggagaaaattcctatctggagtgctgcaagttccaaatctaaggcctccccgagggacagcagcatcaggcgcctccctgggctgtactcaggcatgcctctctttcttttccagacaccgtggatggtggaatcactcagtccccaaagtacctgttcagaaaggaaggacagaatgtgaccctgagttgtgaacagaatttgaaccacgatgccatgtactggtaccgacaggacccagggcaagggctgagattgatctactactcacagatagtaaatgactttcagaaaggagatatagctgaagggtacagcgtctctcgggagaagaaggaatcctttcctctcactgtgacatcggcccaaaagaacccgacagctttctatctctgtgccagtagtatagacacagtgaagcacggatgtcgcctctctgtgcataaatgtgcccagtcctgcttccccgaccaggtgacagggctcctctgcactctatgatggcaggaaacgccactcagccactaagcaggtttaaaaaactgtatataactaaaactctatatataaactatgcatataaaactaaactatatatgtatacatttatatataactaaaactttatatgagactaaaatgatagttttatatagttttttaaagtatagttttatatatatataactatatatatatatcattttttaaactatagttttgtagttttatttatttatttactttttggagatggagtctcactctgttgcccaggctgcagtgcagtggcatgatctcagctcactgcaatctctgcctcctgggttcaagcaattttcctgcctcagcctcccaagtagctgggattacaggtgcataccaccacacctggctaatttttgtattttagtagaggcagggtttcaccatgttggccaggatggtctcgaactcctgacctcaggtgatccacccacctcggcctcccaaagtgctgggattacaggcatgagtcaccgtgcctggctgttttatagtttcatatagttatttttaaaaactatataaaagtttttgtatagccacttagtggctgagtgaagtttcctgtcatatatgatatagatatagatatgtttatatatgatatagatacagatatgttatatatatgttatatgttgtatataagatatatacatatagagagagtcagagagacacagagaagaaggaaaagttaatcttacaacccccagcttttttctattttaccgaatgctagatgaatagatggatgaatgaatagaaatgaatgaatgaatagaaaattttcccttctttcaggaagataaaaaagcctgtggaaagagagatgtagaagacaaaccctgtaatcacaatttcatatgacgcgtgctttaatgagagacgttagtggagtataggaagtaacacagccaattctgtctggtgacatcaggaagggcgtcaaacagaaagcaaattttgagatgaaagttattattcaaatttcaccagatgggcaagtaggatttcaccagatgggcaagcaccaaaagagggaggcaggctaagggaactatgaaaggaaagagtgatgagataataccaggaaaaaaattatcaacactccctcctccaccggaatatggcaatggaggaaaatttggacaaatgaatggagtcaagttattgaacaaaactgagtttcttgttctagtggtccttcattggatatctgtgtagaaacatccaagaggctccgtaagtgcaggtctggcacttagaagagagggttgggcttgagagaaatgtttgagtgatagttaagcacacaggtgtgagtaaaacttcccaggtgatcttgtcttctatgctttctctctttatgctctgccacctatgccttgaattagaaggtaagtggtgtaagtggtgttatttcttatgttgacttacacatgtctatttgatcatataattacatttctggaaattgatgtttctatgttattcttcaaatacaactaaaactgctggttgaaaatttttgtaaaatattgtcagaagcatcaaataaccttagtctgtcctgctgtattgtcctttttttccagggataagaaatttttagaaaaatatgagtccctgtccagaatacacaagccttggctccacgaattttcttcgaattatttcctggattctgtgtttagctttggatttcttcttctacatagcctatgggagtttgactcacacagagtcccacagaaaccaaaatactaaaacatagagatggaaaagacagttctccctgaaaaggatctaaagaacattaaaacatggtatcatgagaactacaaccagtcattgaaactaatgttttctgacggtagtaagtaaaacactggaaatgagatggctctaagctacttcactttgaacgttcagaccatattcacagatgcctacacatcagtcattctctgagccagaggatggagccaaggaccttcatggcggtgggaaagacacagtcccatagtgctatctgtgccctgtatacaagccattttccagaggtgatgggattgggaaagactgtctgtccaatgagaggaagaaaacgaaagggaagacagtaagagatagacaatcttgtttttccttgtttttcttgtccgtgactagaatggacacaaattcctttgtttcagttgaggaatttattaaagcagggcataagagcttaaatagacttcaaaaattctactgtaaaactattaaccatttgcttttttcagggtaatcttaatactgaaaagaacactgtagctatgaagtttcatcataatctccattcccacaaccaggttgtaagagagatatcatctgaagtgaaggacaggaaatttttaaaatgtaaaatatcactgaatgttttcttagcaagttttgagaggccatcgcatctattaaataggaagataatttatataaaattttaatctagaactgtatttctttaacataataaacataattgctctatttaaaatcacattgaacataacaaattgtaaattagacaagtcagaaaaccaatttgtcaactgtttaaaaattgaagaaatagtccagaattcttaggaagcagaaagggatatttaacgtgtgagaaaaaggtactaccacaatagcagctttattcccaatggctccaaattggaaaatattcaacatctgacaatgcaatggagaaatgattgtgttacatttatgtaacagaatacaatatagcacaaaaaatcaagtgtaatttccaacacagatatttcaaatataacattgaataaaatatagtagacacaaaataatacagtatgtagtcagaatagtgattaaatttggtagcattatgtatttattctgagggagacatgaggaaggcttttggaattctaaattctatatcttgatctgggtgatgattacatgagtatattcatttcaaaaattcattgggctgaacacttaagatttgtgcagtctatgtattttatacctcacttagaaaacttaaaatggcaagtatattatcttgaccaataatctattgctgtgtgacaaaccactccaaaagttagtgatttaaaagaacaacatattattatctcttgtgattctgtagaagggctcagctggacagttctcacttagggctgctcacatggtcactgtcagatagtcactgaggctgaagatatctgaagactcaactaggctgaatatccaaggtggcttttttgtgcccctgttggttcgttacctgggatggctgcagtagctgtggacccgctgagcatttctctctgtacacagccttttgatgtgattagatgagctgtctcacagcatggtggcctctaggcagctaaagttttggcatggtcgttgaccaccctaactgtgagcattcaagagacccgggtgtggtcaactaggctccttacagcccagcctgagaaatatgcagtgacacctccaccacaatccagccagctcggattcaagagaagggcacccctgggaaggtgaccactggccagtgtgtttcatcaggctggtgtctttgaagaccaaataccacaccacagccatttgaatttgtgtcattacttggtactcttattttttccctgctgctctttttgcattgaagtccttttgggatgacatcaataaaactatttcatgtttttaagattgtatttgtcaagtatttctttttcaacctttctacatgcagcctttttgttgtttttattcttcaggtgggtatttcataagcagtgtgtattttttcagcccatgatttatagaactagaatcctcagtctattgtcttaaatgtatttctgtatagttttctatagaaggtgatttcctgggttttgagttatgtttcttgcttggttttgtacattaatttttctcacattttggtttcttcttccctcatgcatgaccttatttttgttgactatttttctcatttcattattttgcctttcagaagtccgcaattcattttcattttttgatggttaactgtaacattttattatataattatattaagaaaatctgagattagtcttatctttaccattctcctgaagcctatgtgaactttagaacaattaacacctatggttccccttcatgatttccaatattttggatagtcagaatgttagatctaccataactagaagtattgttttattttaccaatacttaattacaattacctacctatgtgttaaccatcatctttaatcgtcattgtttttgcacaaaactttagtataccaactcagagcagaaagaggatccatcatattctgtgtctgccctattaagcatgcttctctgctgcatggcctttgattcctagtagtagatttatcccaggcaaagatgtagagccctattatgggctatcagatctcaacaccaaggatttcttgtgccacagccctttggtgccaggcctctgactctaacttctatctctttttccaacagttctcatggatactgaagtcccccagacaccaagaaaactggtcacattgactaattttaagagatggccttgaagtagtctcagaaaatgaaaagtcatagcacatactagctattgacaatgtatggttttggctatggcaaacccataacacaaatggaagtgtcagggaagaaaaaccaccatgagcattaaggaacaaaagaatatattataggaatgaggcctgacacaatttggggagaagatggataagtgaaagtttgaaaagggtcagaaaaaacaactctaaccagctctggtgaaggtggatgaactggacttcgcattaagttttgcattaagctgttatatccatacactatatggaaccctgaaggggctggtgtaggaatctatgaagatggctgactctatgtgccaatagccctgtgagttctcagaaaatttggtggtggcactgcagtccctcctggtcagcagggctggcagtcggtataaagagctggatgtgaagcaggggaaagtcagcataaattggaactcaccggcacttttgatgctactccttactgcctggagccagtgatgacttcagaactcagtagcagctgttttactttccccttacaaacttcctgcatttcttaccccatgatcaactctaacccggaaccatactaggaaaaaagttgtccgaaacatattccttgcttagctaagttgacacagtgataaaaccccacaagaatatccagatgctccttgacttgcagtggggtaatatcctgataaatccagcacaaattgaaaacatcataattcaacttacaatatccagcttatctgtacataaccccatcataagtcaaggagcacactgaaatgcatattgcttttgcaccattgtaaagttgaaaagtcattgaaccatcatgagaccatctgtacctgacaattagtgtttctcaaaataaataggaagattttcttctgatctgaaggtcttccagccactccctcccagacatatcataatattggaccagaggtcacccatagcaagctgtccctacttattctttgcagaaaaagtacagttacagtatgaagtggcctcattttaatgaggcccaacatacccaggaaataaaaaatgcagccacaggagcatacagatgccctttaatagatatgtcaatattaacataatgcaatagctatatttgttataaaacgatttcactattgcacaaacataatatgatgggcgaagtcttaatcttatcttttctagctacctatgccagagaagcagaactaaatattaaatgaaaggcacaattgagaggctgttataaaaatgaaaacatagggctttcaaaaaaactttccagctccttgtaattgctacatatttccaacatcgatccattaaaacaagtatcccagcctgttcaaatcaaagaatttcttatgcctcctagaaactattttcactgtccagtacttagtatgacctccattacaatagaataaatttaattattctcacaacctcaacagtgattaacacggaaacatacaagctaaattgagaaatattattagaatgtttagaattaagtccctttatatatgagggaaattgtcatgagatacacatgaggtaactatctcatttagaaaatgatgaagtggcttcaacatgattatgaagaaacattggacttccagccgaggcactggcctgtgctttatcaatatttatggtagtgccaacctgtgggtctagtgattaacaaccatgagttgtcttggtgttattactttgaggatatgaaacagaagcagcaaacagactccaatgccattcattacctaaacctacactcctttccttataggaaactcacttaagtcattacaatgctttatgtctcagtgtatctttaataaatttggaagttgaattgggaagtctttaggccactttaggcaatgtatgggttttttgttttcttttgatatggggtctcactctgtcacccaggctggagtgcagtggcatgatttcagctcattgcaacctctgcctcctgggttcaagcaattctctccctcagcctcctgagtagctgggattacaggtgtccaccaccacgcctggctaatttttgtgtttttagtagagatgggttttcaccatgttggccagattggtcttgaactcctaaccttgtgatccacccgcctcggactcccaaagttctggaattacaggcgtgagccacctcacccgacctgtatggttttttgacaggcagagatggacgtaacatcagtcatgggcaaagattaccaccagggggcagactagggcatccttgggattctgtgatcagtcatccctcctcgctggtgaatggaggcagtggtcacaactctccccagagaaggtggtgtgaggccatcacggaagatgctgctgcttctgctgcttctggggccaggtataagcctccttctacctgggagcttgggtgggcatgtgcgtgtgttggcatggtcaagtggtggccagcagggttgcaatgtggattgtttatgctcatcgaagggagagggagaggccctgctctctagaggtgtaaatggtaaggtgaaagccgccggtcagaggagatgggggattatggccctagggagatgacgggaagattgcacaaaacaaacaggactctccaggagctgggagcacagggagggagtgaggctcagctctgcctggcgtcctgtctgactcggctcccactgggctctcctctctctctggcttctgtctcagcaggctccgggcttggtgctgtcgtctctcaacatccgagctgggttatctgtaagagtggaacctctgtgaagatcgagtgccgttccctggactttcaggccacaactatgttttggtatcgtcagttcccgaaacagagtctcatgctgatggcaacttccaatgagggctccaaggccacatacgagcaaggcgtcgagaaggacaagtttctcatcaaccatgcaagcctgaccttgtccactctgacagtgaccagtgcccatcctgaagacagcagcttctacatctgcagtgctagagacacagcgccaggaggggatcagacaccgcggcaagaacccctgcagctgccctccgccccagcgggccccctgagtgctgagaggggaagcgtggagaatggaaaaccacagctttcctgactgagacatctgggagtgtgtgtgcagggggtggggcgggggggagggggagaaaaagaaaagaagcactgtgagtgtggagtatggaggaggtgtagtgtttgagacccacgaaatggcaatagagttgggcctaaagtggtcggcggacatggaaagttccctgaaaattataaaacctggaattttgccctgactctgccacattagtcatgtattcttgaatagatctacacataatcctagaggtagatatgaagacagttgtataatcactgtgtatttcctataataaacttcagcgattggctttcttgtcatcatgctgggctctcaagacaaagataaccaagaggcagccaagtagagagttatgcatgaatacgttaccttaggggaggatagcaacagcattgaatagcattcactccaaatttgtgttctgtcctccttagaccaggccaccaaaataaaatcctatcacatttcctgtaaatgttgaacgccatcatgttctccatggtgtttcggttgatgaatgaacagagtaagactcggtacaaagggaggggagcaccctctatgcctaggtacacaccatacggaatgtatcgctagggaaggtgctggtgagctggctcctgggaaaggtgtcaaggggaagagggggcagaggtacctagaaggaagacctcagacaacatggcttgtctacagagttggaaagttctgccagtagttagaagacagtaagtggaacagtgaaaatcctttcctaggagaaaccaaacatttacattgaccacaaatctgtatgaaccaacagaaaatgagcaaaacatatgaccatacatttaatagaataaacatatatgactaataaacatatagagatatttcacttcattgatgatcaggataatatgaagcaagacacaatgatacatagttttatatccacttgattagcaaaatataaaaagtttagaaatataaaatgttagcgagggtatggattcataggattacttataaattactgatgggagcataagtactatcaaccatttggaaacagttcagcattatctcgtagttgaagattcctatatcccataactcagcaattccactcctaggtttacatcaggagaagctcttgcatacacatatcagaagacataaataaaaaagtgttcttcacagcaccaaacagtagaaaaacatggcaccaagccacatatgcactgagaagagtgaatgaataaactgtgacatattcatatgagtcaaaatgaatgaactacagtgaagagcaaggttataggtgaatcttagcaatataatagcaaatgtaaaaactaagtctaatgagattatgcaaagcataatgtgcttttcataaagctaaaaacaagtcaagaaaataattttcaggactgaaatatattagaacaaattatattgaaaggaaagcaaagatgagttgtatgctggagcctactttatcagctcatgggagctgactgtatacatttttcccaactccagttttagtgacatcattttgttagcttgaaattggccatagtgagggtatttacactacagaaattagcaaacacagcaaattacggtttgctttattttcctccagacttagctgtcaaccctttaccctttaccaacacactactggcagggaataataatgacccaagttcaggatttttataaggctggggcatggcaggaaatagaatgagagagaactatatggctatacattgaaatattgtcaaggtctatcttgcataatgttgaggaggagaagttttacaagttcctattatgttttttaaaaatattcattgacaagcaatgcctgtgtgttatgaaccacaggttaagataaataaaattgaatgcatatagcatcaaaaagaagagaaaacaaataaatgaatagattagagttcttacaagaaaaggatcaagggcattttatagtcaaaaccaggagtgaaatagcagtggcttaactgctaccatcctcatatagatatcggctgctgaattaatcacagcggacaacctaccacccaacagacctggacccttgtcaaccctttgcaacacagaacaggggtttagacaataagggtgaacgtgaaagcgtggagatgacacctggcccctgaccaaggtggaactgactggaacaagatgggagccaattctgcagtgaacacgctgctgcttttcgtctccgctatgaccgtgtgttgctggtggttaaataccccacctgggttcagtcacctcagactgtgccattgccactgatctcaggacccactttagttgtagccttttactctgttagcgttttcagcctggagaacagagctagtaaaatacttataaaatattccactgcttcactaacggcatggaaaagacaagagcttttaaggctctggcatgaaacagggagacagtggttacattcctatttcacgcagtcactatttccgtctacgttaagctgaggagtgtagtgtttcggtgacatttagcatggaacgctgctgggttcagacctgacattcccaaaccagctgactgtcaaggacacagcctactgcctacctatattaccttaggaaacgagacaacagcattgaacagcattcagtccatatttgtgttctgtcttccttggacaagtaccaacaaaataaaatcctatcacatttcctgtaaattttgaatgacataaatttttgatgagcaattctttttgaagtgttgaactttctgttctgattttatattctactctctgtgctttgttgtatttaaaatcaagttcacctttcagaggcagtgatgggtgaggtaagagacagactcttacatcctcctccccaacacacacacacacacatacacacacacacacacacacacacacggaggcactgtttttcccagtaatggagaagccatgggaagaatttcagaggtttcaagggagctagggtcgtctaattcctctatatccttggatatccccattcttaatgtcaaaaataatctctcgaactggtttcccagagtctcaacccatttgctatagtacatgcaccatctcaggtgtccaaagatgaatatttgataagctacttctcaacttcatacctctgctgctgtttttccattctggaatgtggaaagcagtgtgactcctattaactgaccagtagtcaattttaactacccataaatatgtgagtgtcttttatctgtaatctcctatctggtgccatttttgaaaaccagttaagactcttttatcctaaaaaatgaactatgtctaatttcttgaaagtaattattgatgaaatactccctggagagtctgaagcccctgatattgcatatttaattgttatcctccttttaataaaaggtataggaagaaattttaaatattattcctaaataccttacatcaagatgagctagagttaattaagtgggacgagggataatgaattcaagggcatttaagaaagattaaagaaccagtgcaaaatgttttaatcaggaaagaaattagtgtgtttaatgacaggaaagaagtcagcagagtgacaggagcagggggaggaggtggttgagtacagggcaaaattgaagaaggcaggaaggcaccagaccactcagaaccttactggtcaaggtaaatgatacagaatccaacataaagcttaataggagacactgaggttttcaacatttgacttctttagtaatcagattcgtggctgtgtgtgtatctgtgtatttaatcaccctggtcacaaagtgaagaaataatggaccatgcagggaaggcaaaatgttacctctaccctcttgcagtttttcggctggtcctgagaatggaagattaacaggaaggaaagcatacacatgtatttaatacaagttttacatcacatgaaagcccccataattaaaggaagaactgaatgtgcagttagagttgaacattcatatattgaattgggcaaagggtcatacattgtggaaaggtgaaaaagtaaaggggcttaggctagggttgctggttgaatggcaaagtgactaggaaggtgaggattagtttaacaagctttttttgttacagattccttggcctcaacatcatcccattctatcttggatgttaagaatattcttttttcctggtatagataagacatcttttatatgggaagcttattccatttttcaagaagaaaaggggaagggtcagagtactcctcttatacttgctattgtgtttaatgcctctagctcaaaatattccttatgccaaagtggcatattttgggcagagggttgggaggcttatgctgccaccctccagcagtgtgaacagagttgatgcggaggaaaaacttagctcaggcaagcagtagtttagctcagataatgatgatggtgttagaaatatggggaaaatgagacatttaaaaggaagtaaatcaaaggacttggcaattgattagacatgagcagcaatatgcagggggtggtgggtggtgattaagagagactgctacacacagacaaataagaaggaccaagtgggaagaagatcaagatttactttgagattgggagtgccttagggacagtaatctaaccaggaatatgcagagagcagttggatgtacaagtcatggactcagaaaatggatctggataagaagcacacctttgggacatttagcatcactggaagaatgaaagtgcctccaatcccttgatatacagtttacaatgaaaagatcagagagcataggatagcggtttagggagcacacctgccttgggggactataaaaggttgagggaggcaaaatgcactgataaaccaccatcggcattagactaatggctgaataattgtgtaagtaattgctagtaacaatgctgtggagtatgtggcaggtagcacatcaagtgctgcttttttcttaatttcgctctgatacctggaatgcctttttgctgcctcgctgccgggcgggccactcccgactcaggcaggccgaggcagagctccgcgggcattggatgaattcgctcctttgaccactagagggtgatgtggatctttctataaaatatctgccgctcatcaagtggggactcacagcttcaccggatatttcagatgagatgtttaggtactgactgaccaaaaaaattgcagatatcctgggaggccaattggtctttaaaatggcaggatctaatcttaacattttgtaataacccttagcgtttacccatatctggcacctgtagttgtgtgatttctacacagttgataaatatataaatgaataataccgtgatttctattcaacattgtgctgaatttgcaaccagtgaaacaaggggaaaaagttgaaaatgagaaaggaaagaaaaataagtattggcgcacgacaagtttatttatagagattcaaaagggtctaaagaagcaatgcattatcaataacaaaatgtagtaagtttactgaatttaacataaatataaaacattattttattttcacatactacaagcagttatgttttttaacgagagacaatttacaaataatgatataaaatagaaaataaacacctaagaacaaatctattagattagcaagactatcatgcagaaaactattaaaattttaggggaatcagggccgcgctcagtggctcacgcttgtaatctcagcactttgggaggccgaggcgggcagatcatgaggtcaggagttcaagaccagcctggccaatagggtgaaacccatctctactaaacgtacaaaaaaattagccaggcatggtggtgcacgcctgtagtcccagctagtccggaagctgaggcaggagaatggcttgaacccagaaggcggagcttgcagtgaaccgagatcatgccactgcactccagcctgggcgacagagctagcctctgtctctaaataaatacatttaagggaattattttaaaagtttgaaataagccaggcgcggtggctcacacctgtaatcccagcactttgggaggccgaggtggctggatcacctgaggtcaggagttcaagaccagcctggccaacatggtgaaaccctgtctctgctaaaaacacaaaaaattagctggacatggtggtgggtgcctgtaatcccagctactcggaagcctaaggcaggagaattgctggaacccgggaggcggaggttgcagtgagctgagattgcaccattgcactccaggcggctgggcgacagaaagaaactccgtctcaaaaaaaaaaagtttgaaataagtaaagatatacaacatgatcatgaaaaagtgaatccaatagtaaggttgtttcaatttctgcagtattatctatatattcaataccacagtaatcaaactacaaaagatttactttatgaaatttgtcaaataatctacaactaagtgaaaaagaacaaaaataagcaatatttaagaagtacaaaaagtgatgtgaattgctctaccaattatcaaattatgttatcatttaggataatgaaagaagcgtgattaaataggcaaatggaaaacagaaaatgaaaaataggcccatgaatatacaggaatttcatatataatagaggtgttattgaagatatacggaggaatgatgtaatatacaagttattctggaacaggtggttatccatacaaggaaagatgaatttaaaccttacttcacaatatatgtcaaaataaatcacaagtgaattaaatgcttaaatgcaaaattcaaaatgttaggagttttggtaaataataaggattatatcttcatgaacttgggctatggaagattttttttaacaaagaattaaaaaacatgtttaccccaaataaaagaataatgcattctactaaagaaacccaacaaaaagtagcacaaacagaataaagacatacaccacaaattggaaagatattagcaacacacatagctgacaaaggttgggtatccagagtctagaaaaaactgttacaaataaataatagctaatcaaccaaaaagaaatatggacaaagggcagtttacaggcaacactggtggcctataatatatcaaatatattcaacctccttagcaaccagaaagaagcaaacaaaaactatattgcaccatgagataatattaacatactagactggcaaaattaaacgtatattaaatagcaagtgtagtcctagatgtggaacatctgaacacactcatgagctgttggtgggatcacttatttggcttaatcactttggaaagcattttgttatgttatgtaaagttgacatgttgacttgaaaactcagtctttacattgccaggtatggcaacaatcttgcacctagaaaagcagagacatgttcgagaatacaatactgtttgtagcagcacaaacacccagggaaaaattagtgtgcattaattcaagaatgaataaattctagccaatgaatataatgtaatactagatggcagtgaaagtaaattgtctagattgtgtgtcaacgtattatcacagacctaatgttgaatgaaaaaataacattgtagaaaatatataaactagctgattcctcttagatacatttcaaagacacacaaaattaaatactacataatttacagattcttgtgtaaatgctaaagactataatgccaagctagtgaatgacaaatttaaacttcagattacacctacctgggcatgacggagaaacaatgaggaaatctaaaagagtaacatggactgagaaattttcagcaataatctaactcttaagctgattggttcaggcaaaggtattcattttattgcttctatatatgcattgcatatttgtcataaatattgttctgtatagttcaacatttcattatttaatgtagccgggcacagtggctcatgcctgtaatcccaacagtttgggaggctgaggtgggcagatcacttgaggtcaggaattaaagaccagccagtgacatggtgaaagcctgtctctactaaaaatacaaaaattagccaggtgcggtggtgggggcctgtaatcccagctactcaggaggctgaggcaggagactgcttgaacccgggagacaaaggctgcagtgggctgagatcatgccactgcactccagcctgggagacagagcaagatccgtctcaaaaataaataaataaataaataaataaataaataaatacttacttaatgtaaagcagctgctatgtgattttataagtgtgtcaaaagctactatttgtaaagaccgagttgtatgattccttacctgagatggaagggaggggaagaagcaaactgacaagttaaaaaagtaaatagagtgtaaattagttcaaccattgtggaagacagtgtggagatttctcaaggatctagaaccagaaataccatttgacccagcaatcccattactgggtatatacccaaaggattataaatcattctactataaagagacatgcacatacatgtttattgcaccactgttcacaatagcaaagacttggaaccaaccaaaatgcccatcaatgatagactggataaagaaaatgtgacacatatattccgtggaatattatgcagccataaaaaaggatgagttcatgtcctttgcagggacatagatgaagttggaaaccatcattctcagcaatctatcacaagaacagaaaaccaaacaccgcatgttctccctcataagtgggagctgaacaatgagaacacatggacacagggaggggaacatcacacatggggcctgtcgggggatggagggctaggggagggatagcattaggagaaatacctaatgtagatgatgggttgataggtgcagcaaaccaccatggcatgtgtatacttatgtaacaaaagtgcacattctgcacatgtaccccagaacttaaagtataataattttttaagtaaataaatgtatgagtgattttacttaaaaaaaatagcaaaacagtgagtaacagaaaaaaaaaaaactaaaagcaggctgaaacttacactatttttaacagctaaaacaaagtctgccctcctacattctttgaaattgaaatgactctgtcccatgtacagagcatctacaaaggctatggaaagtgatcacgtcacaaggaggttgctgacgggggctaggagagtgggtgaagaagccttacagaaaaagctaccactacgatttctttctgagccaaccatgtgcctcagacttctctgctgtgtggccatttctttctggggagccaggtaaggccctgttctgaactggttgaatttcagttccaagactctctccggtggctgcagtatcaagctccctcctgcgctttttctacagctgctctctccttcctccacaggctccacggacaccaaggtcacccagagacctagacttctggtcaaagcaagtgaacagaaagcaaagatggattgtgttcctataaaagcacatagttatgtttactggtatcgtaagaagctggaagaagagctcaagtttttggtttactttcagaatgaagaacttattcagaaagcagaaataatcaatgagcgatttttagcccaatgctccaaaaactcatcctgtaccttggagatccagtccacggagtcaggggacacagcactgtatttctgtgccagcagcaaagccacagtgccgaatgttagcccttcttagaacacaaactcattatggacccagctcaggaaataagtgtgtagcaggttggtaggcactacgtaacagaaacccaacttgaaagacaataaatcagaaggaaaaacttgtaaataacagctctaagtgagcaaaaaacaaaggggggttatttaaaacaactgatggggacaaaaccccagggaaggggccagaaggcataaaaagcttggattcctcagtgttcagcatattaggtaagatatgctaggttaccctctctctctctctacatgagctttatggatttctaacaatctttatttaaagaaggggattctgtgcttttcacttggtaaagttgtgggtgcacaaataagaatgacaagcggatcaactgtgtctttcaggtagaccctgatcttctgacccagcacatttccttgaactagagacagactctaaagggctttttgactgcttctcacagctctccctgccatagaagcctagtgggaaccattagcaattcctgccctatggaatgttacaatcacaaatttttatttttatttatttatttatatttattttaatttttttttgagacggagtctcgctctgtcatccaggctggagtgcagtggcgtgatctcggctcactacaagttccgcctcctgggttcacgccattctcctgcctcagcctcccgagtagctgggactacaggcgcccgcaccacgcccagctaattttttgtatttcttttagtggagacggtgtttcaccgtgttagccaggatggtctcgatctcctgacctcgtaatccgcctgcctcggcctcccagagtgctgggattacaggcatgagccaccacgcctggccaacaattacgaacatttttaaagcaactctattgagacataagatatatatggaatatgtatgcaataaacaaatccaactgctgcaataaaacacacccgcattttaagtgtacacttcaacaaattttaacacatttttatacccatgatgtaaccatgatgacaatcaagatacaaaacattttcatcgtctcagaaagtccctcacatctctttattgaggtcttgttaatttctctcagcatcgctttgtattttttattatacagatcttatatatattttcctaaattttattttaacaagattataaatgtactcaataaaaatattttctgccaagatttcacgtcagcctaattcaatttcgtctttacatttttcaattgacatctctacctcagtatgttacataaaaataccttctccagaaattgcatatggtttggagcaaccatatgtgagctcacagcgtcagcctcattcaccatgtgaaccaatcaagtgttagtgctgctctgtttccaggtaaaatatacttatttacatgtattggaaaagctgtgaaatttctgcaaggtgtactttaagaagagatacattttgttaatgaaaacatacctatgcgttaagattaattaaagggaatattttgcagttaagcacatgatttggaatgaggggttgcagccctgctggtcaagcctctgaattccattcttgtttctcccataggccaccttcatcaggtctatagttctacaacacagagtgtcagtagtagggaacgttgttcatgtgagtgcagggaatacttgggattctgtagtttctgctcaactttgctgtggacttaaaattgctccaaaaatacaattcactaatttaaaaatggatccaagtattcagatggagaattaccatattggaggcacgaaatgggaacatactgttgaatctgttgcaatataggaagagtgtttaatgacataaactttttcattatttactcctttatctaggaaataggacactatttaacactgactacaatgaggatcttaaatacagtagaactgtctaaattccatcaataagaatagtgcatatattaccaatattgggatctgaggtgtctcagaattagtaacacatagtactgtagagattattttaaaacatagtgtggagataattttgtgattccattttaggaatactatttctgattacatggtttcttagcataaagccttactccttcatgcaagagagtatatactatcatactatgtccctgtagttttctattccaataatgctcctcaggaataaaatatacatgataatcatgatgatgatatggataatgatgaatataattgataatgcagacagtatgtagaaagatagatgatagaatttgtaccatgtttccaggactagaacacaatcatggtaagtataatataatacctgttataattgaagtctgtaaacagtctaaagaagtagtttaaattgtttcccttgacaccttgacaaatctgcaaactacacatataggctaagtacttccgaggctatatgaacgttctaaaaaacatttcctgtctgtggattccagcataatgcatattctcttctaaggcagaagtttttaacctgggatccgtggacctccaaggagtgcagagataaaattcagggaatcaataaatttgaatgggaaaatagatctttattttaactaacctccaactgaaatatacctttccttctatgatataatgagtaaaccatagtagttttagtaatatcagtgacaaagtcaatgacagaaatcacagacatttgcttatatgttgcatagatgacagttgatataaaagtcagatattttcataccatgttaaatgcagtaaatatactttcatcactatgttgaaatcatgacagttttcagattcagcaggttatatttcatataatgaaatttaaaggtgttcctatattaatatatgagaatttaaaaaaattgatatctgcatttcaaaataattttctatattctagtttatgcatttaaaatgttattctgagatggggtccttaggatttaccagtctgacaaagaggtccctggtacaatgtgaagaactcctggacacagaattagatcctcaacgcaggcatgattgacaacctgaagcctagacctacgcattggaaacaactatgttgcaagcattctttctcagagtttcacccacactgccgcacctcttaatgcttctcactctaaataattactttatattctctttctgtctctctcctgctctttgttttctctctctctctctctctctgccttgtttttcttctaggagggaacagcaacagcttctaaaccccaccagcttgcaaccaaaagtttcatcatgaaagcatcttttaattgcagataacctcagaaatagaacaacatttgtctaccaaaacaaaagcattcattaagaaatcagctaggatcctatttttatttactaaaactacttggaagaacccatgttatacaatgaatttacactcatacaaatttctactcagttggaaaatgagactttagtcagctggtacaaccctatgaccataaatgtctcatttcacttgatacagtattgacttcctaacttcctgtgaattagaacttcaggtccagaaagtaataagagcaaacgcaaatctagtgtttcttatgtactaagaactgttctaaatgctttatttatgtaatgttcatcacaggttttgggtagttacttattatctcaattttacagataaagtgaaattgaagagatgctctgtaacttttccaaggttacatagctgcgaaatggcagagacaggactaaagcccatgccgtgtcccaagtccctgctctaatccattgtcacaagggaaggggcgcttcagacactttgctattcctaaaattgcaggagtagcccccaccccatctctactgtattaattatttatagtgaatacagagggtgtagagaatcggttctttaaaaaacaaaaacaaaaacaaaaccactaaacttccaaaccccttcttgtgttgagttgagcacaggtgcatggcactctgtgtatgactctgaccaggaagtgagggattggctcttctgaccatgcaggcaggcacttgtccatttagaagggatataaaaagcttctataagcagaagaggaggtgcatgtgacttgatcgctctaattcttagtctcaccatctgcaaaatcagctgtgaaaatcagtcatcacgtagcaatgacaaattctttatattaagccccggggaggggctagatctcagccccttcccttggcctctctctctctcttagagcctgtgtctgtaacttcagagagattttgtcgctgccatggggagctgggtcctctgctatgtgaccctgtgtctcctgggagcaggtgagctcagcacacatccaggtggtcaattcctattctgggcttgccaggcccttccctggccagcacctcccttccaggcatgatctccagcctttgtctcttggacccttggatgctgacatctatcagatgccattccagctcactggggctggatgggatgtgactctggagtggaaacggaatttgagacacaatgacatgtactgctactggtactggcaggacccaaagcaaaatctgagactgatctattactcaagggttgaaaaggatattcagagaggagatctaactgaaggctacgtgtctgccaagaggagaaggggctatttcttctcagggtgaagttggcccacaccagccaaacagctttgtacttctgtcctgggagcgcaccacaatggaagcacaaccattgtctctctgtgcggaaatgtgtcctcaccctacagcccccaccacatcctctagcttaattttttcatttttaatattttcttgagattttactatgtcctgttacttttgcaaacacaaaagatacaaaactgaaaagaaaatagatcctttatccaaggagctaagagtctagcaataaagtagttataacagaatggaaaatataatgtataatactaaaatcagaagtcatttgggagctttagggaggacatgcccaattctgtctgattgaatcagagaaaacaaagaggaagtcacattagaacttcaccagctagacctggttctgagtagggcattctgggcaaagagaacagcttttgcaaaggcatattaaagagtttgtcactttggggaacagtttacaaagagaaagaagatgatcaatttatatgaatcaaaagaaatggaatacatttgaggaagtagacagaaaggagtttttgaaaaagttgagtttttggttccatgaatacaataagtatgaaagtcctttgtaggctgttgctcaaaagagagagctgaagcttcattgtcatcagcagacaagcaaacaatacaatttttcaatatatatatatattttcctcatgtaactttgaaatgatactatttttccattttcctcatataactttgatccttaacaaagggcacagtttcaaacaatatgaaatcatgttagcagtagcagttcccatttgggataatagggttcaactgtctatggaacaatgagataaaaactagaagcaggcaactgcatagacaagatgtgaaattgagatgccataaggctggactagaggttgagattctgcagatttcagcatgtaaataattgaactatggggacagaaaattccaaccaaatatagatttagatcacagagataaaaggcatggaagttaagactgtggtattctggttccttatggagattaaagaagcctaagagtgaggagtgattagaacatgggatgtaaaaacaaaagagggaaagagagagagtgagagttttgttttgtctagtatttgatatttctaagaaaattcgggaaaaaaataaaggtaacccaggcagaagaagccgcaaacacttcttgggtaacagggaatagttggtaaaatgtcatatgttagtttactgaggtgcacagaaccttttccactgaggttccttttggaaagacacaagacttagctaagattccaagaaatcaccaaagtaggaaatgaaaagcctccatgaatgaagttgcatgagtctcctaccagtggataaaggataggataggataaaagaatagctgcaaaggataaaagaatagctgaggcactgaagtagaagctccaagtgagaggactaaatctaacaaacatgaagaattattataaaaccacaacaataaaagtggtgtaatataagggcattgatatataaataggtccaaggaaaaaaatacatgttcataaacacagagcaatggtactgcaacaatcaaagaatataattttcaataaatggtgataggaaaattgggtatctatataaagaaaaataagtgcaattggacacatctcaatatatagccaaaatcaatcccagctatattaaaagcataattgtaataaaatcacaaggcttctagaatactgtataagagcacatcttcatggccttaaagcagggaaagagttcttattccctcaatcatagggaacagattgataaaaatggctatatcaaaattaacatattgaatttatcaatgttaattatgtaacagtgacaagattgactgtatagtgacatatcattaaatatctatatatttataccaaattaatatccctatttatatttatattttcaagaaaagctagtatataaattttttaaaaacctacaaactaatttttctacagatcaatgagaaaaaggtaactgtcaatggaaaaagtgagtgaaaaccataagcacctagcaaaatctcactggtcattaaacatgtaaatgtggctatatttaataatcagggaaatagaaattgagtccaacgaaatatatacccacaagaatggctacgatgataaaaatagtaactatcaagtgttggcaaggcaaagtgtcaacaagaactctctgaatcactggctagagtgtatatcggtagatccagtttggaaaacaatttggtattatctagtaaagttcaagatgtgtgtacccactatccatcaattccacccttgagaaaggcttttctagagaaacccttctacgaaaatcaggacaagaatattcactgtaatacatctgtcatggcaaaaacgtataaaatatccaaatgtaacttaagagaagaataaatcctggttattaaaaagaaattacacagcagtgaaaattcatgaactaaaactaaacacacaaacatgaatgaatttcacaaatttgaatgaaaaattacattgcagaagaaaggtacagtattgtctcgtttgtgtaaagtttgaaagcatctaaaactaaacactattttgtttgcttatgtgcctatgcattaaaatataaaagagaagcaaataattacaaaaacaaacacctcaatagagttagagaacagaggcatggaatctgggaaaagaaataagagctttcaaatattctggtaatcttttatttcctgtgccaagttgtttttttaagtgatcattctgttggtattttatcaagttattatctatatattcaaagtccattttgtaatgtggagaaaacaacctcactgaacaattaaattagtaaggagaaatctatggaaagatatacattaagctgttaacattacttacctgaaatgaggatgagatggaggaagagaaaagtaagcgaaaaaaaaaatcatcaaaaaatgcacaatttaaaataaatagttacagagagaaaaagcaaaaaagggaggttatgtaaaagaagcactagtaaatgaacaagctaaaatacaccagaaagagctagaaggtgaagtatttttcaaagcagtcactagtttcagaatcataaagatagcaattacaacagagatctgaaatatataaaagataattagataactaatagccagaaggaatgtccagtcttgagttagaaactgatgctcaaattaatggcaaaggacgtttttgaaacaactgtgaaactttgcataaaaactaaatagtagataagatgaaaatgcatcgatgagaaaggatgatcattaactgaaaaaaagcttatcaaacagaatttcaagaatattgtttactaaaaaaagtgtctatatatctacacatttatatatggggcagagaaggatctagaaagactcactaaggtgttaacagtgataattgctttctggcagtggtatcatatttttattttgttattttattttctaactttctaaaatatgagtgtattgcttatattagcaaaaatagacataacatatttttaaatgaatacaaaataactgagttatatttcctgagttaggataaaagctttttttccctgatactatgaagtgtttttgctcaggaacatgaagcaataacatgatgattataagtcagtggagggatcacgtcacaagaaggtgcagaaaggggatgaaaaagcctcatccctttgcaacgtcaatgcgatcatgggcaccaggctcctcggctgtgcagccctgtgtctcctggcagcagatgcgccctgagcacaaaagaaaaatccttgtcctgggcttgccaaccagcagatccaagctttgttttgttttgttttgttttgttttgttttgtttgttaagctctttcctggactctttctacagcatctgtttctttctcttacagactcttttcatgccaaagtcacacagactccaggacatttggtcaaaggaaaaggacagaaaacaaagatggattgtacccccgaaaaaggacatacttttgtttattggtatcaacagaatcagaataaagagtttatgcttttgatttcctttcagaatgaacaagttcttcaagaaacggagatgcacaagaagcgattctcatctcaatgccccaagaacgcaccctgcagcctggcaatcctgtcctcagaaccgggagacacggcactgtatctctgcgccagcagtcaatccacagcactgaaatgtcagttcctcttagcacacaaacttgtcacagacccagctcaggaagcaggtgatgtattaggctggaagggagtaacagaaaataactggagccagcttaagccacagtgtaatttaacacaaggataaagggtgtttagcagaagtcaagaggtgatagaagttctgaaaaggcaccactagggctgggctctagaatggctatctctccagcgctgatttttattcaattttggctgctgaatgcttttctctccctgtacaccatctctttttctccaggcctcgtggtgagaatgagatggtcactaaagattacaaattcagttgccatcatttccctacactgataaataccaggctggctctttctaagcctcaattcaaaatcccaagagaaaaaaacagatcagtcatgatccagccattaaccttctcacagagcactcagcaggaggcatgtatgtatatatttaaaatcacataaatattacttttccactcagctcaagcaagggaagtgctccgtttttctgtatgtacatttggtcttgttgcttctacatgatagagagtactcatacccatttcttcagaaatacatagccagattttctccagttttctgccagaattgaaaattcttgtacaaataccttcatagacttgtatgattgctttataggattatatacccagagcaagtcatgattgctgagacatggaattctatgcatattttatctatctaaataccaccacgggttcttcaggatcactgtatacatctgcaatcccacataaaagtgaatagggtgttttcctacatcctaatatctcctttaatccttatccagtgatctagattgttctcagtctagcaatgtaaagagattccaatctctgtctctctttctctccaccccccacccctgcaaccctctcacctactgccagaatatcatcagtgtttaccataaagatacaggtgacaattttttaaaactaaataaaaccaataatttaaaggaactgagagattacgttatactactataataataactggcagcaatctagaaggctgaataatgttctctccctccttttctttcctttgcaattttctaattactaatgagtttgagcacttcttcatgtgatagtggtcctggatttctgttctcaaaatggcctatccatatccgctggcaaattctctattgacagttctatattttcctcaatgatttgtagggggtcctgagatatacaagatattagtctcctttctgaaactttaggcactggaaataccaccacccaatatggcaccacctctgtcccagacttcaaagaatcagtagatgtgggaggaaccaggtgatctcttaccttagcaggtgcatgcgtgttatctccattatgtgaatgagacttctatctttcacttccactctgctgagtgctcaacttgctgtctcttccattattactcatgtctttaagcagcatagaaaagttaccagccatggctgtccccaaactactatcacccactgacaaccctttccatccagaactgctgaaaaaatgcttcactccatttagctgtgcttttttacaatatggggcaaatttgattcaaattaattcttattgctcttttctaagtgaattatgctgcctggttatagcaaaggacagaaaaacttcacacatctttttggaagacttaatacttgcccacacattatctcttttagggccaaattccatccactgcaaacacctatctccttgagctcttgatatgacagctgatccattttgatttcacaaatgcttacagagcaactcccattcactgagacataaaggcattcagaaactttcagctacactacatggaattttggtctctggggaaagggagaagagtaaaaagaaccataaaaatgtatttcaaataatgtgtataaggatgacaaaatatagattactttcatgaaaaacattagaacattatattgtctttgggagtgatttatcagtggataaattaaaacaaattcctgaggaagtttgggaaaaaaataaatttaggaaaacaaattttaaatgatttcctgaaaaccatcagggtttaccataaagttaacaattgaaaaaaatcaaataatttaatagtgaatgagaatatgaatacagaaaattcatatgaatatggaatgaaatattagtaaaaatgtgtttgagaacacttacaaatgaattttgttgtccaatttgattaagagtctagtcaaagtgttactcttttaaactacttgtaatagtgtcagtttgacaatctggaacaaaaacctttaaaatgcttatttttgggaatttggctctaaatcaaaatagatagttgttactgtacttgttctattgccttaagccactataaaacttgacaaaaattgtaagacaactatgttcagacatcagacaacaggcagtacacgtcgccatctctgggaaagaggaaacctagaaggggaatttcgctattgtcctaagactctgccttggtatgacttctgggctgcaccacaagtatatgaagcccaagcagtgggcagtggtctacccagcatagggaggcagagattgagttcagaagtatggacatggctgatagtgatagggataagctactgcagagaaggaagctatgcagaataagacctccaaatattttatgaggtccccttaagtctttggtcaaaaactaagcagcaaatgcatgggaaacgcctccataagacctggcagagaacagttgctgggtagttgtgagaggaatagagattctgacagtcatacgagcgtgggagacatgaatcctgactgggcagagctgagaggccttgctgaaacccctgggaatgcagctggcaccacataagggtcacatctcaagagaaggactaccaacgtcctagagtaaaccactccagaactgccctaacaaagctcagcaagtctcaaaaggatctcgctgatcttccaataagttcactgccttttgaagaaaaatatctcagcactctctaaataaaggcaaatataaacatatacatatatataatctgtagatatataagtctgtagagagatatgtatctctagagtgtcaacaatgcagcatctacaattttgatcttgacatgaaaaaaaatattagacatgggaagaactaggaaatgttacacatgggaaaaaaataaacaataaaaaccaaccctgaaataatacaaatgttggaaatttcagatgagaattttcaagcagttattatagaaatatgttcaagaatttggaggaaaatatggtcatgatttaatcaactgatgaaattgattaacccatagcaatcaagacaaaaaggggaaagacacaaattaccatatcaatgatgaaggaaagcatatgtctatagatacaaaagacattaaaatagcgacagaatattataagtatatgcaatacattcttcaacttagatgaaatgaaatttcttgaataataccacttaccaaaatgattcaaaatgaaataagaaatgtaaagaacttcaaatgaaggaagttaaattttttatcaaaagccttccctcaaaggaaactccagacctgaattatttcttcatgaattctattctaaaattaaggaaaaaagactatccatcttacataaattttttaagaaaatagaagaggcagaaacacttcacaacacttttataaacccagcaaaaacctaatgccaaaatctgtcaaatgcattacagaacagtatcttttatggctgcaaatgaaagaaaacttttcacaatatattaacaaattaaatccaaatatgtctcaataaaatactggcaaactggatccaggagcacatcaaaaagcttatccaccacgatcaagttggcttcactcccgggatgcaagggtggttcgacatatgcaaatcaataaacgtaattcatcacattaacagatctaaagacagaaaccacgtgattatctcaatagatgcagagaaggccttcaataaaattcaacatcatgttaaaatctcaataaactaggtattgaggaacatacctcaaaataataagagctatttatgacaaacccacagccaatatcatactgaatgggcaaaagctagaagcgttccccttgaaaacgagcacaagacaaggatgccctctctcatcactcctattcaacatagtattgggagttctggccagagcaatcatgcaagagaatgaaatacaaagtattcaaataggaagggagaaagtcagattgtctttgtttgcagatgacataatcctatatctagaaaaccccattgtctcagctcaaaagcttcttaagctgataagcagcttcagcaaaatctcaggatacaaaatcaaagtacagaagtcacaagcatttcaatacatcaacaacaggcaagcagagaacaaaatcatgaatgaactcccattcacaattgctacagagataataaaatacctaggaacatagctaacaagggaagtgaaggacttcttcaagaataattacaaaccactgctcaaggaaaccagagaagacacaaacaaatggaaaaagatttaatcctcatggataggaagactcaatatcatgaaaactgccatattgtacatagtaatttatagagtcaatgctattcccattaaactaccattgacattcttcacagaattaggaaaaactattttaaaattcatatggaaccaaaaaagagcccaaacagctaagacaatcataagcaaaaagaacaaagctggaggcgtcatgctaccggacttcaaactataaggctacaataaccaaaacagcatagtactggtacaaaaacagacatatagaccaatggaacagagtagagaactcagaaatggatcacacatctacaccatctgatcttcgacaaacctgacaaaaacaagcaatggggaaaggattccctatttaataaaaggtgtggggagaactggttaaccatttgcagataattgaaactagacctcttcctcacaccttatactaaaactaaatcaagatagattaaagattacatggaaaacccaaaactataaaaaccctagaataaaatctaggctatatcattcagatataggcacatagatttcatgatgaaatcatcaaaagcaattacaacaaaagcaaaaattgacaaatgggatctaaagagcttctgtacagcaaaagaaattatcatcatagtgaacaggaaacctacagagtgggagaaaattctgtagtctatccatctgacaaagatctaatacccagaatctacaagaaattcaaacaaatttacaagaaaaaaacaaacaatcctattaaaaagtgggcaaaggacatgaacagacacttctcaaaagaagacattcatgaggccaacaaacataccaaaaaaaaaatctcaacaccactgatcattagagaaatgcaaatcaaaaccacaatgagataccatctcataccagtcagaacagccattatgaaaatgctggcaaggttgtggagaaataggaatgcttttccactgttggttagaacataaattagtttaaccattgtggaagatagtgtggtgcttcctcaaagatctagaaccggaaataccatttgacccagaaatcccattactgggtatatatccagagaaatataaatcattctattacaaagatacatgcatgcatatgttcattgcagtactattcgtaatagcaaagacatggaatcaacccaaatccccatcaacgatagactggataaagaaaatggtacatgtacaccatggaatactatgcagccataaaaatgaatgagatcatgtcctttgcagggacatggatgaagctggaagctgttatcctcaacaaactaacccaggaacagaaaaacaaatgttgcatgttctcacttataagtgggagctaaacaatgagaacacatgaacacagggagaggaacaacacacactggggtctgttggggggtggagtggggggagggagagcattaggaaaaataggtaatgcatgctggacttaatatctaggtgatgggttgataggtgtagcaaagcaccatggcaaacatttacctatgtaacaaacctgcccatcctgcacatgtaccccagaaataaaaaaaaaagaaagtagagttgctataaagtacatctactgggggggaggtaaaaccagataattcactcaaattttgatgaacaaaagcttccaaaaattaattttcttcaaaaaatagaacatttacttttggatcaaaaataaataaataaatccaaatatgtatggatatatgtatatatttgtgtgcatatacatatgtgtatatgtggacaattctacaacatgtccaagggagtttattgcaggagaaacagtggtttagcattccaaaatcaatatacttttgctgtacagaagctctttagatcccatttgtcaatttttgcttctctcaactaatgtgatcaccaagaatagttcatattcagctcccaaatattaattccactcaaattactgcccacagcagggggcaccaaaacagcatgtttactttaagaattgcaaataagggcaatgatttttttttttttacgttgaagacaaagccaaaataaaagtttttatgatcattgtcttgtttatattcatcagatgcctggctaaggaatttactggaacaaatccgtattttcattcatattactaatggagaactctaaccaaaaagagaagaagggaggggacactggaatatgtcatctggagtgtaggcaaaggctgtaaaatgtgcttgggtactcctaaataaagcaacaactattcaaaattacacaggagaggcagaagtggtgaaggaggaggtagatgaacaagagaggccatgaggagttggtaattaccaaagatgactcatgtgaggacatgaaggctcattgtttattaagcctactttgtatatgtttgaaatttttagaattaaaagtaaaaatatctaaaaataagactttaccaatttgacatgcagcaggaatgattagggtaggatgccatggtgtatccatgcatgagggagggtcagtgatatggacaggagacggaaatactgggtagaagagggtggtttcccagcaaaggccccaccctcaagcctggagacctgcagctgtaaatggggacaagcattcctgttttcattcccaaaaagttgtcttttgacccaccatgccccctttcttttacccatataaaccccaaaccccaggcttcagaggcagagaagcaggctaggagacaagcagagggagggcagaacaacgtggcagagaaaaagaggaggaacgtctgaaacccgagaggagttcagctggaggtggtcagagaagagttcagtccctggatggccaaactccaaggggaagatcatcttctcactccatccccccttccagctccccatccatcccactgagagccactgccaccactcaataaaaccccacattcatccttcaagcccatgtgtgacccaattcttccaggacgctgggcaagagctcgggacacagaaagctgtcacactggccctctgcccttgcaaaaaggcagagggtccactgagctggttaacactcaagccgtgtgcagatggcagaactatctgcccacttgggctcctgcatctgtccctctgtgtgttccctttcccctcaggggtttgagcagttgcagcaactgaaaaggtgagcaacactcctgtcgcacgtccttccaggggggtcagggaactcttcctttttcaccaggacgagcacagatctgaagcagcaaagagccagttgtttattacattgaacaatgtttcacactatcaccataactgttctgtacttgcaatctgctgcattaaatattagctctttcctcctaaagtcaggaataatttgtgttagaataaaatgaattctttaatgaacaactgtattttcagctaattcaaaataggaatgaaggcgttaagtacttctttgaagcacatacccacattaaactaacatctttctacaataagccaatatttttaataaagctctgtgcccagaaaacattgaccagaaaagcaggagccactaaaaaataggagcaatttgaaacaaagttaggaatcctgtccttcttacaacaaaaaagtctcaaactttacagagaatgtattcaaattgcatagtttaccaagaactgagttagaataaatgattaaatgcagaaaaaaaggagaagagttataatgtcctatcattcaagtgagactagacttcctttattcgaaattcaatttggttttgaattttctccagcctgttttatcaggaggatgatgtcaccttgaacaactgaaatggatatgccctgagaaaggggagagatacaactctctggtggttgccagtaaagcgccagaaaaacagaagagaagcaagtagaagaatttcagcatctgctaagaacatataatacataagccaacatggcatctttctttaagacccagtaccttgggagggacaatgacatcacttcctgaatcctcccagttttctatttccatgccctgcttccctcaacatccagagctggaaacacctccatcctgcctcttcatgccatggcctccctgctcttcttctgtggggccttttatctcctgggaacaggtgagtttggaacacagatggggaaatcactgccttaaattttccaggttctgaattaagcctatcctcagagattgcagcacgaggatatttaccagtttctgtcttcaatttctgtcttatttcccacagggtccatggatgctgatgttacccagaccccaaggaataggatcacaaagacaggaaagaggattatgctggaatgttctcagactaagggtcatgatagaatgtactggtatcgacaagacccaggactgggcctacggttgatctattactcctttgatgtcaaagatataaacaaaggagagatctctgatggatacagtgtctctcgacaggcacaggctaaattctccctgtccctagagtctgccatccccaaccagacagctctttacttctgtgccaccagtgatttgcacagtgcttcttggccacctgctctctacacagaaagacagacacatgggtgagttgtttgctctgaagggtacctggatgtgggttgtgggatgtggggtgtttagagctttcagtggtcttaggtagtgtgagctaagggccactttggatcaatgtccccaagccatgtgatgactctgaaagcacaggctacactgaatcaatctcccctgtctatttatttttcctagggagctagacgaatggtgacctttcaggagaaggaacttgagcatttgacagaagctcatgattttcaacaagagcatttcttatgagctgaatacaatgcagtttttatagtccttttgccattatttccacccactttgcaacatcccacactttgttctgttcccactgacagctcctttatcctgtctaacctttctctgccccagttcttccaagctcagctccaccatttagctctataattgattgcctttctactaaaaacaaaataactagcttgttttctaaaacttcactgtaagtaaatttaattgtcattaaatctgactcagaagttaaagttcaagtaacagagactgtgatttacaaaagtaatttttcatctactaccccacactttgatctctgctgagattcattttaacctgcaggtgcagatagacttgcattattatctggatgtactgaatttcaaaaaataaaattccctgtccccagtatgaggtcaaagctaggagcttggaagtgccccttgtttccaggcactagaataattccctggttcccctgctgtggggattcttttaggagccagtgaggcccaggcacaaaaataattgatcaaggactgccagagcttgacgtaaaagtcttcctgagaatcaagttgatgtcttcctcatggatttagtcttcttgtcccataagcctcaattatttcagcaaacgaatccatgggacttggtgactgttcagaaatgaagaatccaacttgttcccttttctacctgttctcatgtgtaaagcgtgttacttttagggattctttctcattggcttccatttaaaaaacaggtttctccagagttttgtttcctgctttctatgcacacctcatcaagtcttatcagcaataataattcttcccttacaagctgttaactgtcccagttaattgtctcctggacatttctgatagatttccccaggatttttccttctgccctcctttttcctcagtacacatgtctttcctcaaccttcgcattcattgtcatgacaacttctttcataggttcctgcctggcaaattcaactatctactggacacttgaagctggatgctccataggcaattcaaactcagtttatccctgaaataaactgcctctccatccttgcacttgcccattttggccacacactgtatttctatctcagtgattggaacagcccttctaggttcctcatttttgctatgcctcatattaaatcagtttctaaatctattacttgtatatcacacattgtcatagtttgtgttctccaaaagcagattttgagaggaaaattagtgtgcgggaaggtttgtggaaactgcccttgcagtccacgtgggcagagggaaatggggcagagggagaagttgggctttgctgtatcctcaacaaagtccttcactcaccccacagggagctctgagtctggatggtcctttagtgccatcccaaggtgagatggcaggtcttattcccactttccttgtaaccatgtcattatatgtgagttgctctgagaagcactcatgaatttgatggggaggaagtgtctctttagaacaagaccattcacagagagatgtcggcatcacagtttctaatatacacatatttatctgattcagttacccctctccctcctcattgcttctacctcagtgcagaccctcatcactcattgcctagaaataaatgcaatgccctctccctggcttactagcttcttacccctttcccttaccctatttctcacattgccaccagcatgaccacatatgacattcctcacacaacacacaaagccctttggaaatggttctccaactaaacatctggccaaattggccgaattcactccagcactttagactgtagctgaactgaactttttatatttccctgaatataccagcctgaattgcacaggtgtacctttgccaaagctctttccttcatctgaaatgagcttctttattccttttttgtcaaaactaattttttaattgcaaattttattacagattagtgggcacatgttgtgcaggtttgtcacatgggtaaattgcgtgatgctgagacttcaggtcccaacaatcccatcacccaggacataagcatagaatccaacaggtgattgttcagcccatgccctgctccctccttctcccatctagtgagccccagtgtctatggtttctatctttacaatcatgtgtattcatttagctcccacttaaaagaacatatagtatttgattttctgttcttgcattaattgcttaagataatgtcctccagctccatccatgttgcataaagggaatgattttgttcttttatggctgcatggtattccatggtgtatatgtaccacattttctttatccagttcactgttttgtttttttttttttttttttttttttgagacggagtctcgctctgttgcccaggtgggactgcggactgcagtggcgcaatctcggctcactgcaagctccgcttcccgggttcacgccattctcctgcctcagcctcccgagtagctgggactacaggcgcccgccaccgcgcccggctaattttttttgtatttttagtagagacggggtttcaccttgttagccaggatggtctcgatctcctgacctcatgatccacccgcctcggcctcccaaagtgctgggattacaggcgtgagccaccgcgccgggccccagttcactgttaatgggtgcttaggttgattcaatgtccttgctattgtgtatagtgcagcaatgaacataatgggtacatgtgtccttatgacagaataaattatttccctttgggtatatatccagtagtgggattgctgggtcaaatggtagctccattttaagttctttgagaaatctccaaactgctttacacagtggctgaactggtttgcattcccactaacagtgtataagtgttccctttcttctgcagcctcaccaacatctattgtttgaaataaatcttgagtgcctggctaatcctcacatatcctttaattctcagatcaaagatgagcttatctataacagtttttccaatgtctgtagacaaagattcagcttttctcttgtgtgtgatagtttatgcatttcaaagttatcatagttgttatgtcccttcatacttctttaacttttattttgggttcatggggacatgtacaggtttgttataataaacagttatatgcaaaactgtgatgctgatctctttctttttatggctgcatagtattccgtgatgtatatgtactatattttcttcatccagcttactgttggcggccttttaggttgattccatgtgtctgctattgtgaatagtgctgcaatgaacatctgtgtgcatgtgtctttatgatagaatgatttctactcttttgggtatatgcacaataatgggactgctgggtcaaatggaagttctgttttcagttctttgaggaatcaccatactgctttccatgatggctgaactaatttacactctcaccagcagcatataagcaatcccttttctcagcagccttgtaaggatctgttattttttgacttctgataataaccattctgcctggtgtgagatggtatctcattgtagttttgatttgcatttctctgatgattagtgatgttgagcattttttcatatgtgtgttgatcacatgtataccttttgctgaaaagtgtctgttcatgccctttgcccactttttaatggggttatctgttttctgcttgtaagtttaagttccttatagaatctggatattagacctttgatgcatatatagtctgcaaatattttctcccattctgtagtttgtctatttactctgttgatagtttcatttgctgtgcagaagctctttaattaggtctcatttgtcaatttttgatttttttgaaattgcttttggtatcttcatcatgaaatctttgccaagtcatatgattaggatggtataatatttcctaggttatcttccaggggctttatagctttaggtttatatttaagtctttaatccatcttgggttgatttttgtatatggtataaggaagggatctagttcaatcttttgcatatggctagccagttatccccagcaccatgtgttgaataaggagttctttccccgttgcttgttctagtcagctttgtcaaagaccagatggctgtaggtatgtggcattatttcctggctctctattctatcccattggtctatatctgtttttgtacagtacaccatgctgttttagttactgtacccttgcagtgtaggttaaagttggtaacatgatgcctctagcccttgttcttttgacttaggattgccttggctatttgggctttttggttccacatgaattttaaaatactgttttttctaattctgtgaaaaacgtcattagtagtttgataggaatattaggttggtgcaaatgtatttgcagtttttgcattgttggaatttgccatttggtattgaaatacattcttaagtaaatgtggttatgttatacatcgttttaatgaacattttcactttatgttttttgctaattacttattacttgctacttatttggtatttattttagactatacacatggtgttagacaaaaagcagatttgagtgattttcttattcaagttcaaactgagtcataaagtggcagagataacccgcaacatcagcaacgcatctggcccaggaactgctaatgaacatacatacagtgcagtgttggttccagaagtttttcaaaggagacgagagccctgaagatgcagagtatagtggcaggtgatcagaagttgacaatcaccagttgagagcaatcatcaaaaccgatcctcttacaactaggcgagaagttgttaaagaactcgaggttgaccactctacagttgttcagcatttgaaacaaattggaaaggtgaaaaactcgataagtgggtgcctcataaagtgagcaaaactttttttaaattgtcattttaaagtgtcatctcttattctatgcaataacaacgaaccatttcttgatcagattgtgacatagaatgaaaagtggattttatatgacaactgccaacaatcatctcaatggttggcccgagaagctccaaagcacttcccaaagccaaacttgcaccaaaaaagtcatagttgtgggcgggaagcctcccaggtgccgaggcaagagaccgaggacacgagctgctccagtataataaaatataaaataagaatagttataccagatatagatcttagatatgattatatatgaatatcattaatcattagtttgtagcaattactctttattccaatattataataatcctcgctctataatcataacctaggaaaaaccagggtatacagagttaggagctgaggagacatagcgagaagcaaccagaaaagagtgcgagccttctgttatgcccggacaggtccatcagagggctccttggtctagcggtagtgttagcgtcaaggaaaaacacccgctacttagcggaccgggaaagggagtctccctttccctgggggagtttagagaagactgtactcctccacctcttgtggaaggcctgacatcattcaggcccgcccgcggttatccggaggcctaaccgtctccctgtgatgctgtgcttcagtggtcacgctcctagtccaccttcatgctccatcttgtacacctggctctgccgtttacttagcagtagcaaattagtgaaagtactaaaagtctctgataagcagaataatagtgtaagctgtttctctttctcctctctctctctgcctcggctgccaggcaggaaagggccccctgtccagtggacacatgacccatgtggccttacctatcattggagaaggctcacatgccctatcctgcccctttgtcttgtatccaataaatatcagcgcagcctggcattcggggccactactggtctctgtgtcttggtggtagtggttccccgggcccagctgtcttttcttttatctctttgtcttgtgtctttatttctatgctctctcatctctgcacacgaggagaaaacccaccaaccctgtgggtctggaccctacacgtggtcactgtctggtggtctgctgccagtgtgatccaccacagctttctgaatcctggcaaaaccattacatctgagaagtatcttcagcaaattgatgagatgcaccaaaaactgcaatgcctgcacctggcattggtcaacagaaagggcccaattcttgtccacaacaacatctgaccgcaggttgcacaaccaatgcttcaaaagttgaataaattgggctacaaacttttgcctcatctgccatattcacctgacctctcaccaacaaactaccacttcttcaagcatcttgtcaactttttgcagggaaaatgcttccacagccagcaagatgcagaaaatgctttccaagaattcactgaattccaaagcatagatttttatgctacaagaataaacaaacttatttctcattggcaaaaaatgtgttgattgtaatggttcctattttgattaataaagatgtgcttgagcctagttatgatttaaaattcaccaaaactacaattacttttgcgccaacttaataccatcgaatctacattgctttggccagtaaggccattttaatgatattgattcttcctatccatgtgcatagaatgtttttctatttgtttttgtcatctctgatttctttgagcagtgttttgtaattcctgttgtagagacctttcacttctctggttagctgtattcctaggtatttgttgtgtgtggcaattatgaatggaatcatattcctgatttggctcttagcttgtatgtttttagtgtattggaatgccactttttaatgttgattttgtattttaaaactgctgaagttgtttatcagatcaagcagcttttgggcagagactatggggttttctagatatagaatcatgtcatctgcaaatagggatagtttgactttctctcttcctatttggatgtctatttcttccttctgcctgattgccctgaccaggactcccagtactatgttgaataggagtggcgaaagagggtatctttgtcttgtgctggttttctttttatactggctcttcacaaggctatatatattctttagttaaaagtagacatctcgatggaccagtgactatcaccctattaatcagtcatgggagcactgctgtgcatttggtattttaactttcgggtatgctatcacatcacagaaggcctggtcccctccccatcacctgcagccggacctgtctttgattcctaccaatcacctatattaattgtgcctaaattcaatattccgacagggcataactaccctaaggtgctaattaattcatgcttgaaggacataacagtaattaacagacaaacacatacaaccgctccccttattggacttttaaaatgaaaatctgcaacacccccctgccccatctctgacttcatcaacccaggaaaaaagacaccttgccaaacttcaaaaacaagtaagccttaattcaactctgccagagcccaaaatatttgtattttagctttgggtatccccaacagctacccctcaactaatgcaaatttttttaggaaactaacccctcaccaatctaattctacttttacaacaattatatctaacacgcacgcccatccattactaagcccatatcctaaatttacacaccccgaaaggcatcatctgtcaccttgtactacaccaaccactcgcgagtactaaaatctactccaccaactcctgctaactcaactttaaatccctgaaccctacaactgtgcatattgcctgtatcttcttctatactccaattttgcacttaacatatatacagttaatgtagcttaattatttaaagcaagacactgaaaatgtctagatgggcttatacagccccataaacagacagtcttggtcctggcctttctattaactcttagtaagattacacatgcaagcatccccatcccagtgaaagtacatctaaatcaccttgatcaaaaggagtaagtatcaggcacgcacaaatgcagctcaaaacacgttgctcagccaaacttccacgggaaacaacagtgatagacctttagcaataaacaaaagtttaactaaactatactaatatccagggttggttaatttcatgccagccaccgcagccatacaattaacctgagctaatagaactcagcataaagagtgttttaggtctatccttaataaagctaagcttcatctcagttgtataaaacccgggctgaaataaaataaactatgaaggaggctttaatacttctgaagacacaatagctaagacccaaactgggattagataccccactaggcttagccctaaactccaatagttaaatcaacaaaactattccccagaacactacaagcaatagcttaaaactcaaaggacttggcagtgctttatatccctctagaggagcctgttctataatggataaaccccaatttacctcaccacttcttgctcagcctatataccatcatcttcagcaaaccctagtaaaagtcacaaagtaagcacaagtatctacataaaaacattaggtcaaggtgtagcccatgaggcggtaagaaatgggctacattttctacacccagaaaatctcacaacccttatgaaatctaagggctcaaggaggattcagcagtatattaagagcagagtgcttaattggatgaggccataaagcacacacacaatgcccatcaccctcctcaagtatcactttagagattagtttaactaaaatccctacatatttatatagaggagacaagtcgtaacatggtaagtgtactggaaagtgcacttggatgaaccaaggtgtagcttaacacaaagcatctgtcttacacccagatttcaccataatttgaccaccttgtgccaactctagccctaaacttaactaatagtactaccgaataaccttaatcaaaccatttacccaaacaaaagtataggcgaaagaaattttacccaggcgcagtggacgtagtactgcaaggtaaagatgaaaaagttaaccaagaataaaatagcaaggatagacccttataccttctgcgtaatgaattaactagaaataactttacacagagaaccaaagccaaggcccccaaaaccagacgagctacccaagaacagctaaaagaacacacccatctatgtagtaaaatagtggggagattcatgagtagtggtgataagcctactgagcctagtgatagctggttgtccaagatagaatcttagttcaactttaaatttacctacagagccacttaatccccctgtaaatttaactgttagtctaaagagggacagctctttagacattaggaaacaaccttcatgtagagagtaaaaaacattatccccatagttggcccgaaagcagccatcaattaagaaagcattcaagctcaacatccaaccactctaaattctaatcacaccactgaactcctaacaccacattggactaatctattactttatagatgcaataatattaatataagtaacatgaaatattctccactgcttaagcctacatcagaccagaataacccactgacaaattaacagcctaatattaataaacaactcaacaaatttattattaccgatactgttaatccaacacaggcatgctctaaggaaaggttaaaaaaaattaaaaggaactcggcaaattttaccctgcctgtttaccaaaaacatcacctctagcattattagtattagaggcaccacctgccagtgacatatgttcaacggccacagtaccctgaccatgcaaaggtagcataatcacttgttccttaaatagggacttgtatgaatgaccccacgagggttcagctgtctcttacttccaaccagtgaaactgacctgcctgtgaagaggcgaacatgaataaataagatgagaagatcctatggagctttaatttattaatgcaaacaaagctcagataagcccacaggccttaaactactgtccctgcattaaatattttggttggggtgacctcggagcataatttaacctccgagcaacctatgctaagactaaacaagtttaagcgaattactatacatatattgacccaataatttgatcaacggaacaagttaccctagggataacagcgcaatcctattctagagtccatattgacaatagggtttacgacctcgatgttggatcaggacatcctaatggtgtagctgctatcaagggttcatttgttcaatgattaaagtcctacgtggtctgagttcagaccggagcaagccaggtctggtacatgtgtatttaagtcctccacacctcccatctataagtctttttaaaacaaagaaaatatgtttggttaagagaaggctggaaatgagagagggagttttactggacaaaaaatgtatagagacttatgtaacaattattatctgatattaatatctgatggtaatacataattgattgagaactagggtgaagtgacataatcccaaacatacatgggagaacgttcggggaaatcaaagctgtttttcttaatggaatctgagttctgagaaagaagacatgcaaaggaggatgcaaatatatgaaaatatatgaaatatttgttgttttaattgttaacacaaatttatatactcatatatttgagtctaattagaatatttaataagttaagtttatgcctggagtcctagttttagtattacaggcaaagaagcagagttagaaggaaggaggggaatgaattatgcatgctgtatttgagggcctttggaacttccgaatgctggtagagtacacagttggcactctgtatcaatggggtcctcatttgcagatttagtcaacctcagatgaaaaatatattttaaaaattacaaaataacaacacaacaaaaaaaatacaaaatctaaaacactgaggtataccaactatttgcatgacatttacattgtattagctattataagtaatctagagttgatttaaagtatacaggaggatgtgcctaggttatatgcaaatactgtgccattttatataagagatttaagcatcagtggatttaaactaatcccccatgaataccgagggaccactgggttgagaacatggtgctgaagctcataaaaagcccttgctgtgggattctgacataagacactgcataaaagctcaacacacatgccctatagtcagtgtctgtgattctctggaatcaaactctattctgtgaaaacaggaaccgtgatggtacaggctattcttggcaatgggaaatgaaacctcagaggtaatcctacttccatgtggtgcagagccctgagctaggagatgtttatcactgtttgggaaaccagaaccctcagcctttctcccttctgcctcgcctgaagacaggtgagtcctttgccataatatgaagtcttaatttagcattgccacattctggttccagatctttccctcctggctgaatattaagattgcattttgtctcttgtctttcttggtatctcttccctatgcaaacttcatggacactggaaggactacaaaatcctgaaaatcaagaaacctccattgagaaagggggttttactagaacaaaaatgtgtagagatatatacaaaaattatatataataatgtctgtctctgtaattattcacacttagcaattcccagcaccttctccagaggacttccctaactaaacaagaaaggtagtctttggggaaagtgttttcatcaataaaagacaagctatgtgtgagttattcctgcactgggcagcaaggagtgggtagttacctctgccttcgagtaccccttcatttgactaggacctgagactctctcatatctacttccaagcccaggttgagcacttcttttctttcctttctttagttgcttctactgtgaggtatagattttacatccagtcactgctgaagactttcatcaactcatcactcatccttcagtcatctcacactgagaacaactgggagcctcccgttttcctgtttctttaacatttgtcagaatctccccaaacctctaacacctttttttcagcagggggcagtaaaattcaatttattttttctgttctcagcacttactattaagaccagatttcatagtaaagtctaaggccaaatctcattaatgattttaatggttacttttgtcttaaaggagcccctgataggacaagagtatttcagggtttggtaaatcaaaactgttatattccttcgtgacacatgacagaggaagagtaagcaggggcccacatgtgttacatgtaaatacatacagacttgaagacatggtgttcaaatagtagagatataatagtaaaaacccaaagcctatgtcagcatcatgtgaacaaaaattttagtaaataccaactgtagatcttagtgaactagggcaaaggaagtggacaacactgggagaaattctgggattaatctttgtatctcacaatcaaaaccaaagacttttctgttaagaagaaatgggggaaagggcggagggagaatggcacttggtttagacattgtttactgcagcagcacccaaaccatttgtagcagtattaccaaagcatgtattggattatattttctgttctgtcatgattgatagtgcaattaaaggcagatggactaaaatcatcctaggcaaaggctaagttgataaagctgataaagcctgaacaccaagtcagtgaaaaatgagactgagaaagttattatcacacaataataacaccattctgaggactcagtgaattccagttactgctccaagctctttacatgtgtctatataaatagattgccccgtttaatgctcacaagttctcctgctccttgtctgatcaagccacgctgttcactggttccctcttctgcatgttcttctctcttgggtttgcagagttcattcctgttcatccttcagaacccaactcaaatgccacttcctttcccaacctttttaattaggtaaaatcttgctattacaggcactcaaagctatgtagtttttatgttcatagcttacaaaacagttgcaatggaatgttttgtaagaatattaaagacttgagttaagataagcaaagcatcaagcctactttggatgagggaagtcaacaaaaatattactcatttgatgggttaaaaggatatagatgaaactgtttcaacaggatgtctgtgggacccaggaagtttgcaggggctgtgtcatcacacacacacaatgacattatcaagagcccatcctgcttccccactactgggagacatcctctctagccccaactgtgccatgactatcaggctcctctgctacatgggcttttattttctgggggcaggtaagtcatagacacagttcattccaaaatctagaaggaataattcctctttgttgggtttgtgcctggctcagcatcaaagtccatcgtgaactctgttaccaatttttgtctcttcccataggcctcatggaagctgacatctaccagaccccaagataccttgttatagggacaggaaagaagatcactctggaatgttctcaaaccatgggccatgacaaaatgtactggtatcaacaagatccaggaatggaactacacctcatccactattcctatggagttaattccacagagaagggagatctttcctctgagtcaacagtctccagaataaggacggagcattttcccctgaccctggagtctgccaggccctcacatacctctcagtacctctgtgccagcagtgaatacacagtgctacatggataccgacactccgcacagaaagggtcgcctctaatgtgaggacatcttgcctccagaaacctcatcttaaactacagaaacccctacaaatcttcccagactcctcagccttgagggaccagtgtgctttaagtaacagtctggactaaagactatctctggctcagtctctaagaagctgagaaatgacccagccccacagtcatcctagctgactttttccttgcatctagttgttgttgttcaattgagcttgcacaaattttatccttcaagataaatgcgataatatttgacagttaccttatggctagctgaagaaagtctttgtcagctaagaaacaggaaaaggatcctttgactttctacacaggctgtctttatctctggttcatggtttcttcctcatgttaaacttgttccttcatacacagccacacaaagtccctgccctttcctgaccccagtcctgcacctgacggcttcagttcctcaatctatgactttgaacttagaataaaattttattttcacttgaaataagtgattaatgattattttcactaatatccctctaaataaatgtaattttagctatatctgcatgaggcctaaggaaaagaaaaggctccaactttggcaaagaatagtctttaacaatgtccctggattcagccctaaatctctttggagactacccttagcattggaagactatcccacggctaggtgattcttctgtcttggatatgctgaatctcagggaagtgttctctatccacatgagatcagacctgggaccctgaatagatttatttttcacagaagtatagactgctgtggagccctgggtgctgagctcagatgtgaaatctctgttttgaggttaccaaaaagtaaagtcacagagtctctgtcctggttttgcctccttaaaaagtagctttaatatgttagaaaagaatctagaaaacatcatacatattttattataaaagtcatttcttgttcattcttcttttctgtttgttttctacgatactagccattcctcactcttctttgtaggctctttctattctcattttccttattttgaccttatttctggactttttgttcttttcctcttaacctatacatacatcttagacaatatcatccaatctatttcttgaagcatatgtctcattagtttcaaacttattctctagctgcctactagatatttccacctctatatttcataggctcctcaactcagcttgtccccaacagagttcatcatcctcccaatagcatatcctcttttggagacaccatcatcttgggaggctcatctccaatggtcaggtgtccttagcaaacacctagaagattaacaaccctccttactgaactcttagcctcgtgccttacccttctggccttcttgcaaaagtgatatgcatcagagagttggccctctgtattcatgagttccacatccctggattcaaccaaccacagatcaaaaatatttttttcaaaaatcgtgtctatactgaacacatacagacttttttcgttgtcactattctaaacaatacagtataacaactatttacataacattgcattgtatttggtactatgaattatttacagatgacttaaagtatatgggagtatatgcatagattatatgtaaatactaaaccattttttatcagggacttgggcatttgtagattttgttatccttgggaggtcttggaaccaattcaccaagacactgagggataactgtagacaaatatgatcatgctactggatcccttcaccatttctccatgcttctccctcatattcaagataaaatttaaatttcttcacctggcttaatggtattttgtgatctggactccagaaattagcttatcttgaacaccttatcctagctatttttcatcctggcaatcctgaacttctgaccattttctatagtccatgttctcttacccatctgagaccctgtacccactgtccctctatctctgaagtctgcacttcttgtctacagggctgactcctactccagcatctcattaatcactatgctaacacaagaagtcttcatctgcttcagttctcaaaagaagtgaaaagcagacacttctcaaaagaagacatttatgcagccaacagacacatgaaaaaatgctcatcatcactggtcatcagagaaatgcaaatcaaaaccacaatgagatatcatctcacaccagttagaatggcaatcattaaaaagtcaggaaacaacagatgctggagaggatgtggagaaataggaacaattttacattgttggtgggaatgtaaactagttcaacaattgtggaagacagtgtggcgattccttaaggatctagaactggaaataccatttgaaccagtgatcccattactgggtatatacccaaaggataacaaatcatgctactataaagacacatgcacacgtatgtttattgcagcactatttacaatagcaaagacttggaaccaacccaaatgtccatcaataatagactggattaagaaaatgtggcacatatacaccatggaatactatgcagcaattaaaaaggatgagttcatgtcctttgtagggacatggatgtagctggaaaccatcattctgagcaaactatcacaaggacagaaaaccaaacaccgtatgttctcactcataggtgggaactgaacaataagaacacttggacacagggcggggaacatcacacactggggcctgtcgtggggtggggggagtggggagggatagcattaagagaaatacctaatgtaaatgatgagttaatgggtgcagcaaaccaacatggcacatgtatacatatgtaataaacttgcatgttgtgcatatgtaccctagaacttaaagtataataataaaataaaaataaataaatatttgtgaagttataaacttttatttgcaaggtatctagaagtggaattactgagtcatagggtaagggtataataaattaaaaacaaaaacaaaacttgtaaaatgttttcagaattggctatttcattttacatttctgtcatcaatgtgtgaggttccagttttttcacatcctctccaactcttggtcttttttaataatcatgattctggaaaatgtgtagtgtcatctcactgtggtttttaaattttgtttctctaataactaatgatattgagcatctttttgtttgcttattggttattcctatatgacctctgatgacatacctattcaaatcctttactcattttaattggatggtttgtctttttatttactgagttttaactgtcccttatcagacgtatgactttcaaaactttttttcctgctctgtgatttgtcttctcattttcttaacaggtgactttgaagataaaccattttttattttgatgaggtccaatttttcaatttatcttttatgaattatgcttttcctgttacttctaagaaataactaagccaaagtcataattttttttctgtcttcttctagaagtttcatagtcttttggctgggtgtggtggctcaagcctgtaatcccagcactttgggaggctgaggagggtgaatcacaaggtcaggagatcgagaccatcctggctaacatggtgaaaccctgtctctactaaagataccacaaaaattagcccggcgtggtggcgggtgcctgtagtcccagctactggggaggctgaggcaggagaatggtgtgaacctggcaggcggagcttgtagtgagcccagatggtgccactgcactccagcctgggtgacagagcaagactctgtctcaaaaaaaaaaaaaagaagaagtttcatagtttttgctcttatatttggtgtacaccatgttctgagttaattttggggtatggtgtgaggtaatgatccaagatccttattaatagtattagtatttttgcatagtgtaatttctgtactatctgttgaaaatattatttcatcattaaactgactttacaccatattcaaaaatgagttaaccatagtggatgggtttatttctgatctttgttgatcttatgttaataccacactctgttgattattacagctttatcgtatgtttttaaattggctagtgtaagtcttttaactgtgtttttctttttcaaaattgccttgactattcaagtcctgtgtatcaccatataggtttaggatcagctagtcaatctctacaaaaggtactactagaattttgagaaggattgctgtgtacttattgataaatttggagataatttctatcttaacaatactgagtcttccatgatcacggaatgctttttccattcctctagatcttttaaaatttatctcaacacttcatattttttccatgtatagatcttacatttctgttgtttaatatattgcaaagtgctattttctataatgtaagtataaaactatttttcttaatttcagttttggattattactagtattagaacacatatgatttttgctatacatactgtatcctgaaatcttgctaaatggatttgttctagaagtttctttgtagatttcataggagttattttttttttttacatacaggatcatgtagtctgagactaaaaagaattttactttttcctttccaacctggataccttttattgcaatttcttatctgactgtactgtctgacatctccagtgcaatgttgaataaaagtagtgaaaacagacattgttactttgctaccaatattataggcaaagcattcaatctcttcaagctttcatgtttaaggtgagtgtttatttctttcatgctgttagtcaggatgagagagttcaatctgttcataatttgttgagattttattatgattgggtacaggttattttgtcaaatttattttattgcacacattgagataataatctgatatgtttttattctattaatatggtatattacattagttgattttggatgtcaaggcaatcttgcattggtgggataaatcccacttggtcatagtatataatcttttcatatatggctaaatgaggtttgctaatattttatggagaccatagacatactagtttgtagtttttttgtgatttctttttatttagaatcaaagtaattctgacctgttaggctgaattaggaaattgtggactgaacttggatgaatttaggaataatctcttattctttattttgtggaagttttttcttgtaggagtggtattatttaaatatttgatggaatttaccagtaaagtcagctagtcctgagcttttctctgtgacatggagtgacaaactattgctcacatgttaaagtcaagctatggcctatatttgtattactcataaactaagaataaattttatacttttaaagtgttagaagacggaagaggaggaataggagaaaaagaactgacagaggttgcatatggcccaaaatatttactatctagctccttactgaaaaattttgctgacctctgctctatatggtgttatttactaaaatacttctttacttgtaatatgtctatccagacatgtggctttttttctcgagttactcttatgtctttctaggaatatgtctgcttcacccaagttgtcaaattcattgacatagtgttgttcataacatttccatatatttctatagggttagtaattgtattcttcattttcactcctgactttgcaatttctattttcttgctttttatcttgttcagtctgactaaagtgttatcaattttatagcatttcaagtaaacagttgtagttccattgattttctctattatttttctattatctattgaattgatttttaatttgatctttttttttttttttttttttttttgagatggagtcttactctttcgcccaagctggagtgcagtggtgctatctcggcacactgcaagctccgtctcccaggttcacgccattctcttgcctcagcctcctgagtagctgggactacagccacccgccaccacgcccagctaattttttgtattttttcttttttagtagagacggggtttcaccgtgttagccaggatggtctctatctcctgacctcatgatccgcctgcctcagcctcccaaagtgctgggattacaggcacaagccactgcgcccggcctaatttgatctttgttatttcttccttatgtttacttttggttgacttttctcttatttttccagtgtcttcaggtagaagtttagattatgatggaaacttttgtagttgttttcctaatgcagttatttaaagttatacatttccctctaatcatggctgcattccatgtacattgatatatttttagttttttagttaaaagcataatttttctagaaattccttttgaagcccatgagttatttaggagtgtgatgtttaatttccaaatatttgtgatttttccagcttctttctgttgtttatttctaattaaatccctctgtgatgagagaatatactttgaattattttaatcctcctatctgtatgttattatataacatataatctatatggggaaatactctatgagcacttgaaaaagtgtacattctgctgttgctgaatagtgtgttctaaaatcatcaattaagtcaaatagtttagtagtgtttttcaggtctttttacccttatttactttctgtctagttggtgtggtcaatttttcagactggaggatttaagtcaccaactataattttggtatgtttatttttgtttcatttctgtcatttttactttatgtactttgggactctgttgttaggccccaggagttactccacaatgctgtacgggcaaatgctttctatactaaaagtaactaaacttagagatttgtgagtaccatcaagcatacccatatatgtaaaattggagtcttagaaagagagaagtgagaaaaagacaaagaaaaaataatggccacaaacttctcaaatttgttgaaaaacattaatcaaaagaatctagaagcttaacatctctcaaacacagtaaacacaaagatatctatgtctagatacattatagttaaacttcagaaagccaaaatccacaaataatgtattgaaatcaatatattttttcaacaagagaaaaatgactcatcatttgaaagagaagagcaatacaattaatctgactttaaatcagaagtcattgtttctgactttaaatcagaaacaatggagatcagaagataatggagaggcactgaaagaaaaaaattccaccaaaaattctatatccagcaaaactatcctctgtaaatgaaaatgaaataaagacattcccagataaacaaaggctacagaattgtgtggttagcagacctgtcttacaagaaatattaaaggaagtcatccagctgagagaaaatgacattgttagcaactaaaatccatagtaagaaattaaaagcaccttaaaggataaatatatgtgtgaataaatataaaaaatacatatgcacaaacacacatagaaggaatatatattttgtatattttttatatcatttgatatacatatataggttgaaactttaatcattatgaagtgtttttctgtaataatattttttgctttaaaatttatttctctgatattaatatagccactcaagcttttatggttactaatatgacatatgcttttccatactttactttcaatatatttgtgtctttaaaactaaagtgatttcccatagtcagaaaatagttggattttggtctttctattttacaacataaaatcaactcaaaataaattaaagacataagcataagacctgaaatttttaaaatactattagaaaacataggggaaaagcttcttaatactggtcttggtaaacaatttttagatattactgcaaaagcataggcaacaaaaaccaaattagacaagtgggattacatcaaactaaaaagtttctgcacaggaaaggaaaggaaaggaaaggaaataatcaacagaataaaaaggcaagctacaaaatgggagaaaatatttgcaaaccacatgtctgaaaaaggattaatatccaaaatatataagaaattcacactcattagcaagaaaacaacccaattaacatatggccaaatgacctgaatagacatttctcaagagaaagcatacaaatgaataaatgtttatcattgctaattatcagagaaatataaattaaagccacaatgagatatcacttcacaactgatacactggctaacactacaaagacaaaagataacaagcagtgataaggatgtgcagaaaagggaatcatgtacattgttggcagaaatgtgtgatggttaatattgagtgtcaacttggttggattaaggatgcaaagtattgttcctgggtgtgtctgtgatggtgttgccaaaggagattaacatttgaatcagtggactgggaaaggcagaccaccctcaatatgggtgggtacaatctaatcagctgccagcatggctagaataaaagcagacagaagaatgtggaaggactagactgtctaaatcttctggctttcatctttctcccatgctggatgcttcctgctctcaaacatcggattccaagttcttcagtttttagactcttggacttaaactagtgatttgccaggggctcttgggccttcggccacagactgaagactacactctcaacttccctacttttgatgttttgggactcagactggcttcctggctcctcggatggcagaagacctattatgggactttacctcgtgtttgtatgagtaaataccctttaataaactcctcttcatctatcctattagttctgcccctttagagaaccatgacctaatacagaatgtaaattagtacagccattttgacaaacagtatggaggttcctcagaaaattaaaaatagaactatcatataatctagcaattccagttctagatataaatccaaaggatatgaaatctgtatgttgaataaatgtatgtactcttatgttccttgaagcattattcacatagccaaaatacagaattaacctaggtttccaccaagggatgactagatgaagaatatatgatataaattctgtatatgtatatataaatatatatattatttatacgtatatgtgtatacatacacacatacacacacacacacaatggaataatactcaaccctacagaaaaaggaaatcatataatttgcaacaacatgtttggacctggagacattatgctaagtgaaataattcaggcacagaaagacaaataatgcatggtctcacttattcatggaatccaacaaagtcaaacccacagaagcagagagtagaagggtaattgccaagcactgggatggggtttcaggaagggaggcataggaaatagggaaatgttggtcaaaaggtacatgttttaatcagacagaaagaagttctagagacctaatatgcagcatgattactatagttaataatatatgtactcttgaaaattgctaagaatgtagattttaaatgttcctaccaaaaaaaagtcaaaacaaaataagtatgtgagattatgcatatgttagcttgatttaattattccacaatgtatacatatattaaaatgtcacaatatcacattgtatacaataaatatatataatttctatttgtcaattttaaataaataataaagaaatgagatagctttcaactaagcttatatagcagtataatataaaaatttttgtagtaacaaaattatagtaattttggcttatattgaaatgtgcattaaacaagtgtttgcataaaatataattcaaattactattcatagcccacagccatgaaaacatgtgtgccttactcttggtacagaaacaaatagcttttactcctaaggaaaaaagaaaattcctgccttttgatgagaattgtttgagttttatacttattttatggggaactttgctgacctcttcattccaccatagctggttattcctcccttgcatgtacttttgtttcctgggggcagtgagtcttggaaacatttgggaaattcttattctgagcttgcctgcccacagcccaggttccttcctggagtctgcagcatcaggctctctcctcggctctctttctgtcttctgtcccctcagctcataaaccccagctcgtagaagctgaagccacctagactctaagacacctgattgcagagacaggaaaggagttctcaagataagtgccaagatttcatactggttttcacaagaatcagggttggaattagagccgactcattattcagttaacattgacattgttgattagagacatatccctattgaaaatatttcctggcaaaaaatagaagttctctttggctctgaaatctgcaactccctttcaggtgtccctgtgtccttgtaccgtcactccacagcactgcacaggcatgtgctcacctcacaaaatggcagtctcaaagggaggagtgcccacccacaagaggctccaccctattctgagaaagaacttctttcagaggaggagagaatagaactttccagaaccttttacatgagatttttttttttgggtaggaagtctgacctgagcagcaaccttgcatcagacttcaaaaggcaatatttcctatacctccttgtgctctactagtgagtacagaagtcgagaaaatgttcctaagtctatggccagttcaaatagtctcattttctatttctgagattaaattatatgtattaagatccttactctgccctttcaggtttattgctcctcagacaagatatcccctcttcaggtcccaaacacattcattgcaatgcctttcctcatccttgtcccagtcctggctctctagcttcttgagacaataacccaccctaaggtatgttgtgacatgcatcttctgtgtcactgggatccctaagtggtacaagcattcactcaattgctttagctagagtccccagaatatcttcacctcttctgtcacattcttcttccacattggtccataaacacatctttaacatttctgtttattaaaacctctcaaattcaaccactattttctatcccaacgaatactgccttagctcaggcaaccactgtcttcgatctgaattacttctttgacctgaattacttcaactcctaccaaatatccacctacctgatgtcttactctcttttctaactcagttcattctctgcagctgaaaacacttcctttccattgactttagggttatgaccagtcttctttatatctaaatgttagcctataagttttttcgtaaaaaaaaaaacaaacttccaaactacaaattcttaaaaccctccatgatttggcccttgcatacctatccagtcttgtgaaattcacctactctttacccactttttgcatacttatgctctaataatattcataatccctcagctctcccaaagctccatatgtactttctcactcactcctgagcctttacacatgctgttcacactagctagaataatctttctctccctatttatctgtactcctaatccttcatgtttaaatggcataatcatcatggctgagtctctgactatgcgtggtaaataccccatggtacccagagcttctacaatcatagagtatcacacatttcattgtttaacttattatgatagtttttaaaattattaatacaaaatatgctcaatgaggccaaggaccatgtccaaggttttaatttttgtatcttcaacagtattacaggctttgaataaagtaggtgctctttaaatatttattgaacaaaccagggttttatcagttcttgcttccctagctaagatatgatctcagtcatctaaacatttctctctcagaagtattgctgcagttatttagagattttcacattgtggtagactgaataataatctcccaaaatattcagatctgaatccttgaaaatcttgaatatgttctctcacattgctgaaaggattttgcagatgtgattaagttaaggatcttgaaatggggaggttttccttgattagctgagtgggctcaatatcatcacatactttcctaaaatatcttacctaaaaccacctctgtgaagccctctttcttttcccagacagatatggaggtttctttctttatgtgtttataataaattaaacaaacttcaacttctatcactatgttatgatatttatggtcatgtctgactcttcctagactagtatggtttttgagggattggactatatattcgcttacctttgtaaatccagtatgtaggacttggtacaatatattggatacagaattataagcccgatgggagcagacacctttatttgttgttcatgcttatatcccagaatctagtactatgtctggtgcatgtagtaagagtgaggcaagaggatgcaagtcagaaaaaggctatgtgacaatggaagtagagatcggaatgacagacacactttgaagatggaggaagggccctgagcccagtagtgcagatggcacctagaagctggaaaaggcaaagaaatggattctcccataaagcctacaaaaggaacaccacctgccaacaccttgatttttagccccataagactcatttcagacatttatcctgaacaggacagaagcaaaaaaatggaatcgatcaacataaaagcagaagtgaataaggtagaaaatgttttaatgatagaactaagaaataagcaaatgagataattgtttgccagccaaaagacagagaggacaaatacactaaaacagaagtgacaaagggaagtatcatgataaaatctatttttaaaaacaatattttgtataattctctgcaaacaacctaaaagcctaaatgaaatggctcacattataaatttagcaaaactgaccctaatgtggaaaaaagcctaaacaaaacaatgactacaaaagaaataaatgaatttgtaatagaatttcctcacagaaaagtgccagtcccatatagtttcttacagggatttttccacaccttttaaaatcagggactttgagaatacctaaaacattgcaaagtatagaacagtaggggaaatttctaaattattttcatgacatgagctaaatattaaggtgcaacaaaactgcaccttaaaaaaaaaatcaatctatagactggccaggcgtggtggctcatgcctgtaatcccaacactttgggaggctgagggtgggggtggatcatgaggtcaggagatcaataccatcccggctaacacagtgaaaccctgtctctactaaaaatacaaaaaattagccggttgtggcagcacgtgcctgtagtcccagctactcgggaggctgaggcaggagaatcgcttgaacctgggaggtggaggtttcagtgagccaagatcatgccactgcactccagcctgggcaacagagcgagactccatcttaaaaaaaaaaaaaaaaaaaaaaaaaaaaaaaactatagacttacatcactgattagtattgataaaaaagtattcaataacagagaatcaaataatgacactagaaaataatctacaaattggtgtttgctccaggatggtaagggtatttcaatattagtaaacttactcttaaaatccattatattagtcaatgggtttggcctgagcactgggaaagggatgggtaggaaatactgtctcagaaaggcattgagagagaacacatcctaatcctatctggaaatttacactccccttcagccattcacgtctcttaacaatagtctccagctttactgaactctttgcaaactccaaaaataccgtattctcttagatattgcataggctggtcccccagcctaggtctaccaggaaattatttgttttcctacaaatcttacttaaacccacactacctctgtgaagtcctttcttcccacggagatatggaggtttctttccctatgtgcttacaacaatttaaagtctgttactatattatggctttttggtcatgtctgactccttctaggcaagtatggtctttgaaagatgggactgtaaatctgtttacctctgtaactgcagtagtaggactaggaatgatatatagaatacagaatcataagcccccatggaagaagagaccttctttttgttgttcatgcttgtatcccagagtctagtactatggtgcacatagatgtatatttgttcaataatatgaaagactcaaatatgcctttgtggaattgaccctgcacttatgcctcaccatctcctacttaccccggaattatttattaactatctcatgtcttaggtctcatctcccttccctagttaagagtgggccctgttgctaagcaggtcaaaataggaggctgatgaagaaaatctctgtggaaaatgctgaagaggaacacaggaataaaaatacctttactctgatgatgccttatataaggacagatgcagttggtttaaacttctacattggctcatttctatgaatgccacacctctcaatttcagggacttcccgtgaggggcttcacaacaatctctgggctcagtggggagctactcccttggtgaatctcctcactgccactcaatgagccatcagggtgggccgtcacctctgctaagccacagaggtacaccacatcctgctcctgagaggaagggaaagacagaggatcataggaagtaaaccccttgagggaaatttcaatgtggaatttattctgtttcttgagtagcatatatattttccccatctcagaccctaacctcaagtgaacttactcccagactcacacacataaatatacgcaccagcaccatcccagcaaggaggcagctgcaacaaaaagaagcaggtgggagagtattatattacatatttaactacaggatcactccaagaattacatcccctaaaattattccctccattggaagcagactagtagccaataggaagagaaattgctaaaacaaaaatgtgttcagttggatgaagtatttatttaaaacagaaatgtatttatgaagacataattcttcagaattatattataagctaaaaataaaatcctatacccaccaactgactgaaaggaccatctctgggacaagggcaccccagagtaaccttgaatgttgagttcttggccaggacaggatggagggatcagacacaccttattatacctctcctttagagccatgatgaggtttgcttccctaaaggctaaacacaaaccagccctttgaaaagactctagcactaaaagcaacagaaagtgtgatgctgtccctcctttttcctggtaaaaggccaccaaccaaacagtgtttctggccagtctatggaggacgtgtagtgaggcttttggtgtcctttgcttcaccttttgatgtcagagagctgaaaactccacccccagatcatgctaacatggccagtttttttttacaggaatcccatgaaggggcaggaaactcaattgtggatgtatatgtttttccctttattaatattcatgactcctcctatagcttattgaatatctgtatttggccattccactcagcatgtatttcttttccctttgcctctccctagatgtgtgtttctggcttctggccagaggctgtgcttcccagcctgtcagaatggccacactgcaggctgcaaccctttatgagaaataaagctctcccttccaaatttgaacctcctcattcttccattgacagtatcaaagatcagatagttgtagatgtgtggtattatttctgagggctctgttctgttccattggtctatatctctgttttggtaccagtaccatgcgttttggttactgtagccttgtagtatagtttgaagtcaggtagtgtgatgcctccagctttgttcttttggcttaggattaacttggcaatgcgggctcttttttggttccatatgaaccttaaagtagttttttcaaattctgtgaagaaagtcattggtagcttgatagggatggcattgaatctataaattaccttgggcagtatggccattttcacgatattgattcttcctatccatgagcatggaatgttcttccatttgtttgtgtcctcctttatttcattgagcagtgtttggtagttctccttgaagaggtccttcaacgtcccttgtaagttggattcctaggtattttattctctttgaagcaattgtgaatgggagttcactcatgatttggctctctgtccattattggtgtataagaatgcttgtgatttttgcacattgattatataatcattcttctaagaagataccaatgaagtttcaaggatgattcagcatgataatgaactgtttgtaatcattcaagatatactaaatgctgaaggaagtcagttagaaataagaagtaggacaaccaaaggatagaacctagaagaagacaaagaaaggattttacagaagctgctcatgaaaagagatccaccaattctgagataaaagaactgggtttgagtaagccacttgttataagcatgctcaaggttttcagaaaaaaataaacagagctagtcaatgatacctggtaataaaagatattttgaatttcaggccattgagggtagcatgctaagtgtggttttagttttgggaattagagtaaaatgaaaataatttctgaagaagtctccagccaaactttaaaaagaaaaaaatgcaaggtatagaatatttgaaaaatttattattaatagttgaaagtacatattttagaactggactgatctggtcaccgtctagttttgccatgttacttaacctctctaaaggtagtttcctagcctataaaatggaaatagtcatacctggctctgagaggttttatttagttgagaaaatgtatgtaaattgcctgacacaatccctagccaagaataagactcaataataactaatggcggtagcagtaagagtgctactactagctgaccattctgaaagttgagcctgagtgagtgataactatacactgtgcagttgtaacttcttaacacattaattcatgtaatcttcacagcaaatccacaaggttcatacttttattagtacaacttacagagagtaaaactgaagcattcacagttaacttacttgcgtaaaatgagcttaagtagcagaacccatatttaaacttaggcactctctctccagagctttctttgttagccactaaccttgtggtagtgcaatcaagtaaatgggtttgttgtctgatatgctcagaagccaataagcatggcaccagcttttgagaaaagaaaaggttttactgcaaaactggtcagcaaggagaaataagccggctcaaatctgtcttcctgattcggggtcttggacaagttttaagggactgagagcaaggatttagtgatactgggttgacagggtctgattggagggtttcagatttaaccatttatggtaaagtaggttgaggcagatttgagcccggatctttccagccaatgaaccccttgcttctgaaagagtttcagcatccagattccaagcatcttcctgtcttcttggttccgaagggaggaatcgttcgttccaggtgttatttgaggtcaaagcttttggctctgtcgtacctacaagctaactcatattttgttatccacataacagacccagtttgggctgatcctgcagttacaaatccctccctttttgtttactttagttctcaatcttgaagaaatagagtgtctaccactctagctactttttgttgacaagggacataggtctgggtttgaggaatgaaattgtttcataaataattgcaaatattcataggtcctgagttgaggtcaaacaggtgggtcagggaattcgatatttaataactatttcatgagcagggggaattgatttaacaatcaatttaaaaaatagacagcaggtagagaccttgagagaaggaagagaaatcttaacacatacagaaatataattttgagtttaagtagaccctcaaaaaatagatcttattcctaatgaaaacacgctgtttacatattatatccaggttttttagagaacactagatggcgtcgagtggcttttggtctattatttgggtgggtctcaacttttttagaagtattaatgtaaacacagcatgacatattaaagcataaacacctctttgtttagccagtatataatctagagtaattttattatctattattactttagccaaagcacctggctctctctattgagccaccatggccattgtggtctccttggcaagctttttcagggcaatggaaaggtttttaatcatatgtttataagaagcaactccccaccatggcaacagagtttgtctaaagaaatatcctacaccatctggtgggccacctggtaaatatttaactgggaggaggtttagcatagatcttttggccaaggtgaacagttttatggtgttagtctaatgcccagcatcactaatgccacagacagagaaaggagtgactaagtaccctagtaaacagatgtctttggggcatcagctgtcaaggcattcatagtccgagggctggtcgtttgtttcatagacaaagacatatcctgaggaggcgcatagaataccagatatgttgccgggcgcggtggctcatgcctgtaatcccagcattttgggaggccgaggcgggcagattatgaggtcaggggattgggaccatcctggccaacacggtgaaaccccatctccactaaaaatacaaagaattaaccaggcatggtggcggacacctgtagtcctagccactcgggaggctcaggcaggagaatggcgtgaacccgggaggtggagcttgcagtaagctgagatcgcgccactgcactccagcctggatgacagagcaagactccatctcaaaaaaaaaaaaaaaaaaaaaaaaaaaaaaaaaataccagatatgttaacatctaagttctcagtttcaggaattttacttaggacttggtcaaagtaggagtcagagtatagaggagtctagaaggagttatctaacttacaaattggtagggaagagggcagtccttgaaggcatactaggttctttttatttaactcttgatgtaatcatgtagatctacagtttgaggacacatcagtgtatatctcctggaccagaggatagaaaacaggaagtggaaaataggtgtgttaagtaaagagatgattttcgtttctgcgttagccagtgtctggcttctgtgggcatgggcccctttatcctcagttttaaagctgttaacataagtgtctttgcaggggatgttaatggaaaacagggaactaatgatcctcccccagcaaatctgaccctacaggttatacctgtgggttttttatcataggtcaccagaatattaggcactttagagaagttggtcacagagataagcagcagatcagtgtgatcaagtgcagaggagggtttttgatgacatctctaacatttagatagattttgtgaggtaggtagggattgggacatttttatcaagaaattatctttttggccagtcatggtggctcatgcctgtaatcccagcactttgggaggctgaggtgggtggatcacttgaggtcaggagtttgagaccagcctggccaacatggtaaaaccctgtctctactaaaaatacaaaatttagccagatgtgttcacttgaactcaggaggcagaggctgcagtgagcgagatcatgccactgcattgcagcatgcacgacagagtgagactctgtctgaaaaagaaaaaaaaaaaagaaggaaagaaattatccttttatgttgaggtaaggcaagcaaaaggatataatagaggaaaattgtgggcatttttaacagaggaaatcattttgtttccctgagaggagatatttggctgatagaaaaaaaagcatcagaaaaaaataaactctacccaaggaagggctataaggtcccaaataatatttttgaggttaaatcaaggaggtagagatgattaattcaatagcatagaatagtatatatgacaacaaggcaaaaattaagttgcattaatacaggcctcgcccaatatcttgggcaagctgtctcctttaattgtctcctgtttctgccctcacagttccatcagatggaggctggttttagagacagaaatggatttccacttatctggagagctaggagccctttggccttattgggttttttaaaaagtaacttaaaaaaagattaggggcttccaagtgagttcctgggtggaaaagctggttgtgggcctccacagccatctggtagacggtcagtctggtcctttggcttttcttatctgtgaagggcatgacctgtttgggaattttacaggggccaagaggaatcttctgaaaatgggaataacttttacccatgaatgatgaatttagggcctcaacacttttaactttattgctgaatggatcactaaaggaacttcataaggacctaatctgtttgaactgtagttggtcttcagggtagcggtttttctaggtcttaagttgtacttagtttcctagacttagacaatgtaaaggaacatctataggaaacattaaaacagctagaagcgtaattatgtatagcagaaaaagttatacccagagactgtacacattttatagcatctaatgcatttacccatcatgatcattttcaatattaaaacagtatttagtcttaagaagggttgtcccacatagaattttgtaggggctaaactggtgcttacttttaggggtcattcttactctaagcagggcaagtggcaagatcttatcctatgttaaattgggtttttgacacattttggcaagtactttttttaagatattgtttatcttttcagtctttctaatagactggagcctctaagaggtgcttaatttccactgtatcctaagagctccataaatgtcttaggtaagtctgatatctctgttgtcactttgaattgaaaatgacaatccaaaggaattatgtcttttaataaagcttgagttacctcagatgcattttttgtttgacatggaaagaccttgacccatctagtgaaggtgtctataagtaccgacaggtatttatagtttcctccagctcctggcataactacaaagtctatttgacaatcttgtcttgtttctgttcctcaggtttagacccctttgcctgctggaggtggttctgtctttggattctctgtagcacaaataagacaattttgggcagccttctggatagtcttttgtacgtgcagcctgacaacaaactttggtaactaatgataggttgtgtttcttctataatgagttctttgatgtaactgggaaataatcctttatccagtgctcagggacaagaactattccttgctcattgtaaacctaggcttcttgttttacactgttccctatccaaatcttgagtataagtatgaaatccctactggtttgctctttctagatttacctttgagtactgggtttaaataaggacagattcatacttggaataagtaccagagcctttgttttaggctctcttgtcctggctgtatgtttttctgcctgattggctagattattgcatttagttatctagctatcagtctcttggtgtcctgggccgtgcattatggccattttttttgacatcaaaattgagtctaataagtctaatatctctcttgtgtgtttaattttattttttatgagattaatgagtctgtcttttatatggtcccatttgcgtgcactaccaaaaagacgtatttggagtctatataaatggttaccttttcatttgtcctgaggtgtgaagcttgtgtgacggcaataagttctgccttttgggcagagagaactgatgggaaagcctcagcttttaacattctctggtaagtcactactgcatatctggcttttcagagaccctgatccatgaagctgttcacactggtaaacattcccaggcctgggtatttcaaaaactgatttgtcaagccagacctgtttttgtagatcctctttagggatttcaggcaatggtccttcttctacctgtaataaggcaacttggagggtgcagtcttgtttaggagacaccttaatatttactcattctggtgaaaaattactgtgcatttaattttgttagcaagtcttatcccaacaaaggtattgaacattcaggcatatataggaagctatgtttaaataggtttaataggcttttcctctatggcatttgagtggctgaaagaaaggtttgcaaggatgtttccccagatgcaccagtaatagcagtgttctttgggaagacagggacttgtgttgtgtttgggatagagtatgtagctccatggtcaactagaaaatctatgcatcacttttgcacaccaattgtcatctgcacttcttggtgggaaatgtttacagagctaatagagtgtatagaagtccctgggtctcatcattactggttgctatgagtaagctgtggcatgtggtatgttgatttgtggggagttttatcttaaaagactatagacaagtatgttattaaagtttcccattttgtatagagttttacctgaaatgactggaataagatcctgtaaaaaggaggtgttctggttctgtggtattgtgattatggggattcctcttcagagaatcaccaatgggctagatattccctcttatgtgtctcagagggtcctaaacaccagatggtattgggccgcttgagatgttggggttaccaaggccccttgtatgctcctcctggatgagctattgaagttctaacccaggaatggggtatgtttttctggtggggttgcctataaaatcactttacatcataagccaattgcctcaacacctctgccagactcttagtcacttaggaataccctaaaagggcaggagaaagcaatgtatttcatctttggaatccaaggactttcatttaaataaacttctaatgaggttcttgtcacaaccatcaaaaattttaacctctgttaggatgaataattatgcaaaccaaaaactcagaaacacaaaggaaaaccaaaaccaagccgaattgaatactcaaaaagttacagcaccttactattgtacttatttttttggatgctaacccaaagccaggactgaaataatctaaccaggacctccctagggtaggattcaaaccgatgaagctgcacaaaaataggactctaatctacagtcctagaccaaagacaatttaaggtgtaagcacatattaacaaggtattgactccaaaagacatcttatccagaagaatttctttcctcaaaagagaaagtagcactcaaagggcctgaaatgtcatgacagagaataaggacctcacagctaagcctctggataaactggtctaagtagcaccactcagggtcagtgaagaaactttaattcccactgaggggctacagtgccttggcaggtgttggcctcacattgggcacctatatttgttatcaaacaaatgggtttgcacacagaagccaataactatggcaccagcttttgagaaaagaaaaggctttattgaaacaccagtcagcaaaaagaaaggagtgggttcaaatctgtttccatgatttggggtctagggcaggttttaagggatcagagagcaagggaaaggatttaggaatgttgatatggtagggtctgattagaaggcttcaaatatgactatctatggtaagatatgttaagaaacattttagcccgggatcttctgggccagtggaccgctcactactgaaagaggtctggctttcaggttccagtcatgtcttggtcttcctgtttctaaggggaggaatcttcggttctgggtattgttagaggtcaaagcttttactactgcacatgcctgggctacatgatttgcagttatgtagctgttggcagtgtgggagatgagtgttgtttctctggccaggaaataaatgaaaagtgctggttatcagggactaaattcatcacagcaccaagcaacatcctgcttttggtgctgccatgagcaacaggcttctctgctgtgtgatcatttgtctcctaagagcaggtgagtcctgggcacaggtaaggaatccctattactgaattcacaggatctaactataaaatgtttcttcataaaactcacattagtctcctctttcccaggccctgtctctatttgatcatccatttttccccccaacaggcctcaaggatgctgtagttacacaattcccaagacacagaatcattgggacaggaaaggaattcattctacagtgttcccagaatatgaatcatgttacaatgtactggtatcgacaggacccaggacttggactgaagctggtctattattcacctggcactgggagcactgaaaaaggagatatctctgaggggtatcatgtttcttgaaatactatagcatcttttcccctgaccctgaagtctgccagcaccaaccagacatctgtgtatctctatgccagcagttcatccatagcactgcatagccatatcctctccacacaaaaaaaggtgcataccaaagaggaaaagcctgccctcaaaattcctcaccccgaataagagaagtttcctcacaagtattgacaaaaagagccaaactctgtaaaatatttgaagagatttattctgagccaaacatgagtgagtgtggccagaggcagaggctcaagagggcgtaagaacatgtgtccaaggtgctcaggctacagcttggttttttggagacatcagacatcagtcaatacatgtaagctgtacattgtttcaatttggaaaggtgggacaactcaaagagggggcttccaggtcataggtggattcagagatttttcaggctggcagttggttgaaagagttaagttatcatctaaagatttgaaatcaatataaaggagtgtctgagttgtggggacaaaggttcttattatgcagatgaagcctccagggagcaggcttcagagagaagagattgtgtttcttaatcagacttttaaaaggtgccagactcataattctctcctggatcaggggaaaaaacctgaaaaggaaagaattatctacagaatgcagattttcctcatgatagacagctttgtagggccatttaaaaatatgtcaaaaaatatactttggggtaaaatattttgatttttttcagggcctgctgtgagtcatgttggtgtcttattgctacaaaaggtctgttttgtcacttgtaaggtctccattctaatgttaatgctggttggttgtgcctgaattctaaagtgaagagggtataatgaggcatgtctgaccccacttcccactaagacctgaactggtttttcaggttaactttggaatgctcttggccaagagaaggggtccacacagttggttgtggggcttgggattttatttttggtttacacaagattataccaaagcccttccctaaatttgatatgccctgcttccctctttccatttttgtccttctaggacatctttttggttgttattaaacccttagtttcttgtcaatatcccactagactacagggcatcaacatgatatgaacacttatcttggtttatttgtgatactatagcaaaatgactgagattggataatttgtaaacataaatttgtcacaattctgtaggctcggaagcccaagaacaaagcacctcagttcaatgtctggtgagggccttggtctctgcttccaagacggcaccttgagtactatgtcatcacacgagaaaagtgcctaagctagttccccagcccttttatgagtcactaattcattcatgagagcagaaccctcatgacctaatcacttctcacctcttaatactgccacaatggggattacatttcaaaatgaattttagaagaaacacattcaaaccacagcacatttctagacaaactttcagacacagatatagggaaattttaatgaaattgaattttaccaagtaaagacaaataacccagatttgcaaatacccttcaaagattcttcaaagcgatctcaatggttaatcgtgttgtttaggaaaataagaacagtggcagcaagacctcctcagtggtacaatggcctcagcagcagtaaaagagggtagtaaacattatgcagactttgtgtgggctcaggatcacccacagagaagaaggttatttgcatgtatgtgtgtaactgtgtgtgtttaagagaaatgaactatgtttatttacagggattattgaggagcagaacctcagttgggtagatgcaggtataacttttaagatcaatatccatgtctttgaatagataggctagagatacagatttactgagtagttccccaaagatgcatgttgggtgataaccacctatactagttttccaattactgcaaattcagcaggttaaagtaacaattgtcttatctcatagtcctgtatgtctgaagtccaagaaaagtggctggatttttctcagggtctcataaggcggaaatcaaggggtcagctgtctgcattctcatcaggagactggctcctcctcccagatgattcctagtattggtagaatttggttccttgtgacagcaggtctagggtcttcattttttattggctgtcacagacagcaatgagattggtcattagctccttgcagtttctttctggtcctcttgatcttcaaatgcacatcaaatctgtctcatgtttaaaatccctctgatacccacttctgcttcaagacagaaaactctgcatttaaagggctctggtgattagattaggccaacctgaatagtatttattttgtcaaataatgtaacataatcgctggggtgacatctcatttttaggttccactcatgctcaaagtgaaggacattatacatgggcatgagtcattggaggtcattcttggaattctgcctatcatatcaatggaggtcaaatgccaggaaagtcaagaatagaaattcagagagcatacaatcaaatacattaaattagaattcaaaactattcaagagatggttcagagttttggccatgcagtgcatcaaattttcttactactgcttaatcaaggacatagtgcagaagtagaatgaattggtctttattaaaatggaacaaagaccaggtcgaggaaggaaaggcaaaaaggtagaatagatttggctcttactggaagaacactggagattcaagacgagaaacaggattgttttagtccctgagttaacaaaagagaagaaagatgaaaccagaacagttgccaatgaaggagcagtgaagtggaaaggcagaatggagtgagtgtggagagcacttttctgaagagaataaacttagttatcagatgaaaagagatatataattagctttgtccttataaattttgaggtaacttactatggaaatactttttcttatcagttaattaatttggggggaggtagcacaatcctttgaaattccaataagtagaaaactacttattggaatttcaatgacctcaagatgaagccttgaaaaagaaatgtctgttagaatccagttaacaggagaacacctactgtgactattatcagcaagttggtgaaaacttcctgaagaagaaatgtgggatgatacagaaactaactaaagtctcggaacagcaaatagtttctcctcttgtgaattaattcaccttccacaattaagcagagataactcagggtacctcaaatacttatgagcttcacagaaatgaattgctaccaaattccattgatggaggaagataagaaaatgatcaaagaaaatgtaccttcagagaagaagaattgttgagaaggtagcagtcctttctcctttctctttccatgaggtagttgctattcattactttatgatggggactgggaacacaagaatcaccactcatggattaatgaattcaagatctatactttccattttgattccaaatttgaacttaaatttattcaggacaccaactgaacacttctacctaaaggtaaaactcatatcatatttccctcccaagatgcatttcctctgagttcctgacttgacagagtcatttgtttgtacaatatatgaacactgagagtcatgccacatttctttctcttttgccctggacatccaatttttatgcaagcactttcatttctaattcctaaatatcttagttctttgtttgctatctcaatcactgcaaccactgacatgtttatgcccattttactagcttaccaaataaatataaaaggtctcattaatctctctagttccttattaatcctcatttcatctaatctagtattattagtatacccaagtataatcttccaaattgcaaagatctgtttctatcactctttctgcagcatccttcagtggctcccccatggtctacaatatatacaatctaagtttattaaaatgaaaaaaattatgactatccctttaatattttgaaaaaaggaaaattagtcctttaccagaaaaaaatagcactgtattataatgtcaagttcacactagagtctaggatggtatcaaagagctctatatttttcttcttgagtcactttgatatcctcccacagtaagaccactatagttggtgtattagtctgttctcacactgctatgaagaaatacccaagactgtgtaatttataaagcaaagagggttaattgattcacagttccacattgctggggaggcatcagaaaacttacaatcatggtggagggcaaaagaagcagacaccttcttcacagggtggcaggatggagtgagtgccagcaggggaaatgccagatgcttataaaaccttcagatctcgtgagactcactcattatcatgagaacagcatggaggaaactggtcccacgatttaattacctacacctggtgccacacttgacacctgtggattatggagattataattcaaggtaaaatttagatggggacacagagccaaaccatatcagttgggtactgaggaggacatactgtattaatcatgccttcttattgtctgtattttctaatgttttgacatccatattttctgatgttttgacatctgaggacttgctgatcttggagggactgaccctctcagtgttaactcattcctagggatagcaaactactttccctagagcatgcctttcataccaaatcaaccaatccaaagcctctactccaaaccacctcctttattgggctctcatactctaagcccctattctcctaccctaattaccacagggccaggtactaaacaacttgagataatccctacactttggagcctgctcaaatttttaaactagcccatgctaagcctacttagcctgtgtaccctgcctccctcattcgttcagtgaaaaccacaataaaggttcttgccaatgtttcctgtcactccttctatcttctgacccactgttgtgattcttattgctatgatattttttctaacttggtcttgaggtctctctttttagactagccataaaccaatatagccattctctaggagacctctgactcaggggagggggagttaaattcaggtgtgagtgtcaggtgagacacagtggagcaagtgaaaacaaaatgcatgaaaggaagaaatttattactcacagaacccaaagaggttagagaggcctaagagaagtgtgaagatggcaggagctcatccagtttgggagggaagggagggtacaggcaaaggcaggaggagggggtgggcgaggccagtggaactattccttaggctttcctatgggggttatgagtcagctactttaaagaaaacgtttcagaaggagaaaacttacttgcaggactctagcattggccattaggctttatcatggtcagcagctctggagtgtgctgggttttgggtcaggggaatgagaaatagaccatatagccgacaaccacatagggagaagttttaactggggcaacgacgacagggtatgactgggtttcaaataatttgtttcaggccttaaaaaaaattggggccaggcacagtggctcacatctgtaatcctagcactttaggaggctgaggcaggtggatcagtttgaggtcaggagttctagaccagcctgatcaacgtggcaaaaccccatctctactaaaaatacaaaaatcagctaggcatggtggtgcacacctgtaatcccagctacctgggaagccaaggcaggacaatcacttgaacctgggaggcagaggttgcagtgacccaagatcatgccactacactccagcctgggtgacagagcaagactccatctcaagaaaaacaaacaaacaaacaaaaaactgggcctgtattgccctgcatagtgtgtcatgcccctttcttcttgggaatcgtaggtaacaaactgtattttcagtggcagctgtctcctcatccattagctctaccatacttgaataataatagcactcatattctaaaacacttgcttcttatgagtaggaagaatgggtcactgcttcagaatcccagacatgtccaggaggaggtgaaaaccaaatgagcagatcatacccagcctgattgaaacacacacaatatagtcagccctttgtctctatgtattcaccaactcttcaagtacacctatgtatagcatgctgacaaactctgtcttcttcaatctgctaaatcattttccactttcctacattgctgtgggccaggagagccctgggtgtagtggaaagtggggagtgattaaatccatctaggaaggagatgggtgggtgaaaaaaagtgtgtaacatatacaaaggtttctatgattacaagcctactatgaaatccagtcacacctaccactcacagtcccacttactttgctctaagccacactgaactctatctccaaacatgctgtgcataatatttcccttacacagcacacctgcaaattcctttcaaatataacttaaaacaatagcactacatgaaatgtgccattttcccaagaagattgtagactctttcccctgtattctccatagcttacacaattctccctttctacaaataccaaattatcatgtttattggtatagtgatcttaccatgggcctacaaaatccatgtggtcaaatgccacgcctttccattattccttccccagaatcttctcctatgcatgacatccatgtttaatgaatgatcagacacaattaatatgggaacagggatgctgacttctgtgtttatgcctctattctcagggtctgaaacagcacctgatatttaacaggtgttcattatgtggctgttaaaaaaaaaaaatcagcaatgtctacaatgatttgatcctgggtttgcctcttctctccttcttcctccaaagtatatttcttaaatttaacaacccttgccttccttttctgtctaagggctactggtaggtaggataatgactccgaaaggtgtctatgtcctaaacctcagaacctgtaaatatgttaccatacataataaaagataattaagtttgtagatagtttagtgtgctaattagctaaccttgaggcagggagattatcctgactcatgcaggtgggctcagtataaacacataggtacataaaagtgtatggactatggtgagagtgatgtgacaactttacctgctgttgctgctgaagataatgaaaggggccacaagtcaaggaatgtgggaggcctctagaagctagaagagaaaaaagaaaacattctctcctagagcctccaaagagcaaactgccaatgagaccgaccctggacttccaaccaaaagaactgtaagataataagtttgcgttgttttaagccactaatttgcagtaataggatacagcagtaagagaaaactattataaggctctatttccaagcagctgaaaaaaggcagctgatgaaagaagttgtgccgggaagtagcctaagaggcaaaagtacaaaggcaggagtttgaatcagacgatgccacttttaagggtggatttgtcagagacatgtgaaccacagcaactccatcttaaataggagctgggtaaaataaggttgacacctactgggctgcattcccagatggtgaaggcattctaagtcacaggatgagataggaggtcagcacaagatacgggtcgtaaagaccctgctgatgaaacaggctgtagtaaagacgctggccaaaacccaccgaaaccaaaatagtcccaagagtgacctctggtcgtcctccctgctacactcccaccagtgctatgacacaaatgccatgacatcaggaagttaccctgtatgttctaaaaaggggaagcatgaataatccatcccttgtttagcatataaaaggatataaccataaaaataggccacaagcagccctcagggctactctatctatagagaagctattcttttattcctttattttcctaataaacttgctttcactttatgctatggactccccctgaattctttcttgcttgagattcaagaatcctctcttggggtctggataaggagcctttcctgtaacagctttctggtgatgatgaagggactgtagtgaggaaaccctggaaagaaaggataactttgggtaagtgttggggtcctgtaacatcttcctggcaaaccctgaagggatgatactaagacgacctccccccaacccaaggaaatagactgcagcaccgattggacaactttgggtaagtggtggagtacctacccaggtaaagaatgggattgggatagaggctcaacttaggggagttagagtctctcctaagacagagagggttaaaggcccctcttaataaaaggcaaggacacttgaatgaccttgggttagaggcccgatttaggaggattagaatccctttccaagatttagggggttagtggcccttcttagaaagtctgtcttggtaaagtcctttcgggctaagaacgggttttgcactacaggatgttaactgctattctctttggattaatctgccttcaactccttgctgacagctgtgtgtaacaggattaggcatgtacaggatcatgggacatggggaactattttctccctaaaacagaaaacttgagagctgatgggactgctggaaaagatccttcacaaccatcatgcggccacctgaaccgttcagtgtcactgcaatgggtgggtctttctctggtgtctccgagtgcctccccttccccaccctgcctcaggcagtgctttcttctttctctgtttctctgtctctctctttttctccttgcaaactggttgaattaatggtaaaagtaactgtctcctataaagttttgattaatggaagaaagggtttttgaggctagacttaagctgtagcaaatctgatgtgctttgtgtgtttttctgtattattctgtcataaagaggggtaccttatgatagaacactggctgaggacacttgtaaactgcttttcaagacagaccagcaaactggtcagttacaaactttgctgtaggttcctgagaaaaattggatgagatttttttttgtcttgcatgtccttgggagcttgaagctgtaaccatgtggccatgttttcgcttttcacaatggcatcctgtgttcagggttctattcctgcctcaggggatgagtttttttatattcctatgtgtatgtatttacatgtattatgtgtatgtgatgtttatttctaaaagagcattgattaatgggtttaatgagagcttaaatcaaatattttgtcagaaaagtaaaaagtgtagtgccttttagttcacgtgactttaattttccagaaataaggacagttttgaagattattgataaaataaaaatatcttcaaaaatgtaaacatttggcttaaattaggcaggacacatattaagactgctaaatgcttgaaggtcataaactgcttctttaacttttgaaaaatttttaattaacctaccttgaagccattagattctagataagacctggggacatgtggagttagccacgccccctagctatgctggagtcagcctttatctgcacttctgcctggtgtgtccaaggctaggctccacacctagtacataattaaaatcctgaatttagcaacttttcgtgaaaaaccttggtaagagtcaacattataacatgtaattgatactactgaagaaacagttttatatgcaaattgtgtaaagaaagtgaaatgcatttttcattaaaattatatatatatatatatatatatatatatatatatataaagtcatgggaatttagatttttgcctagattaaagcattaaaggatcgtttcaagttaggatgaagctgactgttcaagaaagctgtggaaggcttatgaaaaaaataaccataaaagagattctgtgtgcgaacattggctaaaattaaaggggtgttattcagttattctagaaactgaacattggaataaaagcactattctactctttaacaaaaacttgtaaagggttataaaaggtttataaaaaccttaccttatggtcaacatgattaagattgaatacatttgtctataaggttttactaagaattgggtttgacatcaataatgcatgaatacagcagtgacatttggcttatttaatattacagtcatacaagaagcattatcaaatacaaaatggcatttggtttttttgggctgtatttgtataaatgtgtcattggtacatgttccaaaattattttaaaaaaaacttctttaaccctgatatgacttagtgtatgctattaataattgttaattaaaatcattgcatgccacagagtcaaccacatttttctagtcaattttggctttaattgtggctgttctaagacttttggtcatccagacaattgtctcatattagttctctgtaaaaggtggtttagaattaaatgtaggactctagaaaactgtgcttttaaatgcagattttctgataaatttggacattgtgacatcagaacagaggaaaacctttcaggactcagggagagctgaaatgttcatgaatatcaagcagaacagaagttaactgcatggactaaactagcaaaagtctaacgtgtaaaatgttttctccctaaaacagaaaacttgagagctgatgggaccgctggaaaagatccttcacaaccatcacgtggccacctgaactgttcagtgtcactgcaacgggtgggtctttctctgttgtctccgagtgcctcctcttccccaccctgcctcaggcaatgctttcctctttaactttttgtgtaaaatgttgctgatcttttgttttgtgtttcagagtcaaggaaacttttgagctattacagcttttagcaattgagtaaagtatacatgtgtgaacaaaattgagagcatatttttttctctttacttgatttctccagattttggaaactcattgtgaatagtctcaatttatggcaatatagttatttgcatgagtgtaataagaatctgttgggtttttgttttgttttgttttattattattattattattattatttttgataacaagacacaattggagaaactggttattttaccaagactttgatggaatggtatactctaaggaatcaaacttgacttgccaagtcaataaaagccccttggggaactggcctcagacctttgatacaacagtccatgtacatgatttctgacctgtggtaagtaaacaatgtcaccttctaacaggtccaggagccccaagttatcttgggaccccaagaggagaggaatttactcagctcataggtatttgaggatacaaacccatggtagggcgcggcttaaaaagagtcttatccaagattccttctaagaaacaaagttccatcaaaaccagtgttaaaagtctatgtgaaaaataattattcttgctgtactttatataaataatcaggccaagtataataaaacaaattggtcttaccatgacttatctttagtgaaaatggaaaacaggagaaagaatattacgtttcaagacctatgttacacttggtattaaattctagtctcatcagttgttgtttgtttatgcagtttaggctaaccctgcttattcctatgaaccaaccagtgatctttgcctgctactctgaaaaaacaaggcattttggtaatgtaaaaatctggatttcattctaattctgggcatgtactggaattgcctagccacctcatgtcagcttggttccagtagttgcccagttcatgaagagccttctaatttagtttacttgggatacttttgcttattttgttatattgctgttttactctttgtgtaggaatgcagactaagcttactaaatgttttcttaaaccgaatacttattaatctttcagatatcacctttcgtcaggactcaagagttctgaatggccttcatcatactgaagctttctgactgagctcctctttaccctgaacacaagagaccataatagtcaggcagaaatatcattgcccctattcagcctgaagaagttacagaagatgaatctttgtccttctacaaccttaggattaagggttcttttataaaagggaaggaggaaatgtctaagacatatgaactagagcaacttcatcctgaataggagctgagtaaaataaggctgaaacctactgggctgcatcctcagacagttaaggcattctaagtcacaggatgagataagaggtcagcacaagatacaggtccttaaaaccttgctgataaaacaggttgcagaaagaagccggctaaaacccaccaaaaccaatatggccatgggagtgactgctggtcgtcctcactgctacactcccaccagcaccataatagtttacaaatgccatagtaacatcaggatataaccccatatggcctaaaaaggggaggcttaaataatgcaccccttgcttagcatataatcaagaaataaccataaaaataggcaaccagcagccctcagggctgctctgtctttggagtagccattctcttattcctctttcttaataaacttgctttcactttactcagactccccatgaattctttcttgcacaagatccaagaaccctctcttgaagtctgattgggactttttcttgtgacagattctgccagtttctgttcttggcaggttccatttctacaaattcctcatctctacaggtttaggatcagaatgttccagcagggagcactacagctgtttcaatcttcagggagactactcatcttgggaataattccttcctttgtcctgtcagcataatgtgtatggaccctgctaagcagcacccagtcatgaaagtgctgccaccgaggaaggtaaggaggttatgacaaaaaacacagaacgtgaccctttgaacagcaggagagtagaaaccgttcttgtcatcagaaatttcagagaggaagctcactcactgtccagcttccctcccacacaatggaagcataaaaatggaaacccattttgcacaagaaattagcacgttgcccctcaagagaattatatcctatgtttgtttctgtaggagtgtctaaacagttaaaaccatgtaccattcacaaaaatctatacataaaacatgaatgtttagaaagtgaacacatatagaatgatatttgtttcaatttaagatgccaacctggatacaagtacacattcagtttgactaaaattgctgtaataataatctaaaagcaaaactaaagaagggtagaaaaaggaaggtaacagattcctgccattgataatggaaatcatagcatgtaaacaaagccaatcctgcttgggaagttcaccctgagcctgcaaggaatgtggggaggcagcatggggcgcctggatgttacaggtagttagttaggcatgagtggggcaggagagggctcccttccccccaccgcccagaatgtcagacaatctggtattgattcagagattataacgttgcctctctaataataatgcataattcagcagcctgagatagggaggtacaatctcttgctgatccacagctgttaacattaaagtgtcaattgaatgcaggcaccaaggagaagcaaagaaggtttccaataaaatctcaggtattgggcaggtgaacccaggtatgtgcattgagagacaaaagggtggagtacgaccttccagggacactccaacagaaacaggaagaaagcgtcagatgggcatgcatacaacttcctaaacacactgcgcatgctcacttccgaagtgtaaggagggcactgtgcattcgggcagcctatcctaaggggagaataatgagaaaggggcacaagatggccgcctatgaagtcccaggatcaaggttaaatgccgcacttgttcttcaagtcacctgcttggatctcttccaagtgttctttcttttcttccctgttctaaagcctttttaataagcttctactcctgctctaaaacttgtcttggtctctttttctgctctatgaccctcagtggaattttcttctgaggaggcaagaactgaggttgctgcagaccagcaaggattcactgctgataactcaagataccttccaccagtaacttggagatgacaccaagagacaacacaggcaaaggaaagtgtattaattctgttttaggtgtagaaactggagtgattggaaaataattcctaaaagaaattgaaaagtcaaattgtcaagcagtaagttcaccatcacatttaccataaagcatgtagagaaatggaaatatttacacatcatagttgagagtgcaggatttgcagtcagacagtttctggcacttagtagctttagaaagtgacttaagccctctaagccctcagttttcacatctataaaatgaagtaaataatataagcctctcagaagtggggtgagggttgaatgaaacaatatgtgagtagtttaacacagagactggcactgacttaagaaagtattgtgataaaagcagcagtggagaaaatattttgaatagctgtatgcatggcaatcctttaacctctttattcatggcaactcatttaattgccacaacaaatatgtaagtacttttattatttccattgttatggactgagttgtgctaccttcttcatttcatatgttgatgtcctaagtcccagtgccccataatgtgactgactatatttggagatggggtctttacatcgataattaagttaaaattaggtcattagggtgggccctaattcaatatgactggtgtccttatcaggaggttaggacacagacatgcaaagagggaagaccagaaagaaggtatagaaaaaaaaaaattgttatctacaagccaaggagagaggcctcagaagaaaccaactcaacaaattttaaaagatgtattttggagaacaaaactgttagaatatatttagaacagaaaaaaaccatttcttctagaactaagttggtctaaaagtgcatatcttggtaaggctctgtgaggaaatgacctaatctggagagaagctgctgggacactcgtctgtgtgtggcctgtggctcacaggggcaggtattctcagaacgcacatgggataatcaccatcctggtgtgtccaggctctgggaacaggctcttcctcgtggctttcacatgagtttcctggtgggctatgtagtcacttttctgcatccttcttttaaaggctcatgaatgtcaaagtaacacagaccctgagatgaggcaggaaagttgtatcggaatgttttcagactatcaaccagaccaaacgttctggaatccataagatccagggctggggataaatttaatctattaattattcttctgaagttggcagctttgaaaaagatgccctgagtcagcatagtcattctaaccaaaaagaaaaaagggaaaaaataatcatctttcccaacccttaaatcgtccagcactaaccagactctgagaccctctgcagcagcagcctatcagtgcagccacatcctctctgagcggatatgacaaaccccagggttgaagcgacctaacctatgagccgccacacacactcaagatgccccagacaccctgcactccgatcttactcgttcctttactgttttcatcctaattgccctcttacacatttgaccacacatttttggtcttggtggttgtattagttttctgttgctactatacaaattgccacccatttagtggcttaaaacaatgcaaatgtatcaccttacagttccgtagttcagaaaccaacataggtatcacccagccaaaatcaaggtgtcggcagatctgggttcctttctgaaggctccaggggagaatcgattttcttaccttatgggttgttttcctctatcttcaaaggcagcacgttctgttgctctgaccctacttgcatactcacagctccctctaaacactgccgggaaaggctctccacgtttaaggacctgcgtgattacattggacccacctgggtaatccacgaactgcttcctatctcaaggtcggctgattagcagccctaattgcacctgcagctttaattcccatttgccatctaactgaacatccacagctgttacgggttgcagggattattagcacctggacatctttaaggaaccattcagccctccactccgatgttccactagagggcactaacatattcctgtaatataaacattaaaattcagataatggtgggagggaaagtttgataaaattgaatactgtattatcaattttaaaaacttgatatataaatatgtctcattggggtctttcaaaagctaatcatatagtacaagaaaatacataaactggagtgactctcagaactaaaatggcctgagcgtaagtgaaatagaatttgaagtgaggtgagaattctgcagtctattcctgggctcaaaatcacatagaaaaaaacaaaaaaaggttgctttatatttaaagggacaaggcataggttctcttacaggggtttttaggaaatggttcatcagtttagtaggtgttagcttaattgcttttatcgggatactgttgccccggttgggtggatgagcagtccctaaaaagagaaggaagagagcaaagaccgaaaaagtatgaaggagaggaagggatggcatggcgtagaatgaaatgctttttcatcaaaatgcaaagatgaaggagatgtttcagagtgcccggccgtctagagggttctgtttactttccattcccgctgttagggacataggagtctgccctacattagggaaatggaatagaataagtttctagaattcctaaatatggtggaattgggtagaaaagatcagagggaaggttgtaggaaggaagggtgggaaagtaaaacaactggctcctactgtaaggctattggagcctcaggctaacagcatcattttagtaccttggttgaggtagaaaaggaaacgagagcagaatagcctcatagtcaaaggaacacagaaggagaaaccacattgctgaggagagtgaattagctagtagagggacagaatatagaattagctacctcctaaatcttgaattaatctaatatgaaaagacattgggaaaaattataatactctgaagtgtaattatgtacctgttcaactttgaaacaccacggaatgttgggaaatccaatatccactaatagtgagctatgtggacgcgagtaaattctgaaagattttgctatttgggatgtcaaggtttactaagtaacatgaaattatttacttgcagtgggtttttagaatgaaagttgttttccctctcttaagaatacccgaattcacagctaggatatggaggatttgccaggaaaatgcaaacacctgtggctgaagtagagccaagctctctccctacatttttttccagaaagcagtggtgaagaaatagaaaaagagagaatactcctcttagatcagagctaaggtcctgatagcaatcactcctttctcaatgcatggaatggaaactgttagagctgcacctctcaccatgaaggggtctgggggcaaggaactcatctctgaggtttgagagtaggcctgaaaaccgggaagggggccccttcttgtctggagatgataatgatttggcaaaaacaatgacgggctctgtgaggctctacttgtggtaggaagcttttgggaagaaaggggtagcctccttctattccaccatccaggaatacattcgttcctacaaagtacaagaaggattcaaaggtatacatgtgtcaaaaatcacaatgagcactgtaaatatatgcaatttttattcatcaactataccttaattttaaaaattaagaaaagttcaaaggtgttcgaggaggaaggcattctggggaatcctaggaaagtcacctcaatgtaggaagaacatattcaggcagaaaagagagcagtaccagcagctgctggaagatctaagagaagcttgacactcctggccccaaacactgcctggctacaacacgatatccagggacagataccttccatgtacagcaagctgtggagtggcaagaaagcaaagcacgtaccaaaagcaggcaggaagcagagctggctggtaaggctctgaggttactgcaggaagcaggtgttgcctctgcctttcaccagcttcttctggagaagaacagagaaggggaaaagaagaaagatgctccagataccatctttggtggaaacagctgctagctctagcaatgatgactaagtcaattttgctaaagagcaaagaagctgtgtgtcttggattttaaacagcaatagactagcaaaataatctatgatgtgaatctgagattttacaccctagactcttttaaaatgtagtgactaaaaatatataccagtggataaatgaagtcagggatatacttgaaattttttctgccagagtagaaatgacttcaaaatatatgataatgcagctttcatgtaatcccagctactggggaggctgaggcaggagtattgcttaaacccgggaagcggaggttgcagtgagccaagatcatgccactgcactccagcctgggtgacagagtgatactctgtctcaaaaaaaaaaaaaaagataatgcagctttcaatattataagctttatgttctcacacttctaagtgataatcaaatgtgttacaccactttataccctgagatccaaaatacataaatatttgacagtttgtacaagactgtattaataagaaaatgtggcacatgtataaagaaaggaatctcacagattaaggaaaatgacattgattacaaatgtcctcagcctgagttggctgtgttgcgtttgtacacttcagccctctgagctgaagtgggagtggtttctctcctgaaaatgtttctgaggcccaaatagctgaagaggtggagacgttacagaaaccacctggagcccccagaactggcagacacctgcctgatgctgccatgggcccccagctccttggctatgtggtcctttgccttctaggagcaggtgagtcccagaacacataggcaacttttggccttattttgtaggcctcagcccaaggcatctcctaaaggcttaagcattggagatccccttcagcgctgcctctaactctgtccccttcctttacaggccccctggaagcccaagtgacccagaacccaagatacctcatcacagtgactggaaagaagttaacagtgacttgttctcagaatatgaaccatgagtatatgtcctggtatcgacaagacccagggctgggcttaaggcagatctactattcaatgaatgttgaggtgactgataagggagatgttcctgaagggtacaaagtctctcgaaaagagaagaggaatttccccctgatcctggagtcgcccagccccaaccagacctctctgtacttctgtgccagcagtttatccacagtgttgcacagccagctgctctctgcacaaaaacagagggtagctgcaagaacaaggagactcctccttcaggagacccctcaccgaccaacaggataaacttcctccatcatcccacagaagcccttccccacacgccagcctcagggactctgcaatgcagccactctgtggaaccaggggtccatcctctacctgctgtaccaatgaggtttcaaagttgggcaggacaagctcactgagttaggtctagtgccagggtacactctcccatcctttcttcttgtggagcttaaatctttaaattcaactaaactgttgcccaaactgaagactccatttacaatctaatgggtctcaacaatatttggttctgtattccaggtcctatttattctggaggttttgtcacttggaggaacaccatgtttggagttatttatgaaacccagcacctcctattttcttcctctcagcagatggtccaaatgcccaagccagagatgcaagactgatcttcactctctctctgactttctccttccacaccaaatccactaccctatcctgcatttttctaagtactaaattcctcacaaattttactaacttttctaatttcactgatctcacctggatcactttagccaccttccaagtagccaccctacctgcaagcctgcacctgctcccacccaaaaccactccctcaagcttaaaaccctttggtttatttctattaactagctaaagtctcaagtttatgttagtttgcaagtctctcagcccctccatgatgtgacctttgcatatcccccacctttctaacactgacttcccttatccttcaactaccacaactgcctgcatctactccagaaacatcccatttctcgcacatccccaaatatgtccactgctgactcactcctgggtctttatctacaatggtcactctacccagaataccatttctctctctggtattcatctgttcttccagctgctcttttgtgcagactgcagctggctgtgcagcactgtggataaactgctggtgcaaatgtacagagaggtctggactgggcgactccaggaatgggggagattctccttcatagaccaatttagaagtcacttcctccaagacgattgccttgaatcattgactggattatttctccgctgtgtgttcttctaacagcctgaacagagctaacaccaacaccgagacaccaccatgaactcaccagccattgacttctctgttctatagctttttgcctctttggaataggcatgtcatgggtgcaggtatgacgtccttgaacttggtttgctagaccctacattaagcctttttctggtggttacacatcagtatatttcctaagttctctctttttagccacaatgtccatgaatgctggtgtcactgaaatttcagtttatcaagtttcagagtcagaatataaagttctatattacaaccagaatatgttttatgaccaatatgtgctgagccagacaagaggcaggaatgaagctccaactaatctatttctcagttggtgcttggagtacaaacaaatagagagtctctaatagacctgtgtctcttgagataagactgagcatttcttttttttaatatatatatactttaagttctatttcttgcaacctccagacatccagcccttcatagacactgccagccgttaacccgaagccctgcacagccacttcctctctgaacagaaaagactgccacaaggggagagacggtcttaccttcctgagcctgcccttgccagaggaagccactgccaccgcagaagcacttaggagcctttcccacctccttgcactgagacttatggaactcttgagggccctagtctgtaaaagtccatccccggcctggcgcagttgctcatgcctgtaatcccagcactttgggaggctgaggtgggtggatcatgaggtcaggagttcgagaccagcctggccaacatggtgaaaccccatctctactaaagatacaaaaaattagtcaggcatgatggtgcacacctataatcccagccacttgggaggctgaggcaggagaattgcttgaacccaggagatggaggttgcagtgagccgagatcgcaccattgtactgcatcctgggtgacaggatgagactccgtctcaaaaaaaaaaaaaaaaatctatccccagatcacggtgcgcctgtgagacagagctgtcaatgtcctctttcccttccttctcatttgctgtttcaatagggcttcatcagcctgagttctttattagaattgacctgcatcaatccagtgcccccctcataccacctactagggaaggctgcattctacattacggtcttcagggatcctctctggggccccacatgcttccctttttgtttacctgtgtctcggggcaattttaatcttagtcttatacttttcatttaagcaggttaggctacactatacacttacagattttgccagtagaagctttgagacttcacatcttgtaaaataaaaaaaaaaaattgtactaaagataacaatgtttatggttgtgaagctttttttgtaagcaaatagtctggtgaaactgaagttcaaaggtgtttgtgttgggtagctgtgtcagtatgcttgatttatggtaaggccaagtctgttggattagatattagatattcacagtaatgtcaaaactaaggaatatagtctgaataattacaataactattttatattattgcaaacaacttaaaaactattgtgacttgattgattcatactatgcatggatacagtttcaaaacctgtttagaccatcagaaagttttaatgaataatgttagcaaaataaccacaagtaaagtgttaccggaaaatgcagtataagcatcacactgacagttgtagctgacccttttgttttgatcagtggttctcgatgtgtaccaaaattacttggtgagatttctttttattgtgggaataacacttagcatgaaatctaacctttaaacaaaactaatgtgcaatatgatattgttaactctaggtacaatgttgcatagcagatttctagaatgtaattatcttgtataattgaaactttacaccaattgaatggcagctcagttcttccttctcccattttcctggcaattatcattctgttctctgcttctctgtgtttgacataatgctaagtgaaatgagccagtcacacaaggacaaatctttcattgaaggagtcttttatcaccaaaagtatttagaattcctggcacttggtgataataaaagcaaaaccatttcacttgggttttatgattgttttaaaatgctttgcaccctttatcgcttgcacctggggctgaacacacctaccaccccattattgatataccaccatctccccaaccccatcaggtaaacctacacatgtgagcactcacatgaacctacacatgtggatttgaaccagattcaaacccaggcagcatagttccaaagcctgccctattacccaatatgctacttgtagtaattattaagtatattgtatgagaaactaagactgctctcaataaaatatatgttgagagtgaggagagacagacagagagagagagagagagagaaaatggtaaggttttcctaatcacagttggtcaggaaaaaaattaccttcactttcaaagactgagactcaccagaaggactcatgggactcggcgtgtccttgtactcatagcaaagatgtatcacaaatatgtagtaagaatactatgatcacaaggaacaaagacatggtggactttggagaaatccatgtgagacttccttatgttctcttccatgagagagcacactctcaccccaacaatgaaaatgcagcaacgtgagaacaacctttctgcccagggaagctcattagagactcagcacctccaatactttcagtggctggtgttaggtgctgaatcgtgtcattaaacattcatatgttgaaatcccagcctccagtactaagaatatgactatgtttggagataaggattttacagaggtggttaaggttaaatgaggtcctcactaatatgactgggatccttataagaagaaattaggacacaaacatgcatagagggaagacaatgtgcagacacagggggaagccatctacaagccaaggagcgaggctccacgagaaaccaaccatgctgacaccccgatcttggatgtctagtctccagatgtatgagaaaatacatttctgttgcttaaatgacctagtctgtggtgacttatggcagccctcgcaaaataattcagctgatcacattggcaccctctgcctatcatgcagcataattccagacttgacgtaaagcaagtgttcagcctaacccacgtggtttgtgcaagcagtctagacacactaagccatgcttaccagttactatagtgggaacactcccaaaattcaagttcgcagatgcaaatcaagagccaaccatgcaagcagtcccttctaaggccagcagtctcaggcccgctgtgtcaactcttttctatacgtgcacatacacacagtgacacttccatgagcacaagggatgtccttcactctctagcacctctagaccctttctagtctagacaatggctgagggattatgagagtgggccgggacaatgacatcacagaccatcaacccactgcctggtcctgggagaagacctattctttcttcaaagcagccatgggaatcaggctcctctgtcgtgtggccttttgtttcctggctgtaggtgagtcctgggagttgctgggtctggggagttggtggcaacccctgtcctactattttgaggtcttttataccaagctcttttctcctctcctccttgatggcctgtttttcacccttgctttctgtctctcacaggcctcgtagatgtgaaagtaacccagagctcgagatatctagtcaaaaggacgggagagaaagtttttctggaatgtgtccaggatatggaccatgaaaatatgttctggtatcgacaagacccaggtctggggctacggctgatctatttctcatatgatgttaaaatgaaagaaaaaggagatattcctgaggggtacagtgtctctagagagaagaaggagcgcttctccctgattctggagtccgccagcaccaaccagacatctatgtacctctgtgccagcagtttatgcacagcgcagcacagctgcatcctctctgcacaaaaagagcggacgtaagagagaaggggccctaactcagggctggtgctggctccgatggcacattcgtgctaaatagaaaaaaagcggccactaaggagaaactagctccataagcacacttctttgcaaggagagaatgaggtattatttttcacccctttacaagtcagggactgttctggatttaattcccccagtccgatgtgttgtaaattcacaagtcccaacaaggaggaaaagtcctctcgcatattcacagtgtaaccctgttctaccatttcgttaatcaattttaccttcccttttctatcctcgtctctcttaactgtgcattttctactttgcttagtgttttgctcttggttgacatttcactagaggacattaacatattctaaattctttcgatgatttttactgtgcctgtgctgattcaagagaaagtttgtggaatttgaattttgttcattcaatttagaaagagaaaaactctgattaaaacaaattcttccaggttctccgatcaatcatattttgctggaaaaaattctgatcacagaaggtttaaactctgctgcagaaggtggtaggaatttggttataactgaactcacaatcttctggaaaaagtgtgtatttgtctgtctttaagaataaaacatatgctcttctgtcagtaaaaattaacagtgctttggaaatacaaataaatgtaaagggtattagaaatcccaaactgcagagcacttgcacaattattattggcaagacaaaacaggcatctgaaaacgtattttgattcagtgctaaatttttgtgtggaagaagtcagagaaaaaaattgaatgaatgtgtatcacaatattcaagattaagtttgtgtgagataggacttgagctgattttgaatacaagtaaatgagggaagagaaaccatcaaaaggaagaaataccctgcaaatgtttctgtgagagagtctaccagaaggaagaggaagattctttccctgaggaaagacaggaatcacaattctcctggctgaggtcaacatccagaacagagaaagcacatcttcccagaatatcattaaaatcctttcccttttgcgccgagaatacatgctagcggtgcttgcggctgcagcgtttcccctgagataacacacaaggtttgatacaagaaattctttctccaccttctaaacattacagtgcttaactcctacatcctgttcaagaaggagaattctgagcacacggtttgccatagaaacttcagactgacattgattaaaaggatgctgaaaaagcatcgtgagccagggcagcaacgtctctggggtcgtccacgctctgatgatgtcacacctcttggcccacctggaagacattttcccaacagcattaccaccatcaaagaaacaaaacccaactggtcactgcacttttgctgctcacacaatgacgaggatggcaagatctatagagaacggcaatatttttgtgcggaatgtgatgtttcactttctgttgttccgtgctttgaaattttcccacacgaaaaaattatctaatagtgattattatatacatttctgtgatgttaggattagaggccagttctgtttagaaataattccaagaacagtttttatattttattttcatgttgataatcagtcaaatttgcttcagcctcaaagagcatgtttatgtcaaattaaatgaatgctggcagcgagctgcactttttttactaaacaggaaaagggttaaataacagaacactgtatctacagattttcatattcagtgaaacttcaggttttctgagagtcctacattttcccacagattatttatttcttatagcaagtattgcccagactcagaagatcaactgcaagagatgggaacaggtaccagcactttgcgtccattcccagggctatgtgggaccatttccaacacaggggtcatcacctcaattgagtccctggtagaaagagtgctatgccagactcagcttcccttctggcatggttaccacctgctccctccaacacagcctcaccttgctaagaaaatgcagcccagggagagaggaagaacacataaaaaaatgaaaatgaaaataggcagagatggagtatcaaacatcaaagtgagtaacagaagacatctaaagaggtcaaaaggattgtagattgggataggaggtttgaatttagaaaaaaaatgaaaaagtgttcacgggggagttcacagtttacagaatagactttttttttcttcttcttttgaaatggagtctcgctctgttgctgaggctggagtgcagtggcacaatcttggctaattgcaacctacacctcccaggttcaagtgattctcctgcctcagcctcccgaatagctgggattacaggcgcacgccaccatgcctggctaatttttgttatttttagcagaaatgagttttcattatgttggtcaggccggtctcgaacgcctgacctcttgatctgcccaccttggcctcacaaagtgctgggattacaggtataagctaccacgcctgacccacataatagacttttaaaggcacataatagatcatggatgtttaccatgagggtacagagaataattcagaaaatgtaaaccattatttcactaaacatacataaacatacatcacattaggagaccaacaaattcacagaacataaaaattgatactctaaatctccaagtaagcaatgtttgtttatctatttatttatttatttatttattttgttttactttaagttcagggatagatgtgcagaatgtgcaggtttgttacataggtatacatgtgccatggtggtttgctgcatctatcaacctgtcatctaggttttaagccctataagcattagctgtttgtcctgatgctctccctcccctcgcccccgacccccaacaggccctagtgtgtgttgtttccctccctgtgtccacatgttatcactgttaaactcccatttatgagtgagaacatgcggtatttggttttctgctcccatgttagtttgctgaggataatggcttccagcttcatccatgtccctggaaaggacatgatctcattcctttttatggctgcatagtattccatggggtatacatgccacattttcttcatccagtctatcattgataggcatttgggttggttctatgtcttttaagcaatgttttaaattatgtgatttgggaaaatataacaaaataaattattttttgttgaatgggagtattaacagggctctttgatgggacatggctgggaagatgtctggcctcttcctgcagggaacaaggaaaatttagagaaggaggcaatttttttttctctagagtccactgagatatcacaggtagtttatacatataaaatacagcagccctgacatacagatattattttctcctaattaaaaataaatttaaataagtgaagtgtaattaaacctaaatttaaatgacttgcctataacctcacagctgaaaagttagtggaaaggcatgtttctatattgttttttaaataataagataattgaatccaagataggtatatttccatcttcagctgaatgggtcccaagaccaaccattaggtgaaagacgtaatccacacagccagggaattctaccttctacctttgtaacagcaagatagccatagcaccaaagacatttttaatgtcttagcacaagcttctaacacctccattttgaagtagaaggatgaaggcttgagagcagaaactggatcttgttagtgatggacaagtggacatagtcatattaattgtgcgttttacaagattctttgataatcactattaaaccagctgtagatacactgtatcatcatttatctcccatgtcaccatcatatcataagattaacattgatgactttgaaaatttgctgctaaaattaaattatctcaattttccagtatcctcctaactgacctagccaattttgtatggcttgaaaaattgggaagtcttctcatctgtgctagatcttcttcaattaatttcaattcattaaaacagaaatagcaagaaactaagagtcaatggggtttcttcatcccatcattccctataaagggcagtgacaagcacctagatgtaacatagatttcttctgccctctgttgagggcatcagaactggctcagttcactcagacatcggtggcagaaagttgagggagatttcctttatgcttaagccttcagtagaataaactggtacctgttctatccaatggatgctgtcttatttaacttgggacactgaaggggtactattcactaatgaaaacattaaaaagcagaccataagatattttaaagaaagagaaaacataatgaaggatgtataatcattacatagtgtatcagtctgttttcacactgatgataaagacatacccgagactgggaagaaaaagaggtttaattggacctaagagttccacatggctggggagggttcagaatcatggcaggaggtgaaaggcacttcttacatggtggcagcaagagaaaaatcagaaagaagcaaaagcagaaacccctgagaaacccatcatatctcgcgagacttattcactatcatgagaatagctcaggaaagactggcccccatgattcaattacctccccctgggtccctcccacaacacatggaattctgggagatacaattcaagtagagatttgggtggatacacagccaaaccatatccttctgcctcagtcccctccaaatctgatgtcctcacatttcaaaaccaatcatgccttcccaacagtcccccaaagtcttaattcgtttcagcaattacccaaaagtccacagtccaaagtctcatctgagacaaggcaaatcccttccacctatgagcctgcaaaataagctagttacttcctagacacaatggggatacagggattagataaatacagccattccaaatgggagaaattggccaaaacaaaggggttacaagtccccatgaaagtctgaaatccagtggggcagccaaattttgaagctccaaaacgatctcctttgactccaggtctgacatccaggtcatgctggggcaaggggtgggttcccatggtcttgggcagctccactcctgtggctttgcagagtacagtctccctcccggctgctttcacaggctggcattgagtgcatgtggcttttccaagtacacagcacaagttgttggtggatctaccattctggggtctggaggacggtggccctcttctcacagctccactaggccgtacccaggtagggaatttgtgtgggggctccaaacccacatttcccttctgtgctgccctagcagaggttctccatgagagccccacccctgcagcaaattttgcctgggcatccaggccttctcatacatcttctaaaatctaggtggaggttcccaaacctcaattcttgacttctgtgcacctacaggctcaacaccacataaaaggtgccaaggcctccaccctctgaagacacaacctgagctctatgttggcccctttcatctatggctggagtggctgggacacaggacaccaagtccctaggctgcacatggcatggggaccctgggcctggcccattaaaccagtttttcatcctggacctccaggcctgtaatgggaggggctgccatgaaggtctctgacacggcctggagacattttcccatggttttggggattaacattaggcttcttgtgcaaatttctacagctgtcttgaatttctcctcagaaaatggttttttttccactgcattgtcaggctacgaattttataaacttttatgttctgtttcctttttaaaatggaatgcttttaatagcacccgagtcaccttttgaacactttgctgcttagaaatttcttctgccagatacgctaaatcatctctctcaagttcaaagttccataaatctctagggtggggagaaaatgccatctgtctcttttctaaaacataacaagagtcacctttgctccagttcccaacaatttcctcatctccatctgaaaccacctcagcctggaccttattgttcatatcactatcagcatttttgtcaaaggcattcaacaagtctctaggaagttccaagctttcccacattttcctgtcttcttctgagtcctccaaactgttccaatctctgcctgttacccacttgcaaagttgctttcacattttcgggtatcttttcagcaacaccccactctactgataccaattttctgtattagtccattttcatgctgctgataaagacatacctgtgactgggaagaaaaagtttaattggacttacagttccacagggctgcggaggcctcagaatcatggcgggaggcaaaaggcacttcttacatggtggtggcaagagaaaaaagagaaagaagcaaaagtggaaacccctgataaaaccatcggatcttatgagacttactatcataggaatagcacaggaaagaccggcccccatgattcaattacctccctgtgggtccctcccacagtgcatgggaattctaggagatacaattcaaacagagatttggatggggacacagctaaaccatatcacatagtatatattgaaaatgtattgtcaagtatcttggatgagatacacattgccagataccatacagttacctgcctaagaaaataagccaataattatagtctattaatggtaacattagacagacaaatgcttacatggtaatgccagagcccatggtttgagatgctctgacatgtgatgggtctcatacatcactttcttgtctaaaaatagtagctaagtgttctgaaaccttgccctcaatgaactcatatttcttaattattgccattctgctttacaaatgctcaaaaatctgcatatttaatattcagttatgaatatattttatgcatgtgtagggtggcaggataagaagagggatgatgttaaatttactaacttataatttctaggtgtagaactattgcttgcccatatctgaatattaaagctatatttgtccttctttgaattttgattatactgtctcttccattttatttattaaaaattatgaccagagagagtgtgtgtagttgatacccaaagcagaaaatcaagttatagatgactagtttataaattaaacagaaatcccttactctcacccttcacagaccatctaagcaatacatcaaatgctagtagccaacattcttctttttgacaggaaactagaagtttattctaagaaactaaataagaagatctcaagccttggaattacatggcatatcaagagtgatatgagatgcagggctaaagacaaagagaataattgatatataaatatatagtctcatatagtcaattatccagtttctcttgttgagaactgttaatgatatgagattttaccatacttgcaagctaagagcttgacaacattccatggatgctagcagaagacaagagactgctggattacagacaaagtatttttaatactctcaacacagcaggcagcatgagcttcatatgtctataagtgacctgtgcctgcccctctgcccagttccccaacagtgacacagagcagtttctggatgctgtggcttttcccaaacctcatcaatctttgtctcatgggggtacattgtgtttattatcctggatagcaaacagatccagagggagatgttgtctctgtcttccaggttgattgctatacaaacattcttgacaagatagtccaaatgaaaagttgatataagttgtgcagaaatgtcagagacccatgaagaattaactctcaacacctctccactgcctttggcacagaacaagtaggtaactatacccacagtagcataataatatatttttatttgaagaaattgagcagcccctgaaaagagacttacaaatactgatatttcagtgtcccttacgaaacaaccagttccccgccaaatctcttcaagtaaaatctcctagcaaacaagtaccatccatattaccaggctttcagtcaggtttttagtgctttactcttaaaaatcaatatacaatcaaagatcactagtatacaaagtttctaacatagatagaaaggaaaaggatacagacattaaaagaaagaagagaaaaagaaaataaaaaacaagaaacagaaaaaggaaatgaaattaaataaatagtgggaacaaagaaaattgactcaagcatataaaataaagaaaaaaagtggacttctaagtagtaatcatgtaaattcttgtttctatcccagacagatataagaaacacatcgtccttaaaacagaataagataaaggggagaaactttaagaaagtcaaaataaatttttaaaataagagtcaaaagaaaactcgatataacatcccagaaaatagaacaaaaagttcaagaagttaaataacagaaaacatgaaagaaaatataagtgacttgaagggtgaacaaaggagagtcaactgtccaagagaaactccagaaaaaagaaaaaaaaaatttttaattatcagagaaattataccctaaaaattagttcccagaaatgaaaaaaaattagcctccatattttaaaatgcctgctgttggctaattaatgtcagacaactgaaatgaaggcatatcttcatgatttcagaacactggggattaaatgattctaaaccacaaaaagacaaagaaaatgttaaaaatcaaaattatacttagagaaaagtgataaataaatgcaaaagtggaatgacatcacatttctacacagcaacgctgaattccagaaaaaaaggtgcaagaaatatcaataaaattctgatagaaaatcattttaatcttagatttctctactaacccaatatatcaataaaatgcaaataaaaagacatttttaataatgttaggatccaaaacatttacctccatctcaagctttcttaggaaattactggctagtatgtctcagcaaactgagaaaacaaaccaaaaagaaaaaaaaaatggggtccaggaaatagaaattctcattcagaataataagaaagaaaagtgccaggataaaagctgggcagtggaactaattagcaactagcccagactaaagcagagggactccagggttgcattttcaaatagtgccaaaacgtagactatggatctattaaatgatacatctgagtaactcatccacaattttgtagtatcagtttgcatggcctgtcaaaaatccagatccatcctggagaaggtgatcccattaaaaagaatccagattattcagcaatatcaaatataggtagaaaccaaaagacaaaaatctgctgatttttcaaaccattaaaaagattgatgcagttctggtaatggcatcataattcttataagacccacgctcccacaaataacaaatataaactcaggacgaacatttttaaagcctatcttaagggacagcaaagcaaccaatagccagtagaaactacagggaagtcaacacttggatgacaggtaagttttctgtttttgtagctttttgctggaaagtagttcccagtcaaatagaaacccattaaaaagccagctgtagagttaggaaagacatccaagaagggaaagtccaaaaaagaacaacccaatgttctccatacaaactctgtttgaatctctggttgatgcctaaactatgcatgtgagaggaatactggaatcagcagtgttaaacctaacataactggatagagatttcagctgttgccggctataggaaacagaatttgaagtataaatccaaccaagttaaatgcctgttaaaacaaaaatccaaccatcgttagaaggataaaacaaaatctagatatattgttgacaatgtccaagatacaacgcaaaaattaccaggcatatgaagaaaagaaatcacatgacctaatttgaatgaagaggccattagtggatacaaactttgagtttacctggatgctggaattactagactgaaatttaaagtagctattataatcatgtttaaggatataaaagaaaatgttcttataatgaataaaataggaacgtttataacaataatgaaacctattaaaaataaatgaaaaatttaaaatttaaactgcaatatttgaaaattaaataaaatctcactaaacgaaatctctagcagattagagatgacggaagaaagattcagaaacttgatgttatatccatagaaattacaaaatctagaaaacaggagaaaaaatatgaaaaaatagcctcagtgatctttagaaaaatatcaaaaggtacaaaatgtgtgaaattggagtaaaagtgaaagaagaggagatataaaaaagcatggataaaaaacaatatttttttaaaaaagcctaattaaaaagtatattgaaagacataaaaagaatttcagaaaaataatttgtagaacacctacctaggcacatcacagtcaaattgtccaaaactagaaaagaagacaaaatcttcaaacagccagagaaaaatcatacataccaggaacaatgacatgaataatgataatttttcattttaaaaaagtgaataccagaagagaagggaactgtagctttaaagtgctacaagaaatataaaaagtcaacccagaatttgatataaaatattcagctaaaaattaaaatactacagtaaagttatctgaatataaataaaaattaaaatatccattgacagtagaactacatgatagtaaatcgcaatggaattctcttaggtaaaaaagaaataataccagttggaagcttggattgtgaggaagaaatgaagagcacaagaagtagtgaaatgcagtcagatattaaagagtcttaaaaattctatatcatatgtaagactagctaaagtaaaaatttcatcattgtattataggatatataaaatatatataatacagaatgacactaaaatctaaaggatggaaataggaaaaacagatctattagatacaaatttcttatattttaagtaaacttctacaatatagtaagtagacaaatagttttaaatgtatcattctttattttccagaatagccctgaaaatattagaggtatagcaaaaagccaacaaataaaaatcaaaacagaatctaaaaatattattcaaatatttaaatagagtcaattctaggagaaagtttggtataatattaaaaaatcaatcaatgtaattcatcttgttaacacatttttaaaaatctatttgattatacgtacagatagaaaaaacttggtaaaattccaaactcatttataataaaaacactcagaaaattaggtaaaaaagggacttcttcaatctaacaaaggcacctgaaaaaaaccaacagcttatgtcacacttaatgacagaaatattaaacgtcttcccatttttatttcttaaatattaaacatgttcaagatcataaacaagtcaataatgttcacccttaccacttctattccatattgtactgatgcataaagacaagaaaaatactaaaaagctaggtatcaaaagataaagaaaacctttttcagagatgaaaggactacttacatgcaaatattaaaagaaatctatatattaactactcaaattagtaagttcatacattaatttattattacaacatataaaaattatattttgtatactaatgataaacaattggataattgaattttaaaacctgaatttatattaaaaaacataaaatatttaaatttagcaaaagacatgcaagacttgtgtacagaaaactaaaaacagttgctaaaggaaatgaaagacagttttaaaatatagaaatagaaataatgtcctgttgcagcctctgcctcaggagtcccctgcagcctggaacacctagcaaaagaaatgcaggtgcagtgccagggattggagctggatccccacaagtcctagaagcaaaccttgtgagggggccatctgtctccccgacccacctcagagcatgcctgtgaacaagaaagtacgagagccacacaagctgggtgttagcctagctaccggccgttactcttaagcgcatctactggatcacagcacaaactacaacactaaaattaccgtgctaatatatgcaggatgtgaaaccaggtgcaagaattcacccacatatgcggattctgtacagagccctggccctccgaaagcatccagaaatgaagccaactgaccacactcagcttacaccacagttaagggaacaccaaccctaccagatgagaaagaatcagcacaagaactctggcaattcaaaaaaaccacagcatctccttacatccaaatgggtcactagctccctagaaatggttcttaaccggtctgaaatggctgaaatgacaaacacaaaattcagaatctggatagaaaggaagctcattgagattcagaagaaagttgaaactcaatccaaggaatccaagtaacccagtaaaatgatccaagaactgaaagatgaaatagccattttgagaaagaatcaaaataaacttctagagctcaaaaatttactacaagaatttaataatgcaataagaagtattaacagcagaatacaccaagctgaggaaagaatctcagagcttgaagaccagttctttgaatcaacttagatgaaaataaagaaaaaagaattttaaaaaatgaacaaaactggccaggcacggtggctcacacctgtaatcccagccctttgggaggccaaggctggtggatcacgagttcgggagatcgagaccatcctggctaacacggtgaaaccccgtctctattaagaatataaaaaaattagctgggcatggtggcgggcacctatagtcccagctactcaggaggctgaggcaggagaatggcatgaacctgggaggcggagcttgcagtgagccgagatagtgccactgcactccagcctgggtgacagagcgagactccatctcaaaaaaaaaaaaaaaataaggaaataagaaatatagggttatgtaaagataccaaatctatgcctcatcggcattcccaaaataggagaaagagtaagcaatttcaaaaatatatttgaaaaatatatttttcaaaaatataaataatgcctaatataaatataaataatgccaaaaatcgcctaatcttgctagagaggttgaaattcaattccaagaaatacagagaaccctggctagttactatatgagacaactatccccaagacacatagtcatcagattcaccaaggtcaaggtaaaataaaaaaaattctaaaggcagctagagtgaagggtcaagtcacatacagaggaaaccccatcaggctagccacagacttctcagcagaaaacttataagccagaagagattgggagactattttcagcatcctgaaaaaaattcaactaaaaatgttatatcctgccaaactaagcttcataaatgaaggagaaataaaatccttcttagacaagcaaatctgaggaaatttgttttaagtagaccatccttacaaaaggtccttaaggtagtgctaaatatggaatctaaagaacctgctgccataaaacacttgaatgcatagcccacaggcaccacaaagcaactacgctatcaaatttacataacaaccagctaacaacatgggtatgagatcaaaatcacacacatcaatactaatcttgaatataaatgggctaaacatctgcttaaaagacattgagtggcaaactagataaaaacacaagacccagccatcattgccttcaagagacccatctcacatgtaacaacacccacaggctcaaaacaaagagaggggaaaatatctatcatgcaaatgaaaaacaaaaaaggacaggagttgctattcttatatcagataaaacaaacattaaacaatgaagggcattactataatgataaagagtacaatccaacaagaagaactaacaatgctaaatatatatgcatccaacattagaacacccatatccataaaacaagctcttcttggcctatgtaaagatttaaacaaccaaacaataatagtaggaaacttcaacaccctactgacagtgttagacagatcactgggcagaaaactaacaaagaaatgctgggcttaaactcaacatttaaccagttgaaactaatagacaaatacagaacactccacccaaaaggaatgcttatacactgttggtggaaacgtaaattagttcaggcactgaggaaagcagttggagatttctcaaataatttaaaacagagctaccattccacctagcaatcccattattgaagatatatccaaaggaaactagatcattataccaaaatgcactcatatgttcatcaccatgcaattcacaatagcaaagacatggaatcaaccgaggttcccatcaacgatggattggatgaagaaaacatatacaccatggaataccacacaggcctaaaaaagaatgaaatcaagttgtttgcagcaacataaatagagctgaaggccgtagtcctaagtaaattaatgcaggaacagaaaaccaaatactacatgttctcacttacaagtgggaactaaacattgagcgcacatgaacacaaacatgggaatgattgacactgagcactactcaaggggaagagagagggaggttgacacgggttgaaaaactacctattgggtactatgttcactatctgggtgcagtatacccgtgtaacaaaccttcatatgtaccccctgtatctaaaataaaagtgagaattttaaaaagactaaatatgttaaaaccagtactctctaaattttatctacagtcattaaaatctcaattgttatctcaactgtttttgttttctaagaaactgagaagctgattctagaaggtatatgaacacacaaagaatttatgggaagtcccgctcctggttagaagcctatgtatgatgtttcaggccatagataattaattacaaaggctttacctggctggtttacagggtgtggagaggctgttctgcccaccccagacttggtgcacagccaatgcattgcagtctttgaagggagttgcagtcaaggaccccctggctggtcacgcccttgtgcatatttatattgccagctcaggatccttcattcttaggtctctttttctgaggcctatgtagaggtcttcttcaggtgcctctgtcaaggcctcctaataggagaggaagagagagccttaaagacacttttctccactctgagtacccagtgagtttccactttctccttgcagggctccccaacagtgagacaactccatgtctgtgctaatccaactaacacttgaccagtgccatttccacagggaaaaacagaacagggggagtcagtaatttctctggctttagactcttgcttacactattgaaggaggtaattaaagatttaactctttcctttggggcttgttgctttaattggctcactacctggatgcaatatacccatgtaacaaacctgcatgtgtaccccctgtatctaaataaaagttgaaattttaaaaagaataaatatgttaaaatgagtacctaagtcctcagcactctttttcagctatgctgagctcctgacactctagaatattcaaaacaatatttagaaagaacacatttggagtcctttcactgtctgaccaagacttactataaacccacaataatcaaagtaatgtggtactggcaaaagggcagacaaataaaagatacacattaaaaccacaatgagatactgctaaccatccacatacccactcaagttaaaccacctggcaacaccaaatgctggcaaaaatttggagtcccagaactcacatatattgttgatgaaagtggataatagtacaaccaatgtggaaaatgttctaatagtttcttataaaactaaacccctctgatcatctacccctatgagccagcaattatactcctaagtatttacttaagagaaataaaggcataaatctacaaaaaaagacttaaactggaatgtttacagaaagtgaattcatcattgccaaaacctggagatatcttgaacgtccatctacaggaggctggctaaacaaacggtagtatatctatatggttacatattccactgccacaaaaaggaatgaagtactgatacacacaacttgaacaaatcttaaaaatattattctgggtgaaagaagtaaacaaatcttaaaaccattattctgggtgaaagaaactttgcacagaagagcgtatgatgttattccatttatataaaattctagaaaagaataatttataatgaaaaaatcagaacactaattgcctctaaggagttagcagtgggaaaaactaaaggcatgagaaaactttggagataatggtaatattctacaatttggtaggttacacagtgtatgcatttgtcaaaacttgtttaacggtattcaagatttgtgtgtggtgctgtatgcaaattttacctgaaaaacaccttgaactccagttaattatacacgtgctgaactgcttagaagtgaagtatgcctccaactgacttttcaatgaattaaaaaattagatggattgatggatgaatagaaggatggatagatggatagttatgtggtaaagcagtaacagttttatccagaacctaggcggtgggtacatgcatgttcactgtataatagtttcagcttctatagatgtttgaaaattctcataataaaatggaaaataatggcatgattctgtgtattttttaataaaatcaactttgaaatatgctgataagaaccacattgctaattaaagaagtgaagtacaggaaggtttgggctgtgtgtttctgtgtaaaagaaggaggagtcagatttacataaacttgaacaagcaagaactattatttctaagaacatgtagcaaaataattacaagactgtctctggagaaggaacttaccttttgttctctgttataattgaatcattaaccaggtgcatgtattaattcaataaataaacacattaaaattcaatgagagtttagtatccataacattccccgagagaaaaatctagagaccactgcagtttgaaaagcatgaaaagggagaggaatatgtttgctgttttttgttttttgttttccaaacaaagagaatactgatgaagaagcaaagatttggaatttagtaaagaatagggatcatttgttaattttcagaagcttttaggataaataaaatgaaaaagatgctgggttattttggcatagagtttgatacacttgactaaaagatttaaaaatatacctacatgtcaagaaaaactgaagtattctataccttttactacttctacttagcagagtttatcttgagccactgtccgtggcatgtccaataagttgtaaaggcttcacacacactcctcatatgaacaagttgctgaaatattgttaaagtgtcacattttgtccattataaggtaaattgtttttcacaattctattttctttgaaatacgggtaagtcctataatcaatcttcacctttaatgtggtagtactaaacaccacccaaaagtaacaattagatatttaatagaacatcttataatagagagaatctcagaatcaaataaataagatgggttagtttttgcaagcctgtctttctggagtttcctagtattctttagagtgttaggcctatcattctcagttacccaccagactgtactttactaaggcacaggcaactgcaagagtcagacaatacttgatagtgttgatattgacacttgagatttgtgatcgcataggcattgatttgagtcctgactctgttacttactcttggattatatgaacttggataggttatttaaggtctctaggtcttatctgtaaaatttcctaatccgtaaaaatagtgtgatgataataaatagcctagccaaaaaaatagacttaaataaatgtatgaaaagtagagtaagtgctcaaaaacttagctctgcttttatgcaaaaatgaactattttaagcagttacatgatacgagaaatcagcttgataatggaaaaagatcataccattgtggtcaagttttacacaaacatgatctgtttcgtggcctagactgagttgaattagaatagaagaaaccatattacaagtattcaggaattaagcaaagacaaaaaaaaatagttatgactgtgataactgaaacaagggaagagatataagagacaatgcatttaatttgtgaattgacaaataaggtaggtgaggaaaaaagaggcttatggaattcttgaacctaacatgcaagaagagcagggatgccatttgttgggagaggggaattgaggaataagagcccgtttattggtgtgtgtacgtgttgggggaggaaggagttcagtttgggacaaccatgaagacccagcagacagctgaaatactgtaatgaagttcccttatattctaacatattacttttagttctttgaagtcaattctgcaccccactttttgctctacacccagacagtagcacagattggtgttcagtaatgacagatggaaaagtgatgggagaatggtggtgagtggctggtgcatgctgtgagacttgtgcatgaagactcatcctgagtgaagagccacacggttccaccagggggaagactgatttttgcatatcatgcagaaactcaaccacctgttagaggagggaaacagagtgggaaggaactacgctgtaggaaggaaagatgaacttgagtttcacttcttagtgccttttctcaggggagaggccatcacttgaagatgctgagtcttctgctccttctcctgggactaggtatgagccttgtcttttgaggagtctggggttaatgttaacactgggtggaaagactttctctccagagagtctgaagccaccagacagaagatgaaggggatatgttagattaaagaaccataacagagtaattgttggcacaataaaaaggaggcagttccctggggtcctttgggagctgaggtggtattggagagataaagcagagaccttcctgcctggggagatgtctgaccccaagcttgtcggtcctcatgaatatctctctggaactaggctctgtgttcagtgctgtcatctctcaaaagccaagcagggatatctgtcaacgtggaacctccctgacgatccagtgtcaagtcgatagccaagtcaccatgatgttctggtaccgtcagcaacctggacagagcctgacactgatcgcaactgcaaatcagggctctgaggccacatatgagagtggatttgtcattgacaagtttcccatcagccgcccaaacctaacattctcaactctgactgtgagcaacatgagccctgaagacagcagcatatatctctgcagcgttgaagacacagtgcggggcacagatcaaagatctgagcaagaacctcagctctctcctacccagctcctctcacacgagcctgaaggccctgccaaggtgggacagaaggaggaaaccacagcttttgggcagacacagctgtttctgtgtttgtgggtgggcatgggtatgaatggatagactggggatgaggagagcatctgtaggactagctggagcgttctatccacaggcaggaagagtggctcctggaaagctgagggtaaaatttcttctagaagggtgctcagaaatacccaataaaaacaatcagatacagtttccttcaagtggcggggtcagtaatagcctttaactgttttatctcaaggctctttttagctggttttctatcataatatattttggaagaactttagtcatcttgaaacaaagctggtacattatattaatgacatctggttgttctcagtgaataggaatgataaagccctctagatgcttcaatatgacaatatgacacatgcatcccaggccaatataaaatctgcaaagttcaggaactttctatactggtgagttttggagtggtccagatgtaagaagtaagctgctgcaccttagatcatgtaccacggagaaagaggtgcaatgcttagtctttggactttgaattaaactttggatatactgcatttgattgtgctactctatcccatttactatgtaatctgtaaagctggggccagtgcaagagagggttctgtggcagaagaagcccatgatgaaagcttcctgctgcttgggccatggactaagcagacccagttgttcttgaagagcctatggtagatactgatgccctgtggagctcctgacattccccaatacgagaatcacaaggcagtgtggaacaggtttgctgtgccctgatttgcacttcagaccattgcatcttgggctatacttttgttgctttccagatcccagagagaaagaatgctcacacacacaaattacatgaggagtgtttattacttacatacaggcagcaagggaaaacagaggcctaagattcagggaaagccagtcccactaggctcaggaaagctgcccagggtggatgaaatcttgtctgtgccttccctacttgcactgccactgagggacctcagagagcagccaccctgggttttatatcttagagcaacttgacatgcttggcaaagcattgaaggacattctatttctagaagggactggaacagagccctggctgttctggccagttcctccttatctcaggatgttacagtcccagaacattgtacagttatttttgagaactacaagcaagaaataggggagtactgagtttgtccaaggccacctggagaattgccctgcagacaggtgcagagttttggtgtaaagccatactcttaccggccaacgatcccctttcttttgaaaagttgctcctggctctataatggatgcctcataatggcattcagaacaaggtattatctgatctgcaaaactgtaaatttggctgtgcccagagcattctgttattaaatggaaaatacataatcaagaccatacttaagcacagctggaaaaaggcacgattcaatttcaagagcacatctcagagtctcatgctacccactcatacttttctcctcttaccttcaaaccacacccaagtttcatggaaattccatatttccagttgagaaacatgagcttatttttttgatgggtcttcacattattctggaaggatcattacagtctaaccaagtatggttctgaaaggtagtggtgaagggaaatcttctcggggccaaaacttaaattggtatacctgattgttgtccacattttattgaagaagagatggccagaagtatagctatatcttatgttcaattttctttcatactatcatctagtctccttacctattcagtcatatttttcttctttttgcttctctatgctacaatctgggtaatttctttaaaactactgtttagtttactaattcacacctcagctccagtaagcctctaatttaatctttcaactgactttgttcatctaaattatattaatttttatttctagaaaatccacttgggtcatttacaaatatgagtggacatttttgaaagcatcttgttccttgtgtattttaaaattattttctttttataagtatattaagcatctactgggaattattatctgacaatgccagcatttgatgcctttttgcatctggctttcagtggtctgctggctctcactcagggtagcctatttccttgtacattatgtaagttaatgtgaattcatctttcagaattctttaaatactggagtaaaagtgggttttctaggaaaattcatgtttgcctctgtcaagaaattggggcgctacagacctaatatcattttattttataattctcagtatatatcttcttggtcatagaatgtctatctcaaaccccaatgggctgactgttcagtgaccatgaatattcagaggaaattttttaaaatccttcacccaaagccaagaccaagacaaataatattctttgttaattgcttctaggattagttttctagctcatcctttcactaactgtgtatctctttgtgtacctcactttaaaaagcagtgattcctgtctagtttctggtccatgtaaggtctcatgggccttctccagtttccatgtgtactaattctccaggtcacaggaatgcacatgtatacctgttttatctcatgggctcagtgctagcttaccttcctggcccatgctcccattaccataggaagttgacaaatttacctacagtgaagccttggattatgaagcaccttcctatattacaaaattgcctctttaaaagcagtaaagcactgtggttaggaacttgaactttgtcaagtgacagacctaagtttaaaacttggttcttctgctttaacactaggtgtaaccttaacaagttacacaatttctccatgccttaatttctccatagaaaataagaataatagtgagtttttaaatgtaggttttttaaaataagaaagtgatacaattatctgtataaaaagcacatagagacaaaatatgcaattagtgtagttgctacctaaacgtatttctcactataaaaacatattttaccactggcaattccttcctcaagaataagtatggccctctctcagaaaattttatcattacaattgtttctcttttagctattttaattaaataaaaaatttgtggtattataaaatatgcatattatcaaaataaaaaagtcaaaatcactcagtttaataaaattagatcatacaatatgtagttttagaatttattcccttaacccaacaatatttcatgaatatcatttcatgtcaaaaatattttacattaactttaataagaatagttcgatatactgatgaccatccttcatacaatcaaaacccatgacaaggtatatatccataggctagatgacagggttatttaattttaaatagcaattgtttgtgtgcgttgaattatttctgttgcagactcagaaggaaatcatgaaagccctaagtctacctgcagatggctggttcttttttattcaggtgttaacttaaatgccacctccccaaagagacctttcctgaccactctacgtaacagcacttcagcagtcatgccatattatattatcactttatcctattttagtaatatgtactcatcatttactgaaagtgatgtatgtgcatcccatttctatacctcctcatatgtgcataaatgcatgcacatgcacacatgaatgcactgaaaacaagaaccttttctgtcttcttcgttgctgcttccaaatagcctagaagaactcttggaatatcactccaggaattcaataaatatttgtgagtaaataaatacatttcaaagataagaggaaaatttatacagctgcagtggatttccctggtggaaaactctacaaaggcatttgagtttagataatgtaagcccataagaaaattaactagattattctaacaggaaaggaataagcacttcaaactttatattttttattcttgttttaaatttatgttttagttgcggggaggatacaaaaagattaaaggacacaaaattacagctagataggaggaataagttccagtgttttacagaactgtaggaggactacagataacaagcattgtatttgaatagaaaggtccatatgtcatgtgccaaccccgttctgctgccttacccaagactgggaaatggaacagatgatatgggttctatagagaggcaaagtgcagaacctgctcaaacacagtggccctggggtggaaagttctcaattggaattgtgttggtgcctgtgtggatggagcattcaattctgagccttaggagccttttgaaggccctcctggccaagatgatcttgaggaaatgactgacccattggctgccttccaaatggatgacacagtctagacttttataaactacatgagtagaaggaacccagttgactggatttatcaccaaacctagcttgtgagcctcagtctagagctagcataatttagaaaaataaatgcatacatcatatattaaactctgagtatcatgaaacagatcctagatgttacaataataagaacctacatgggtgtttctcctgcactctgtcctggctttcttctgcttcttgtctaagggagcctggactcacttaagcagctctaataggccaaacaagagagtggtcaaggagtggctgaaatgtgaacagaaagactcaccattatattagagcaatcaatctatccttaaaatactgtgggtttagtgtcaagtgctagaggcttccccatttacccatacatggaagcctgaagaataaacagaactataaacttccctctgggcataaaacttgcatgtcttccacggcttcaaggtggggagcagctgggcaggcagaaggaggggcaagaggcagtcaagaggaggggcgggaggcaggcggggaggaatgggctactccgtttagctgatcagccttgaccagttcatgctctgggactccatcttacaagtcagacttttccgagtcacacagagcactcccttcactctccagattcaatgattcctgggatgatatagtaacgaaaataattccttattggataaagaaattgtgctgtgcgggagataagtagcttagaaaaaaaaatggatgaggagaggagctgggagtttgggggtaagacagcctaaaatctgacagtctggttggggaacgataaaagatactggaacccaaggaggagatcagtaagaatgtaggagaaagatctggtgggatttggagaagaaagtgttaaaaaataaaattggaatatgacagtttgcagactactaggtctgaaagacgcaactctgtagcaacatgaaggggaacaaactttgtctgaatagggaagtttctagtatgatctctgctttccttagacaagtaaccctggagaagacacttgacctctgagctttagattgttcatctgtaaaaaggagagaacaatatctgctgcctaccacctcagtgaggctgcactaaggatcagctcagaggaggcaaagcagaatgccctattgcacagcatggaggccctagagtcggaccaccatacttacatcccatctttaaaacctcctggctgtttggccttgagcaagccacttcacctccagaaagttcatttgatcatctgtaaaatgggcaagcccataggtggttgtgatgataaaatgaaaaaaaactttttaacttacatgagttacatgctgtagagtaagttatgtggtatatagtaagcacacagaaaagactcactgttatcaaaattaaaggaaagtggtttagtgtgctaagcactaaatacaagccagagagatgtcttgagaagtagacaaagaaatctacaattcagaatgaacagtaacaagaatgacatgtcctccaaattgagcttgggcagctggatctgaacctatcctacacatctgagtctacagtatgaggtaacagtctccacctatagctatcttctctgcctgtaaggtcattcctttctgaagaaagctgacctcagactattttgcgatcatttaaggaagagcgcaaaatactggagaaggctagtcttcaagctctagatacagaaaatcctcaaattcttgggtgttccctttcagactgagagtcagagccacaagcactgatccaaaaatccccttttccaaaaaaattttccatcttctaccaaggttcacctccctgtttagtgcacactagtatctacagttgttagagcaggagtctctccttatcctctaaggcaggtgttctgtgaagaccccatgacaagggacaaaatgaaacaacatgttcagggacaacaaaggaaaagcccattttatcaatgctccaaaacctggctacctcaggcttggcaagttattcgtgagcagagaagtttgtcatctacatggcagtcatggcctggatgggtctcgaactgtggcatggtaatgctctgagactaggtgccaggagaaagataaattcaatcatccatttctaccaggaagaaaagcaccaggaaggaatcagatgtacagtttgtcctctggggacctctgccttgatcctcaataaatctccttttagatacctcctcttagatgaaattcccacacttcacaatgctctccatggcttctgttggccttatggtcagctctgccaagatctgtattcttgggcaagacagaatccttctgaatctcagtctcttgctctataaatggaaacaattttgctctgcacaaattacaattagcatgtttgtgggaagttaaagtgtgaaactcagcataaatgaaaagtaatgtaccactgttgcttacatgaaaactcttgtaaagttgtcaggcactgtgcaccatctaagcatagcagtgttaggtatgggcccattagtgattagagggggtgcgaggcggagagggggtctccaagcagtgggtctcctggctgtggggaagctggctcagcggccataccaggagctgaaaccgaaggtactctgtgtgtcctctcaacaccatgggccccactttggcattatttccaattccctctggtttccatttgcttcctccctctagccccctggccaggtccgatttcaacaccaagtttctgagcttttcccattttgtccaccgtctctagaacatttctgcttcttttacctttcaaagaatccaaacttgaactctacttactcctgcccatcaccagcctgagctcagagttgctgagaagggaaagcaccctcataaggaagctcctcctttccctacatcattagacttgagcacagacagcatctccatttccacactgctctggccaggttgtgcctcagtcaattacacaactgtgtcttagtagccttggtagggcccaaatcaggatattctctaggaagattcactttgtactgagccaagcataatctcactgcatcgaaaatagaaaatgatcatctgatcattctggttcagactgtcagccctgagcaggtgggtcagtttgcatcacctgagtgcagattgcaaggacaacagtgaggctgcataaaaagaacctatgacaggatgcacatgagagagacaaatgtcttcacattgaagaaggggaggagtgcgccattggttttccatcctccagaggcactgagaaagctcctacagaaactgtgccccctccttctttgaaacacttcccatccttaagccttggtaggaaggagagaaatctggaagcccagaatcctatggaatgctgagtctcccttctccttaccccttagtgttggaattttcattccccaaaatcttgcatttgaccttcctgcacactgactggagagaagcatcttcatattcacaggaatgagccttagataagactttgctcctctcatgtgggccccaggaaactgaaatccaagctttttaccaacgcttgcccttccttaagtacattaaatacattcccaataggtggaaagatttgtaaacagctaggccattctccctccttctaaccctcatctccagggcctaagaaagcccagctctgttatctggggcttgactttccctgtcttccccatcccagtatccttgcaggaaacagccggtctcgctctctgctctcagaaggcaagtttccttatcacctgtgaatcacaaacccagagagtggccaaacatagccaggctgatgcaagaccctgggaagaggaaagctgcaggtgtgtttgtgctgggaggagtggtgaccctcacctcacagtcacctcctctctggatcctcgtgaggtataaagacgagtcctccaccaccagtcaggcacactctaccaccatgaatccactcctgatccttacctttgtggcagctgctcgtgagtatcatgccctgcctcaggccccaaccacccccccgttcctggccgacaaatgcccttccattcttaccacctctcctcttttgactgtgctctgatattccgtttcctccatctggcatatctccttcccatcctccttgggctctttttaagtctcacctgttcaccttctccttgacttcactcccaccactgtcattcatccatatccgagttgtggttggagaagctgggaagggggccaggtggggctgtcccacgaaatgaagcagcaggcttcaggcttggctccgacagcaacagaatagcaccactatagctgctcctaacctcgaatgcacctggggaggttgaaaaattactcatgccagagactcagctctagaaattctaacttcaattgtctggggtagagcttgtgttctgggcttttaagcttcccaggtgatttttaatatttccagccatgcagccaaggttaagaattgctgtcctattggccaataacaaagtctacctttgttctgccaaagtgagcctgggggctgccctcaactctgccctgactgcacagatctgagctatgggggaaggtggtcatggccaggtctatgcagacagggggttttcctagcttggcaaaagaatcctgacaatccagggcccaaatagccaggggaagtacacaggtgatgaataaaagagagaagcactcagtgggagagacaaccacatcccaactcctatcccactggaagcattgtgaggacattccttgcgacttcagcctggtgaccccaggagagctcggatcctccgcagggtacctagctatgtgccctgcaggcacagagacttgggagccacaggcagtgatgatcaccaggggtggcagagctccctcccttgcctagcctcactgtgcttgttaaggatttctaattagcagaaagcaatcacaggctgggagcgccacccctaacatgctattgacttgccttctcccttcccatctccactccagttgctgccccctttgatgatgatgacaagatcgttgggggctacaactgtgaggagaattctgtcccctaccaggtgtccctgaattctggctaccacttctgtggtggctccctcatcaacgaacagtgggtggtatcagcaggccactgctacaagtcgtaagtgtggggcccccgactgcaaagctcccggccagtctgcctgggagagcttggcttcagcccagggaactactgaggttgggtaagatggatgggagaggtggtggagaagaaaacttgttggcagctgcggactctccagagcagagagtgaacacaagacaggaacctctcacacccaggcaaatccatgaaacagcaagggttgtggtcataaaagcaggcagggatgatcttggggtggtgagagctagtgagaaaagcaggcaagtatcttttgctggttagctacacattaaagccaactaagaaagactttttaaaaatacagatgcctttgtcctatcccagggcaattaagtcaaaattttcaggaagagggtgtgaatatcagtgagaattttacactctacctctgctaactgtagagtgtatagacagagctgagaactgctgcctacaccaagaactctcaaacctgagtatgcatcagaacgccctgcaggcttgttaaggcacaaatcactgggccccttccccaaggttctgatcagtaggtgggggtaaggaccaagaattcacatttctaacaagttcccaggagatgctaatgctatggctacccttggattagattacacagaagggtggttctcaccaggccaagaatggagggaggaacaggcactgtgcacagttggcaaaggcctggggtgaagaatgctgggaaaacttcaaggagctccttgtgcccacagtgctagtgactgtggagattgtgggaaagagtctggggaggcaggttgaggagcagcctctggtgggatccctttgactcttccccaccccactaccaccaacctctggagcagataggtcctgggtctcataccttcactgacccacatccctctgctgcccatgcgatatggccacacaccccaccccatgcctccagagctgtccatgagcagagagcttgaggaacctggggaaggtgggataggtgccctggctgtgggagaaggtcttcaccatgcctgccctgcccatcagccgcatccaggtgagactgggagagcacaacatcgaagtcctggaggggaatgagcagttcatcaatgcagccaagatcatccgccacccccaatacgacaggaagactctgaacaatgacatcatgttaatcaagctctcctcacgtgcagtaatcaacgcccgcgtgtccaccatctctctgcccaccgcccctccagccactggcacgaagtgcctcatctctggctggggcaacactgcgagctctggcggtgagtgggacccttagtccttctacttccctccatcctcacaatttccagaacaaaccatgccccttaacttgaatcctctcacctccaggcttaagacacatttcgagtgcccattacacacagactctgcactgggcaccagagagatgcaaactatcaaggacttggctcctaaaatcaagagacaggacaaatggagaacttgatatgatcacatcttgggaggggttcaacaatgatcattctgggaactaaaagccagagtctcttgccaggacttatgttctggagtcctctccaggggctgtgttcctcttcagttttccatccaagattattgtctccttctctggcctgacccacatttctacttcctttgatctcttcctgatcctcacagccgactacccagacgagctgcagtgcctggacgctcctgtgctgagccaggctaagtgtgaagcctcctaccctggaaagattaccagcaacatgttctgtgtgggcttccttgagggaggcaaggattcatgtcaggtgatttgaccaacccttcccatgctgaggctcccactgatacctaggccccaccagggaaaaggatttgaactcaaaaggtggtggggctgaggaggctccctgcagtgcccacatggagaagtgaggaagactcccttgggctgcatcttgtctgcttaggaagaacagagaatgggccaccatgagaaggacatggagccacagagctggctggaaaggggtcttttaaggttcagagtaaatgtagctatattcctcctccatctctccatacaacttgtcccttcttccccccagggtgattctggtggccctgtggtctgcaatggacagctccaaggagttgtctcctggggtgatggctgtgcccagaagaacaagcctggagtctacaccaaggtctacaactatgtgaaatggattaagaacaccatagctgccaacagctaaagcccccagtatctcttcagtctctataccaataaagtgaccctgttctcactgtctgtgtctgtgcctgctccctctcactccttcacactggaaagcatcctccaatttcaggttagacacgactgtcccctttaaaggtaagcagagcccccatctcccaaaatgtgttccatggtacactagattagcacatacaaacagatggaatccaaaaataagaagaagcttgggagaaaggggagtactgttttctagagatacctgtttcagaaaggtggtctttggggtgggggggtgggtattgatttttatttgggcttctcacagtagttagagctactctgccttcagaacaattacagcacagaaaatgtgtcagcatcttcgaggtggcccaaaaaacctgaccagctgaatcttcttgctaaaatacaataataatgacaaatcctgttggtgatgacgtgcctctcccaggaatgtgtcggcaccaaaccctcgaccaagccctcccttctcattcacctggaaaatcagatgcaaataaatctccctggccgcctaactcttccctcagttccctagttccatctctgtgagcaggctagagagatgttccacctaccatagcaggagccagactgcgacttgggaatcaagcccagatctacacgctgggcttgattttcgtcttctttgcctttggggtaggatgccacagtgaatcccacagctaacaccagctcctcactctgaccagggaaagaaactagagagggtcaggattcacctatttgatcaattagctgaggaaggattcattttcataaaacttgcttgactttgagacacttcaagtgagttatttgggattctttaaaaggggtggaaggaaagatctgaggactgtgacaccaccagccactctgaccacacgttggctggcttgaacccactggatgcagcagagggaggcaggccctgtggcacctctggcacctgccaaagcctcctcctggcaattctgagagggcccatgttggggctgtagctcatccaagcttggcaccgaagatccaaggaagcttctctttgaaattccaccttcacctctgtcccaagtggttgtggacacccctgggagctggcactaagggccaggagcagccaagggagacagacaagttcagagcacatttccagttacagggaacagagcacaggcctccaagtgtccacagagcagcgtgcaaattgcagggatgagtagaggaaaacctctacatggagcacagcgttcctggcaaacacaggggactgcagtccacatgctgtggaatacacccaagtatgcatcagacacttgtttggtaaacagtaaatgtgtaagatcaattaccttgagagggccatctgggctccagatgtgtgacttgtgtgaggagacggctaccactcactatctccagaggaaaacagggctcagggctcgcacacaatggatagatacacacgggtcacccagaacatcaatacatacaaacatcactttgttcaacatggattttgtttttatggagtccaaacgcagaccgtagttcaccttacagccttgggtttgtctgcttttggagatatatatccagtagatagatagacagacaagacagataattttttccctttcttactataatgtcaatgccttatctgaatatcatcatcactcaagagtcaagggaagaaccaaacgcttcatataaacagggctgggctgggcagggagtgttagtttccagtgttttctgtctccattcagatcatccctatcaaagcccagctggtcacctcaagccaagacacagacataaggatcccaatggccttccagatggctgcttccacctcccacctgggccactaagactctttacacaggaaagtgagtcaccccagtgagaagggttgccagaagaaacagggcatgaaaatcacagataaccatgggatttcttccaagtggtcagtataaaatataccaacactaccatcaccaaaaacacaaaacaagcaaaaacatgcttattcaaaatcctagacaaaatactgtgtgagagccaggccacggggttgccttttcacaggccacacagctttcccagtccatgtactcacgtggaaccgtgagatgtgaaagtctgcagggcgtgtgctcaggatcgaggctggtactgttcacctatgggtccagaccaaagggcaataaggcagaaagctgatatctgtccaccgccacggcttagggcctccttctcacagaggctcctaagagcccccacctcagccttcacacaaaacatctccttctggctgaactacagccaggctggagtgccgtggcatgatctctgctcactacagtctccacctcctgggttcaagtgattcagcctcccaagtacctgggattacaggcactcgccaccatgcccagctgattttgtttgtttgtttgtttgtatttttagtggagacagggtttcaccatgttggccaggctcattttgaactcctgacctcaagtgatccaaggtactgggattacaggcatgagccaccacttctggcccaggacccattttttaaaaaaattttcaacttttattttagattcagggcatacgtgtgcaggtttgttacatgggtatattgcgtgatgctgaggtttggggcacaaatgttcttaccactcaggcagtgagaatagtgcccaataggtagttattcagccctttccaccctccttctctcttccctctagcagttacagtgtctactgttcctatctttatatccatgtgtaccaaatgctcagctcccacttatacagaagaacgtgatatttggttttacatacctgtgttaatttgcttagaattatggtctccatctccatccacgttgctgcaaagacatgatttcattttttcatagctgcatagtattccatggtgtatatgtaccacatttcctttatccaatctacagctgatggccacctagattgattccatggctttgttattgtgaatagtgctgtgacggacatgcaagagcatgtgtctttttggcagaccaattattttcctttgggtatatgcccagtaaaggaattgctgggtggaaaggtagttctgtttttaattatttcagaaatctccaaactgccttctgcattaatttttccataaactaatcgacagtcaggccaagagtgtataagcattccctttcctctgcagccttgacagcatcttctattttttttttttttttttttgacgttttaataatagccactctgcagccaagctctttcaaggccaatgtgggatagagccacaaacatcccttttccggaagagaattcttgcctgcccactggtagaattcttgttttcatctgtcttttattatttgtttttcaaagaaaaactggcctgtaatcccagcactatacgtggccgaggcgggcggatcacgaagtcaggagatagagaccatcctggctaacacagtgaaatcccgtgtctactaaaaacataaaaaattagccaggtgtggtggcaggtgcctgtagtctcagctactcgggaggctgaggcgggagaatggcgtgaacctgggaggcaaagcttgcagtgacctgagatcatgctactgcactccagcctggacaacagagccagactctgtctcaaaaaaaaaaaagaaagaaaagaaaagaaaaaaaagaaaaaccaaaggtaaagtggtaagatcttccacacctgaaccagtttgtagccaccagagcctgctgcgaaggggcccctcaagcatgcattcatcttgtcacctggaatttgagagatcaagaagccccatagcaacctaccatgcaactgcccatcagtgctgatcctttcaagggattatctcaattctgactctgcagacactggcagccacaggtgacaaaccctgtgtatctgtgggctttcctcatcacccagggccacaatggggtgcctgccctaggcagagacacagcaacattctcttaaactgaaattaagcataaatccacttcaccaataatcatctgagggctcagtccctgtctccttcctcggggattttaaaacacacatttctctgaccaaacaggtaggtgagatctgactttaaaggggggaaattgggttgaattgaggtatcaggaatggatcacaagtgtttttgtgtggggacaggcatccacatccctaactgtacctggagatggagaaaaatgcaggagaggagaagagaaaaaaaggaggaaaaagtggctgaaagtatttgaaagcttctctcatggttctttctggctctggttgcttttccaaggtcttgagtgcaggcagggccagctctggctgggagctgctgctctgggacatggaagagtcacttcacctccagaaagttcattcgatcatctgtaaaatgggcaagcccataggtggttgtgatgataaaatgaaaaaaaaacattcttaacttacatgagttacatgctgtatagtaagttatgtgctatataggaagcacacagaaatgattcactgttatcataatagaaggacagtggcttggtgtgctaagcactaaatacaagccagaaaaaatgtcttagagaagtagacaaagaaatctatagttcagaaccaacagtaccaagaatgacatgtcctccaaattgagcttgggcaggtagatctgaacctatcctacacatctgagtctatgatatgaggtaatagtctccacctatagctatcttctctgcctgtgaggtcattcctttttgaagaaagctgacctcagactatactgtgatcatttaaggaagagcacaaaatactggagaaggctagtcttcaagctctagatacagaaaatcctcatattcttgggtgttccctttcagacagagaatcagagccacaagcactaatccagaaaccccctttcccaaaaacgttttccatctcctaccaaggttcacatccctattgagtgctcactagtgtctatagttgctagagcaagagtctctccttattctctaaggcaggagttctgtgaaggccccatgacaaggggacaaaatgaaacaacatgtttagggacaacacaggaaaaacccatattatcaaagctccaaaacctggctacctcaggcttggccagttattcatgagcagagaggtttctcatctacatggcagtcatggcctggatgggtctggaactgtggcaagataaggctctgagacaaggtgccaggagaaagatgaattcaatcatccatttctgccaggaagaaaagcaccaggaaggaatcagatgtacagtttgtcctctggggacctctgccttgatcctcaataaatctccttttagatgccacgtgcagcaattcccacactttacaatgctctccatggcttctgttggccttatggtcagctctgccaagatctgtattcttgggcaagacagaatccttctgaatctcagtctcttcctctataaatggaaacaatttggctctacacaaatcacaattagcatgtttgtgggaagttaaaccgtgaaactcagcatcaatgaaaagcaatgtaccactgttgcttatgaaaactcttgtaaagttgtcaggcaccatgcaccatctaagtacagcagtgttaggtataagcccatcagtgattagagggggtatggggtggagagggggtctctgagcagtgggtctccgggctctggggaagctggctgggtggccatactaggagctgaacccgaaggtactctgtgtgtcctctcaactccacgggccccactttggcattttctccaattccctctcgtttccatttgcttcctccctctagccccctggctgtgtccaatttcaacaccaagtttctgagcttttctcattttgttcactgtctccagaacatccctgcttcttttacctttcaaagaattcaaacttgaactctgctcactcctgcccatcaccaacctgagctcagagttcctgagaagggaaagcaccctcataaggaaactcctccttttcttacatcattagacttgagcacagacagcatttccatctccacactgctctggccaggttgtgcctcagtcaattacacaactgtgtctcagtagccttggtagggcccaaatcaggatattctttgggaagtttcactttgtactgagccaagcataatctcccgggatctaaaatagaaaattctagacccacccctccacatcttcgttattgaacccaatatgtcacccatttaccatgtgctcaaatctctacctactgctgattctcagatcaaatcgtaacccagatttaccatggtccaaactctgacatctgattggggccatgtcatcctggttcaggctgtcagccccaagcaggtgggtcagtttgcctcaccctgagagcaggttgccagggcaaccatgaggctgcataaaaagaacctatgacaggatgcatatgagagagacaaatgtcttcacattgaagaaggggaggagtgcaccattggttttccatcctccagatgcactaagcttctacctaaactgtgccccctccttctttgaaacacatcccatccttaagccttggtaggaaggagagccatctggaagccctgaatcctatggaatgctgagtctcccttctccttcccccttagtgttggaattctcattccccaaagtcttggatttgacctttcccgacactgactggagagaagcatcttcatattcacaggaatgagccttagatcagactttgctcctctcctgggagctccaggacactgaaaagccaagcttgttaccaatacttgcccttccttaagtacattaaatacatcccaaatagttaaacagattcctaaacagccaggccattctccctccttctaaccctcatctcctcggcctacgaaagcccagatgtgtgatccagggcttggcttcccctgtcttccccatcccagcatccttgcgggaaagggctgctctctctctctgctttcagaaggcaaatttccttatcacctatgagtcacaaacccagagagtggccaaacatagccaagctgatgcaagaccctgggaaggggaaagctgcaggtgtgtttgtgctgggaggagtgctgaccctcacctcagagacacctcctctccagatcctcaggaggtataaagacaggtcctccaccaccagtcaggcacactctaccaccatgaatccactcctgatccttgcctttgtgggagctgatggcgagtttcatgccatgcctcaggccccaaccaccccctttcctggcagacacttgccctgccattcttgccacctttcccattttgactgtgttctgatattctatttcctccatctctccttcccatcctcttcggctctctttaagcctcacctgtttcagcttctccatgatttcactcccaccactgtcattcatccatatctgagctgtggctggagaagctgggaagggagaccaggtggggcgggcccacaaaatgaagcagcagccttcaggcttggctccatagcaccagtatagcaccattatatctgctcttaacctcaaatgcacctggggaggttgaaaaattactcatatcagagactcagctttagaagttctaacttcattctctggggtgcaacctgtgtactgggcttttaacattcccgggtgatttttaacatttccatgcatgcagccaaggttaagaattgctgttctattggccaataacaatgtctacctttgttctgccaaagtgagcctgggggctgccctcaactctgccctgactacacaaatctgagctatgggggaagctggtcatggccaggtctacgcagccagggggttttcctagcttggccaaagtatactgacaatccagggctcaaatcgccaggggaagtacacaggtgatgaataaaagagagaagcactcagtgggtgagacaaccacatcccaattcctatcccactggaagcattgtgaggacattccttgaatcctcagcctggtgaccccggggagaactgagcccctgcagggtacctagctacatgccctgcagacacagagacttgggagccacatgcagtgatgcttaccaggggtgacagcgctccctcccttacccagcctcactgtgctcgttaaggatttctaattagcaggaagcaaccgaaggctgggagcgctacccctaacatgctactgacttgccttctcctttcccatctccactccagttgcttcccctttcgacgacgatgacaacatcatttagtggtatacctgtgaggagaattctgtcccctaccaggtgtccctgaattctgggtaccacttctgcagtggctccctcctcagcgaacagtgggtggtgtcagcagctcactgctacaagtagtaagtgtggggcccctgactgcaaagctcccagccaggctgcctgggagagcttggcttcagcccagggaactactgaggttgggtaagatggatgggagaggtggtggagaagaaaacttgttggcagcagcggactctccagagcagagagcgaacacaagacaggaagctctcacacccaggcaaatccatgaaacagcaagggttgtggtcataaaagcaggcagggatgatcttggtgtttggcagagctagtaagaacagcaggcaagtaccctttgctggttagctacacatcaaagtcacttaagaaagagtttttaaaagtactgatgcctgtgtcctatcccagggcaattatcaggaattttcaggaagagggtgtgaatatcagtgagtattaaacattctacctctggtaactgtagattgtatagacagagctgagaactgctccctacaccaagaactctcaaacctgagtttgcctcagaaccacctgcagggttgttaaagcacaaatcactgggacccatccccaaggttctgagcagtaggtgggggtaaggaccaagaatttacatttctaacaagttcccaggagatgctaatgctatggctacccttaggttagattacacagaagggtggtgctcaccaggccaagaaaggagggaggaacaggcactgtgcacagttagcaaaggcctggggtgaagaatgctgggaaaacttcaaagagctccttgtgcccacagtgctagtgactgtggagattgtgggaaagaggctgggaaggagggttaaggagcatcctccggtggaatccttttgactcttcccaaccccattaccaccaacctctgaaacagaaaggtcctgggtctcacaacttcactgacccccatccctctcctgcccatgtgatatggccacacaccccacccgatgcctccagagctgcccatgagcagggagcttgaggaccctggggaaagtaagatgggtgtcccagctgtgggagaaggtcttcaccatgcctgccctgcccatcagccgcatccaggtgagactgggagagcacaacatcgaagttctggaggggaatgagcagttcatcaatgcagccaagatcatccgccaccccaaatacaacagttggactctggacaatgacatcctgctgatcaagctctccatgcctgctgtcatcaatgcccacatgtccaccatctctctacccaccgcccctccagctgctggcaccaagttcctcatctctggctagggcaacactctgagctctggtggtgagtgggaccctttgtccttctccttccctccatcctcacaatttccagaacaaaccatgccccttaacttgaatcctctcacctccaggcttaagacacatttctagtgcccattacacacaggctgtacagtggatggacatcagagagatgcaaagtctcaaggacttggctcctaaaatcaaaagacaggacatatagagaacttgctttgatcacgtcttggaaggggttcaaaaatgatcattctgggaactaaaagccagagtcccttgccaggacttaggtttcggagtcctctccagggacagtgttcctcttcaatgttccatcctagattattgtctccttctctggcctgatctacacttctactttctttgttctcttgctgatcctcacagccaactatccagatgagctgcagtgcctggacactcatgtgctgacccaggctgactgtgaagcctcctaccctggagagattaccaacaacatgttctgtgtgggtttccttgagggaggcaaggattcctgccaggtggtttgaccccttcccatgctgaggttcccactgatacccaggccccacccaggaaaaagatttgaactcccaaggtggcggggctcaggaggctccctgcactgcccccatggagaagtgaggaagactcccttgggctgcatcctgtctgcttaggaagaacagagaatgggccactgtgcgaaggacgtggagccaaagagctggctggaaaggagtcttttaaggttcagagcaaatgtagctatattcttcctctttctctctcttcatacagcttgtcccttcttctccccagggtgactctggtggccctgtggtctgcaacggacagctccaaggagttgtctcctggggctatggctgtgcccagaagaacaggcctggagtctacaccaaggtctacaactatgtggactggattaaggacaccatagctgccaacagctaaagcctctggtacctctgcagtctctataccaataaagtgaccttgctttcactgtctgtgtctgtgcctgctccctcacactgcttcacactggaaagcatcctccaatctcaggtcagccacgactcccccccttaaaggtaagctgaaccctcatctcccaaaatgtgttgcatggtacactagattagcacatacaaatagatggaatccaaaaattataagaaacttgggagaaaggggggcactgttttctagagaaatgtgtgtttcagaaagttggtctttggtgggggggtactgatttttatttgggcttctcacagtgggtagagctactctgccttcagaacaatcacagcacagaaaatgttgtcagcatcttcgaggcagcccaaaaaatccgaccagctgaatcttcttgctaaaatacatcaaaaaagacaaatgctgttggtgatgacgtgcctctcacaggaatatgtcagcaccaaaccctcaaccaagccctccctcctcattcacctggaaaattagactcaagcaaagctccctggcctcctacctcttccctcagttccctagttccatctctgtgagcaggctagagagatgttccacctaccatagcgggagctagactgcgacttgggaatcaagccaggtctgcacgctgcattttcatcttctttgcctttggggtaggacgccatatgaatcccacagttaacaccagctccccactctgaccagggaaagaaactagagagggtcaagattcacccatttgatcaattaactgaggtaggtttcattttcatataacttgcttgcctttgagatacttcaagtgacttacgtgggactccttaaaaaaaagtggagggaaagacatctgagcagccactctggccacatgttggctggcttgcacccactggatgcagcagagggaggcaggccccctggcacctctggcacctgccaaagcctcttccaggcaattctgagagggaccatgttggggctgtagctcatccaagcttgtcactgaagatccaagcaagcttctctttgaaattccaccttcatcttctgtcccaagtggttgtggacacccctgggagctggtaacaagggccaggagcagccaaggaagacagacaagttcagagcacatttccagttacagggaacagagcacaggcctccaagtgtccacagagcagtgtgcaaattgcagggatgagtagaggaaaacctctacatggagcacagcattcctggcaaacacaagggaccgcagtccacatgctgtggaataaacccaagtatgcatcggacacttgtttggtaaacagtaaatgtgtaagatcaattaccttgagagggccatctgggctccagatatgtagttcatgtgaggagacggctaccactcactatcttcagaggaaaacagggctcagggcttgcacacaatggagatacacacaggtcacccagaacgtcaatacatacaaacatcactttgttcaacatggattttgtttttatggagtccaaacgcagaccgtagttcaccttacagccttgggtttgtctgcttttggagacatatatccagtagatagatagacaacacagatacatttttttccctttcttactgtaacgtcagtgcctcgtctgaatatcatcatcactcaagaatcaagggaagaacaaaatgcttcatataaacagggctgggcaaggagtcttagtttcccctgttttctgtctccattcagatcattcctatcaaagcccagctggttacctcaagccaagagacagacataaggatcccaatggccttctagatggctgcttccacctcctacctgggccacatagagtctttacacagaaatctgagttagccctgtgagaagggttgacagcacaaacagtgcatgaaaatcacagataaccatggtatatctcgcaagtggtcagtgtaaaataaaccaccaccaccaccacaaaaaacacaaaacaagcagaaaaatgcttattcaaaaatctaagacaaaatactgtgtgagaaacaggccacggggttgccttttctcaggccacacagctttcccattccatgtgctcacatggaccgtgagatgtgaaagtctgcagggcgtgtgctcgggatcgaggctggtactgttcacctgtgggtccagaccaaatggcaaagaggcagaaagctataactctgtccaccgccacggcttagggcctccttctcacagaggctccaaagagcccccacctcagccttcacacaaaacatctccttctggctgaacaacagccaggctggagtgccgtggcatgatctctgctcactacaacctccacctcccgggttcaagtgattcagtctcccaagtacacgggattacaggtgcatgccaccatgccaagctaattttttttttcttttttgtatttttattagagacagggatttacgatgttggccagtgtggttttgaactcctgacctcaagtgatccagagtgctaggattacaggtgtgagccacagcttctggcccaggccccattttttaaaaaataatttcaaattttattttagattcatggggtacatgtgcaggtttgttacatgggtatactgtgtgatgctgaggtttggggcacaaatgatctcctcactcaggaactgagcacagtacccaataggtattttttcagccctttccacactccttctctcttccctctagtagttgcagtgtctactcttcccatctttacatccgtttttacccaatgctcagctccgacttatacatgagaacgtgatatttggttttctgttcccatgttaatttgcttaggattatggtctccagctccatccatgttgctgcaaaggacatgatttcattcttttcatggctgcatagtattccatggtgtatatgtaccacattttctttatccagtctaccgctgatggccacctaggttgattccatggctttgctactgtgaatagtgctgtgatggacatgcaagagcatgagtctttttggcagaacaattactttcctttaggtaaatgcccaataaagcaagtgctgggtggaaagatagttctgttttaaattgtttcagaaatctccaaacggttttctacattaatttttccatgaactgatttacactctggccaacagtgtacaagcattccctttccactgcagcctcatgagcatcttctattctgtggacattttaataataaccacactgcagccaagctctttcaagcccaatgtggggaacagccacaaacatcccttttcccaacgagaattcttgcctgcccactggtagaattcttgttttcagctgtctttcattgtttgcttttcaaagaaaaaccaaaggtaaagtggtatgatcttccacacgtgaaccagtttgtagccaccagagcctgctgggaaggggcccctcacgcatgcattgatcttgtcatgtggaatttgagagatctagaagccccacagcaacctaccatacaactgcctatcagcgctcatcctttcacaggattagctcaattctggctctgcagacactggcagccacgggtgagaaaccctgggcctctgtgggcttccttcatcacccagggccacagtgggctgcctgtcctaggcagagacacagcaacattctcttaagctgaaattaagcataaacccacttcaccaataatcatctgagggcacagtccctgcctccttccttggggattttaaaacacacatctctctgaccaaacaggtaggtgagatctgactttaaaggggggaaagtgggatgaattggggtatcaggaatgaatcccaagtgtttttgtgtggcgaatggcatccacatcccaaaatatacttggagatggggaaaaaagcaggagaggagaagggtaaaaaaggaggacaaagtgtctgaaagtcattgaaagcttctctcatggttctttctggctctggttgctttgccaaggtcttgagtgcaggcagggctggctctggctgggagctgctgctctggaacatggaagagtcacttcacctccagaaagctcatttgatcatctgtaaaatgggcaagcccataggtggttgtgatgacaaaatgaaaaaaactttcttaacttacatgagtgacatgctgtatagtaagttacatgctatataggaagcacacagaaataattcactgttatcataaatgaaacacagtggattagtgagctaagcactaaatggaagccagaaagatgtctagagaagtagacaaagaaatctatagttcagaatgaacagtatcaagaatgacatgtcctccaaattgagcttgggcagctggatctgaacctatcctacacatctgagtctacagtatgaggtaacagcctccacctatagctatcttctctgcctgtaaggtcattcccttttgaagaaagctgacctcagactatactgtgattgtttaaggaagagcgcaaaatactggagaaggctagtcttcaagctctagatacagaaaatccttatattcttgggtgttccctttcagacagagtcagagccacaaccgctaatccaaaaatcccattttccaaaaaaattttccatcttccaccaaggttcccctccctgtttagtgcacactggtgtctacagttgctagagcaagagtctctccttatgctttaagcaggagttctgtgaagaaaccatgccaaggggacaaaacaaaacaacatatttagggacaacacaggaaaaacccatattatcaaaactccaaaacctggctacctcaggcttggccagttatctgtgagcagagagttgtgtcatctacatagctatcatggcccagacggtctggaaatgtggcaaggtaaggctctgagacaaggtgccaggagaaagatgaattcaatcatccatttctgccaggaagaaaagcaccaggaaggaatcagatgtacagtttgtcctctggggacctctgccttgatcctcaataagtctccttttagatgccacctgcagcaattcccacacttcacatgctctccatggcttccattggccttatggtcagctctgccaagatctgtattcttgggcaagacagaatccttctgaatctcactctcttgctctataaatggaaacaattttgctctgcacaaatcacaattagaatatttgtgggaagttaaagtgtgaaacacagcataaatgaaaagcaatgtaccactgctgcttacatgaaaactcctgtaaagctgtcaggcaccatgaaccatctaaatatagcagtgttaggtataagcccatcagtgattagagggggtacggggtggagagggggtctcctagcagtgggcctcctcgctgtggggaagctggctcggccaccatgccaagagctgaacccgaaggtactctgtgtgtcctctcaactccacgggccccactttggcattttctccaattccctctggtttccatttgcttcatccctctagccccctgaccatgtccaatttcaacaccaaatttctgagcttttctcatgttgttcactgtctccagaacatccctgcttcttgtacgtttcaaagaattcacacttgaactctgctcactcctgcccatcaccaacctgagctcagagttcctgagaagggaaagcacccttataaggaagctcctccttttcttacatcattagacttgagcgcagacagcgtctccatctccacactgctctggccaggttgtgcctcagtcaattacacaactgtgtcttagtagccttggtagggcccaaatcaggatattctctgggaagattcactttgtactgagccaagcataatctcactgcatcaaaaatagaaaattctagaccaacccctccacatcttcgttattgaacccaatatgtcacccatttaccatgtgctcaaatctctacctactgctgattctcagatcaaatcgtaacccagatttaccatggtccaaactctgacatctgattggggccatgtcattctggttcaggctgtcagccccaagcaggagggtcagtttgcatcaccccgagtgcaggtttcaaggacaaccctgaggctgcatgaaaagaacctacgacaggttgcatatgagagagacaaatgtcttcacattgaagaagggaaggagtgggccattggttttacatcctccagatgcactgagtaagctcctacctaacctgtgccccctccttctttgaaacacatccccatccttaagccttggtaggaaggagagccatctggaagccctgaatcctatggaatgctgagtctctcttctccttaccccttagtgttggaattcttgttcccctaagacttggatttgaccttcccgctgagtgactggagagaagcatcttcatattcacaggaatgagccttagataaaactttgcacatctcatgggggctgcagaacactgaaaagccaagcttgttaccaatacttgcccttccttaagtatattaaatacaatcccaatagttaaacagattcctaaacagccaggccattctccctccttctaaccctcatctcctgggcctaagaaagcccagctgtgtgatccggggcttggcttcccctgtcctccccatcctagcatccttgcaggaaagagccgctctccctctctgctctcagaaggcaagtttccttatcacctgtgaatcacaaacccagagagtggccaaacatagccgagctgatgcaagaacatgggaagcagaaagctgcaggtgtgtttgtgctgggaggaatggtgaccctcacctcacagacacctcctctctggatcctccagagctataaagacgggccttccaccaccagacaggcgcactctaccaccatgaatccactcctgatccttgcctttgtgggagctgctggtgagtttcatgccctgcctcaggccccaaccaccccccgttactggcagacatatgccctgccgttcttgccacctctcctcttttgactgttctctgatattctgtttcctccatctggcatatctccttcccatcctccttgggctctctttaagcctcacctcttttaccttctccctgatttcattcccaccactgtcattcacccatatttgagctgtagctggagaagctggaaatggagaccaggtggggcaggtccacaaaataaagcagcaggcttcaggcttggctccaacagcaccagaatagcaccactatagctgctcttaaccttggatgcacctggggaggttgaaaaatttctcatgcgagagactcagctctagaaattctaacttcatttctctgggatgcagcctgtgtactggctttttaagcttctcaggtgatttgtaacatttccaggcatgcagccaagattaagaattgctgtcctattggctaataacaatgtctaccattctctgctgaagtgagcctaggggctgccctcaactctgccctgactacacaaatctgagctatgggggaagctggtcatgacgaggtctatgcaactagggggttttcctagcttggccaaagtatcctgataatccagggctcaaataggcagaagaagtacacaggtgatgaataaaaaagagaagcattcagtaggtgagaaaaccacatcccatctcctatcctacaggaagcattttgaggacattccttatgacctcagcctggtgaccccaggagagatctgaaaccccatggggtacctagctacgtgccctggagacacaaagacgtgggagtcacatccagtgatgctcacaggggtggcagagctccctcccttgcctagcctcactgtgcttgttaaggatttctaattagcaggaagcaaacgcaggctgggagtgccacccctaacatgctactgacttgccttctcccttcccatctccactccagttgctgtcccctttgatgatgatgacaagattgttgggggctacacctgtgaggagaattctgtcccctaccaggtgtccttgaattctggctcccacttctgtggtggctccctcatcagcgaacagtgggtggtgtcagcaggtcactgctacaagccgtaagtgtggtgccactgactgcaaagctcccagccaggctgcctcggagagcttggcttcagcccagggaagtactgaggttgggtaagatggatgggagaggtggtggagaaaaaacttgttttcagcagctgactctccagagcagagagtgaacacaagacaggaagctctcacacacaggcaaatccatgaaacagcaagggttgtggtcataaaagcaggcagggatgatcttggggtggtgagagctagtgaaaaaagcaggaaagtacctttagctagttagctacaccttaaagccacctaagaaagagtttttaaaaatactgatgcctgtgtcctatcccagggcaattatcaggaattttcaggaagagggtgtgaatatcaatgagtatttcacactctaccttggtaactgtagagtgtattgacagagctgataaccactgcctacacgaagaaccctcatacctgagtatgcaccaccagaaaaaactgcaggcttgttaaggacaaatcactgggtcccatccccaaggttctgatcagtaggtgggggtaaagaccaagaatttacatttctaacaagttcccaggagatgctaatgctatggctacccttggattagattacacagaagggtggtgctcaccaggccaagaatgcagggaggagcaggcactgtgcacagttagcaaaggcctggggtgaagaatgctgggaaaacttcaaggacctccttgtgcccacaggactagtgactgtaaagattgtgtgaaagaggctgggaaggtgggttgaggagcagcctccagtgggatccctttgactgttccccaccccattaccaccaacctctgaagcagaaaggtcctgggtctcacacctgcactgacccacatccctatcctgcccatgtgatatgaccacgtacccaaccccatgcctccagagctgcccatgagcaggaagcttgaggaccctcgggaaggtgggatgggtgccccagctgtgaaagaagggcttcaccatgcctgccttgcccatcagccacatccaggtgagactgggagagcacaatatcgaagtcctggaggggaatgagcagttcatcaatgcagccaagatcatccgccaccccaaatacaacaggattactctgaacaatgacatcatgctgatcaagctctccacacctgccgtcatcaatgcccatgtgtccacgatctctctgcccactgcccctccagctgctggcaccgagtgccttatctccggctggggcaataccctgagctcagggggtgagtggcaccctttgtccttctacttccctccatcctcacaatttccacaatgaagcatgctccttaacttaaatcctctcacctccaggacacatttctagtgcccattacacacaggttctgcactgggcaccagagagatgcaaagtctcaaggacttggctcctaaaatcaagagacaggacaaatggagaacttggtgccattacttcttgggaggggttcaacaatgatcattctaggaactaaaagccagattcccttgccaggacttgttttggagtcctctccaggggcagtgttcctcttcaatgttccatcctagattactgtctccttctctggcctgacccacatttctactttctttattctcttcctgatcctcacagccgactacccagatgagctgcagtgcctggacgctcctgtgctgacccaggctaagtgtaaagcctcctaccctttaaagattaccagcaagatgttctgtgtgggcttccttgagggaggcaaggattcctgccaggtgattagaccaacccttcccatgctgatgttcccactgatacccaggacccaccagggaaaaagatttgaactcccaaggtggggggctgaggaggctccctgcagtgcccacatggagaagtgaggaaggctcccttgggctgcatcctgtatgcttaggaagaacagagaatgggccaccgtgagaagaacatggagccacagagctggctggaaaggggtcttttaaggttcagagtaactgtagctatattcctcctccatctctccataaaacttgtcccttcttcatgccagggtgactctggtggccctgtggtctgcaatggacagcttcaaggaattgtctcctggggctatggctgtgcccagaagagaaggcctggagtctacaccaaggtctacaactatgtggactggattaaggacaccatagctgccaacagctaaagcccctggtcactctgcagtctctataccaataaaataaccctgttctcactgtctgtgtctgtgcctgctctctcacactccttcacactggaaagcatcctccaatctcagttcagatatgactctcccccttaaaggtaagcagagcccccagctcacaaaatgtgttccattgtacactagattagcgcatacaaacagatggaatccaaaaataagaagcagcttcggagaaaggcagggcactgtttctagagaaacgtgtgtttcagaaaggtagtctttgggggagggtattgatttttatttgggtttctcacagtggttagagctactctgccttcagaacaatcacagcatagaaaatatgtcagcatcgtccaggtggcccaaaaaatctgaccagcggaatcttattgctaaaacacaataatgacaaatgctgttggtgatgtcatgcctctcccaggaatgtgtcagcaccaaaccctcaaccaagccctcccttctcattcacctggaaaatcagattcaagtaaatctccctggcacgctgactcttccctcaattccttagttccatctctgtgagccggctagagagatgttccacctaccatagcgggagccagactgtgacttgggaatcaagcccagctctgcacgctgcactttcatcttctttgcctttggggtaggacaccacagtgaatcccacaattaacaccagctccccagtctgaccagggaaagaaattagagagggtcaggattcacccatttgatcaattaactgaggaaggattcattttcataaattttgcttgcctttaagacacttcaagtgagttatttgggactcattaaaaagggtggaaggaaagacatctgagggctgtgacaccatgcagccactctagccacatgttggctggcttgcacacactggacacagcagagggaggcaggccccgtggtacttgtggcacctgcaaaagcctcctcctggaaattcggagagggcccagcttggtgccgtaactcatccaagcctgtcaccgaagatccaagcaagcttctctttgaaattccactttcaccttctgtcccaagtggttgtggacacccctgggagctggtactaatggccaggagcagccaaggaagacagacaagttcagagcacatttccagttacggggaacagagcacaggcctccaagtgtccatggagcagcgtgcaaattgcagtgatgagtagagtaaaacctctacacggagcacagcattcctggcaaacacaggggaccgctgtccacatgttgtggaatacacccaagtatgcatcagacacttgtttggtaaacagtaaatgtgtaagatcaattgccttgagagggccatccgggctccagaagtgtgattcgtgtgaggaaacagctaccactcactatcttcagaggaaaacagggctcagggctcacacacaatggacagatacaaacaggtcacccagaacgtcactgcatataaacagcactttgttcaacatggattttgtttttatggagtccaaacacagaccgtagttcaccttacagccttgggtttgtctgctttgggagatacatatccagttgatagacaagacagatacatttttttccctttcttaccataatgtcaatgcctcatctgaatatcatcatcactcaagagtcaagggaagaaccaaacacttcatataaacagagctgggctgggtggggagtgttagtttccagtgttttctgtctccattcagatcattcctatcaaagcccagctgattacctcaagccaagacacagacataaggatcccaatggccttccagatagctgcttccacctcctacctgggccacatagagtctttacacaggaaagtgagtcaccccactgagaagggttgccagcagaaacagggcatgaaaatcacagataacaatgggaatccttccaagtggtcagtgtaaaatagatcaccaccaccaccaccaaaaatgcaaaagaagcaaaaaaaatgcttattcaaaatccaagacaaaatactgtgtgagagtcaggccacggggttgccttttctcaggccacacagctttcccagtccatttgctcacatggaaccatgagatgtgaaagtctgcagagcgtatgctcaggatcgaggcttgtactgttcacctatgggtccagaccaaagggcaaagaggcagaaagctgatatctgtccaccgccaaggcttagggcctccttctcacagaggatctgaagagaacccacctcagcattcacacaaaacatcttctggctcaactacagccaggctggagtgccatggcatgatctctgctcactacagtctctgcctcccaggtcaagggattcagcctcccaagtacttgggattacaggtgcatgccaccatacccagctaatttttttttttttgtatttttattagagacagggattcaccgttttggccagactggttttgaacacctgacctcaagtgatccaaagtactgggattacaggcgtgaaccacctcttctgtccgaggccacattttttaaaaaataatttcaaattttattttagattcagggaggacatgtgcaggtttgttacactggtatattgtgtgatgctgaggtttggggcacaaatgatctcatcactcaagcagtgaccatagtacccaataggtagtttttcagcactttccacactccttctctcttccctctaacacttgcagtgtctactgttcccatctttatatccatgtgtacccaatgctcagctgccagtatacatgagaatgtgatatttggttttctgttcctatgttaattcgcttaggattgtggtctccaactccatccatgttgctgtaaaggacatgatttcattcttttcatggctacatagtattcaatggtgtatatgtaccacatttccttcatccagtctaccgctgatggccacctatgttgattccatggctttgctagtgtgaatcagtgctgtgatggacatgcaaaagcatgtgtctttttggcagaacaattattttcctttgggtaaatgcccagtaaagtaagtgctgggtggaaaggtatttctgttttaaattatttcaaaaatctccaaaatgcttcctgcattaatttttccatgaactcatttacactctggccaacagtgtataagcgttccctttcctctgcagcctcaccagcatcttccattttttggacattttaatagccactatgcagccaagctctttcaaggccaatgtggggaagagccacaaaaatcccttttcccaaagagaattattgcctgctccctggtagaattcttgttttcaactgtctttcattgtttgtttttcaaagaaaaaccaaaggtaaagtggtatgatcttccaaacctgaaccagtttgtagccaccagagcctgctgggaaggggctcctcaagcatgcattgatcttgtcacctgcaatttgagagatcaagaagccccatagcaacctacaactgcccatcagtgctcatcctttcaggggattagctcaattctcgctcagtagacactggcatccacaggtgataaaagcccgagcctctgtgggcttctctcatcatccagggccacaatgggctgcctgtcctaggcagagacacagcaactttcccttaaactgaaattaagcataaacccacttcaccaataatcatctgagggcatagtccctgtttccttcctcagggatttaaaacacacatctctctgaccaaacaggtaggtgagatctgactctaaaggggggaaaatcagcatgaattggggtatcaggaatgaatcccaagtgtttttgtgtggggacaggcatccacatcccgaactgtacctggagatggaaaaaaatgcaggagaggagaagagaaagaaagggggaaaaagtggctgaaagtcattgcaagcttctcttgtggttctttctggctctggttgctttgccaaggtcttgagtgcaggcagggctggctctggctgggagctgctgctctgggagatggaagagtcacttcacctccagatagctcattcgatcatctgtaaattgggcaagcccataggtggttgtgatgataaaatggaaaaaaaaatgcttagcttatatgagttacatgctgtatggtaagttacatgctatatagtaagcacacagaaatgattcactgttatcataattgaaggatagtggttcagtgtgctaagcactaaacacaagccagaaagatgtctgagagaagtagacaaagaaacctatagttcagaatgaacagtaccaagaatggcatgtcctccaaattgagcttgggcagctagatctgcacctatcctacacatctgagtctacagtatgaggtaacagtctccacctatagctatcttctctgcctgtaaggtcattcctttagaagaaagctgacctcagactatactgtgatcatttaaggaagagcgcaaaatactggagaaggctagtcttcaagctctagatacagaaaatccttatattcttgggtgttccctctcagacagagagtcagagccacaagcactgacccaaaaatcccttttttcaaaaaaattttccacttctaccaaggttcacctcgctgtttagtgcacactggtgtctacagttgctagagcaagaggctctcatcctctaaggtctgtgaagaccccatgacaaggggacaaaatgaaacaacatgttcagcggcaacacaggaaaaacccatattatcaatgctcaaaaacctggccacctcaggcttagccagttattcgtgagcagagaggtgtgtcatctacatggcagtcatggcctggatgggtctggaactgtggcaaggtaaggctctgagacaagatgccaggagaaagatgaattcaatcatctatttctgccaggaagaaaagcaccaggaaggaatcagatgtacagtttgtcctctggggacctctgccttgatcctcaataaatctccttttagatgccacgtgcagcaattcccacatttcacaatgctctccatggcttccactggccttatggtcagctctgccaagatctgtattcttgggcaagacagaatccttctgaaactcagtctcttcctctacaaatggaaataattttgctctacacaaatcacaattagcatgtttgtgggaatttaaactgtgaaactcaacataaatgaaaagcaatataccactgttgcttacgtgaaaactcttgtaaagctgtcaggcaccatgcaccatatgagtacagcaatgttaggtataagcccatcagtgattagatgggatacagggtggagagggggtctctgagcagtgcgtctcctggctgtggggaagctggctcagcggctatgccaggagctgaacctgaaggtaatctgtgtgtcttctcaactccacgggtcccactttggtattttttccaattcactctagtttccatttgcttcctccctctagccccctgcacatgtccaatttcaccatttctcattttgttcactgtctccaaggtcggtcagtttcaatcaccctgagtgcaggttgcaagggcaaccgtgaggctgcataaaaagaacctatgacagaatgcacatgagagagacaaatatcttcacattgaagaaggggaggagtgcaccattggttttccatcctccagatgcactgagtaagttcctacctaaccagtgccccctccttctttgaaacacttcccatcctcaagccttggtaggaaggagagccatctggaagcccagaatcctatgggatgctgagtctcccttctccttacccctcagtgttggaattcttgttgtccataggcttggatttaaccttccgcacggtgactggagagaagcatcttcatattcacaagaatgagccttagataagaccttcctcctctcatgggggctgcaggtcactgaaaagccaagcttgttaccaatgcttgcccttccttaagtacattaaatgcatccccaatagtaaaatatattcctaaacagccaggccattctccctccttctaaccctcttctcttcggcctaagaaagcccagctgtgtgatctgcggcttgacttcccctgtctttcccatcccagaatccttccaggaaacagccggtctccctctctgctctcagaaggcaagtttccttatcacctgtctgctctcagaaggcaagtttccttatcacctgtgaatcacaaacccacagagtggccaaacatactgatgcaagaccataggaaggggaaagctgcaggtgtgtttgtgctgggaggagtggtgaccctcacctcacagacacctcctctcccgatcctcgggagataaaaagacgggtcctccaccaccagtcaggcacactctaccaccatgaatccactcccgatccttgcctctgtgggagctgctggtaggagtttcatgccctgcctcaggctccaaccataccccgttcctggcagatgcatgccctgccattcttgccacctctcctcttttgactgttctctgatattctatttcctccatctggcatctctccttcccaccctccttgggctgtctttaagcctcacctgtttcagcttctccctgatttcactcccaccactgtcattcatccctatccgagctgtggttggagaagctgggaaaggagaccaggtggggcaggcccacgaaatgaagcagcaggcttcaggcttggctctgacagcaccacaatagcaccactatagctgctcttaacctcgaatgcacctgaggaggctgaaaaattactcatgccagagactcaactctagaaattctcacttcatttgtctgaggtgcagcctctgttctgggcttttaagcttcccaggtgatttttaacatttctaggcatgcagccaaggttaaaaattgctgttgttttggccaataataatgtctacctttgttctgccgaagtgagccttgggctgccctcaactctgctgtcactgcaaagatctgagctaagggggaaactggtcatggccaggttttcctagccagacagggggttttcctagcttggccaaagtatcctgacaatccagggctcaaatcgccaggagaagtacacaggtgatgaataaaagagagaagcattcagtgggtgagacagccacattccaattcctatcccactggaagcattttgaggacattccttatggcctcagcctggtgaccccaggagagatctgaacccccacagggtacctagctacgtgccctgcagacacagagacttgggagccacatccagtgatgctcaccaggggtggcagagctcccccaccttgcctagcctcactgtgcttgttaagttttctaattagcaggaagcaaccgcaggctgggagagccacccctaacatgctactgacttgccttctcccttcccatctccactccagttggtgtctcctttgatgatgatgacaagattgttgggggctacaactgtgaggagaattctgtcccctaccaggtgtccctgaattctggctaccacttctgtgttggctccctcaacagggaatagtgggtggtgtcagcagctcactgctacaagtcataagtgtggggcccctgactgcaaaactcccagccaggctgccggggagagcttggcttcagcccagggaagtactgaggttgggtaagatggatgggaaaggtggtggagaagaaatcttgttggcagcagctgactctccagagcagagaatgaacacaagacaggaacctctcacacccaggcaaatccatgaaacagtaagggttgtggtcataaaagcaggcagggatgatctcggggtggtgagagctagtgagaaaagcaggaaagtacattttgctggttagctacacactaaagccacgtaagaaagcgtttttaaaagtactgttgcctgtgtcctatcccagggcaattatcaggaattttcaggaagagggtgtgaatatcagtgggtatttcacactctacctctggtaactgtagagtgtatagacagagctgagaaccgctgcctacaccaagaactctcaaacctgagtatgcatcagaactccctgcaggcttgttaaggcacaaatcactgggtcctatccccaagtttctgatcagtaggttggggtaaggaccaagaattcacatttctaacaagttcccaggagatgctaatgctatggctacccttggattagattacacagaaaggtggttctcaccaggccaagaagggagggaggaacaggtgctgtgcacagttagcaaaggcctggggtgaagaatgctgggaaaacttcaaggagctccttgtgcccacagtgctagtgagtgtggagattgtgggaaagaggctgggaaggcagattgaggagcagcctctggtgggatccctttgactattccccaccccactaccaccaacctcggaagcagaaaggttctgggtctcacaagtgcactgacccacatccctctcctgcccatgggatatggccacacaccccaccccatgcctcaggagctgtccatgagcagggaggtggagaacccttgggaatgtgggatgggtgtcctggctgtgggagaaggtcttcaccatgcctgccctgcccatcagctgcatccaggtgagactgggagagcacaacatcgaagtcctagaggggaatgaacagttcatctatgcggtcaagatcatccgccaccccaaatacaacagctggactctggacaatgacatcctgctgatcaagctctccacacctgccatcatcaatgcccatgtgtccaccatctctctgcccaccacccctccagctgctggcactgagtgcctcatctctggctggggcaacactctgagttctggcggtgagtgggaccctttgtccttctacttccctccatcctcacaatttccagaacgaagcacaccgcttaatgtgaatcctctcacttctaggcttaagacacatttctagtgcccattacacacaggctctgcactgggcaccagagagatgcaaattctcaaggacttggcttctaaaatcaaaagacaggacaaatggagaacttgctatgatcacatcttgggagaggttcaacaatgatcattctgggaactaaaagccagagtcccttgccaggacttatgttttgaagtcctctccaggggcagtgttcctcttcggtgttctatcctagattattgtctctttctctggcctaacccacatttctttctttgttctcttcctgatcctcacagccgactacccagacgagctgcagtgcctggatgctcctgtgctgagccaggctgagtatgaagcctcctaccctggaaagattaccaacaacgtgttttgtgtgggtttccttgagggaggcaaggattcctgccaggtgatttgaccccttcccatgctgaggcttccactgatacccaggcttcatctgggaaaaacatttgaactcccaagttggtggggctgagtctccctgcattgccccatggagaagtgaggaaggctcccttgggctgcaagctgtctgcttaggaagaacagagaatgggccactgtgagaaggatgtggagccacagagctggctggaaaggggtcttttaaggttcagagtaaatgtagctatattcctcctccatctctctcttcatacaacttgttccttcttctccccagggtgactctggtggcccagtggtctgcaatagacagctccaaggaattgtctcctggggctatggctggcccagaaaaacaggcctggagtctacaccaaggtctacaactatgtggactggattaaggacaccatagctgccaacagctaaagtccccagtccctctgcagtctctataccaataaagtgaccctggtctcactgtctgtgtctgtgcctgctccttcacactcctttacactggaaagcatcctccaatctcaggtcagacagggctgtcccccttaagggtcagcagagcccccagctcccaaaatgtgtcccatggtacactagattagcacatacaaacagatggaatccaaaaataaaaagaaatatcggagaaaggcgggcactgttttctagagaaacgtgtgtttcagaaaggtggtctttggcaggggatattgatttttatttgggcttctcagagcagttagagctactctaccttcagaacaatcacagcacagatattgtgtcagcatctttgaggtagcacaaaaaatctgaccagctgaatcttcttgctaaaatacaacaatgacaagtgctgttggtgatgtcatgactctcccaggaatgtgtcagcaccaaaccctcgaacaagccctcccttctcattcacctggaaaatcagactcaaataaatctccctggcccccaaactcttccctcaattccctagttccatctctgtgagcaggctagagagatgttccacctaccatagcgggagccagactgtgacttggaaatcaagcccagatttgcacgctgcattttcatcttttttgcctttggggtaggacaccacagtgaatcccacagctaacaccagcccccaatctgaccagggaaagaaactagagaggatcaggattcacccatttgatcaattagctgaggaaggattcattttcataaaacttgcttgcctttgagacacttcaaatgagttatttgggacactttaaaaaaggtggaaagaaagatctgagggctgtgacaccatgcagcaactctggccacacattggctgacttgcacccactggacacagcagagagaggcaggcttcatgtcacctgtgtcacctgccaaagcctcctcctggcaattctgagtgggaccatgttggggccgtagctcatacaactttgtcactgaagatccaagaaatcttctctttgaaattccaccttcaccttctgtcccaagtggttgtggacatccctgacagccagtaacaagggccaggagcagccaagggagacagacaagttcagagcacatttccagttacacggaacagagcacaggcctccaagtgtccacagagcagcgtgcaaattgcagggatgagtagagtaaaacctctacatggagcacagcattcctggaaaacacaggggactgcggtccacatgctgtggaatacacccaagtatgcatcagacacttgtttggtaaacagtaaatgtgtaagatcaattaccttaagagggccatctttgctccagatgtgtggttcgtgtgaagagacagctaccaatcactatcttcagaggaaaacagggctcagggctcacacacaatggatagatacacatgggtcacccaaaacttcgctgcatacaaacatcactttgttcaacatggattttgtttttatggagtccaaacgcagaccctagttcaccttacagccttgggtttgtctgcttttggagacatatattcaatagatagatagatagacaagacagatacattttttccctttcttactataatgtcaatgccttgtctgattatcatcatcactcaagagtcaagggaagaacaaaacacttcatataaacagggctgggcttggtggggagtgttagtttccagtgttttctgtctccattcagattattcctatcaaagtgcagcagctggttacctcaagccaagagacagacataaggatccctatggccttgcagacagctgcttccacctcctacctgggccccttagactctttacacaggaaagtgagtcaccccactgagaagcgttgccagcagaaacagggcatgaaaatcacagataaccatgggattacttccaagtggtcagtataaaatataccaatactaccaccaccaaaaacacaaaacaagcaaaaaaaaatgcttattcaaaaatccaagacaaagtactgtgtgagagccaggccatggggttgccttttctcagtccacacagctttcccagtccatttgctcacatggaaccatgagatgtgaaagtctgcagagggtgtgctcaggatggaggctggtactgtttatctgtgggtccagaccaaagggcaaagaggcagaaagctacaactctgtccactgccgcggcttagggcctccttctcacagaggctccgaagagcccccacctcagccttcacacaaaacatcaccttctggctgaactacagccaggctggagtgcggtggcatgatctctgctcactacaacctccacctcctgggttcaagtgattcagactcccaagtacctgggattacaggcacctgccaccatgccaagctaatttttttttttttttttttttgtatttttagtagagacaggctttcaccatgttggccaggctggttttgaactcctgatctcaagtgatccaaagtgttgagattacaggcatgagccactactcctggcccaggctccactctaaaaaaaaaaataatttcaagttttattttagattcttggctgcatagtattccatggtgtatatgtaccacatttcctttatccagtctaccgctgatggccacctaggttcattccatggctttgctactgtgaatagtgctgtgacggacatgcaagagcatgtgtctttttggcagaacagttattttccttcaggtaaatgcccaataaagaattgctgggtggaaaggtagttctgtttcaaattatttcagaaatctccaaactgctttctgcattaatttttccatgaactcatttacactctgaccaacagtgtataagcattccctttcctctgcagcctcaccagcatcttctgctttttgacattttaataatagccactctgcagccaagctctttcaaggccaacgtggggaacagccacaaacatcccttttcccgaagagagttcttgcctgcccactggtagatttcttgtttccatctgtctttcattgtttgtttttcaaagaaaaaccaaaggtaaagtggtatgatcttccacacctgaaccagtttgtagccaccagagcctgctgggaagggatccctcaaggatgcattgatcttgtcacctggaatttgagagatcaagaagccccatagcaacctaccatacaactgcccatcagcgctcatcctttcacaggattagctcaattctgactctgcagacactggcagccacaggtgacaaaccctgggcctctgtgggcttccttcatcacccagggccacagtgggctgcctgtcctaggcagagacacagcaacattctcttaagctgaaattaagcataaacccacttcaccaataatcatctgagggcacagtccctgcctccttccttggggattttaaaacacacatctctctgaccaaacaggtaggtgagatctgactttaaaggggggaaattgggatgaattggggtatcaggaatgaatcccaagtgtttttgtgtggcgaatggcatccacatcccaaaatatacttggagatggggaaaaaagcaggagaggagaagggtaaaaaaggaggacaaagtgtctgaaagtcattgaaagcttctctcatggttctttctggctctggttgctttgccaaggtcttgagtgcaggcagggctggctctggctgggagctgctgctctggaacatggaagagtcacttcaccttcagaaagctcatttgctcatctgtaaagtgggcaattccataggtggttgtgatgataaaatgaaaaaaaagttcttaacttatatgagtgacatgctgtatagtaagttacatgcctatataggaagcacacagaaatgattcactgttatgataatggaaggacagtggtttggcatgttaagcactaaacagaagccagaaagatatcttagagaagtagacaaagaaatctatagttcagaatgaacagtaccaagaatgacatgtcccccaaattgagcatgggtagctggatctgaacctatcctacacatctgagtctacagtatgaggtaacagtcttcacctatagctatctcctctgcctgtaaggtcattcctttttgaagaaagctgacctcagactatactgtgatcgcttaaggaagagcacaaaatactggagaaggctagtcttcaagctctagatacagaaaatcctcaattcttgggtgttacctttcagaaaaagagtccgagctacaagccctgatccaaaaatccctttttccaaaaaaattctccatcttctaccaaggttcacctccctgtttagtgtacactggtgtctatagttgctagagcaagagtctctccttatcctctaaggcaggagttctgtgaagaccccatgacaaggggacaaaatgaaataacatgttcagggacaacacagcaaaaccccatattatcaatgctctaaaacctagctacctcaggcttggccagttattcatgagcagagaggtgtgtcatctacatggcagtcatggcctggatgggtctggaactgtggcaaggtaaggctctgagaaaaggtgccaggagaaagatgaattcaatcatctatttctgccaggaagaaaagcaccaggaaggaatcagatgtacagtttgtcctctggggacctctgccttgatcctcaataaatctccttttagatgccacgtgcagcaattcccacacttcacaatgctctccatggcttctgttggccttatggtcagctctgccaagatctgtattcttgggcaagacagaatccttctgaatctcagtctcttcctctataaatggaaataattttgctccacacaagtcaccattagcacgttggtgggaagttaaactgcgaaactcagcataaacaaagagcaatgtaccactgttgcttacgtgaaaactcccgtgaagcagtcaggcaccatgcaccatctaagcatagcagcgttaggtatcagcctattagtgattagagagggtaccggggagagagggggcctcagagcagtgggtctcctggctgtggggaagctgcctcagtggccatgccaggagctgaacctgaaggtactctgtgtgtcctctcaacaccatggaccctattttggtatttttttccagttacctctggtttccatttgcttcctccctctagccccctggccatgtccgatttctccagcaagtttctgagcttttctcattttgctcactgtctccagaacatccctgcttcttttacctttcaaagaattcaaacttgaactctgctcactcctgcccatcaccaacattagctcagagttgatgagaagggaaagcaccctcataaggaagcccctcctttccttacattattagacctgagcgcagacagcatctccatctccacactgctctggccaggttatgcctcagtcaattacacgactgtatcttagtacccttggtagggctcaaatcaggatattctctagaaagattcacttagtactgagccaagtataatctcactacatctaaaatagaaaattctagacccacccctccacatctttgttattgaacccaatatgtcacccatttaccatgtgctcaaatccctacctactgctgattctcagatcaaatcataacccagatttaccatggtccaaactctgacatgtgatcaggggcatgtcattctggttcaggctgtcagccccaagcaggtgggtcagtttcaatcaccctgagtgcaggttgcaagggcaaccatgaggctgcataaaaagaacctatgacaggatgcacatgagagacaaatgtcttcacattgaagaaggggaggagtgcgccattggttttccatcctccagatgcactgagtaagctcctacctaacctgtgccccctccttcttctcatccctatgccgtggtaggagggagagccatcttcaagcccagcatcctatggaatgctgagtctctcttctccttaccccttaatgttggaattctcattccccaaagccttggatttgactttcccactgagtgactggagagaagcatcttcatattcacaggaacaagccttagttagataagactttgctcctctcctgggagctccaggacactaaaaagccaagcttgctaccaacgcttgcccttccttaagtacattaaatataaccccaatagtaaaatatattcctaaacagccaggccattctccctccttctaaccctcatctcctcggcctaagaaagcccagctgtgtgatctggggcttggcttcccctgtctttcccatatcagcatccttccaggaaacagccggtctccctctctgctctcagaaggcaagtttccttatcacctgtgaatcacaaacccacagagtggccaaacatactgatgcaagaccataggaaggggaaagctgcaggtgtgtttgtgctgggaggagcagtgaccctcacctcacagacacctcctctccccatcctcgggaggtataaagacgggttctccaccagcaatcaggcacactctaccaccatgaatctacttctgatccttacctttgttgcagctgctggtgagtttcacgccctgcctcaggcctcaaccaacccttccctggcagacacatgccctgccattcttgccacctctcctcttttgactgtgctgtgatattctatttcctccatctggcatttcttcttcccatcctccttgggctctttttaagcctcacttgttccaccttctccttgatttcactcccaccgctgttattcatccatatccgagctgtggttggagaagctgggaagggagaccaggtggggctggcccatgaaatgaagcagtaggcttcaggcttggctctgacagcaccacaatagcaccactatagctgctcttaacctcgaatgcacctgaggaggctgaaaaattactcatgccagagactcaactctagaaattctcacttcaattgtctggtgtgcagcctgtgttctgggcttttaagcttcccaggtgatttttaacatttctaggcatgcagccaaggttaagaattgctgttgttttgaccaataataacgtatacctttgttctgcaaaagtgagcctggggcttccctcaactctgccctcactgggcagatttgagctgagggggaaactggtcatggccaagtcgatgtcgccagggggttttcctagcttggccaaagtagccagacaatccggggcttaaataaccaggtggagtacacaggtggtgaataaaagagagaagacttcagtgcttgagacagccacatcccaaatcctatcccactggaagtattgtgaggatattccttgcgtcctcagcctggtgaccccaggagagatctgaacccccacagggtacctagctacgtgccctgcagacacagagacttgggagccacatccagtgatgatcaccagggctggcagcgctcccccccttgcctagcctcactgagcttgttaaggttttctaattagcaggaagcagccacaggctgggagcgccacccctaacatgctactgacttgccttctcccttcccatctccactccagttgctgccccctttgatgatgatgacaagatcgttgggggctacatctgtgaggagaattctgtcccctaccaggtgtccttgaattctggctaccacttctgcggtggctccctcatcagcgaacagtgggtggtgtcagcaggtcactgctacaagtcgtaagtgtggggcccctgactgcaaaactcccagccaggctgcctgggagagcttggattcagcccagggaagtactgaggttgggtaggacggacgagagagatggtggaaaagaaaacttgttggcagcagctgactctccagagcagagagtgaacacaagacaggaagccctcacacccaggcaaatccatgaaacagcaagggttgtggtcataaaagcaggcagggatgatcttggggtggtgagagctagtgagaagagcaggctagtacttttgctggttagctacacattaaagccacctaagaatgagtacttaaaaatactgatccctgtgttctatcccagggcaattaactcaaaattatcaggaagagggtgtgaatatcagtgagtatttcacactctacctctggtaactgtagagtgtatagacagagctgagaactgctgcctacaccaagaactcttaaacctgagtatgcatcagaactccctgcaggcttgttaaggcacaaatcactgggacccatccccaaggttctgatcagtaggtgggggtaaggaccaagaacttacatttctaacaaattcccaggagatgctaatgctatggctacccttggattagattacacagaagggtggtgctcaccaggccaagaatggagggaggagcaggcactgtgcacagttagcaaaggcctggagtgaagaatgttgggaaaacttcaaggagctccttgtgcccacagtgctagtgacatggagattatgggaaagagtctgggaaggcagattgaggagcagcctctggtgggatccctttgactcttccccactccactaccaccaacctctgaagcagaaaggtcctgggtttcacacctgcactgacccacattgctctcctgcccatgcgatatggccacacaccccaccccatgcctccagagctgtccatgagcagggagcttaaggacccatggaaaggtgggaggggtgccctggctgtgggagaaggtcttcaccatgcctgccctgcccatcagccgcatccaggtgagactgggagagcacaacatcgaagtcctggaggggaatgaacagttcatcaatgcagccaagatcatccgccaccccaaatacaacagccggactctggacaatgacatcctgctgatcaagctctcctcacctgccgtcatcaattcccgcgtgtccgccatctctctgcccactgcccctccagctgctggcaccgagtccctcatctccggctggggcaacactctgagttctggtggtgagtgggaccctttgtccttctacttccctccatcccacaatttccagaacaaaccatgccccttaacttaaatcctctcgcctccaggcttaagacacatttctagtgcccattacacacaggctctgcactgggcaccagagagatgcaaattctcaaggatgtggctcctaaaatcaaaagacaggacaaatggagaacttgctatgatcacttcgtgggagaggttcaacaatgatcattctgggaactaaaagccagagtcccttgccaggacttatgttttggagtcctctccaggggcagtgttcctcttcaatgttccatcctagactattgtctctttctctggcctaacccacatttctttctttgttctcttcctgatcctcacagccgactacccagacgagctgcagtgcctggatgctcctgtgctgagccaggctgagtgtgaagcctcctaccctggaaagattaccaacaacatgttctgtgtgggcttcctcgagggaggcaaggattcctgccaggtgatttgaccccttcccatgctgaggctcccactgataaccaggccccaccagggaaaatgatttgaactcccaaggtggcggggctgaggaggctccctgcagtgccccatggagaagtgaggaagactcctttgggctgcatcctgtctgcttaggaagaacagagaatgggccaccgtgagaaggacgtggagccacagagctggctggaaagggctcttttaaggttcagagcaaatgtaggtgtattcctcctccatctctctcttcatacaacttgtcccttctcccccccagggtgattctggtggccctgtggtctccaatggagagctccaaggaattgtctcctggggctatggctgtgcccagaagaacaggcctggagtctacaccaaggtctacaactatgtggactggattaaggacaccatagctgccaacagctaaagcccctggtccctctgcagtctctataccaataaagtgaccctgctctcactgtctgtgtctgtgcctcctccttcacactccttcacattggaaagcatcctccaacctcaggtcagacagggctctcccccttaaacataagcagagcctccagctcccaaatgtgttccatggtacactagattaacacatacaaagaggtggaatccaaaaataagaagcttgggagaaaggggggcactgttttctagagaaacgtgtgtttcagaaaggtggtcttcggcaggggctattgttttatttgggcttctcagagtggttagagctactctgccttcagaacaatcacagtacagaaaatgtgtcagcatcttcgaggtggcccaaaatatttgaccagctgaaacttcttgctaaaatacaacaataattacaaatgctgctggtgatgacgtgactctcccaggaatgtgttggcaccaaaccctcgaccaagccctcccttctcattcacctggaaaatcagactcaaataaatcttcctggccctccgactcttcccttaattccctagttccatctctgtgagcaggctagagagatgttccacctaccacagcgggagccagactgcgacttgggaatcaagcccagctcttcatgctgcatttttatcttctttgcctttggggtaggatgccacagtgaatcccacagctaacaccagctcctcactctgaccagggaaagaaactacagagggtcaggattcacccatttgatcaattaactgaggaaggattcattttcataaaacttgcttgactttgagacacttcaagtgagttatttgggattctttaaaaaaggtggaaggaaagatctgaggactgtgacacaaccagccactctgaccacacattgactggcttgcacccactggacacagcagagggaggcaggcttcatggcacttgcggcacctgccaaagcctccttctggcaattctgagagggcctaagttggggccgtagctcatccaagcttgtcacccaagatccaagcaagcttctctttgaaattccaccttcaccttctgtcccaagtggttgtggacatccctgggagctggcgctaagggccaggagcagccaagggagacagacaagttcagagcacatttccagttacagggaacagagcacaggcctccaagtgtccatggagcagcgtgcaaattgcagggatgagtagagtaaaacctctacatgcagcacagcattcctggcaaacacaggggaccacagtacacatgctgtggaatacacccaagtatgcatcagacacttgtttggtaaacagtaaatgtgtaagatcaattaccttgagagggccatctgtgctccagacatgtggtttgtgtgaggagacggctaccactcactatcttcagaggaaaacagggctcagggcttgcacacaatggacagatacacatgggtcacccaaaatgtcactgcatacaaacatcactttgttcaacatggattttgtttttatggagtccaaatgcagaccctagttcaccttacagccttgggtttgtctgctttgggagatatatatccagttgatagacagacaagacagatacatttttttccctttcttaccacaatgtcaatgcctcatctgaatatcatcattactcaagagtcaagagaagaaccaaacgcttcatataaacagggctgggctgggctagatggggagtgttagtttccagtgttttctgtctccattcagatcattcctatcaaagcccagctggtcacctcaagccaagacacagacataaggatcccaatggccttccagatggctgcttccacctcccattttggccacgtagactctttacacaggaaagtgagtcaccccagtgagaagggttgccagcggaaatagggcatgaaaatcacagataaccatgggatttcttccaagtggtcagtgtaaaataaaccaccaccaccaccaccgaaaacacaaaagaagcaaaaaaagtgcttattcaaaatccaagacaaaatactgtgtgagagtcaggccacggggttgccttttctcaggccacacagctttcccagtccgtttgctcgcatggaaccgtaagatgtgaaggcctgcagagcgtgtgcttgggatggaggctggtactgttcacctgtgggtccagaccaaagggcaaagaggcagaaaactgcaactctgtccaccggcacagcttaggcccttctgctcatagaggctctgaagaacccccacctcagccttcacacatatccttctggctgaactacagccaggctggagtgccatggcatgatctctgctcactacaacctccgcctccagggttcaagtgattcagcctcccaagtagctggaattacaggcacccaccactgtgcccagctaatttattttttattttatttatttatttatttatttatttatttatttatttatttatttattttgtatttttagcagagacagggtttcaccatgttggccagactggttttgaactcctgacctcaagtgatccaaagtgctgggattacaggcgtgagctaccgctcctggctcagaccccatttttaaaaaatattttcaacatttattttagattcatggggtacatgtgcagatttgttacatgggtatattgtgtgatgctgaggtctggggcacaaatgatctcctcactcaggcagtgaccatagtacccaataggtatttttttagctctatccaccctccttctctcttccctctagtagttgcagtgtctagtcttcccatctttatatccatgtgtacccaatgctcagctcccacttatacatgagaacgtgatatttggttttctgttcttatgttaatttgcttatgattatggtctccagctccatccatgttgctgtaaaggacatgatttcattcttttcatggctgcatagtattccatggtgtatatgtaccacatttccttcatccagtctaccgctgatggccacctaggttcattccatggctttgctactgtgaatagtgatgtgatggacatgtgagagcatgtgtctttttggcagaacaattattttcctttgggtaaatgcccagtaatggaattgctgggtgggaatcgtagttctgttttaaattatttcagaaatctccaaactgctttctgcattaatttttccatgaactcatttacactctgaccaacagtgtataggtgttccatttcctctgcagcctcaccagcatcttctgtttttgacattttaataatagccactctgcagccaagctctttcaaggccaatgtggagaagagccacaaacattccttttcccgaagagaattcttgcctgcccactggtagatttcttggtttcatctgtctttcattgtttgtttttcaaagaaaaaccaaaggtaaagtgataatgatcttccacacctgaaccagtttgtagccaccagagcctgctgggaaggggcccctcaagcatgcattgatcttgtgacctggaatttgagagatcaataagccccgtagcaacctaccatacaactgcccatcagcgctgatcctttcatgggattagctcaattctggctctgcagacactggcagccacagttgacaaaccctgggcctctgtgggcttcctttgtcacccagggccacagtgggctgcctgtcctaggcagagacgcagcaacattctcttaaactgaaattaagcataaatccacttcaccaataatcatctgagggctcagtccctgcctccttcctcggggattttaaaacacacatttctctgaccaaacaggtaggtgagatctgactttaaaaggagggaaaatcgggttgaattggggtatcaggaatgaatcccaagcatttttgtgtggcgagaggcatccacatcccaagctgtacctggagatggagaaaaatgcaggagagaagaagagaaaacaaagggggacaacgagccctggttgctttgccaaggtcttgggcacagacagggccagctctggctgggagctgctgctctaggggttgggagagttctgttcatccatggtgctcagcagcagggactgggggccgtggtaggtgcagatgcccagactctcaagcttgctccttgcatggctggcaggggcattgctccttgtcaccaggtgactgcacagggcagctgtcatggacatccagggggccatccagagcatcactgatgagcatgttgaatgctttggggccatcgtcatgttggccccagttgcacacatggtatcttctctttgcttggggcgaagggggcggggaggggcggggatagtctgccatgctcagagttgtaatcattcagcagctgctccatatattctaaatccttgcacaggaaggctcctcggcccaactcccccaggctggccacacagacactgggctccattcccaagtctttggtggctgctgtgtcagctggtgtcagaggccccagggtcagcaatgagtgggggtcttgtgctgcttctgctaggcccagccaaggggctgctctgtgcctcctgggagtcccagggtcactgccaccttaagggccacatgccatagctggaagtcactatatgtttggggaagagttggagatcgggaaaccattccctcataacaaggtagtaaatagtttggcaaaaaactgaagataaagtggcagtgctgagtaatcatgggcttcctacaggtgatcgggttgatttcttgttgccactgcctggcctgaagacagtgcttggctcagcggtggcagcagacgaagcagcagctcaagaggatgatgatggtggcccacaccagccagagccacagcagtgttttttgtcacaggtgtagcttggattgttggtaccacacaggcttatcccgtgggggttcaccctgggttgacaggggctgggcagcacctggaggaccaggaacaccacccacacccccacacacacaccacccagaccatctcctctgcaagcccctcctgctcctgctcctccatcacagcactgccctccttctgcttcctctcctcctctgccctccagaacagtggtcttaaagaggtttcttggccttggcacttctgtgggctcccaatgtgctgatgtgtgacacgctggcatgcttggcaagacctcactgctgcctttgactacacagggtcctctctgtacccagagcaaacatatgcaaggaaaccccagcactgaccgaatcagcttcctcggaggcccctctccacatgtgctcctgctaacccagtctgtacttcccacaagctgatgtcctgcttggagatgatcgtgctggccctcttgcccaacaactggctcctgtgtctggaggggagaagacaaatccctggtctccatccctcatgttcttgagaagtctgccttttattcctccacagaataataccaacatgtttacactattcctatgtatagacattttcccatttagttttctctcccctccggagtggttattaatccagcggtacagataagaaaacaggttcaaagaggcttattagtttacccacgtcccaagcccagcagatggtaggtctggggttgactcctcatttgcctggcttcaaagcccacgctctctgtgccccgcctcacatcccgctatgactgtggtctgaggtgatgacaagtccatcagcgctgacctctgatgtttctccagccccctgtcactatcacccattcccttcctccctgcatctcctgaggggcacctcccaattgtcccattccatgcggcaagacgactgctctcagagagctcctggttatggcattgctccctaccctcccacagtgatcaaactagaattcaagctccctggggaaatgtagggttctcctggcaccacccttgcccccactcccagtctcatgcctcttcactgctctcctcccctgtcccctcccctgctcagaagccctggtggcccatccaacaagccatgcgcctcctgcctctgtctctggacactatggcactctcagactggaagccgttcctaacctccccttcacccttttcagaaaagtcttcctgattcttccttgtccccacctcccttgggtctggctctgctggccctccctcgggtctgaggcagccatcctcctcctgtctccgcttgcctctgtcctagtcctgctcaggtgctcaggtgcaatagatgcgtccgtcctggcaatcaactgtgtgctcctcaagcgggtacatcttgtcttacatatcctgatatctccagtgattaagcaaagcctgggatgtaataagcacccagtgagtggaggaataaacatggagtggagggaaatgtgctgagaaaagaaagacccttccagaagaatgattctcaaagagtggtccctaagccagcaacaccaaaatctcctgggaatttaggagaaacacaaaagctaggccctaccccacacccaccgagtcagatctcctgggacagggcccaacaaacagcatatttttttatttgagatagggtcttgctctgttgcccaggctgaagtgcaatggcatgatcactgctcactgcagccttgacctcccaagctcaagtgatcctcccacctcagcctcccaagtagctaggaccacaggcgcacaccacaaacccagctaatattattattatttgtagagatggcaacctcatatgtcgctcaggctggtctcaaactcctaggctaaagtgatcgcctgcccctttgcctcccaaggtgctgggattacaggcgtgagccaccacacccagacagcaacctgcattttaacatatcttccaggtcttctgatgcccgctgaaaacttgagattggatacggtaatgacatccttaggccagtattgaaaccgccattgcaaaattgtaactgagacggtgaaacagatctgacccaaccaactctatcttgcggttttttttgtttttggttttgtttttttttttttttttttggagccggagtctcaatctgttgccaggctggagtgcagtggctcgatcttggctcactgctacctccacctcccaggttcaagtgattcccctgcctcagcctccccagtagctggaactacaggtgcacaccaccatgcctggctaattttttgtattttagtagaggcggggtttcaccatgttggccgggctggtctcaaactcctgacctcatgatccacctgcctctgcctaccaaagtactgggattatgggcgtgaacaaccgcgcctggcctccatcttgcttttaacctccaagctgtccttattccttccccagcataggctgaactaactttgggaagaacttagtttctagtttgaaacaaagacggtaacagttctttcccaaaacaaacctcctttttgcctggagactagactgtcttataggactaacaaatttgccaaaagattagaaattatggtttaggagtcacgtagctggagtctgcaagattccaaacctccccaaattgctcctggggataacgtcactattgtaaaacctaagatcagtgcttgagatattttaaagaccctgcacttgatgcatcagctggcacaacgcagatcgataaactagttcatctgatcttgtggcccccactcaggaaccgactcagcacaagaaagcagctggggtttcatctccaacccaacggatcagcactcccgactcactgctttcccctccgcccaccaaattatcctctaaaactcggatcctcgaattcccggggagacggcaagatttgatttgagtaatagtaaaactccagtctcccacacagtctgctctgggtgaattactctttctctatgtcaattcccctgtcttgataaatcggttctgtctatacagcaggcaaggtgaacctattgggcagttacgatatctctctgaaaacaagtcactattttttgtttgtttttgtttttgttttgtttttcagacagagtctctctctgtcgccaggctggagtgcaatggtgcgatctcggctcactgcaacctccgcctcccgggttcaagctattctcctgcctcagcctcccaagtagctgggattacaggcaagcgccaccacgcccggctaattttttgtatttttagtagagacagggtttcaccatgttagccaggctggtctcgaactcctgacctcaggtgatccacccgcgtccgcctcccaaagtgctgggattacagacgtgagccaccgcgcccggcttcagtcactaacatttttactgactcttctggcaccatgattaaccccgacacgcactatcgcatgcaattctcacaaccccatgaggtaggtattattattgctcctagcttacagataaagagacagagtttaagaggtttagccacgctacggggctgctgggagcccggcagtctggccacaggaggtcggtttcacggaagggcaggatgtggcggcatctcctgaatttaaggagtcttgggggcgcggtgcttctctgtcattgggcaactcattttagcctcttggggtttcagttcctcaactgagaacaaggaatttaggttgaaatgaacatgctggaaagctttcaagaattgcacacgtgaaatgctctttgcgtgtctcccggtctcccacccgcccccgacacagaggcgcaggagtaaccctgctcccttccgcgtcctcgccccaccacgagctgcgcattcttctcgccccctcaagtggccgagctcagattgcagttacttaggtctaaaaaaataaggaaaggctgccccctgctgcccacatggatgcatgaccccaacctgatacctgcctaactggtcttcctagcttttatggaaaaaacgctgcatatgagcttgggcataccgtccagagaggcaaaactgggacaaactccatcggaattctaaaaaaccatgatgccaagacagagtggcattattatttataaggccagtagggatgagggcccccactaggtgattaaaagacactaacttagaggatgaattattgataagtaaacgaggtgagtaaggcaggaaaacatgcagaaatagatcaaaataaactgaatatttcaattaggaaaggtactggcaagaggctttgacacaatccaatggatgaaagcaatcaactttttttttttttttttttttgacagagtctcactctgtcgcccaggctggagtgcagtgactcaatctcggctcactgcaacctccacctcatgggttcaagcgattctcctccctcagcctcccgagtagctgggactacaggcgcacaccaccatgcccggctaatttttttgtatttttagtagagacagggtttcaccgtgttagccaggatggtctcgaactcctgacctcatgattcgccctcctcggcctcccaaagtgctgagattacaggcgtgagccactgcacctggctgcaatcaactttttatgcaggcatttggtagcatgttgcgaggtccatcactattaatgccgtgaatataccaaatcctctttttctttcttccctaagttctaagggccatgccctggcaccaaacttatggcagtcctagactgccctctgatgttcaccatggcttacctctgccctgttctagttggggacaagctgtgggtcccaagcctggcattgtaacagaaacgcccagggtaattttctgtttgtttatttaaataaataaataagtaaactcagtcttggagattttaactcaataggtcatgaagactactcagaaatctacatttttcacagttgtccaagtgattaagtcctcactgagcaaattcaggacaaggaaacaacttcttacataaattctacataacttcatacataacttcacacataaacttctttggcaaaaaaaatgactttgtaaattaaacaagtaggtttttaaagtagcatattttatttaaagccaaattttcttgatttttaaaattaacttaagtttgactttcaatagacaatagagctatatgactctaaaatggaaacaacccagtaacgttgacactgggaaatgtaacttttacttccgctctgtttctgtctactccacccattctttcttttctttttttttttttttttttttttttttgttttgatagagtctcaccgtgtcgcccaggctggagtacagtggcgtgatcttggctcactggaacctccgcctcctgggttcaagtgattcttctacctcagcagcctctcaagtagctgggattatagtcacctgccaccacgcccagctaatttttttttttttttttttgtactttcagtgaagatggggttttgccgtgttggtcaggctggtctcgaactcctggcctcaggtgatccgcctgccttggccttccaaagtgctgagattacaggggtgagccaccgcacgtggcctactccactcattcttaataggtcatcactcttgtcagtttctgttgtatctttacagtgtttctgtatacaaaatgtatacaaaatcaagtaaatacaaaagtataattcttcttttcccccctctgttagacaaaggtgtcatctagttatgctattctgagactttctcttttctgggttaataatgtatcttagagaattttccatagcaatataaaatattttgattctttttttagcattgaatattactccattgtgtgaacatatcacagtttatccagtcccttactgatgggcatataattcaattttgtcagtcaaattagtgaaaagtgtattttgatgaagtttttttaattttatttttcttattgtgattttttttcccttatagttaggtaccatttggatttatttttctctgaacaatttactcttcacctatttttattgggctgctggattattttcctattgatttttaggagttcaccacatgttgaggagattagccctgatggtgagaactaggaatatttttcccagattgttatgtatattttgattctgtttatattttaccatgcgagtgtgtcatcattatgtcgttgtttgtcttttttttttttttttctggattttaagtcatagcttaaaaccctccgagtgacgcacagcctcggggcagggccagggtagtgatgggggctgtggcttctctataaggacatgccccaacgtgacaacagcttggagaggggtgggtactggagaagaccagccccttcgccaaacagccttacaaagacatccagctctaaggagctcaaaacatcctgaggacagtgcctggaggtgagaaggaagcccccggcctggtccataccccaccaccaacttgcataatggggggtgatgtcacccaccctccactcccctcaaaggagcagctgctctggtggtctctcccaggctctgggggcggacccatgggaggggctgtttttgtacaaagctgtaacattgtggggacagggggccacaatgattcaactctacgggaaacctttacaaaaacctctctggcggtcccaactcccagagtcctcttctttcctcctgggtcacaggtcttaatgcaatttggttcagaatgcctctgcctcactcctgatcacatgtcagaccaagactgtggacaaggacaggcccagatgagaactaaagcttcccaggcagagagaggtcagacataagaagactgcctcaggaacctcacaagtggaggactcagggagggtcccaatccccaaaaattgagacaaagtcaggtggaaggttcatcggaggtgaccagctctccagaggactcgggaagaagtcaggggtatctatagatggagtcacaggttctgggcccctgccatcctctgcaggccatgcactttccctttcgatggaccctcacagagggagcatctgaatggggcatcctttgaaaaaggaacctaggaccctgtggatggactctgtcattctccatggtcctaaaaagcaaaagtcaaagtgttcttctgtgtaatacccataaagcacaggaggagatttcttagctcactgtcctccatcctagccagggccctctcccctctctatgccttcaatgtgattttcaccttgacccctgtcactgtgtgaacactgaagctttctttggacaaggcaccagactcacagttgtaggtaagacatttttcaggttcttttgcagatccgtcacagggaaaagtgggtccacagtgtcccttttagagtggctatattcttatgtgctaactatggctacaccttcggttcggggaccaggttaaccgttgtaggtaaggctgggggtctctaggaggggtgcgatgagggaggactctgtcctgggaaatgtcaaagagaacagagatcccagctcccggagccagactgagggagacgtcatgtcatgtcccgggattgagttcaggggaggctccctgtgagggcgaatccacccaggcttcccagaggctctgagcagtcacagctgagcccagggtgatggggcagaagagggaaggggagggggcctctcctcatagttccctgagatagcccagagaaagcccggtgggtaatgaatgagccacaacacctctccatctatctgcttcactgacagaggttctctgtagattcttcgtatattcctgtgctggattttataggaggccactctgtgtctctttttgtcacctgcctgagtcttgggcaagctctggaagggaacacagagtactggaagcagagctgctgtccctgtgagggaagagttcccatgaactcccaacctctgcctgaatcccagctgtgctcagcagagactggggggttttgaagtggccctgggaggctgtgctctggaaacaccatatattttggagagggaagttggctcactgttgtaggtgagtaagtcaaggctggacagctgggaacttgcaaaaaggggctggaatccagacggagcctttgtctctagtgcttaggtgaaagtgtatttttgtcaggaaggcctatgaggcagatgaggaggggatagcctccctctcctctcgactattttgtagactgcctgtgccaagttaggttcccctactgagagatgggtagactcagcttggaaggggtcaccttgaacatctcctgtctccttgaagggtgccggtcacggccatgacagataaaagagcctctgaccttaccaccacggtcctaccgtttctctccctcacacagaaaggagaaggtcacagaagagggaacttgggggatcacacggggcctaattggtctgctgaccaccgcattttgggttgtaccattgtctacccctctacccaccagggttaaaattctactaaggaacaggagaggacctggcaggtggacttggggaggcaggagtggaaggcagcaggtcgcggttttccttccagtctttaatgttgtgcaactaatgaaaaactgttttttggcagtggaacccagctctctgtcttgggtatgtaaaagacttctttcgggatagtgtatcataaggtcggagttccaggaggaccccttgcgggagggcagaaactgagaacacagccaagaaaagctcataaaatgtgggtcagtggagtgtgtggtggggccccaagagttctgtgtgtaagcagcttctggaaggaagggcccacaccagctcctctggggtttgccacactcatgatgcactgtgtagcaatcagccccagcattttggtgatgggactcgactctccatcctaggtaagttgcagaatcagggtggtatggccattgtcccttgaaggcagagttctctgcttctcctcccggtgctggtgaggcagattgagtaaaatctcttaccccatggggtaagagctgtgcctgtgcctgcgttccctttggtgtgtcttggttgactcctctatttctcttctctaagtcttcagtccataatctgcctcctcactcccttcttggctcatcctccctcttatgtgcatggctctgcctctcctaagcctcttcctcttgcgccttatgctgcacagtatgcttaggcctttttcctaacagaatccctttggtccagagccatgaatccaggcagagaaaggcagccatcctgctgtcagggagctaagacttgccctctgactggagatcgccgggtgggttttatctaagcctctgcagctgtgctcctataattcacccctccactttgggaacgggaccaggctcactgtgacaggtatgggggctccactcttgactcgggggtgcctgggtttgactgcaatgatcagttgctgggaagggaattgagtgtaagaacggaggtcagggtcaccccttcttacctggagcactgtgccctctcctcccctccctggagctcttccagcttgttgctctgctgtgttgcctgcagttcctcagctgtagagctccttgcttagtcttcagggctgtgtgtttctttgctcttcttttcattgttttctgggactcttctcatctctactttcttagtggatgtattgttttactttcccttttttaaattgcatcttctccattttttccttcccattctaactccacttctgcattgttgactccttttggtgactagctctgtcttctatgttaagattctccccactgccagcctccagcacagaactctgctcatgtcttcatctccctccttctttctttctctaccagtcttagaagatgcatctatgtcttcctgaggtagtttgaaggttcatgagccaggcatgaccaggttggggagacaggtggtttcagggttgctcttgaggcctgagggcagaagtccctgtcacagcattgggcgagctgcagggagtctctgaggtgcctgtgtttggcaggtgtttgggagataggtctgaagagagtgttacaactggaaactgacattatcttagcaacagataaggtataaagaagacaaaatgggtaggagactctattttctttttttctgagacggtgtctagctctattgcccaggctggagtgcagtggcacgatctcggctcactgcaacctccgcctcctgggtttgagcgattctcctcccttggcctcccgagtagctgggattacaggtgcctgccaccaaacccagctactttttgcatttttagtagagatagggtttcactgtgttagccgggctgttctcaaactcctgacctcgtgatccgcctgccttggcctcccaaagtgctgggattacaaatgtgagccactgcacccagccaagactccattctcttaagcctcagaatctatgctagaacaatagggtaaaggccccaccaggaagccctagtacaaccttccccatgctggggaggaagcagacaggcggtggagcggggttgggatgggatgaggtctaggatggagacatagacaagggtggaggaatgggactcatagggtctaccaaagtttaggggcttgggcagacattagtgtaggtggggacacacaccaagacgttgagtggaaagtacaaatcaccagattcaaaggcctgggttcaaggggctgtggtgggggaggtgtgcaatttgaaaagcaacttaagctgcctcctctctaagacatagaaacagaagagactaacttatatgaaaatcctttgtaaaggattttgtaaaggactcaacttgtggtgacaatccttttcattcctgttgtttatgatcactaggtcacagggtttgcctttttccaaacctgcatctcaattttcccatcaaaaacatttcccaaatttggataaagaacccatatctagacttgccacatttctgcaccaaaagctcactctcatggttggaacagagccaagcaaagggcacagtaaattgtggtttcttccactcctcatgtgtcttcagatgaaatcattctttccaataatcccagaaattctttctctcctctctcaagcatgtgaaaaggtccagagctctgcagtgtgagctttctactgaaatggcccttggactttgtggttcattcatactcagtggtctagcttgtactacttttgagaatgcaaagcttaactgtggacggattccaatcctggccaggcagggttgctggacactctgagagaagaaagggttaatcccatgaccatcaacttccatgggatttcagccatcctggacaagctaccacaccctcctgccccaggggaggaggaaatgtggaccatcccatcagatattgaccaggtttggctctttaaagagggttacatgcaagaaaataaaattttttaaaaaggtgctgggcaggtgggggactcagatgtaatggaaaagtgtcttttctagaaaagaaaagctaattctaatatgtgtcactaccccacgagacaaatatatacatcttgatttaaaaaaggaaaattataattagaaaaagtcaatttagttattgtaattataccactaatgagagtttcctacctcgagtttcaggattacatagccatgcaccaagcaaggctttgaaaaataaagatacacagataaattatttggatagatgatcagacaagcctcagtaaaaacagccaagacaatcaggatataatgtgaccataggaagctggggagacagtaggcaatgtgcatccatgggacagcatagaaaggaggggcaaagtggagagagagcaacagacactgggatggtgaccccaaaacaatgagggcctagaatgacatagttgtgcttcattacggcccattcccagggctctctctcacacacacagagcccctaccagaaccagacagctctcagagcaaccctggctccaacccctcttccctttccagaggacctgaacaaggtgttcccacccgaggtcgctgtgtttgagccatcagaagcagagatctcccacacccaaaaggccacactggtgtgcctggccacaggcttcttccccgaccacgtggagctgagctggtgggtgaatgggaaggaggtgcacagtggggtcagcacagacccgcagcccctcaaggagcagcccgccctcaatgactccagatactgcctgagcagccgcctgagggtctcggccaccttctggcagaacccccgcaaccacttccgctgtcaagtccagttctacgggctctcggagaatgacgagtggacccaggatagggccaaacccgtcacccagatcgtcagcgccgaggcctggggtagagcaggtgagtggggcctggggagatgcctggaggagattaggtgagaccagctaccagggaaaatggaaagatccaggtagcagacaagactagatccaaaaagaaaggaaccagcgcacaccatgaaggagaattgggcacctgtggttcattcttctcccagattctcagcccaacagagccaagcagctgggtcccctttctatgtggcctgtgtaactctcatctgggtggtgccccccatccccctcagtgctgccacatgccatggattgcaaggacaatgtggctgacatctgcatggcagaagaaaggaggtgctgggctgtcagaggaagctggtctgggcctgggagtctgtgccaactgcaaatctgactttacttttaattgcctatgaaaataaggtctctcatttattttcctctccctgctttctttcagactgtggctttacctcgggtaagtaagcccttccttttcctctccctctctcatggttcttgacctagaaccaaggcatgaagaactcacagacactggagggtggagggtgggagagaccagagctacctgtgcacaggtacccacctgtccttcctccgtgccaacagtgtcctaccagcaaggggtcctgtctgccaccatcctctatgagatcctgctagggaaggccaccctgtatgctgtgctggtcagcgcccttgtgttgatggccatggtaagcaggagggcaggatggggccagcaggctggaggtgacacactgacaccaagcacccagaagtatagagtccctgccaggattggagctgggcagtagggagggaagagatttcattcaggtgcctcagaagataacttgcacctctgtaggatcacagtggaagggtcatgctgggaaggagaagctggagtcaccagaaaacccaatggatgttgtgatgagccttactatttgtgtggtcaatgggccctactactttctctcaatcctcacaactcctggctcttaataacccccaaaactttctcttctgcaggtcaagagaaaggatttctgaaggcagccctggaagtggagttaggagcttctaacccgtcatggtttcaatacacattcttcttttgccagcgcttctgaagagctgctctcacctctctgcatcccaatagatatccccctatgtgcatgcacacctgcacactcacggctgaaatctccctaacccagggggaccttagcatgcctaagtgactaaaccaataaaaatgttctggtctggcctgactctgacttgtgaatgtctggatagctccttggctgtctctgaactccctgtgactctccccattcagtcaggatagaaacaagaggtattcaaggaaaatgcagactcttcacgtaagagggatgaggggcccaccttgagatcaatagcagaggttaattcagcgtgaaaggcagtgatgggagctgaagaggttacttctagaacagtctaggaagacacagatgttgagtataggaattttctatatccaactatactgttctgcccaggaaagacgtgctcagaggaagagccaacctatacaggtgtgttcaccctccagctggccatgtccccgtgactaacaaagctggattccataagcatcacccaccttccttgcagctttcttattgagcactccattcatcttcattggttcaccaagttgatttcccagctccaaagaagagaggctctgacttgcaaacttattttcaatggaagatgtgtcttccggtttaagttacccatctgtttataaatctctctctagtgaattaaaccagaatgaaaatgtcccctaatcattcctggaaggttagaaaataaaggtatctaaaactgagaatcagccccattcctacttctagaattccttcaaaagctccttctgttgtctcactgtcaccatggtgatggagtcccaaatcccaaaggtggcacagaagaccggatgattatccttgtctccttccacactctcctcacttctctcatccctgaagcccctgagctgcttctttcaggccgctttgcacatgctcttcctcctggggtgacaaagtactcttctccccatgataactcctgcttagacttaaagatttagctccaatgtcttcccctccaaaaagctttctctggccctttcttgcctcttccttacctcttcctcccttgaggctggattaaatacacctttattttgctatcacagtgccttgtgcataaccttctttgtgatacatcacacttgctggaaactacctctttatttgtctgacacccccagggactatgaactccttgttaacaaggatacattttaagatagtatcccagggctatagtatagtaacctcagtttagtgtagacaccacataggtatgtatgaataaataaatgaataaatgagtgaacccaaactgacccaatccaggagcaatcatcaccgtaagtcctgcctgaaatagccattacccttccatttataggactacaccacacagtcttccctctttattgcaacacatacatgcattcaaagatgcgtgtgtgcatgtatgcacacgcgtgtatatgtttatatttacacacatgtacacacatccactcattaaacacatatccctgtgatgtgttgttatcaacttccaagaaaattaagatacccaaattacagtccccaagaagcgtatctgttcacagagcaactcaatcatgaacagaaagagccaaacgcaagtccatgctttgaaagagcaacatgaactgcttactaaaatgcagtcagagagtggccctcaatttctcactgggataatcagtaaagagtctgagaaggtggcaatctcttcaaaggaagaattggtctcagttgttcactctagagaatggccatgctggtcagaggcatgaacaaaagccctaatgacatggctaggtacctctgggtaggcccgtttagctggttgcaaggttcagaaatgggagtgctcaaaattagcgctggaaaggcaggttggtgcatgccactctgggaataaacttacctccatgcaaccagcatggagcctgcacatggtggatgttcactaaacacctgtggagtaaatgaagaatatggagttcagacatcgttcaggaagcaactgaacaaagggaaattatagaggtttctggattgtttgtcctcctgtcataaggtgccatcaactgctctgtggattttcctatgagctgcctgccacccctcgctcctcccacccacttcactataaatgccagtctgagcaggtgggcacagtgagccccaccagggagacccagtgacatagatggtctgctcagggtgatgcatgttccaaggagggacctctctgccccccaccattaccatcactgtgactttccccaagcccttcccattttaattcactgcctttgtcttttccaagccccacacagtcagactaacctctgccacctgcgcttcctgccgctgcccagtggttgggggagggggactagcagggaggaaacatttttgtatcatggtgtaacattgtggggactagcgggagggcacgatgattcaggtagaggaggtgcttttacaaaaaaccctgatgcagtaagcatccccacccagctcagggaatgcagctaccaggtgggaagagttctctggggctggtcccagctgtggtcttgcagggtcccccaacccagcgagcacctgtccatctccctgtccagactcggcttccaaggaataagaaggccaagacagcaaagtgggattatcactcagcacttttaataaaacttgttcttgacaaagtacttgcacatgcattatttattaagaactgatgaaaaccctgagggaaagatattgtcccatctttccaatgaggaaactgagatcagaggttacaggtcatataactaggaaacggcaaggtctagcctgcaatatcgcccagctccagccgttccagtaccaccaatgccccttcagatttcaaatccactgtgttgtcccccagccaagtggattctcctctgcaaattggtggtggcctcatgcaagatccaggttaccgtgtccagctaactcgagacaggaaaagataggctcaggaaagagaggaagggtgtgccctctgtctgtgctaagggaggtggggaaggagaaggaattctgggcagccccttcccactgtgctcctacaatgagcagttcttcgggccagggacacggctcaccgtgctaggtaagaagggggctccaggtgggagagagggtgagcagcccagcctgcacgaccccagaaccctgttcttaggggagtggacactgggcaatccagggccctcctcgagggaagcggggtttgcgccagggtccccagggctgtgcgaacaccggggagctgttttttggagaaggctctaggctgaccgtactgggtaaggaggcggttggggctccggagagctccgagagggcgggatgggcagaggtaagcagctgccccactctgagaggggctgtgctgagaggcgctgctgggcgtctgggcggaggactcctggttctgggtgctgggagagcgatggggctctcagcggtgggaaggacccgagctgagtctgggacagcagagcgggcagcaccggtttttgtcctgggcctccaggctgtgagcacagatacgcagtattttggcccaggcacccggctgacagtgctcggtaagcgggggctcccgctgaagccccggaactggggagggggcgccccgggacgccgggggcgtcgcagggccagtttctgtgccgcgtctcggggctgtgagccaaaaacattcagtacttcggcgccgggacccggctctcagtgctgggtaagctggggccgccgggggaccggggacgagactgcgctcgggtttttgtgcggggctcgggggccgtgaccaagagacccagtacttcgggccaggcacgcggctcctggtgctcggtgagcgcgggctgctggggcgcgggcgcgggcggcttgggtctggtttttgcggggagtccccgggctgtgctctggggccaacgtcctgactttcggggccggcagcaggctgaccgtgctgggtgagttttcgcgggaccacccgggcggcgggattcaggtggaaggcggcggctgcttcgcggcacccggtccggccctgtgctgggagacctgggctgggtccccagggtgggcaggagctcggggagccttagaggtttgcatgcgggggtgcacctccgtgctcctacgagcagtacttcgggccgggcaccaggctcacggtcacaggtgagattcgggcgtctccccaccttccagcccctcggtccccggagtcggagggtggaccggagctggaggagctgggtgtccggggtcagctctgcaaggtcacctccccgctcctggggaaagactggggaagagggagggggtggggaggtgctcagagtccggaaagctgagcagagggcgaggccacttttaatcttttttctggggtgtttagagagaaggtgaacgatggaggagaggatttgttaggactctgggagaggcgagactggagaggacgaagggaaatcctggtttggggaatgggtaggagtgggggtaactgctattcgtaggcaaaaagagctgagcaggctgggaacagcgcgggtgggcaagggtcagcactgcgggcaggcgggtgggtgttagggggcagaaatcctgcagccgagggtgcagtagaacacagaagaaaaagcctgccaaacaaaagtggaacagagaagccaaaaagggagatgaacatgagtcagtgaagaaaagaatgaaagtttactgtttagcagtgtggatctctaatccgacttaaaactccttgttcccgattcctattcctcctaagccagagatccctgggtccagggtgagggcacggcattcatgcttacccacgggctggtcaacaaagaggtgctgacctgagagtagggcacataacctcagccactggggtacacttaccacccccgcccccgtgtagctccctcccctatcctgaaatctcccttagcacactaagtattctaggttaaacagcccagatgttcagggagttcattcgccacaaacacacattaaaatgcagacaatttgcctgtgagatgaggaaaattctctggaagatttaggccctgagagctgaaaagggaccctaaacattacctggtgacaactgccctgaggccagagaagagaactcacaatattggtatattaaccggtaccatttgtagttaggctgtcattaatctgggtgtaatggggctcagctacagagaagcgtatccagaggaaatgtggggttcctgcagtcagctggggcaccgaaaagacccagactttagaaccagataaaggctgagttcgaacctctggttcttttgtgatgtggtgaccttgggcaaattaatgtgtgaacctcagtttcctcaactataaaatgtaatgaacaatacctaccacttactattgctgtgaggaagaaaagagagtcaacatgtaccgtgtacagattattgatgtaattcaatggttcttttccccatcctcctaggaggtcactggggagacagggggcagggtcagcccagtgccaaaggatgggcaggatctgaagtgtggaaatggagtaaggctgtgtctgtgtcagaggtgggttgggaagatgtgagacaaacatcacaattttgcctaaggtgaatccaacccacaagtagagcacaggccaacagcagctcactagtacacatacttacaccagcagctcactagtacacacacttacaccagacgctcactggtacacactcacaccagagctcattagaacacacacaccgtcagcttgctagtacacacacttacaccagaagctcactagtatacacttacaccagaagctcactagtacacacacttactccagaagctcactagtacacacacttacacccacagagacaagccccacaccacacggactcacaaatgcagaagaagagttgaccctgccctcatgtacagatagtatgctggtgtgtagtgagaggcggctagtgttcgccacgcctgttgcatcaataactattccacagaacagcatacatggtcaaggaatatttttaatatttacaatgaggactgagtgtttgctaaatgaagaaatcaaaggagtacattctggagggctggtagactcccagagccagggtttttgagatgagagtgaaaataagcaggctgagagcagaaagaaagaaagttctgcagatagaagttaggatattaccacttcggccccagcccagccagtaaatgtttagaagcatagtagtaattagcaggtaggagttgtggggaggaaaggaaactgacatgatgggaagcaggaccagctacaaaatcttcaggaccagctcagaatgaaaatgccggggctcgtgttaaatcttaggatttcaacatggtgacagcagagcactaaaccaagcagggggcccttctagcaggaggccccatggggacctaggaaggaggtcacatccatacaaatgtaaagaaatgtcagagtaaatttcctccattgtccaggagattcggaataggttctcctaagactgatatttcttcattttaatagagttgctcagaaatgaaaaacaatcaatgggaagaaaaagaaaaaaaaaaaagataagatgagtaggagggcaggtccaaaagaagtgattcagcaaaatgaaaggggtcctcagggattaaaggggatgaatttacctgtcatccctaagaatctacaaaggagatgctcaggacagaaactgtatcaacacaactagtagcaagaagttactctgatgatatcagatgtttatttgggaaacttgctagtagagaaagctacatataatatttggatgcaaagggacacagaaggttgaagagtccctaattttgaaataagggaagatgactaactgtctgagctgagaaaactcaggggtacctggaggcagaggaatggataagatgacttcatgcaccacaaaaagaaaaaacctcacattctcatgaacgcactgtaaaaccaaaggatgtcctcatgtgaatgcaaaaaataggccatctgtaaatccaaagaaagcccccagatctaaaatgtctccctcatcccagattccccttcattcctgagcaccttagatttggtataaataacctgcttgggagggggctttttgaattcgtacataatttaaccttcacacagtttctgcaaagtcagaatggtgattattacctcacatgcagaaaaaagtgataggaatttctgtcttaaaagtcttgttggtggacaaaggaagttctaggatttggatcttgtttttttgggttccaatcccttgctccagttaaaaaactaccacataaaatggtgagaagtaggtaggcaagtttttattgatagagaggaaatcaaataatggcaatgaggagacatcacctggaatgttaggcagtgcctaactgggggatggacagacaatgggcagtgccaacccatagggtggatacaaaagacaggcaaggaaggggtagaaccatcaaagaggaataggctggtgaccccaaagcaaggaggacctagtaacataattgtgcttcattatggtcctttcccggccttctctctcacacatacacagagcccctaccaggaccagacagctctcagagcaaccctagccccattacctcttccctttccagaggacctgaaaaacgtgttcccacccgaggtcgctgtgtttgagccatcagaagcagagatctcccacacccaaaaggccacactggtatgcctggccacaggcttctaccccgaccacgtggagctgagctggtgggtgaatgggaaggaggtgcacagtggggtcagcacagacccgcagcccctcaaggagcagcccgccctcaatgactccagatactgcctgagcagccgcctgagggtctcggccaccttctggcagaacccccgcaaccacttccgctgtcaagtccagttctacgggctctcggagaatgacgagtggacccaggatagggccaaacccgtcacccagatcgtcagcgccgaggcctggggtagagcaggtgagtggggcctggggagatgcctggaggagattaggtgagaccagctaccagggaaaatggaaagatccaggtagcggacaagactagatccagaagaaagccagagtggacaaggtgggatgatcaaggttcacagggtcagcaaagcacggtgtgcacttcccccaccaagaagcatagaggctgaatggagcacctcaagctcattcttccttcagatcctgacaccttagagctaagctttcaagtctccctgaggaccagccatacagctcagcatctgagtggtgtgcatcccattctcttctggggtcctggtttcctaagatcatagtgaccacttcgctggcactggagcagcatgagggagacagaaccagggctatcaaaggaggctgactttgtactatctgatatgcatgtgtttgtggcctgtgagtctgtgatgtaaggctcaatgtccttacaaagcagcattctctcatccatttttcttcccctgttttctttcagactgtggcttcacctccggtaagtgagtctctcctttttctctctatctttcgccgtctctgctctcgaaccagggcatggagaatccacggacacaggggcgtgagggaggccagagccacctgtgcacaggtgcctacatgctctgttcttgtcaacagagtcttaccagcaaggggtcctgtctgccaccatcctctatgagatcttgctagggaaggccaccttgtatgccgtgctggtcagtgccctcgtgctgatggccatggtaaggaggagggtgggatagggcagatgatgggggcaggggatggaacatcacacatgggcataaaggaatctcagagccagagcacagcctaatatatcctatcacctcaatgaaaccataatgaagccagactggggagaaaatgcagggaatatcacagaatgcatcatgggaggatggagacaaccagcgagccctactcaaattaggcctcagagcccgcctcccctgccctactcctgctgtgccatagcccctgaaaccctgaaaatgttctctcttccacaggtcaagagaaaggattccagaggctagctccaaaaccatcccaggtcattcttcatcctcacccaggattctcctgtacctgctcccaatctgtgttcctaaaagtgattctcactctgcttctcatctcctacttacatgaatacttctctcttttttctgtttccctgaagattgagctcccaacccccaagtacgaaataggctaaaccaataaaaaatggtgtgttgggcctggttgcatttcaggagtgtctgtggagttctgctcatcactgacttatcttctgatttagggaaagcagcattcccttggacatctgaagtgacagccctctttctctccacccaatgctgctttctcctgttcatcctgatggaagtcctcaaacaccatttccatacccaggcattctgggtccccactggagggttagtctgaagggcaatggctgggctttggaaaaccagcaagatgaggacagagaggaaggcacacagcaaaccataagcccttacccagtgcaggacagaggatgcgggcagacctatgggttacaatgtctggtcatttcccaattccagattaaactgtcacctgttttacctttagttttattagtttgtagtcttaacacctccagcttctcttgtttcaggatttgggcttaaaattgagtgctactctgcatgtctagtttgaaatactagagaaggcagagttgagacaactgatatgtaaagcctggggaagagtgatttctcaggagcgagacacactaagtcaggagcaatgggatatagggcccagtgggggctgaagtgctatgttcagagtagcccttccaatgggcttcttcgtttgatggatggaaaccaaaccactccaaacacaaggtgttaactgctcctacttgggcaaagacagttatcctgtcaaggtaaattctgcatacaggctgaatgcattgtggtaaaacactacatggaggaagaggaggaatgggattaaagaaaaggaggcctagaacagtgagaggggctgagagaggccatgtcgaagttagttgaggaagactgtcaggggagagaagagaagtctgaaagcagagaaaggttgggaaagaggagggagccctttgttgagagcctgcttgcttcaggcctcaggctggacgctgctacctgtgctgtctgcatctgcacaatgatcccaggaacaggtattattttccccatgttatagatgtggaaactgaagattacagttcaaattacttatgagttgtgaaaccgtggcatgttctgctgaagatggcaattctggaaactttttccaagtagttaccaggatggtgggattgctcctggtatctgggtgatcctagagcagcttctcccaaactccaggcagggcccatggtaacacactgaagacaccttaatgccttggtgtctttgtttcccacggctgccgtaacaaagtaccactggtgggtttaaaacaataaaaacttattctctcacagttctggaggctaaagatacaacaccaagatgtcagcgggtcatcctgtatgacagctctaggggagaatcctttcctgcttcttcccatgtctgatggcttctggcactccttggcttgtgccagcatcgcagcaatctctgcctctgtcttcacatggcattttccctgtgtctctgcatttaagctcccctctcctttctcttttcaaggcatggtcttaggatttagggcccaccctaaatccagaacaattttattgagagatcttaacaaattatacctgccaagtccctatttccaaataaggtcacattctgagtttctgagtgggcatgaattctgggggaacactcttcttcccactacactggggatcttggaactggagaagagggttctctggtggcagcttgcaaagaccaggaaaggatgtgctcacagcagggatggggcccaggaaactcatcacatgccggtcatttccatcagtcgtaactatctctagactgctcaaaatgcagtatagtattttgttggctattgttgttacatatgtgctggtttgttttcatattggctaaaaaaaagcctaaaacaaaggggacaggctttaggccctagaccaacattcatgcttcccactccttagacctgcgtggaggcagcaggcatatccttgtggctcctcgcaaaggtaggacaggaggatgagcagccgagggaacaaggaagcacttcagagagagcagaactgtgggggccagagggcacaggctaggactggggatattggaggatagtggtttgtgtgggcagagctgtgaggggctgagcagctgtagtgcaagattagagtggaggtgggaagggggaaacaccttgtagaagaaagatagtgtctgttagtttgatggccatcatcttggggacgtggaaaacggaggcattagcaggtgggaggatgtgggaggagtttcttgttagtaccctagagtttgcaatcagacccaggtgaatgaattctcctctggaggataaaaggccatgtgaattttaccctctcagtccaggggacttgacagagatggagagagcttcaagctccatctggtcctcccaacaccctacttgacccagggcaggttcctcttcccaagtttttacagccatttccttgtctctctcaaacaacacccccaacattcagcacgcatgcactgggaagtgaatctcttctgcctctacctgcctttttctctagaatcgaagtggattcttctgggccaattctgggcatcctctccattcttcctcaggtaacactgagaaaagatgagttcgatgtagggcaatcatataacttactgtaagaattgagataccattgaaaatgaaaggggcccattagccacatgggatgctggaacaagaggagtaaaccaggaatggtcacaaggcccctccagtggagaggctctgagggagtttctgggtgcagcattattcctgcaaagggaggtactaaagggactccacaccaacctggacttgttgactgtttcaaacctcagggctgacctaagcatcatcctatgaagaaaccatgtggacagaatatagggcaaggcagggacaacagcatcctacacaggtgacacccagtgcagagcaaagcatgcttacttattgaaaagagttacaagaaaagcatctctggaagaatgtctagggtaccccaagttctcgctgaacttagcatggagtagctcttaaagagaagaacttcacctgtgacctttacagatttatttgggaaattggaagaaaaagggggtcatccaaatggttgcgtaataaaataacttctttgtgggggaaatgggattcccgtgagcatcccagagccccagtcaccatcacttcctgagaggaagaatcttcccatcagcaccagtatccatagagattttcctactactaggctcattgctgggccacataaggttggggagtggggatggtcgggagctgctgggacaatccaagagaaaaaggctttttctctctcgagggagtgatttcataataagagtttgagataagggcaatggatcctaatagatattaaagtctccatttccgtccctgagccatttcctcatttttcttctgtagtggcccagaaaggaggggtggagatagactgatatcagcccctaacagtctgtgtgacacacagccccaaatgtcctatataggagaatctttgtgaggtttctctggttataaatgaatgtgggaatggaatattggtgctttgagacctctgttgaagctgcatagtgaaaacaaaaatgagtttttgcttcttcctcaggtaacactgagcaaagatgtctagccatattttcatttaggggtgttgggagatgctggtggagatcacgggaatggctaaaacccagaggtgaactcagctttgccatggacccatgagtgaatccattttctgcttctctactgacatctcagactcatcaccaggttcacttttaccatgtcctagaaactcccctatgctatataagaagactcatagtatagaatggcatgaagcatggccaacagttttaatcacagttcatttccattgcttgtggcaaactcccatggctcccaaaaagctgatttctgaggcttgggaccccataacctaagactacccaacccacctagactcaaacacaacatattccctgccttattctagggttgaatgttctttcctcctatctggaagccttccttttcttgctgtctgtgtttgtgaatttgaagttcctgggttccttaacatccctacatctctgcctgtccttttattttttttattgtggcagaacttatgaatcatctccctccaacagacatgatattttctattcgccatccccctctcctatagactcaactacatgcctttctctcccatctctatccatagtctttatctctgctgctggtggactcctgagagggcttcttggggaatatggggccccaaaaatgagtgaatggcttctgtaggtcagcaaaaaggatctgaaaatgagcctacacctgtgactatttccaaaggatttttatcagcttgctctgcaactgatctcaactgccctctgtgaatatgagcatttaatccacacaacatgtaaagctaattctcagctcctttttgccaacctacagttgctattcacttatctctgggaccctatagtccccccaaaagccctctcaggtgtctacatgcaacagagtgcccatattctggcaagaacccataaatctatgcgagacagaatcattagaaactttaaaacttgagtttttggaatggaaaaaaagcatgtagtggatggatgaaaacattatcatagcaaagaagatgttgtaatgcagagacctgggtttaagccttagttctgtcatttatcaactatgtgaccctgggcaagtgatcacctctgagactcagttttccttgctgtaaaatgagctcaattacaagcccaacttcataagatcgttttatctcatttaacccacacaacatgtaaagcttttagaacaatatcagtaagtattaggtgttattataactactaccaacctgaagatttttttcaggcaaaacattttcagttttctcaattttgttattatagggcacagttttgagcacgtcctactttccatagcccaatcactcccttctgaaaacattaaagtttgtttttatccctctatcttttaaaaaatgtgttgtacaggacctgacccagcaccaggtgggttctgacctacaaagagtaaagggggaactttgcctcctctttctcaacatcttatacgttagttggttccattaggacaatttatctactttttgtacgctcaccatcccgttgactcacagagctcactttgactcaccccctgggtgttttttcacatatccttctttcacatattccccttcctgtgttcatatagatggttttctctgtttggtgggggaggagggagagagagaatgtttatcatgtttattcagcttatctctccaacctattaagattctgcaggattctaattttgtgattcattatatttatccttctatcctcatgccatctcagatatgatcatcttgcctgattcattactataagagtgattcatgaaattcatagcaagatcacagctcaacagagaccccacattccccaagccttgtctgaagtccaggagctgctaaaacacagagaattagcttctggtcctcctctggccccagctgcatggctctgaacaactcatttttattctctgggcttatatgtcctcctctgtgatatgaggacattgggtaaagtgatctctaagaatcttcaaactctgctcttcagattctctgattcaaagcctgcagtctctgaagtaccaagagaatgggaactcagagaagctaagctcttcctggcctcaaatcatacatatctgtgacatagtctcagacagtctgatggtggaagaggacagcactggcactggagtcccacagttagcaagagtcaactggagccctgacacctgttccctggccctcctccatcaaaaaggtctagggccatgaatgacaagaaaattgtgttaaaaaggagagtggccctgaatcaaaaggtgggaagtaatgagatggaaatcggggtcttttaggtaatagctgacaactggggtaggaatgggggttctgagcccagtgctggctgccgggctgtttatctctgagtcacatcagcaccaagccacagcagccacctgccctagctccatctcttacagtcacaacaggatgtggtttgacatttactgggtcctgcatctggggtgcctgtgaaagttgctccctccacccacccaccttcagagcatcatgagaaccacactcaccgcatccggcacccaaccccctcctatgctgctctttctacctgggcccctggttagcatcctggcagtagaaatagaacttcagaggggaggggcagggtctctagaggggaatctaggtatcccagatccatgtgcaggcctcccctcccccaacacatctttacacctgctggaggttatgcacaagatcaaaggccacagtgggcaccatgaagatagtggagaatgaaaaacagctgcaataactgctctgacccagttgggatcccttctggtcccacatcactcaggcaactctctcttcccacctgccccccaaactcccttccacctccctccacatgtatcctcccacttccttccactcatgtaatgagaggtgctgatgagtcacaggagaggtagccctagataaccaacagactgcaaaacggacagtccctggatgtctgagccagtgtttgtgcactgcattgactggctcctcgtagttttttcctgtagttgctaaagcctgtaaggtctgtgtgatgaatattttctaacacatcttagaagaacataatgcaagacagaatgaaaaactagagaggcagaaacccccaaagtaagtagtgggaaattaccaggtatataataggtcaagcctgctctgcaggagctcaagggattgtagcattcttatcccaaaccactgaatcctgggcaaaaataagaagtcgcctaattttagtattaccagcttcccaaccccgggcattcttcatcttactcaagctgtccagaggccccagggtgactccctataagtcccatgggtggctgagatctatttagaggcacaagggtatctccttataagtcccatgggtggctgagatctatgagaagcatcttggggagagtgcctctggccaccagcatgtggccctgaatcttccatgtgcaactggccagggaaggagatatatggaaatagtcatcctgcacatctgcaaaatcagatgcaaatcctggaagctctcctagaaaagagacagcctcatctgattaaaggggcaagtgagtttgatgaattattggcaagagacagcatgtctgaacaggatcggtcatcctaaactgctttcctttgtcccctggaattataatgactgtggatttctgagtcctagatggtatggaaacagttatgggaatgaacagtcttgcatgaataagagcagataacatggaggatgttaatttgttctgctgaatttaggtggctttcaagcctctccttcaatgctcacctgtctctaggatgctctgtgcaatgatcaggactttttttcttcagattctctaaaacttacaatattcacatagacctgcacatttctacacaaactgactctcctgcttgcaatgtcattttgcttatataactattagcctcctaaagagctaaacttagctacaattttatgtcctttgtgaagttttccagaatttttgcagtatattacaggaaggaaaaatctgcctcaagtctctactaattctacttgactagtggtgattgcctgagacatttctctattaatgaggattctgaagctgtataaagcccctacagaatcagcatctgaataggcacagcatagggttcaagtttcatggttttgccatccaagcatgtttagcattttaaatattaatatttattacatacttgtagtttatgatttgaaattttttaactaagtcttcctcttgggtaagttgtaatgaaaataatcttgtaagcttaaggagcggaaaataatacctgttgaaaattagagcttgtaatagggctttataaacaccatctcatttaatacacataacaattcaatgaggcaagttttataggtggggaaaaacttgaaacttagtaaaattaaataactaggtcaagttcataacaactagcaaatttttagactacaaaaatcaagtgctttgactaaatcatgctatgactgtgcccaacaccatctcgagtacattttatttttctttttaatcctcaaaatgactcactgtgtccagcaaataatagctgcttaatacataggtgatccttaaagttcagtagggacccctgggcattattccatatgttcttgatcactctgtgtctacatctcagattttccacttcagattaaatgatactagaaatatgcacgtgtctggattgatctaggttaaatgatgcccggaatggagtattttaagacatcttgtgcccccttgtggaggggaagggacattagaaagaaaatctttttaagaacaaggactagggagggatggggatgaggaaggaagctcagttgccaaggtaaccatcgaacctcttcccagccatccacatcagccttttcctctccttcatttccatccaagtgatttctcttttttagagctcaaccattacacacacggtcctcttcttgcgtatctcttggatcaccatctgtctgtctttgctacaaaggaagggctacaagatagtacaacaggacattttttaaaacctcaaacatcaccaaaatttctaagtgcaagtttatttttattttttttttttttgagacagagtctcgctctgtcacccaggctagagtgcagtggcatgatcttggctcactgcaacctccacctcccaggttcaagtgattctcttgcctcagcctcccaagtagctagtattacagacgcctgccaccacgcccggttaatttttgtacttttagtagagacaggtttcaccatattggccaggctggtctcaaactcctgacctcaggtgatcctcctgcctcagcctcccaaagtgctgggattacaggcatgagctaccacgtctggcctaagtgcatgttacctatactaacaaaaccacacttctgcctcgaatgagaacagtctcctgaacatcttgcctctttgcctgactcaaagcctcaggtctaagcctccccataatttctagtctcagcagaaagatcaatgacaggagactctccaggtgatgaaattaaccaattaagtaacctgggttggcatcctcccgtttgttcaccagctcacctcctgccacaggtatatcctttctctcagccatatatgcacaaaccccctccccacggcacacatagaagaatttggaagactagaaaatcaggcaaggtatagcacaccttgagggctggagtatggtagcctgggccgggacatccatacattgagaacttgactatgtgcaggcaaatcacaggttctgcacacatacaattttttgttctccctgagaacttagtagagtcttttgtagaattctcgctttattccattgctttcacattggccagcagtcagaaacctacttacaaatatcctccacccagtccctaagtgaaggcccctggggagtatggttagggctcaggagagggtggggtttttgcacagatgtctgccccacccagctcagtgtgacactccaggcacagagatagaagccagagtcactgagaaggagcttcttagaactcaggatgaactgccggtcctggggtctggaggctgagagattctggggcacctcagagctgatctggccaataccaacggagtagaagagcagctggaggcccctgcctgcagcctgtcggtaccagtataggttggggtttgatgttccctccacagtgcactccagagagagcgggctgcccacaggctgcaccagggtcgctggccattgatgaatagtctgagatctgacccctgtgggaaagataaagtgccatttacagaggagcaccccagcctggcttgccttccccagacagaggggcagctcaagctcttgcatgacacaggcacctggaatccatcatggggagtagactgggggagccaagatgcaaagcatccctgggccagggaagaccaacagaacgaactccttctcaggagatagagagaactaagaatcatcagatcagcccctaaggctaaattcccatatctgttccagacaatcaggaatagactcaagagtgtcaaaccaacagctcagactctgcattcacgggattggggtgagggtgaggatgagaaaagaggcttgccagagaggagggcacccaccaaagaaagtgcccaggagaagggcaaggagagagcagagcatcatccaagccagcctttccttcagctagtctgggggacagacgcctcctcttctgggccagtgatgtggtcaggctgctccctctgggagatctgctgccagagcagaggaatcctaccccatgagctggggaggaaatgaggctagtcttcttttaagagtgtggtgaatcacccccagcctccctgggaaccagctatctctgcacttgttatcttctttgcattcctgctgacatcctggtatgtaaatatatttaatgactcattatttacctgtaaactaaaggtaactctccagctcccccgggagacatcagaagcctgggaaagcttcagagaaactgtgatactgatagaaggatgaaaaaagattttagtttatctgaaattggaaactagagctagacatgttacctgggagatgaaaggatagggctcaagagattcaggtattttggggtaatcaaagcagaaatgctcagttctgagggcaggaagcttctatgacagccaaagggatcgcctgcataatcttcatccctggcagacagattttgagacctggacaggcataattaactcctgaactgatcaaagttggaatctgctccatgtgtctctaatgggccaactagatctaatttatcctctaaatgcaatatgagtaataggaaacatcacagagacttggaatcatatggatttgggttcatttcacagctctgcttcttgctggcttgggaactctcaagcaaaccctgattctcaattttcttatctataaagtgaaaataatgatgacaatatctaaaaattgttgaaagatgcattttgcctggtgcactgcaggcaggcactcttacatatgttggcttttttttttttttttttttttttttttttttgactccctatgtctgcagcaaagattgggagatttacaatggcatggggtggaaggtaggggctgaagggatcacgagccacaaaaaacacagtcaagccacgaattcataatagtaaggattcataatagctaagcatgggactctgctaggtagctgctaaaatgtcattctgctgaaatgggacaaaagaccttcagatgcctggaggacaccagcacacccttggaaactcctcttccctctgtctttgccatgctctgtattctgaaggattcatattcagaacaattacttagtttgggttggatgtggtggagcggtttgagatgaaaacccaggaaagaaagccgtaaaagtggctgaacagggagaataagctttaagcaaataaagcatttgtaacactttcccatttcatcagggcctagtgatgtcatatgtttgttgttgttgctgatgctacagtaacacaattccaagttaatgttggggttcttgcttctgacagttttggctgtagcacatttttttgtttgcatttgaatacaccatatgtataggggaatgttttgttttttatcatttcaaaatggaattaatcctcttataacatttatttaaatgataaatcaagtggtaaatatagtttgcttgcagtgaacatttggaacatatgatgaaaaatagctatagccaacgcaagagcagttttcattgaacagttgttcaatctcagtttttaataaatctgataatataatatctgtgcatgttaggattgcagagagtgaagccaaaataaatatgtgcacacatagcctattcctccctttctttccatttctgttctctttcctctttgcttttgaaatttttatttagtcctgagtggggatggggtggagagaaagtggacagtgggtggtgggagatacagggagaaagaatgagaattgctcttgttctcaagggtaccgcatcacgttttcctctggctggcagtctttaacaccagcgtatcctatgagacctgacttcactcatcagctgcatcagctcagtgtcattaccacatgtagacagcaatgtaatcctccttcttagagatgctgcagcagattggagggtgaagagatgtatcagtcagatcagagtaaccagctggctcctggctcctgatcattgtcacagctcagtagctggaagctccttccatatggctgatgcctttaaaaaaatctcctcaatctccatccccatctgcaatactgtttagttattcaatcatttaagtcattcatgtattgaaaagaggatggggatatgatccctctgctctgtggcagtagatctactaatgggagagtcctggccgcacatctggcctgggtctggaggtgcctacggaattgaaagctggctggaactgtcatcttaacatgtcctggtcatcttaacgtgtccacctctctggcaagcctcttttcaagtctttttgttaccatcttcagctttttccctccatactagattcttaatgaattgctgccaacaagagaaagctttatacatgaagagaatggcaataagaactaactcgtctttttaattttaaaactggtatatattcctatataataggaatggaagatacttgcaaagcctatttgttcctctacagaagagttaaaaattacctgggctaatggaaagaagggagagtcagccaattagatgctcctgaatgccctgaattgtgacttacctcttcttatccacatcctgatcaaggaaagggatgagagagaggtggagagagaagaaatggaaattcaaaagttttgacggcagaggaaaattgtgcttatttccagaatgagacgaacaaggtcctgggtccctacatgtcatactggctagagactggtaagtagaaatgacttgtggtcagcagaataatggctcccaaggatgtccacattctaatccccagaatctgtgcatgtgttagattacatggcaaaggggaattaaggttgaagatggaattaaggtttctaattggatgcccttagaacagggagagtagtcagaattaatcaggtgtgccccatacaatcacaagcatcttcaacatggaagaaggaagcagaagagagtcaaagaaagagatgtggacatggaagcaggcaagagagatgccatgctgctggccctggaggtagaagggggcatgagctaaggaatgaaggtggcctctagaagctaggaaaggtaaggaaatgggttctcttctagagccctcagggaagaatgcagcctagctgacagcttgattttaactcggtgaaacctgtgtcagacttcagagttacagaactgtaagataataagtttgtgttgttttaagccactaagtctgtagtaatttattagagcagcagtggaaaacatacatggctctagaatgtgtcttaacagagggacctgaggtagtctccaagaatccccaaagatctcaggatagatcaggaatagccattttctcattcacagggaaacagattaactgagagaagccatcaagcctgaagagacatcgtgtttgaaatgtgtaaggcacagtgtacccgccgtggatcaaaacaacctgaaggacagacagacagacacaccgaggatcagcagatatcagtggggacaggtgctgatgatggtgcaaatgagagtcatgaaggaaagttaaatgatgaccaaagaccaagtaccttccccacaatgctttgacaagcgcttttataagcaccctggaatttagacactacccggggagaaaaggaaagggagacaagcatgaattgtctgagaaacccctgaattaatcatgtgtaccccaatgcaacaaggatctagatatagaataattttaattatagaaaacaaaattatattttacccacccatatttgatgcccatgaatttcacatctaccttacgtgcacataaaattcaagcttagatagacggaaaacaaaaaatcaagaagcaatatttgccttctaataacttatctattggaggaggtaaaagatagaaaagtagttcagatgacaaatactaaaagagttaggaacttctgcttccacttacgatgaaggaacttgtactcaatccatccactttgtaattctccttgagctgctgtaataaagtaccacaaactgggtgacttaaaacaacagaatttattgtctcatggttctggagcctagaagtctaaaatcaaggtatcaacagagctatgcttcctctgaaacctggaaggaaattcttccttgcctattcctagcttctgttgatttgctggcaaattttgacattccttaacttgcagctacataactttaaactctgcctttggcattacatggcattttccctgtgtgtttctgtcttcccacggctgtcttcttacaagtacatcagtcatattaggagtccacagtgctccagtatgacctcatcttaactagtcacacttgcaatgaccctattttcaaacagagtcacattctgaggtactgagggttgggatgtcaacatatctttttctggggggatggtgggtataattcaatccattataccctccaataataaacacctagaaaactgggcaatatacgtgagataattgttttctaatattggacaagagatggcacaaaactgtgatccataagtgaaaggagacaaatgaggtgcgtgctgtgatcatttccgttttctacccagaatttcctgggttactgtacaaacaagagggacccaagcagagcatggcaccctgaaattcttactgagctgaggacacagctcagagaagaggaggccatgcacggaaagagccccgcaattttcatgaggtctcattgagtctttgggtaaatactaagctggcatccattgggtgaaactccacaggggcaggcaaagaataagtactggagaattaacaactgctggtgaactacagtatgaataattactagatcttggtcgaggctgagagagatacagctctgagccatcagaatagctttgttgaatacctggaacattgaacaggtatcccaggaagcccataacttagagtaggactcaaatggcatagaataagtctaccgtccattaaccctaacaaagcttaaaagagcccttgaaaggaaaagcagacaagttgacctgcaagcaagtcaactgcccactagaataaagctcaacactctttgagagaagaaaacaaaattcagataataaaaaagtaacattcataatgttgagcatccagtcagaaattatgggatatacttaaaagctggaaaatgtgtctatgctaagtagtaatattaggcaattgaaatcaacccagaaatggcagagatggtaaattaaaataatgggacttataaatggctaatatactaaaatggctattattaaatatgttcaaggatttatagtgaaacacaacataatgaagaatgaaacagaaactataaaaaagctaaatagaacttctagatctgaaaaatatctgaaatgaaaattttgctagataagcttaagttggagtagacactataggagaaatgtctatgaacaggaaatcaggacaacagaaactgtcaaaacaagagagaggaaaataaagctaaacaactacaaaaactggaagaggtctcagggaactcccaaacaatatcaagccacctagcacacatatcattggagtcttcaacatagaggagagaaagtggtggcagaaaacaattatttttaaaatagtggccaaaatgtttcatacatgataaataatatccacctacagatccaggaagcttagcaaaacccaagcaggataagctcaaaaaagtttgtttatgaaagagattactttcaggtatgaggctcagtttaactttcacataagagacagactctgagatggtccttgagaagtcatagggttttagactgataaaaatgacattaaaaggcaagaaaggatgaatggtacagaaatgaccaaaggtacagaggctgaaagtacaggacatcggtgaagaacagtaagaagatgaacctaaagggagaggaagagaatacatgaagataggttacagtagaatttcctaaagcttaacacatctgtgtctgagggaattctatgatggggtaacagaggctgaatttaccctcaaacctgaaacaattaaaatgcatgaaatatatgaaactctggacaacagatggctcaagaccgtgatccctgaaagaagtgaaatgaataaagtgaaccctgtgatggcctcagtttatagcctggagatctttttcaggcagtattatagggaggagaagcccaaacagcgcctggcagtctctctgagttaaggagacttgcattcagggtttgaggaggccaaaatggctaaaattccagggaagagacccagggaggagaaagcggtgggtgggaagtgctctggaatgtgcattggactcccagtgactcttcaactgctctgaccagtgagtacaagaaaacaacctgaggctagggagagaccactcgatggatcaagcagaaccatctcaaagtccacacggggccgggaaaagatggtgcttccatcaaccagagtgggagacctcctaacacagagggcattgaggagaattctcagaagcggatcaccccagtcgcgggaagcaaatttgctgtacactaaaggctgtcctagatacaacttacaaagctccaaaacaagactcagaaatatcaaattgtttctatgtaatctatctgcatcacaaaataaagtcccaaatttatttaagggatacaaatactccagtagctagaaacgtaaaattcaaatatctgatatccaattttaaaaagtcatatatgcaaagaaaaagaaaaatatgggtcataaggaggagaaaaacactcaatagaaacagatccagaaatgatatacatgatggagttagcagacaaggctattaaatatatattcaatatgttcggcaggatagaagagagtgtacatatgttaagaagagacgtggaagatttaaaaaagactgaaataaaacttcttccgatgcaaaatacaatgaatgtgattttataatatactggatggaattaacagcagattaggtatctcaagtcaaacttaaagataaggtaatagaattcacctaggataaaaacagaaagaaactgacttaaaaaaagtgagcagagcatcagtgagctgtagaacagcattaagcagcctaatattgagagtcctataaaactggaggactaatgcagaaaaaagaaattgaataactaatagctgaagcagttttaaatttaatgaaaaggaaaagccacagattgaagaagtttcatgaactccaagcacaagtaacatgaagaacactttaacaagatatagtatcattggattgcttaaaactaataaagaaaaatcttgaaaagcagccagagaataaaagacacactatgtacaaatgaacacagttaagaatgactgcagtcatctcactagaaacaattcaggcaaaagagtgtggagaaacatctttaaattatttaaagtaaaaaaaatcctcttaacctagtactctatatccagtgaaaatatctttcaaaaacattggcacaataaacttctcagacatgaaaaaactaaaataattctttgccaggagacacacacactataagaaatgttaaaggatgtctttcagacaaaatgaaaaaaagtccagatggaattggtaagccagctccctgtgagggataaaaaggaaaaaagggaaaagcctggatttatagcattttgaccaattttgtgaatataaatattcccaccatggccaaattcaagcaaacaacaatttctaacaactggttcacagaatttctggatatttaacaactgggtcctatgagctgatacaaaccaactacagactattacagatagaatatcattagtaaatatgtaataaatataaaaaacagtatttgtgccatttaaaaaatctctttaaaaataattgactttctatttccagtgaaaacaaagtaagggacaaaatacataaagcaccagttgtcaagacattagacatcaggcaaggaaggacaagaaaaaatgaggtgagttttataataaaacaagcttaccaccttgagacaatttccaggccatggcacagagaggggaaatccagggggaaaccatcaaactcctcgagtcaaggagacacagctgagaggagaataagtcaagtagagttcacagggctgaggatagcagaggagagaagcgggcaaagagagaatttgtgaggtcatcagagagcccaccctcagtattcagtagggtattaacaagagcatgagtgtgaaaaaaccacctgagattgggaaaataaccacacaaaggattaaagaaaacagtaactgaatttcatgtagggccgggaatagtgtatagtttcaccagccaaactcaaaaacattaaaattcatggggcattgggacaagagctcagaagtgtttgggctcagaagtggaggataatgatctctaaactaaatgctgctctgctgtcatctaacaaatgattaaagccaggtacaaaagcatcagattatttcaagaaatgtaactgtattctaaaacagagctcaaaaatatttatagaaaaataaaaagtccaacacaaaattaaaactcaatgtatggaataaaataaaaaaattaccaagcatacaaaaatagcagaaaaatgcaacgtataatgaaaggaaaactggcacagatgttagaattagtaaaaaaataataataatttaatttaaaaataaaatagttaagctagagatgttaagcagacatagaagatatttttaaaagctgcaaagccaacttctggagatgaaaatgacaatatctgagatgaaaaatacactggatgagattaatgatagattagacaatgtagaagaaaatactagtaacctaggaagatatagcaacaaaggcaaaccaaaaatggaggatagaggaaataaaataatttttgaaaggaaacagacaattaattgttacaggacaacttaaagtgaactaacataactggggttttaaaagaagagaagaaagatgggaagaaagaaaaaactattggaagaaatcatgactgaaagtttctaaagtcaataaaactcgaacctcacatatccaagaagcctgacaaaactcaagcatacatacacaaaatacaccaaagaatatcataatcagatttctgaaaattagtgttaaagagaaaatcttaaaagcagccacaggataaaaacatgttttgtacagtagaacaagataaagatgacagaagatttcttggtgaaaacaaagcaagtgagaacacagtaaagcaacatctttaaaatactgaaagaaaaatactgtctttttgataatgaccagcctaacaaatgtgaggtaatattttattgtggttttgattttcatttccctaatgattaatgatgttgaataccttttcatatcccttttggccatttgagtgtctactttagaaaaatgttgaataatcaaaaaagatgattagtgatgttcagcaccttttcatatacctgattatcttctttggaaaagtgaaaaaatgaaaacatatattctttgaaaacaggtggtttgcccatttttttaaatggatattaatcctttatcagacatatggtttacaaaattttctcccatttcatggtttgctttttcattttgttgattgtttcttttgtcatgcagaagcttttttagtttgatgtattaccatttgtttatttttacttttgttatctgttcttttgttgttacatcaaaaaaattgccaagaccaatgtcatgaagcttttttttatgttttcttataaaatttttgcagtttcagatcttacatttaaatatttaatccatttaaagttgattttccgtatatagtgtaacataagggttcagttttattttattttatttttttggatacagatattcaatttcccagcaccatttatcgaagaggctacccttttcccgttgcatactcttggtgcttttgtcaaagattagttgaccatatatgtgtgggtttatttctgggctttctgttcggttcctttattctatatgtctgtttttaagccaataccatactgttttgattactatagatttgtaatataacttgagactggaaaatgtgatgccttcagctttcttctttcttcttaatattgctttagctatctaaagcaatatttaatctgtgaaaatgccactggaaatttcatagagattgcattcaatctgtagatgactttgggtagtgtggacattttcacaatattgacccttctgatctatgaaggtaggatagatttccatgtatttgtatcttcttcaatttctttcatcattgttttacggtttttagtgtacagatctttcacctccttggttaaatttatttcaaggtgttttattccttttgatgtttgtaaataggatcattttctaaatttctcttttacatagttcattgttagtgtacataaatggaattgatttttgtatgttgattttgtattctgcaaatttaataaatttgtttattagttctaatacttttttactagagtctttagggttttatataatttaagatcgtatcatctgcaaacagagatagttttactttaatagtaatttagacaccttttatttctttttctttaataattgctctaactaggaattccagtactatgtagaataaaggtaacaagatggcatatttgtcttgatcttgatcttagagaaaaggctttcaactttttactgttgaaaatgatgttagctatgggcttgtaatatattacctttattgtgttaaagtatatttcttttatacctaatttgttgagagtttttgtcatgaagggatgttgaaattatcagatgctttttctgcatccgttgagatgattatatggcttttgttcttcactctgttaatatggtgtatcgtttattgatttgtatatgttgagccatgcttgcatcccagggataaatcccacttgattataatgtatgatcattttaatgtgatgtcaaattcagtttgctgatattttgttgagaattttaacaactatattcatcagaaatattgtcctgtaattctcttttcttatagtatccctgtctggttttggtatcaggtaatgctggcttcataaaatgagtttaaaaggactccctcttctccaattttttggaaacatttgagaacaattagcataagttcttctttaaatgtttgatagaatctggcagtgaagccatcaggtccttggctattatttgatgggaaaaattttattactaatttaatctcctcaatcattgatctgttcagatttttttcttcatgattcagtcttagtaggttgtatgtgtctaggaatttatacatttcttctaggttctccaatttgttggtgtataattcttcatagtagtctcacaattctttgtatttctgtggtatcagttgtaatatcttctctttcatttggattttaataaaaaaagaatcaagtagtacaagttacattatctctctccagtgggattatattagaaattaatagtagaaaaatctggaaaatctccaaatacttggaaactaaatacatgtatataaactacctatgggtcaaagaataaatcaaaggaggaattatagagtattttgaagtaaataaggataaaaacgcaatatatcaaaaatttttgaaatgcagctaattcagtacacagaggagaactcatagcactaaaatatttacattagtgtacagtaaaggattaaccttgcccaaagaaagttttggtcctcccttttccctaggctttggatcataacttttaaacccttggaatgtcctgcctgattaaaataactttgtttatctgggagggtttgggccataccagacagcctatgctaacaatgatttatggtggggactttaggctacacagtgtattagtgtgtccaaacccctgtaaaaagctctggacaaacctccaataaaaactctggacacaaagctcaggtgaatgactccagttttaaaaattcgaaatttgtgtgaaaccaccaataactaaagtaatattgagaaaaaagaaagtcaatactttatgcatactgtgacacatcattgctgagagaaataagtgctgtttgcacatctctgctggggacaactggaagctgcatgcctatgctctcttgaaccctgctctatgagcctcttcccttcactgtctttaatctgtatttccactctaataaactgtgagtattgtggccttcttgaattctttgagttcttccagtgaatcactaaacaggagtgatttagtggagtcctcttgaatttgtcactagaaaatgaaagttctcaaatcaatgacctcagattccaccttataaactagaaaaagaagagcaaattaagcctaaaattaagctgaagaaagaaggtgataaatatcacaggagaaattagtgaaatggagaacacaaaaccagtaaagaaaaaccaaagtaaccaaaagtttgttatttgagaagatcaataaaatcgatagggtgctagcagactaatcaggaaaaaagagagaaaatataaattactcatattaggaatgagagagaaggtactgctacaaaatctacaggtattaaaagaatgttaaaggaatattataaacaactttatgtcaaaaaattttgagcagaatagagaatccaaaagtagatccacacatatttggacaactgactttcaacaaagctgaaaaggcagttcactggggaaagaatagtttttcagtaagtggttctggagcaattagctaaccatatgcaaaataacaataataaacctcaaccttgccttataccagcaacacatactcactcaaaatggattatacatttaaacagatttgctaaaactataaaggttctagaagaagacatgagagaaaatctcagtaatgttgggcttattagtgattcttaaataaaacacaaaaagcatgaagcataaaagaaaaaagctgaatttcatcaacatttaaaactagatggtgaaaagataacactaaaggaatgaaatgtttgctgggtgcagtggctcacgcctgtaatcccagcactttgggaggccaaggcgggaggatcactggaggcagggaatacaagaccagcctgtccaacatggagagaccccatctctagtaaaaatacaaaattggccgagcgtggtggcacatgcctgtggtcccagctgctcgggaggctgaggcaggagaattgcttgaacccaggtggtggaggttgtggtgagccgagactgtgccattacactccagcctgggtgacagacagagactctgtctaaaaaaaaaaaaagaaagaaagaaaggcacaggtccacacaaagacacaaattttcataacaattttatttgtaatagtcaaaatttggaaaaaatccaattgcctattaatgggcgaacaaatgctgaaattgtcatgtatccacacaaaggaaaattagcaataaaaagaatgaactatttaaatttaaaataacatagataaatctcaaaataatatgatgaataaaagtaaagaaacaaaaaagagtacatagtttataattgcattatattaaattctagaaaacacaaagaaatctatagtaatagaagaagcactctatcagtgtttgtctgggaacagcatggagagaaggatggaattataaaaagccacaaggctattcacaatagcaaagacatggaatcaaaccaggtgcccatcaatggtagattggatcaagaaaatatggtacatatacaccatggaatggtacgcagccataaaaaaagaatgaaattatgttctttgcagcaaaatggatgcagttggaggccataatcctaagcaaattaatccaggaacggaaaaccaaatatcgcatgttatcacttaaaagtgggaactaaacattgagcatacatggatataaacaatggaacaatagacattgtgaactaccagaagggggagagagacaaggggaagtgttttgaaaaactacctatcaggcactatcttctgtacctgggtgacaagatctgtacttcaaacctcagtacaaacctcagtattaggcaatattcccatgtaacaaatctgcacatgttctccctgtatctaaaataaaagttgaaatttaaataaataaataaatagcgggccacaacaaaacttttggaggtgatgtgtaagttcattacattaagttttatgatggtttcccaggtgtttgcgtatgtcaaagcttaccaaattgtacattttaaagatgtctattgtttgtcaagtgcattttaataaagctgtaaaagaaagaattatttttgatacagtgttaggacaacagaaaaccactgagaaaatttaagcaagagaatgtcaataattaatgccacattttaactaattaactgcaattaatcacaatcaatcagtaagaaaaggttttgtgctgaagattttccagagagataagtaagcaagtatatcatgcatgcagtggagcagggcagagcctcataaaatccctcttaaacgtgtctgttcttttgccaaatttccattctggttgccagctacctttttcctcctctttctttccacagccactgccatcctcattatagccccagacaattcagctcttgaaagtgtatccagcaaaacaaaagtgtaacagcagctcagcaccacttggaaagcagttgcatagccacctctttctctacaagctcagtccttcctgaggttgccctctcacctattcccctacatcaaaagtgactcatcaaagtattcagtagacaaaattagtctctatccagggagaattcactacttggaaagtaagatgttctgtttctcattacatacaaaaaaaaaaagttgataaaatcacagaattcagtttgagagagaggaagatactaaatgtcatttgtcattctgaccttgaagtcacattgagtccaattcaatcagaaaagtgcaagtgaaaatttggatttttaatgagacaccaggactagaaatactgacttcaggggtcatccgcagagagaaaatagttgaaatgtttggaatggatgagatctccaaagcaacaagtgaagaaaaaggaacaaaggtccaaaaataaaaactgttgaacatccacacttataggtaaaaggaggggaaaagtaagcttaagaaattaagaaagtagttctagagggaagacaagaaatgggatggtatcttggaagttcagaggagactgtgggtacaaagaggtggcagcaggatttaaaagaactttaaaaattcagtaaaattaggactgaatgacttcaccgatgttgttgactagaggaggagaaagtagcagattcagagcactcatttgacaagtttaggggcagagcgagtaagggagaggttaaagggaatggtagagttgaatacagtcttttattccaacgtatttatagtctgattatatagaaagccaagaggaagaactatataaagacaggaaaattgaagatgctaaagaaagaagatatttgagaaacaaagaggcatgtggattaattattggacatcaagaagggggaacttttttcctctgaaataggaaaagaagagaaaatgcgtaaaagatagacctgcactgaggaaggccaacatacatacagaaagaggctagatctaatgatcggttgaatgtaatgtttttaaaaacccaccatttcacccatcagattggcataattaaaagaatcaatagtatctgatgttggcaagcatgtagggaaataacatgctctcatgcacagctggaaagtaaactgcaacagtctttatggagggtaatttggcagtgtttattgaaactccacatggccgggcgcaggggctcacgcctgtaatcccagcattttaggaggccaaggcgggtggatcacaaggtcaagagatcgagacgatcctggccaacatggtgaaaccccgtctctattaaaaaaaaaacacaaacattagctgggcattgtggcacgtgcctgtcgtcccagctactcgggaggctgaggcaggagaattgcttgaacccgtgaggtggaggttgcagtgagacgagatcatgccactgcactccagcccggcgacagtgcaagactccgtatcgaaaaacaaacaaacaaaaaaacacaaaaaaaaacaaaaactgcacataacatttgactcaacaacttacttctcagaaacaattccataaaaatacatgcataggtgggcagaaaattttgccaggacttctgttatagccttataaagggcaaagtataggcaatatgtaaatatccatcagtagagaattggacagataaatatccataacatacattttaacaacagttaaaatgaacgaaatagaacaagatgtggtaacatggaaatatccccaaggtatgttgttcagtgaaaaaagtaagttgccaagtaatatgtacaaagcaatatggtttatatcaaaacacattcaaaacatacacaaagcagttagcatacacgtgtgtgtatatatgtgtgtgtgtgtgtgtatatatatatatgtatatgcccacacacacacatatatatgtatgtgcccacacacacatatatatatgtatgtgcccacacacacacatatatatatgtatgtgcccacacacacatatatatatatgtatgtgcccacacacacatatatatatgtatgtgcccacacacacacatatatatatatgtatgtgcccacacacacatacacacagatacacattcattcatttaaccaagagtaatggggtgccaactatccatttccatgaagtttattttagtagagaatgcaaatacgtagagagaaaaaggaccggaaaatgcacacaagattgataataatggttatttctggaaaagacagcaagaaagagaagtgtcaagataatctttgatctgcagtgtttatatttttgaggtacatgtatttttagactatgtattgagaaccaccaattatgagtccaacttgcactccattttacttatttgagaaggtaaataagagaattcagaacattaggctcaaactccaattcctttgcttcagtctatagtaaatacctattgagaatagcaccaaaaagcagtcagaatgagaggaaagaaaaagaagcaatgatgtgaatggatgatcccagaaagagtgatactatgtggattgaatatgctggaaattttttttaaatgtcaagaaagacctgtcttgtgagacaaaggcatgcagtttttgtcccatgtggtgtaagatttaagatc

SEQ ID NO: 32014 - DNA, 2732 bp, Homo Sapiens
gtctttatttcagtcccggatccgcgggcgcaggcccagctcaggcccccagggatggacgtcgtggaccctgacattttcaatagagacccccgggaccactatgacctgctacagcggctgggtggcggcacgtatggggaagtctttaaggctcgagacaaggtgtcaggggacctggtggcactgaagatggtgaagatggagcctgatgatgatgtctccacccttcagaaggaaatcctcatattgaaaacttgccggcacgccaacatcgtggcctaccatgggagttatctctggttgcagaaactctggatctgcatggaattctgtggggctggttctctccaggacatctaccaagtgacaggctccctgtcagagctccagattagctatgtctgccgggaagtgctccagggactggcctatttgcactcacagaagaagatacacagggacatcaagggagctaacatcctcatcaatgatgctggggaggtcagattggctgactttggcatctcggcccagattggggctacactggccagacgcctctctttcattgggacaccctactggatggctccggaagtggcagctgtggccctgaagggaggatacaatgagctgtgtgacatctggtccctgggcatcacggccatcgaactggccgagctacagccaccgctctttgatgtgcaccctctcagagttctcttcctcatgaccaagagtggctaccagcctccccgactgaaggaaaaaggcaaatggtcggctgccttccacaacttcatcaaagtcactctgactaagagtcccaagaaacgacccagcgccaccaagatgctcagtcatcaactggtatcccagcctgggctgaatcgaggcctgatcctggatcttcttgacaaactgaagaatcccgggaaaggaccctccattggggacattgaggatgaggagcccgagctaccccctgctatccctcggcggatcagatccacccaccgctccagctctctggggatcccagatgcagactgctgtcggcggcacatggagttcaggaagctccgaggaatggagaccagacccccagccaacaccgctcgcctacagcctcctcgagacctcaggagcagcagccccaggaagcaactgtcagagtcgtctgacgatgactatgacgacgtggacatccccacccctgcagaggacacacctcctccacttccccccaagcccaagttccgttctccatcagacgagggtcctgggagcatgggggatgatgggcagctgagcccgggggtgctggtccggtgtgccagtgggcccccaccaaacagcccccgtcctgggcctcccccatccaccagcagcccccacctcaccgcccattcagaaccctcactctggaacccaccctcccgggagcttgacaagcccccacttctgccccccaagaaggaaaagatgaagagaaagggatgtgcccttctcgtaaagttgttcaatggctgccccctccggatccacagcacggccgcctggacacatccctccaccaaggaccagcacctgctcctgggggcagaggaaggcatcttcatcctgaaccggaatgaccaggaggccacgctggaaatgctctttcctagccggactacgtgggtgtactccatcaacaacgttctcatgtctctctcaggaaagaccccccacctgtattctcatagcatccttggcctgctggaacggaaagagaccagagcaggaaaccccatcgctcacattagcccccaccgcctactggcaaggaagaacatggtttccaccaagatccaggacaccaaaggctgccgggcgtgctgtgtggcggagggtgcgagctctgggggcccgttcctgtgcggtgcattggagacgtccgttgtcctgcttcagtggtaccagcccatgaacaaattcctgcttgtccggcaggtgctgttcccactgccgacgcctctgtccgtgttcgcgctgctgaccgggccaggctctgagctgcccgctgtgtgcatcggcgtgagccccgggcggccggggaagtcggtgctcttccacacggtgcgctttggcgcgctctcttgctggctgggcgagatgagcaccgagcacaggggacccgtgcaggtgacccaggtagaggaagatatggtgatggtgttgatggatggctctgtgaagctggtgaccccggaggggtccccagtccggggacttcgcacacctgagatccccatgaccgaagcggtggaggccgtggctatggttggaggtcagcttcaggccttctggaagcatggagtgcaggtgtgggctctaggctcggatcagctgctacaggagctgagagaccctaccctcactttccgtctgcttggctcccccaggctggagtgcagtggcacgatctcgcctcactgcaacctcctcctcccaggttcaagcaattctcctgcctcagcctcccgagtagctgggattacaggcctgtagtggtggagacacgcccagtggatgatcctactgctcccagcaacctctacatccaggaatgagtccctaggggggtgtcaggaactagtccttgcaccccctcccccatagacacactagtggtcatggcatgtcctcatctcccaataaacatgactttagcctctgcaaaaaaa

SEQ ID NO: 32015 - DNA, 3932 bp, Homo Sapiens
  misc_feature (452)..(452): n is a, c, g, or t
  misc_feature (2341)..(2341): n is a, c, g, or t
  misc_feature (2882)..(2882): n is a, c, g, or t
  misc_feature (2889)..(2889): n is a, c, g, or t
  misc_feature (3280)..(3280): n is a, c, g, or t
  misc_feature (3286)..(3286): n is a, c, g, or t
  misc_feature (3300)..(3300): n is a, c, g, or t
  misc_feature (3814)..(3814): n is a, c, g, or t
  misc_feature (3824)..(3824): n is a, c, g, or t
ttctccttctagttgaaacgagccaggggcactggggtctgtggggtgttccccctgtgacactctctctccctcccacctctgcccaggctgaaggagccttggcccaacagtgacccccccttctccttcaagaacgtcatcagcctgacagaagatgtggatgagttccggaataaactgcagggagagcggatctcaggcaacctggatgctcctgagggcggcttcgatgccatcctgcagacagctgtgtgcacggtgggcactgggaagggtgctgccagcctaggccaggggtgagcacttctgggcaagggcctgagctgccccctggcctgctctggtgccaggctcacaggccctgagggaaagcctgggagcctgcaaccccttcaccctgagacaagctcaaactctgtgagtaggtctcagttacaatctgagttcanatgtgcctggagccacggtcccctggcctgagcagtcacagcctggtttcgtatcagctaccaaggcagacctgggctttagcgttctggaatctttagtaccctgaacccaccagctgcccagactccacctgttctgggcatccaaataagccatttcctttgatatgtacatccatttgttcattctgaaaatgacatacccatattactaggttagaaaacaaagagctagccaaggcgtggtggctcacacctgtaatcccagcactttgggaggccgaggcggggggattgcttgaattcaggatttgagaccagcctgggaaacatggcaagaccctgtctctacagaaaacacaaaaattagctgggtgtgatgcacgcctgtggccccagcgccttgcgggggccgcatctccagctcctgtttctcagcgttgtcactcagtcatgtgccgtcagatgcatctttcatgagggcacttgctgtgaatccagtggcttaagcccagccccatgttgggacccgcgttccccgtcctacacgacgccgtgatgcgtgtcagcaggcagcctgctcagtgggcacgccccgccttgccttccccagagggacattggctggcgcccggacagcacccacctgctggtcttctccaccgagtcagccttccactatgaggctgatggcgccaacgtgctggctggcatcatgagccgcaacgatgaacggtgccacctggacaccacgggcacctacacccagtacaggacacaggactacccgtcggtgcccaccctggtgcgcctgctcgccaagcacaacatcatccccatctttgctgtcaccaactactcctatagctactacgaggtgcggggcccaggtcccacgggtgggaggtggtcaaggtagggggtccatggagcttctcagacacctctccctccctccctccctccctccctcccttcctcccttcctccctccctcttttcctccctttccttcctcccttcccaaagcctttagaccccccaaaatgtgggccctagtgggaaggggaggtcatgtgcccatcttccaccccaactcccaagcaggtgggggctaagagggcaggctctgcgacaccacagtaggttccaggccttcagtttccccatcctcaaagtgggaagaatcctagagctgttcaagattcatggagatgcttagcctgagacctggccttctctcccgcagaagcttcacacctatttccctgtctcctcactgggggtgctgcaggaggactcgtccaacatcgtggagctgctggaggaggccttcaatgtgagggcagctcaggctccagagtctgagcccttctggggcagggcaggaagtgggcagggtgggcaagaggtgtcttggatcacggtggagaaatgggtctgggacagaccagtgaggaagggtctctagctatccctgaggccccgaggggccacctgggcctggccctggctcctgcaggctctgtgataccccgcatgatgccagccacacttggaggttggggtggagcacagaggccccccacagagcactgatcaacctccttcctcctttagcggatccgctccaacctggacatccgggccctagacagcccccgaggccttcggacagaggtcacctccaagatgttccagaagacgaggactgggtcctttcacatccggcggggggaagtggtacgcctctgtgggggcagcggggtgggggataggcacagcgccccacaccgagtggaatcgtttaaaacagcggtcaagagcgtggcccctggagtcaggcaggcctgggtgcagatccctgggcctagccgctcggatgagcntaggttgctcctctgcttgttggtttccctcggcatgcaagcgtcgagcccggaggcttgctggggcagtaaatgggttagtgtcacgaagcccagaggccctggccactgtcattgtcgctatgattgtgactgcgctgggaaggagggagtttccagccctgagggaggtgagcaggagctcatttcagggatccagacatctcctaggaacttgggggccgagggccttcaggcatcgatggccccctggtccttggggctgggcctgccttggctgaccacggggcccctgcagggtatataccaggtgcagctgcgggcccttgagcacgtggatgggacgcacgtgtgccagctgccggaggaccagaagggcaacatccatctgaaaccttccttctccgacggcctcaagatggacgcgggcatcatctgtgatgtgtgcacctgcgagctggtacaacgcagccccgcagggcgggaggggagagctgagccaagcacccagggaccatgaggaatgaagcaggactcatgngccccanatcccttgtggggtttcccgaggcacacaggatagcggaagtgtccagtggccccggtcctgctcccccgacgcaccccaccatggtctctctcattccagcaaaaagaggtgcggtcagctcgctgcagcttcaacggagacttcgtgtgcggacagtgtgtgtgcagcgagggctggtgagtggggaagggagttgggcacccaggacaccagtggcccctgatgggaaagctgggctcctgcaggggcctggccctgggtgcaccttgtacacctggctgggggtggggcggcaatcaaagaaacggctaagggcggggcacacccagttgttggtcaaacccaggtcaaagcactttgaaatacagagatatatgggctgtctctanaaagangtgtgaggattganactgggttggctgttggggctggggtctggatcttgggggacaggcacacgaagcttcctttttgctccatgcctttggtattctgagtcctgtgtcatattgcctgatcagaagagagctcgtaaatgcacggcagtaagggctttagcttcaggacactgggcgagcttgccacaacttgaggcagagcagtggggaaaggacactggaaggggtgacatgacagggcactggggtttaggtctcagctcagccacttctgtctgcatgactgggagctgcctcggccctctcagagcctcagtttcctcatctgtaaaatgggacagcaggccaggcgaggtggctcacacctgtaatcccagcactttgggaggccgaggtgggtggatcacctgaggtcagggagttcaagaccagcctggccaacatggtgaaatcccatctctactaaaaatacaaaaaagtagctgggcgtggtggtgcatgcctgtaatcccagctactcgggangctgaagcanaattgcttgcacctaagaagcggagttgcccgtgagctgagatcgcgccactgcactccagcctgggcaagaagacgaaactctgtcctgaaaaaaaataaaataaat

SEQ ID NO: 32016 - DNA, 3851 bp, Homo Sapiens
  misc_feature (940)..(940): n is a, c, g, or t
  misc_feature (1924)..(1924): n is a, c, g, or t
  misc_feature (2515)..(2515): n is a, c, g, or t
  misc_feature (3378)..(3378): n is a, c, g, or t
  misc_feature (3380)..(3380): n is a, c, g, or t
  misc_feature (3576)..(3576): n is a, c, g, or t
aaagtgaacctgaccacagaacctttacagagcacccggcaggatgagagttccacggcgcaaactttgggaaccttctgcccccatccccctctatgcccttgtgtgccatgcttacaccctgctaccacctggatattctggtgtctggggaggcactgtcacccctcttgaccattggcatggggcggggtggctggaagggcttacctgggccagggcagctgtctcaggcctcaccctcacccaccttgtctcctaggcctgcctggcacttctcccgtgctgcaaccgaggtatgggcctggcatcgcaggggcagcaggggctctgactgctctttctctgagctggggtggagggaagctgaacctggaacggcagaggctggaggctctggggtcccacctgaagaggttgggctgtgcgggtctagggaggggtgccgtgctgaggaccccatcctgcaggtcacatggtgggctttaaggaagaccactacatgctgcgggagaacctgatggcctctgaccacttggacacgcccatgctgcgcagcgggaacctcaagggccgtgacgtggtccgctggaaggtcaccaacaacatgcagcggcctggctttgccactcatgccgccagcatcaaccccacagagctgggtgagggcggggctgggcgccacagctctgggcagtgcccttcgggccctgtgttccagatgtgggatcacagcatgcctcttctctgggtgtggggtgcaggcacagggctcagccaccttttgccctgtgctgatggtgctatgaacctcatgcctcggtgtgcgtggcctgctggccaggcatcccctgatcctagcatggttgctggagggatgctctgtggtgcctgtcatgcaggggggtgaccacctccatctcaccccctgcccaccgcnttttccttagtgccctacgggctgtccttgcgcctggcccgcctttgcaccgagaacctgctgaagcctgacactcgggagtgcgcccagctgcgccaggaggtggaggagaacgtaaggacccaggaactaggcctggccggagatgtgggtatgagggcgggtgaggtgggcagggcagagcgaatgcggtcgtggtaccgagattcattaactaggggagaggggtctctctggacctgtgcctggcagggggcatcctgggatctgtttccagagggcagaaggccagagcctgggcccaggatgctgccccacggggcatgccccagccaaccctgaggatctctgggtacagaggctgcctggctccctgggtccccagcctgagggcttgccacggggtggcctaggcccagcctcacgcccctcccttgcctggcagctgaacgaggtctacaggcagatctccggtgtacacaagctccagcagaccaagttccggtgagtcccggggtgcccgggttgggtgggggagccgctcctaccgggactccaggagccgaagcccccaggccgatcaggcctccacttcagggctatctagctcacagcgccctctttgtccccacaggcagcagcccaatgccgggaaaaagtgagtagaagactcgtgggtgagagggcccccacttcctgcccgcctgtccccagcccagccactgcctcgtccgtccctactccatctccatcccataggaagggagggtcagatgtgtccgtcaggttcggaccttcattcgttcctttgaccatttcttcaacaaatgctaatgtgaagtgcttgctatgaagtggcccctggactagagcaggcaaaagcaaatcaacccagtccctgccctcatataggtgactgtccagccccccacccggtaccagcgatagcaggtacccatctccatccgctccagtgtccaagancctgatcttgggttgcacctctggggaccaggcaggttaccgagtaggatgggccagcaggtcacacaccttttttcccaggtcctacatcgagtcctggcccttcatgggggagagagagggagtgaggagggggtcttgatgcagggacagaagagctaggaatctcagcacatgaccatcagtaagaaccgttggctgtgcgtggtggctcacacctgtaatcccagcactttgggaggctgaggcgggtggatcacctcaggtcaggagtttaagactagccaggccaacatggtgaaaccccacctctactaaaaatacaaaaattagccaggtgtgttggtgggcacctgtaatcccagctacttgggaggctgaggcaggagaatcccttgaacctgggaggcagaggttgcagtgagccgagattgtgccactgcactccagcctgggcgactgagtgagaatccgtcttgaaaaaaaaaaaaaaaagaatggctgaccagcatttcttatcctgctacgggccaagcattgtcctaagggctttccgtgtgtggtcatcttatccaaccctctcgtcaagcntgtgaggtagagatcactgctgttcccattttgcagatgaggaagctgaggctcaaaagggttaagtgacttgcccaaggttacccagctatcgagaactagaaccagggctagggccgcggcagcctggcctgagcacacacacccttagcatctttgctgtccagcccttgatgaggtgggcagagaagcccatttcacagaggaggacgctgaggacagggaggcgccatggctgggctgaggctgcagggtaaagggtatggggctggcataggcctggagcactgcctgcctctgaagaccctgcacttcttgctgtcttacatcctggcccctgaaggggagaagacaggcaggagggacagggcagcaggtgccagcctgacccctccgctgcctgaaccttccaccctcgacccaggcaagaccacaccattgtggacacagtgctgatggcgccccgctcggccaagccggccctgctgaagcttacagagaagcaggtggaacagagggccttccacgacctcaaggtggcccccggctactacaccctcactgcagaccagggtaggagggcgggtccgctgtgccactgcctcgcacctcccgcctgtgtggccctgtgacccacctctgaccacctccgaacccccacccagacgcccggggcatggtggagttccaggagggcgtggagctggtggacgtacgggtgcccctctttatccggcctgaggatgacgacgagaagcagctgctggtggaggccatcgacgtgcccgcaggcactgccaccctcggccgccgcctggtaaacatcaccatcatcaaggagcaaggtgggtctgggtgggganantggggaaagcaaacgggggctcgggggcactggttcctcctgcttaagtggaattgcgacctggccacgtggcctgggctagtcacttaacctctgcaagccttggtttctccatctgtaaaatgggtaagggctcttttacggaatgcgtggctgttcacctcgccacagtgcctgcctggtggtgagcgctcantaaatggaagcttctgttgcatcctcataagggccagccccttgctcctctctatctaaaaaaagggttggccaaggcatcacaccgtggacatctgacccctcctcccacctgtgccggaagccacaggcctcaggcctgttcctgctctcctccagccctggggctgaaggctccatctctggtcctgcccgtgactggcctccctcctctgcctggcccttccaagatgtctgctggacactttgttccaaaacacttttttttttcttggt

SEQ ID NO: 32017 - DNA, 5190 bp, Homo Sapiens
ggaattcccgcgaggccggggtgggccaggctgtggggacgacgggctgcgacgatggccgcagcggcgggcggcggcgggccggggacagcggtaggcgccacgggcttcggggattcggcggcagccgcaggcctagctgtttatcgacggaaggatgggggcccggccaccaagttttgggagagcccggagacggtgtcccagctggattcggtgcgggtctggctgggcaagcactacaagaagtatgttcatgcggatgctcctaccaataaaacactggctgggctggtggtgcagcttcttcagttccaggaagatgcctttgggaagcatgtcaccaacccggccttcaccaaactccctgcaaagtgtttcatggatttcaaagctggaggcgccttatgtcacattcttggggctgcttacaagtataaaaatgaacagggatggcggaggtttgacctacagaacccatctcgaatggatcgtaatgtggaaatgtttatgaacattgaaaaaacattggtgcagaacaattgtttgaccagacccaacatctacctcattccagacattgatctgaagttggctaacaaattgaaagatatcatcaaacgacatcagggaacatttacggatgagaagtcaaaagcttcccaccacatttacccatattcttcctcacaagacgatgaagaatggttgagaccggtgatgagaaaagagaagcaagtgttagtgcattggggcttttacccagacagctatgatacttgggtccatagtaatgatgttgatgctgaaattgaagatccaccaattccagaaaaaccatggaaggttcatgtgaaatggattttggacactgatattttcaatgaatggatgaatgaggaggattatgaggtggatgaaaataggaagcctgtgagttttcgtcagcggatttcaaccaagaatgaagagccagtcagaagtccagaaagaagagatagaaaagcatcagctaatgctcgaaagaggaaacattcgccttcgcctccccctccgacaccaacagaatcacggaagaagagtgggaagaaaggccaagctagcctttatgggaagcgcagaagtcagaaagaggaagatgagcaagaagatctaaccaaggatatggaagacccaacacctgtacccaatatagaagaagtagtacttcccaaaaatgtgaacctaaagaaagatagtgaaaatacacctgttaaaggaggaactgtagcggatctagatgagcaggatgaagaaacagtcacagcaggaggaaaggaagatgaagatcctgccaaaggtgatcagagtcgatcagttgaccttggggaagataatgtgacagagcagaccaatcacattattattcctagttatgcatcatggtttgattataactgtattcatgtgattgaacggcgtgctcttcctgagttcttcaatggaaaaaacaaatccaagactccagaaatatacttggcatatcgaaattttatgattgacagctatcgtctaaacccccaagagtatttaactagcactgcttgtcggaggaacttgactggagatgtgtgtgctgtgatgagggtccatgccgggggagagcagtggggactcgttaattaccaagttgacccggaaagtagacccatggcaatgggacctcctcctactcctcattttaatgtattagctgatacccctctggcttgtgcctctgatcttcgatcacctcaggttcctgctgctcaacagatgctaaattttcctgagaaaaacaaggaaaaaccagttgatttgcagaactttggtctccgtactgacatttactccaagaaaacattagcaaagagtaaaggtgctagtgctggaagaggatggactgaacaggagacccttctactcctggaggccctggagatgtacaaggatgattggaacaaagtgtcggaacatgttggaagtcgtactcaggatgaatgcatcctccactttttgagacttcccattgaggacccataccttgagaattcagatgcttcccttgggcctttggcctaccagcctgtccccttcagtcagtcaggaaatccagttatgagtactgttgcttttttggcatctgtggtggaccctcgcgtggcatctgctgcagcaaaagcggctttggaggagttttctcgggtccgggaggaggtaccactggaattggttgaagctcatgtcaagaaagtacaagaagcagcacgagcctctgggaaagtggatcccacctacggtctggagagcagctgcattgcaggcacagggcccgatgagccagagaagcttgaaggagctgaagaggaaaaaatggaagccgaccctgatggtcagcagcctgaaaaggcagaaaataaagtggaaaatgaaacggatgaaggtgataaagcacaagatggagaaaatgaaaaaaatagtgaaaaggaacaggatagtgaagtgagtgaggataccaaatcagaagaaaaggagactgaagagaacaaagaactcagtagtacatgtaaagaaagagaaagtgatactgggaagaagaaagtagaacatgaaatttccgaaggaaatgttgccacagccgcagcagctgctcttgcctcagcggctaccaaagccaagcacctggctgcagtggaagaaagaaagatcaagtccctggtagctctcttggttgagacacaaatgaagaaactagagatcaaacttcgacattttgaagggctggaaactatcatggacagagagaaagaagctctagaacaacagaggcagcagttgcttactgaacgccaaaacttccacatggaacagctgaagtatgctgaattacgagcacgacagcaaatggaacagcagcagcatggccagaaccctcaacaggcacaccagcactcaggaggacctggcctggccccacttggagcagcagggcaccctggcatgatgcctcatcaacagccccctccctaccctctgatgcaccaccagatgccaccacctcatccaccccagccaggtcagataccaggcccaggttccatgatgcccgggcagcacatgccaggccgcatgattcccactgttgcagccaacatccacccctctgggagtggccctacccctcctggcatgccaccaatgccaggaaacatcttaggaccccgggtacccctgacagcacctaacggcatgtatccccctccaccacagcagcagccaccgccaccaccacctgcagatggggtccctccgcctcctgctcctggcccgccagcctcagctgctccttagcctggaagatgcagggaacctccacgcccaccaccatgagctggagtggggatgacaagacttgtgttcctcaactttcttgggtttctttcaggatttttcttctcacagctccaagcacgtgtcccgtgcctccccactcctcttaccacccctctctctgacactttttgtgttgggtcctcagccaacactcaaggggaaacctgtagtgacagtgtgccctggtcatccttaaaataacctgcatctcccctgtcctggtgtgggagtaagctgacagtttctctgcaggtcctgtcaactttagcatgctatgtctttaccattttctctcttccagttttttgctttgtcttatgcttctatggataatgctatataatcattatctttttatctttctgttattattgttttaaaggagagcatcctaagttaataggaaccaaaaaataatgatgggcagaagggggggaatagccacaggggacaaaccttaaggcattataagtgaccttatttctgcttttctgagctaagaatggtgctgatggtaaagtttgagacttttgccacacacaaatttgtgaaaattaaacgagatgtggaaggagaacctcagtgattttattccctagtgaggcctctgagggcctccacactgcctggcagaacataccactgaactagtatgtgctagaggagggcacaaacatccgctccttccctaggcctgctggctctggttttctatgcagatgattcattggattgggggtgagtgttttgtttttctgggggcagtgtgagctttgagggttggaatattgggaggcattccttagtttcctcaactagcctggaaagttaggagtctagggtaattaccccccaatgagtctagcctactattcactgctttgtgtgcatttttttctccctctttaaaaaaccctttaaaagaaaaaaaaaagtagatagtgctaaatatttagctcatgaaacttggttaggatggctgggggtacaagtccccaaactacctcttgttacagtagccagggagtggaatttcgtcaaccggtacttttaaggttaggatgggacgggaaaagtgaagcaggatattagctccttataccttctcccttccatttctgagatctcacattccatctatcacagggttttcaaagagatgctgagggtaacaaggaactcacttggcagtcagagcatcatgctttgaggtttggggtgctcaggctgggagggtagaatgccattccagaggacaagccacaaaaatgccttaatttgagctcgtatttacccctgctgataagtgacttgagagttcccggttttttcctcttgtccttccctcccttctgtccttccatgtgtggggaaagggtgtttttggtagagcttggtttccaaagcgcctggctttctcacttcacattctcaagtggcagtttcattatttagaatgcaaggtggacatcttttggatatctttttctatatatttctaaagctttacatatgagagggtatagggaggtgtttataaaacacttgagaacttttttccttaatatcagaaagcaaaaaaataaaaccacaattgagatttgcctttcaaaccctcaggtttgcctctaaccaggtgtccctggtcaccatcagagtactggaatacgggaaccgaggaggaccttggtccttttgtttttgttctggactcttgggagtggaaatgggatgagtttatccactggagcttaagtcccatgcatttgctccagaaag

SEQ ID NO: 32018 - DNA, 3590 bp, Homo Sapiens
tcttcagtatatgaattaccctttcattcagcctttagaaattatattttagcctttatttttaacctgccaacatactttaagtagggattaatatttaagtgaactattgtgggtttttttgaatgttggttttaatacttgatttaatcaccactcaaaaatgttttgatggtcttaaggaacatctctgctttcactctttagaaataatggtcattcgggctgggcgcagcggctcacgcctgtaatcccagcactttgggaggccgaggtgagcggatcacaaggtcaggagttcgagaccagcctggccaagagaccagcctggccagtatggtgaaaccctgtctctactaaaaatacaaaaattagccgagcatggtggcgggcacctgtaatcccagctactcgagaggctgaggcaggagaatctcttgaacctgggaggtgaaggttgctgtgggccaaaatcatgccattgcactccagcctgggtgacaagagcgaaactccatctcaaaaaaaaaaaaaaaaaacagaaacttatttggatttttcctagtaagatcactcagtgttactaaataatgaagttgttatggagaacaaatttcaaagacacagttagtgtagttactatttttttaagtgtgtattaaaacttctcattctattctctttatcttttaagcccttctgtactgtccatgtatgttatctttctgtgataacttcatagattgccttctagttcatgaattctcttgtcagatgtatataatctcttttaccctatccattgggcttcttctttcagaaattgtttttcatttctaattatgcatcatttttcagatctctgtttcttgatgtcatttttaatgtttttttaatgttttttatgtcactaattattttaaatgtctgtacctgatagacactgtaatagttctattaaatttagttcctgctgtttatatctgttgatttttgtatttgataggctgttcatccagttttgtctttttgaaaagtgagtttattttcagcaaggctttatctatgggaatcttgagtgtctgtttatgtcatattcccagggctgttgctgcacacaagcccattcttattttaatttcttggctttagggtttccatacctgaagtgtagcataaatactgataggagatttcccaggccaaggcaaacacacttcctcctcatctccttgtgctagtgggcagaatatttgattgatgcctttttcactgagagtataagcttccatgtgtcccacctttatggcaggggtggaaggaggtacatttaattcccactgcctgcctttggcaagccctgggttctttgctccccatatagatgtctaagctaaaagccgtgggttaatgagactggcaaattgttccaggacagctacagcatcagctcacatattcacctctctggtttttcattcccctcatttttttctgagacagagtcttgctctgtcacccaggctggagtgcagtggcatgatctcagctcactgaaacctctgcctcctgggttcaagcaattctcctgcctcagcctcccgagtagctgggactacaggcgtgtgccaacacgcccggctaattttttgtatttttattagagacggagtttcaccgtgttagccaggatggtctcgatcgcttgacctcgtgatccaccctcctcggcctcccaaagtgctgggattacaggtgtgagccaccgcgcccggcctcattcccctcatttttgaccgtaaggatttcccctttcttgtaagttctgctatgtatttaaaagaatgttttctacattttatccagcatttctctgtgttctgttggaagggaagggcttaggtatctagtttgatacataggtagaagtggaacatttctctgtcccccagctgtcatcatataagataaacatcagataaaaagccacctgaaagtaaaactactgactcgtgtattagtgagtataatctcttctccatccttaggaaaatgttcatcccagctgcggagattaacaaatgggtgattgagctttctcctcgtatttggaccttgaaggttatataaatttttttcttatgaagagttggcatttctttttattgccaatggcaggcactcattcatatttgatctcctcaccttcccctcccctaaaaccaatctccagaactttttggactataaatttcttggtttgacttctggagaactgttcagaatattactttgcatttcaaattacaaacttaccttggtgtatctttttcttacaagctgcctaaatgaatatttggtatatattggtagttttattactatagtaaatcaaggaaatgcagtaaacttaaaatgtctttaagaaagccctgaaatcttcatgggtgaaattagaaattatcaactagataatagtatagataaatgaatttgtagctaattcttgctagttgttgcatccagagagctttgaataacatcattaatctactctttagccttgcatggtatgctatgaggctcctgttctgttcaagtattctaatcaatggctttgaaaagtttatcaaatttacatacagatcacaagcctaggagaaataactaattcacagatgacagaattaagattataaaagattttttttttgtaattttagtagagacagggttgccattgtattccagccttggcgacagagcaagactctgcctcaaaaaaaaaaaaaaaaaggttttggcaagctggaactctttctgcaaatgactaagatagaaaactgccaaggacaaatgaggagtagttagattttgaaaatattaatcatagaatagttgttgtatgctaagtcactgacccatattatgtacagcatttctgatctttactttgcaagattagtgatactatcccaatacactgctggagaaatcagaatttggagaaataagttgtccaaggcaagaagatagtaaattataagtacaagtgtaatatggacagtatctaacttgaaaagatttcaggcgaaaagaatctggggtttgccagtcagttgctcaaaaggtcaatgaaaaccaaatagtgaagctatcagagaagctaataaattatagactgcttgaacagttgtgtccagattaagggagataatagctttcccaccctactttgtgcaggtcatacctccccaaagtgtttacctaatcagtaggttcacaaactcttggtcattatagtatatgcctaaaatgtatgcacttaggaatgctaaaaatttaaatatggtctaaagcaaataaaagcaaagaggaaaaactttggacatcgtaaagactagaatagtcttttaaaaagaaagccagtatattggtttgaaatatagagatgtgtcccaatttcaagtattttaattgcaccttaatgaaattatctattttctatagattttagtactattgaatgtattactttactgttacctgaatttattataaagtgtttttgaataaataattctaaaagc

SEQ ID NO: 32019 - DNA, 5236 bp, Homo Sapiens
  misc_feature (4687)..(4687): n is a, c, g, or t
cgagcgcggcgcccttgagctgcaccgcggcgcaggtttgcgagccgacttgtcagccggccaagaaaaggaagctccgtcccttcccgctcacccggcttccccaccccttgtactctaaactctgcacagggcgagcggcgcggccactgatgcgccgaggaggagcgagccgccgccgggcagcggcgtgccctcgggggagagggcgccggataagagcggcggcgcggcggcgatggcgcggcgcgcgatggcagctgcttagcccggcgggcgcggagcagccccgagctgtggctggccaggcggtgcggctgggcgggggacgccgccgccgttgctgcccggcccggagagatgagcacggaggcggacgaaggcatcactttctctgtgccacccttcgccccctcgggcttctgcaccatccccgagggcggcatctgcaggaggggaggagcggcggcggtgggcgagggcgaggagcaccagctgccaccgccgccgccgggcagcttctggaacgtggagagcgccgctgcccctggcatcggttgtccggcggccacctcctcgagcagtgccacccgaggccggggcagctctgttggcgggggcagccgacggaccacggtggcatatgtgatcaacgaagcgagccaagggcaactggtggtggccgagagcgaggccctgcagagcttgcgggaggcgtgcgagacagtgggcgccaccctggaaaccctgcattttgggaaactcgactttggagaaaccaccgtgctggaccgcttttacaatgcagatattgcggtggtggagatgagcgatgccttccggcagccgtccttgttttaccaccttggggtgagagaaagtttcagcatggccaacaacatcatcctctactgtgatactaactcggactctctgcagtcactgaaggaaataatttgccagaagaatactatgtgcactgggaactacacctttgttccttacatgataactccacataacaaagtctactgctgtgacagcagcttcatgaaggggttgacagagctcatgcaaccgaacttcgagctgcttcttggacccatctgcttacctcttgtggatcgttttattcaacttttgaaggtggcacaagcaagttctagccagtacttccgggaatctatactcaatgacatcaggaaagctcgtaatttatacactggtaaagaattggcagctgagttggcaagaattcggcagcgagtagataatatcgaagtcttgacagcagatattgtcataaatctgttactttcctacagagatatccaggactatgattctattgtgaagctggtagagactttagaaaaactgccaacctttgatttggcctcccatcaccatgtgaagtttcattatgcatttgcactgaataggagaaatctccctggtgacagagcaaaagctcttgatattatgattcccatggtgcaaagcgaaggacaagttgcttcagatatgtattgcctagttggtcgaatctacaaagatatgtttttggactctaatttcacggacactgaaagcagagaccatggagcttcttggttcaaaaaggcatttgaatctgagccaacactacagtcaggaattaattatgcggtcctcctcctggcagctggacaccagtttgaatcttcctttgagctccggaaagttggggtgaagctaagtagtcttcttggtaaaaagggaaacttggaaaaactccagagctactgggaagttggattttttctgggggccagcgtcctagccaatgaccacatgagagtcattcaagcatctgaaaagctttttaaactgaagacaccagcatggtacctcaagtctattgtagagacaattttaatatataagcattttgtgaaactgaccacagaacagcctgtggccaagcaagaacttgtggacttttggatggatttcctggtcgaggccacaaagacagatgttactgtggttaggtttccagtattaatattagaaccaaccaaaatctatcaaccttcttatttgtctatcaacaatgaagttgaggaaaagacaatctctatttggcacgtgcttcctgatgacaagaaaggtatacatgagtggaattttagtgcctcttctgtcaggggagtgagtatttctaaatttgaagaaagatgctgctttctttatgtgcttcacaattctgatgatttccaaatctatttctgtacagaacttcattgtaaaaagttttttgagatggtgaacaccattaccgaagagaaggggagaagcacagaggaaggagactgtgaaagtgacttgctggagtatgactatgaatatgatgaaaatggtgacagagtcgttttaggaaaaggcacttatgggatagtctacgcaggtcgggacttgagcaaccaagtcagaattgctattaaggaaatcccagagagagacagcagatactctcagcccctgcatgaagaaatagcattgcataaacacctgaagcacaaaaatattgtccagtatctgggctctttcagtgagaatggtttcattaaaatcttcatggagcaggtccctggaggaagtctttctgctctccttcgttccaaatggggtccattaaaagacaatgagcaaacaattggcttttatacaaagcaaatactggaaggattaaaatatctccatgacaatcagatagttcaccgggacataaagggtgacaatgtgttgattaatacctacagtggtgttctcaagatctctgacttcggaacatcaaagaggcttgctggcataaacccctgtactgaaacttttactggtaccctccagtatatggcaccagaaataatagataaaggaccaagaggctacggaaaagcagcagacatctggtctctgggctgtacaatcattgaaatggccacaggaaaacccccattttatgaactgggagaaccacaagcagctatgttcaaggtgggaatgtttaaagtccaccctgagatcccagagtccatgtctgcagaggccaaggcattcatactgaaatgttttgaaccagatcctgacaagagagcctgtgctaacgacttgcttgttgatgagtttttaaaagtttcaagcaaaaagaaaaagacacaacctaagctttcagctctttcagctggatcaaatgaatatctcaggagtatatccttgccggtacctgtgctggtggaggacaccagcagcagcagtgagtacggctcagtttcacccgacacggagttgaaagtggaccccttctctttcaaaacaagagccaagtcctgcggagaaagagatgtcaagggaattcggacactctttttgggcattccagatgagaattttgaagatcacagtgctcctccttcccctgaagaaaaagattctggattcttcatgctgaggaaggacagtgagaggcgagctacccttcacaggatcctgacggaagaccaagacaaaattgtgagaaacctaatggaatctttagctcagggggctgaagaaccgaaactaaaatgggaacacatcacaaccctcattgcaagcctcagagaatttgtgagatccactgaccgaaaaatcatagccaccacactgtcaaagctgaaactggagctggacttcgacagccatggcattagccaagtccaggtggtactctttggttttcaagatgctgtcaataaagttcttcggaatcataacatcaagccgcactggatgtttgccttagacagtatcattcggaaggcggtacagacagccattaccatcctggttccagaactaaggccacatttcagccttgcatctgagagtgatactgctgatcaagaagacttggatgtagaagatgaccatgaggaacagccttcaaatcaaactgtccgaagacctcaggctgtcattgaagatgctgtggctacctcaggcgtgagcacgctcagttctactgtgtctcatgattcccagagtgctcaccggtcactgaatgtacagcttggaaggatgaaaatagaaaccaatagattactggaagaattggttcggaaagagaaagaattacaagcactccttcatcgagctattgaagaaaaagaccaagaaattaaacacctgaagcttaagtcccaacccatagaaattcctgaattgcctgtatttcatctaaattcttctggcacaaatactgaagattctgaacttaccgactggctgagagtgaatggagctgatgaagacactataagccggtttttggctgaagattatacactattggatgttctctactatgttacacgtgatgacttaaaatgcttgagactaaggggagggatgctgtgcacactgtggaaggctatcattgactttcgaaacaaacagacttgactgttgctcaatctaatcttcgatggaaattctaaaaattaatacagagctgatcttcttgggggtgggaaaatcgaagggagargagaaaggcgctgcmctttaaatccagtatttgtttactcatgttaaaaaaaaaaaaaacagacaaaacacactgaaatttcctaactacatctatttctataatttttaaggactnttcataaggactcttaaaataatcctgaacattagaaccctaatgttcaggaagattttaatctaagcatttttatggaaatatttttaatgcagcagctattgcacttcagccaaatgtttatttcacacaaaacggatgtaacattcatgtgatcgtgcacccactggacaaaccaaaatgtgaccataactgtttaggttctgtgtgtttgtaatatgtctaataatctggagtagaaatgcgtaatttcaattactgtataaagtttatgtttttttaagtgtgcagaatctgagagcaatggtttttacttctctgtgttaattgtaatattgactctattttgtaacttaagtttctgacctgtcgtacatttgtttgagtcgtttatgtactactgaactgtaccagttgcacatgcttgaactgtagtaatgttagcttgttctaaagctatccattgtgtcatatttactctaaaaattaaagagactctcaacaaaaaaaaaaaaaaaaaaaaaccatggtacccggatcctcgaattc

SEQ ID NO: 32020 - DNA, 13449 bp, Homo Sapiens
  misc_feature (11967)..(11967): n is a, c, g, or t
  misc_feature (12008)..(12008): n is a, c, g, or t
  misc_feature (12013)..(12013): n is a, c, g, or t
gcggccgcgtcgacgcggcggcggcagcggcgtcggctcggggttctccgggagagggggagtgcgcggcggccgcagctgccacaaaccaggtgaagctttgttctaagaatatttgtttcatctagtttatgagtccaaatgatatagactgtaaatgtcacagcagtggtgaaagactgctcggtcatgagcaccgacagtaactcactggcacgtgaatttctgaccgatgtcaaccggctttgcaatgcagtggtccagagggtggaggccagggaggaagaagaggaggagacgcacatggcaacccttggacagtaccttgtccatggtcgaggatttctattacttaccaagctaaattctataattgatcaggcattgacatgtagagaagaactcctgactcttcttctgtctctccttccactggtatggaagatacctgtccaagaagaaaaggcaacagattttaacctaccgctctcagcagatataatcctgaccaaagaaaagaactcaagttcacaaagatccactcaggaaaaattacatttagaaggaagtgccctgtctagtcaggtttctgcaaaagtaaatgtttttcgaaaaagcagacgacagcgtaaaattacccatcgctattctgtaagagatgcaagaaagacacagctctccacctcagattcagaagccaattcagatgaaaaaggcatagcaatgaataagcatagaaggccccatctgctgcatcattttttaacatcgtttcctaaacaagaccaccccaaagctaaacttgaccgcttagcaaccaaagaacagactcctccagatgctatggctttggaaaattccagagagattattccaagacaggggtcaaacactgacattttaagtgagccagctgccttgtctgttatcagtaacatgaacaattctccatttgacttatgtcatgttttgttatctttattagaaaaagtttgtaagtttgacgttaccttgaatcataattctcctttagcagccagtgtagtgcccacactaactgaattcctagcaggctttggggactgctgcagtctgagcgacaacttggagagtcgagtagtttctgcaggttggaccgaagaaccggtggctttgattcaaaggatgctctttcgaacagtgttgcatcttctgtcagtagatgttagtactgcagagatgatgccagaaaatcttaggaaaaatttaactgaattgcttagagcagctttaaaaattagaatatgcctagaaaagcagcctgacccttttgcaccaagacaaaagaaaacactgcaggaggttcaggaagattttgtgttttcaaagtatcgtcatagagcccttcttttacctgagcttttggaaggagttcttcagattctgatctgttgtcttcaaagtgcagcttcaaatcccttctacttcagtcaagccatggatttggttcaagaattcattcagcatcatggatttaatttatttgaaacagcagttcttcaaatggaatggctggttttaagagatggagttcctcccgaggcctcagagcatttgaaagccctaataaatagtgtgatgaaaataatgagcactgtcaaaaaagtgaaatcagagcaacttcatcattcgatgtgtacaagaaaaaggcacagacgatgtgaatattctcattttatgcatcatcaccgagatctctcaggtcttctggtttcggcttttaaaaaccaggtttccaaaaacccatttgaagagactgcagatggagatgtttattatcctgagcggtgctgttgcattgcagtgtgtgcccatcagtgcttgcgcttactacagcaggcttccttgagcagcacttgtgtccagatcctatcgggtgttcataacattggaatatgctgttgtatggatcccaaatctgtaatcattcctttgctccatgcttttaaattgccagcactgaaaaattttcagcagcatatattgaatatccttaacaaacttattttggatcagttaggaggagcagagatatcaccaaaaattaaaaaagcagcttgtaatatttgtactgttgactctgaccaactagcccaattagaagagacactgcagggaaacttatgtgatgctgaactctcctcaagtttatccagtccttcttacagatttcaagggatcctgcccagcagtggatctgaagatttgttgtggaaatgggatgctttaaaggcttatcagaactttgtttttgaagaagacagattacatagtatacagattgcaaatcacatttgcaatttaatccagaaaggcaatatagttgttcagtggaaattatataattacatatttaatcctgtgctccaaagaggagttgaattagcacatcattgtcaacacctaagcgttacttcagctcaaagtcatgtatgtagccatcataaccagtgcttgcctcaggacgtgcttcagatttatgtaaaaactctgcctatcctgcttaaatccagggtaataagagatttgtttttgagttgtaatggagtaagtcaaataatcgaattaaattgcttaaatggtattcgaagtcattctctaaaagcatttgaaactctgataatcagcctaggggagcaacagaaagatgcctcagttccagatattgatgggatagacattgaacagaaggagttgtcctctgtacatgtgggtacttcttttcatcatcagcaagcttattcagattctcctcagagtctcagcaaattttatgctggcctcaaagaagcttatccaaagagacggaagactgttaaccaagatgttcatatcaacacaataaacctattcctctgtgtggcttttttatgcgtaagtaaagaagcagagtctgacagggagtcggccaatgactcagaagatacttctggctatgacagcacagccagcgagcctttaagtcatatgctgccatgtatatctctcgagagccttgtcttgccttctcctgaacatatgcaccaagcagcagacatttggtctatgtgtcgttggatctacatgttgagttcagtgttccagaaacagttttataggcttggtggtttccgagtatgccataagttaatatttatgataatacagaaactgttcagaagtcacaaagaggagcaaggaaaaaaggagggagatacaagtgtaaatgaaaaccaggatttaaacagaatttctcaacctaagagaactatgaaggaagatttattatctttggctataaaaagtgaccccataccatcagaactaggtagtctaaaaaagagtgctgacagtttaggtaaattagagttacagcatatttcttccataaatgtggaagaagtttcagctactgaagccgctcccgaggaagcaaagctatttacaagtcaagaaagtgagacctcacttcaaagtatacgacttttggaagcccttctggccatttgtcttcatggtgccagaactagtcaacagaagatggaattggagttacctaatcagaacttgtctgtggaaagtatattatttgaaatgagggaccatctttcccagtcaaaggtgattgaaacacaactagcaaagccgttatttgatgccctgcttcgagttgccctcgggaattattcagcagattttgaacataatgatgctatgactgagaagagtcatcaatctgcagaagaattgtcatcccagcctggtgatttttcagaagaagctgaggattctcagtgttgtagttttaaacttttagttgaagaagaaggttacgaagcagatagtgaaagcaatcctgaagatggcgaaacccaggatgatggggtagacttaaagtctgaaacagaaggtttcagtgcatcaagcagtccaaatgacttactcgaaaacctcactcaaggggaaataatttatcctgagatttgtatgctggaattaaatttgctttctgctagtaaagccaaacttgatgtgcttgcccatgtatttgagagttttttgaaaattattaggcagaaagaaaagaatgtttttctgctcatgcaacagggaactgtgaaaaatcttttaggagggttcttgagtattttaacacaggatgattctgattttcaagcatgccagagagtattggtggatcttttggtatctttgatgagttcaagaacatgttcagaagagctaacccttcttttgagaatatttctggagaaatctccttgtacaaaaattcttcttctgggtattctgaaaattattgaaagtgatactactatgagcccttcacagtatctaaccttccctttactgcacgctccaaatttaagcaacggtgtttcatcacaaaagtatcctgggattttaaacagtaaggccatgggtttattgagaagagcacgagtttcacggagcaagaaagaggctgatagagagagttttccccatcggctgctttcatcttggcacatagccccagtccacctgccgttgctggggcaaaactgctggccacacctatcagaaggtttcagtgtttccctgtggtttaatgtggagtgtatccatgaagctgagagtactacagaaaaaggaaagaagataaagaaaagaaacaaatcattaattttaccagatagcagttttgatggtacagagagcgacagaccagaaggtgcagagtacataaatcctggtgaaagactcatagaagaaggatgtattcatataatttcactgggatccaaagcgttgatgatccaagtgtgggctgatccccacaatgccactcttatctttcgtgtgtgcatggattcaaatgatgacatgaaagctgttttactagcacaggttgaatcacaggagaatattttcctcccaagcaaatggcaacatttagtactcacctacttacagcagccccaagggaaaaggaggattcatgggaaaatctccatatgggtctctggacagaggaagcctgatgttactttggattttatgcttccaagaaaaacaagtttgtcatctgatagcaataaaacattttgcatgattggccattgtttatcatcccaagaagagtttttgcagttggctggaaaatgggacctgggaaatttgcttctcttcaacggagctaaggttggttcacaagaggccttttatctgtatgcttgtggacccaaccatacatctgtaatgccatgtaagtatggcaagccagtcaatgactactccaaatatattaataaagaaattttgcgatgtgaacaaatcagagaactttttatgaccaagaaagatgtggatattggtctcttaattgaaagtctttcagttgtttatacaacttactgtcctgctcagtataccatctatgaaccagtgattagacttaaaggtcaaatgaaaacccaactctctcaaagacccttcagctcaaaagaagttcagagcatcttattagaacctcatcatctaaagaatctccaacctactgaatataaaactattcaaggcattctgcacgaaattggtggaactggcatatttgtttttctctttgccagggttgttgaactcagtagctgtgaagaaactcaagcattagcactgcgagttatactctcattaattaaatacaaccaacaaagagtacatgaattagaaaattgtaatggactttctatgattcatcaggtgttgatcaaacaaaaatgcattgttgggttttacattttgaagacccttcttgaaggatgctgtggtgaagatattatttatatgaatgagaatggagagtttaagttggatgtagactctaatgctataatccaagatgttaagctgttagaggaactattgcttgactggaagatatggagtaaagcagagcaaggtgtttgggaaactttgctagcagctctagaagtcctcatcagagcagatcaccaccagcagatgtttaatattaagcagttattgaaagctcaagtggttcatcactttctactgacttgtcaggttttgcaggaatacaaagaggggcaactcacacccatgccccgagaggtttgtagatcatttgtgaaaattatagcagaagtccttggatctcctccagatttggaattattgacaattatcttcaatttccttttagcagttcaccctcctactaatacttacgtttgtcacaatcccacgaacttctacttttctttgcacatagatggcaagatctttcaggagaaagtgcggtcaatcatgtacctgaggcattccagcagtggaggaaggtcccttatgagccctggatttatggtaataagcccatctggttttactgcttcaccatatgaaggagagaattcctctaatattattccacaacagatggccgcccatatgctgcgttctagaagcctaccagcattccctacttcttcactactaacgcaatcacaaaaactgactggaagtttgggttgtagtatcgacaggttacaaaatattgcagatacttatgttgccacccaatcaaagaaacaaaattctttggggagttccgacacactgaaaaaaggcaaagaggacgcattcatcagtagctgtgagtctgcaaaaactgtttgtgaaatggaagctgtcctctcagcccaggtctctgtcagtgatgtcccaaagggagtgctgggatttccagtggtcaaagcagatcataaacagttgggagcagaacccaggtcagaagatgacagtcctggggatgagtcctgcccacgccgacctgattacctaaagggattggcctccttccagcgaagccacagcactattgcaagccttgggctagcttttccttcacagaacggatctgcagctgttggccgttggccaagtcttgttgatagaaacactgatgattgggaaaactttgcctattctcttggttatgagccaaattacaaccgaactgcaagtgctcacagtgtaactgaagactgtttggtacctatatgctgtggattatatgaactcctaagtggggttcttcttatcctgcctgatgttttgcttgaagatgtgatggacaagcttattcaagcagatacacttttggtcctcgttaaccacccatcaccagctatacaacaaggtgttattaaactattagatgcatattttgctagagcatctaaggaacaaaaagataaatttctgaagaatcgtggattttccttgctagccaaccagttgtatcttcatcgaggaactcaagaattgttagaatgcttcatcgaaatgttctttggtcgacatattggccttgatgaagaatttgatctggaagatgtgagaaacatgggattgtttcagaagtggtctgtcattcctattctgggactaatagagacctctctatatgacaacatactcttgcataatgctcttttacttcttctccaaattttaaattcttgttctaaggtagcagatatgttgctggataatggtctactctatgtgttatgtaatacagtagcagccctgaatggattagaaaagaacattcccatgagtgaatataaattgcttgcttgtgatatacagcaacttttcatagcagttacaattcatgcttgcagttcctcaggctcacaatattttagggttattgaagaccttattgtaatgcttggatatcttcaaaatagcaaaaacaagaggacacaaaatatggctgttgcactacagcttagagttctccaggctgctatggaatttataaggaccaccgcaaatcatgactctgaaaacctcacagattcactccagtcaccttctgctccccatcatgcagtagttcaaaagcggaaaagcattgctggtcctcgaaaatttccccttgctcaaactgaatcgcttctgatgaaaatgcgttcagtggcaaatgatgagcttcatgtgatgatgcaacggagaatgagccaagagaaccctagccaagcaactgaaacggaacttgcgcagagactacagaggctcactgttttagcagtcaacaggattatttatcaagaatttaattcagacattattgacattttgagaactccagaaaatgtaactcaaagcaagacctcagttttccagaccgaaatttctgaggaaaatattcatcatgaacagtcttctgttttcaatccatttcagaaagaaatttttacatatctggtagaaggattcaaagtatctattggttcaagtaaagccagtggttccaagcagcaatggactaaaattctgtggtcttgtaaggagaccttccgaatgcagcttgggagactactagtgcatattttgtcgccagcccacgctgcacaagagagaaagcaaatttttgaaatagttcatgaaccaaatcatcaggaaatactacgagactgtctcagcccatccctacaacatggagccaagttagttttgtatttgtcagagttgatacataatcaccaaggtgaattgactgaagaagagctaggcacagcagaactgcttatgaatgctttgaagttatgtggtcacaagtgcatccctcccagtgcatcaacaaaagcagaccttattaaaatgatcaaagaggaacaaaagaaatatgaaactgaagaaggagtgaataaagctgcttggcagaaaacagttaacaataatcaacaaagtctctttcagcgtctggattcaaaatcaaaggatatatctaaaatagctgcagatatcacccaggcagtgtctctctcccaaggaaatgagagaaaaaaggtgatccagcatattagaggaatgtataaagtagatttgagtgccagcagacattggcaggaacttattcagcagctgacacatgatagagcagtatggtatgaccccatctactatccaacctcatggcagttggatccaacagaagggccaaatcgagagaggagacgtttacagagatgttatttaactattccaaataagtatctccttagggatagacagaaatcagaagatgttgtcaaaccaccactctcttacctgtttgaagacaaaactcattcttctttctcttctactgtcaaagacaaagctgcaagtgaatctataagagtgaatcgaagatgcatcagtgttgcaccatctagagagacagctggtgaattgttactaggtaaatgtggaatgtattttgtggaagataatgcttctgatacagttgaaagttcgagccttcagggagagttggaaccagcatcattttcctggacatatgaagaaattaaagaagttcacaagcgttggtggcaattgagagataatgctgtagaaatctttctaacaaatggcagaacactcctgttggcatttgataacaccaaggttcgtgatgatgtataccacaatatactcacaaataacctccctaatcttctggaatatggtaacatcaccgctctgacaaatttatggtatactgggcaaattactaattttgaatatttgactcacttaaacaaacatgctggccgatccttcaatgatctcatgcagtatcctgtgttcccatttatacttgctgactacgttagtgagacacttgacctcaatgatctgttgatatacagaaatctctctaaacctatagctgttcagtataaagaaaaagaagatcgttatgtggacacatacaagtacttggaggaagagtaccgcaaaggagccagagaagatgaccccatgcctcccgtgcagccctatcactatggctcccactattccaatagcggcactgtgcttcacttcctggtcaggatgcctcctttcactaaaatgtttttagcctatcaagatcaaagttttgacattccagacagaacttttcattctacaaatacaacttggcgactctcatcttttgaatctatgactgatgtgaaagaacttatcccagagtttttctatcttccagagttcctagttaaccgtgaaggttttgattttggtgtgcgtcagaatggtgaacgggttaatcacgtcaaccttcccccttgggcgcgtaatgatcctcgtctttttatcctcatccatcggcaggctctagagtctgactacgtgtcgcagaacatctgtcagtggattgacttggtgtttgggtataagcaaaaggggaaggcttctgttcaagcgatcaatgtttttcatcctgctacatattttggaatggatgtctctgcagttgaagatccagttcagagacgagcgctagaaaccatgataaaaacctacgggcagactccccgtcagctgttccacatggcccatgtgagcagacctggagccaagctcaatattgaaggagagcttccagctgctgtggggttgctagtgcagtttgctttcagggagacccgagaacaggtcaaagaaatcacctatccgagtcctttgtcatggataaaaggcttgaaatggggggaatacgtgggttcccccagtgctccagtacctgtggtctgcttcagccagccccacggagaaagatttggctctctccaggctctgcccaccagagcaatctgtggtttgtcacggaatttctgtcttgtgatgacatatagcaaggaacaaggtgtgagaagcatgaacagtacggacattcagtggtcagccatcctgagctggggatatgctgataatattttaaggttgaagagtaaacaaagtgagcctccagtaaactttattcaaagttcacaacagtaccaggtgactagttgtgcttgggtgcctgacagttgccagctgtttactggaagcaaatgcggtgtcatcacagcctacacaaacagatttacaagcagcacgccatcagaaatagaaatggagactcaaatacatctctatggtcacacagaagagataaccagcttatttgtttgcaaaccatacagtatactgataagtgtgagcagagacggaacctgcatcatatgggatttaaacaggttatgctatgtacaaagtctggcgggacacaaaagccctgtcacagctgtctctgccagtgaaacctcaggtgatattgctactgtgtgtgattcagctggcggaggcagtgacctcagactctggacggtgaacggggatctcgttggacatgtccactgcagggagatcatctgttccgtggctttctccaaccagcctgagggagtatctatcaatgtaatcgctgggggattagaaaatggaattgtaaggttatggagcacatgggacttaaagcctgtgagagaaattacatttcccaaatcaaataagcccatcatcagccttacattttcttgtgatggccaccatttgtacacagcaaacagtgatgggaccgtgattgcctggtgtcggaaggaccagcagcgcttgaaacagccaatgttctattccttccttagcagctatgcagccgggtgaatgcgaatgaacttcacgttctccaaagcactttaactccaaactagatttgttgacttcaccagttttaggaggttgaacctaaagaaatggatgactggacaaaccatccaaataatgataaagtctattcatctgcacaaaattctgaagagtcacatgatcctaagaggaaagttctgttctattttagtgataatctggaagattgtgtcaatatgcactagccaacaagttttaagcctcgcatggtacattaaaatgatattcttaaaattttttcccaccaaggtattccaaagaaaatattaaggtctcccctttttctatgattccaaaaggaccagtagaatttaaattggttggttgatngtttatataaaacacactaaaattatattttaaaagtttantgccntgaaatactcctcccaccacacacacatgctccaaaagaggaaagaaaaaaagataatttttaggacttgataattgctttctttgagaagcaaattattcagtaggtgcctctgtaccaaatattttatggaatatctaaatactaaaataaactatgaatgaatctcaaaattaggcagtttttgccagttgctttcttagctcaaaggagaaccagaatttttttgacagccacaaacaagaatacaggtatcttggatttcagacacattctgtttcttcataaaaattttacttaaaatctgtaacgctagatattgactatccttagttgagtcactgaggtttaaacacaatggtaagtcttaaagtctgctatttacagagcattgaatctgtaccaatttgcaatagaaagccttcagtatgcaagaagtttgcatgggtattaagaacacagcctaaataaggcatttgatctaatctgcaggaagaattttcttccccaaaacagaattataaaagcttactttaaacaggaggcagaataattcttttaggaaaccatttcattctgtttctactaacctataccatctgagaattcctaaacatcttggagccgtctgtctctcccatatgatggctgtctgtatatttttacttggggtgctgctttattggctttgaaaacactgtcagataagctcagtaatatgttaccatgggataaaaatatgtatccctgcctaagaataacttgtgcatttgttatggaaatttaattcatatggtgtttacagtactacttttgtaacttccagactttctaaaacattctgcttaaaaaccatataaaatataattccaaagtctctgctgtcaagatagattcgagagaaagcacgtggccatgtatgctttaaccttaaactgcatacacatgtagtgatacctaggctgcatttagatcaccgtgtgctcaggccaggtgtgaatcctgaggtccatggaggtgcagagatgagattactcctattcacgttgaagtgatttgctttgttaacaaaaaattgcagctattgtctagctttcatttttttactgagaactttaaattagtcccctattagaatagggttgctactcatctttttttaaaaaccgaatttcatcatttatctaaagagaaaatatgcagaataactggtcttgttaagagtgcaatattatatttttatgtaaaaataaaaattaatttggggggattatttattcagcatgaaacctaatatgtatatgtttgaaatacttcataatgtgcatgttgtagcaaacatttctgtaaattatcacaagctctgttacctttatatacgctgcctcttcaatttggaaataaatttcataaaaaaaaaaaaaaaaaaaaaaaaa

SEQ ID NO: 32021 - DNA, 1192 bp, Homo Sapiens
ccagcccgaaaggcagggtctgggtgcgggaagagggctcggagctgccttcctgctgccttggggccgcccagatgagggaacagcccgatttgcctggttctgattctccaggctgtcgtggttgtggaatgcaaacgccagcacataatggaaacaggacctgaagacccttccagcatgccagaggaaagttcccccaggcggaccccgcagagcattccctaccaggacctccctcacctggtcaatgcagacggacagtacctcttctgcaggtactggaaacccacaggcacacccaaggccctcatctttgtgtcccatggagccggagagcacagtggccgctatgaagagctggctcggatgctgatggggctggacctgctggtgttcgcccacgaccatgttggccacggacagagcgaaggggagaggatggtagtgtctgacttccacgttttcgtcagggatgtgttgcagcatgtggattccatgcagaaagactaccctgggcttcctgtcttccttctgggccactccatgggaggcgccatcgccatcctcacggccgcagagaggccgggccacttcgccggcatggtactcatttcgcctctggttcttgccaatcctgaatctgcaacaactttcaaggtccttgctgcgaaagtgctcaaccttgtgctgccaaacttgtccctcgggcccatcgactccagcgtgctctctcggaataagacagaggtcgacatttataactcagaccccctgatctgccgggcagggctgaaggtgtgcttcggcatccaactgctgaatgccgtctcacgggtggagcgcgccctccccaagctgactgtgcccttcctgctgctccagggctctgccgatcgcctatgtgacagcaaaggggcctacctgctcatggagttagccaagagccaggacaagactctcaagatttatgaaggtgcctaccatgttctccacaaggagcttcctgaagtcaccaactccgtcttccatgaaataaacatgtgggtctctcaaaggacagccacggcaggaactgcgtccccaccctgaatgcattggccggtgcccggctcatggtctgggggatgcaggcaggggaagggcagagatggcttctcagatatggcttgcaaaaaaaaaaaaaaaaaaa

SEQ ID NO: 32022 - DNA, 556 bp, Homo Sapiens
gttgactttttcttttatctttgcaggatctactccaagtgaccaacagcaaaacaaattacgaagttcatagacgagatttgttcaacactgcaattgtttgttagatgtaaaccctgtgactatagtacgttgcttcttgttcttcacaattcatgacttaagtaccaaaatgcataccagttattatatattgccaagaattaaatgataaacttagagactgattagactgaaaatgcctaatcgatatatatattcttgtgcctagtactttaccacaaatacagtgtaatatcatcagtccaaaactgcattacttttgtaaaaacactggttaatttgtataagatattatagagctttttatgctttagaagttaaacaatatctttgggggggaactaatttattttcatcacttgaaatgtggtagctcttacaaagtttattgatttgatttttttaaaaatcaaaagccaattgaacaacaggatatatagactgataaatatttaggctgaatagtattttaacacttgtcttcaacttgatt

SEQ ID NO: 32023 - DNA, 1837 bp, Homo Sapiens
acaaccgtaacagccaccagacaagcttcagtggccgggccttcacatccagacttgcctgagaggacccacctctgagtgtccagtggtcagttgccccaggatggggaccacagccagagcagccttggtcttgacctatttggctgttgcttctgctgcctctgagggaggcttcacggctacaggacagaggcagctgaggccagagcactttcaagaagttggctacgcagctcccccctccccacccctatcccgaagcctccccatggatcaccctgactcctctcagcatggccctccctttgagggacagagtcaagtgcagccccctccctctcaggaggccacccctctccaacaggaaaagctgctacctgcccaactccctgctgaaaaggaagtgggtccccctctccctcaggaagctgtccccctccaaaaagagctgccctctctccagcaccccaatgaacagaaggaaggaacgccagctccatttggggaccagagccatccagaacctgagtcctggaatgcagcccagcactgccaacaggaccggtcccaagggggctggggccaccggctcgatggcttcccccctgggcggccttctccagacaatctgaaccaaatctgccttcctaaccgtcagcatgtggtatatggtccctggaacctaccacagtccagctactcccacctcactcgccagggtgagaccctcaatttcctggagattggatattcccgctgctgccactgccgcagccacacaaaccgcctagagtgtgccaaacttgtgtgggaggaagcaatgagccgattctgtgaggccgagttctcggtcaagacccgaccccactggtgctgcacgcggcagggggaggctcggttctcctgcttccaggaggaagctccccagccacactaccagctccgggcctgccccagccatcagcctgatatttcctcgggtcttgagctgcctttccctcctggggtgcccacattggacaatatcaagaacatctgccacctgaggcgcttccgctctgtgccacgcaacctgccagctactgaccccctacaaagggagctgctggcactgatccagctggagagggagttccagcgctgctgccgccaggggaacaatcacacctgtacatggaaggcctgggaggatacccttgacaaatactgtgaccgggagtatgctgtgaagacccaccaccacttgtgttgccgccaccctcccagccctactcgggatgagtgctttgcccgtcgggctccttaccccaactatgaccgggacatcttgaccattgacatcagtcgagtcacccccaacctcatgggccacctctgtggaaaccaaagagttctcaccaagcataaacatattcctgggctgatccacaacatgactgcccgctgctgtgacctgccatttccagaacaggcctgctgtgcagaggaggagaaattaaccttcatcaatgatctgtgtggtccccgacgtaacatctggcgagaccctgccctctgctgttacctgagtcctggggatgaacaggtcaactgcttcaacatcaattatctgaggaacgtggctctagtgtctggagacactgagaacgccaagggccagggggagcagggctcaactggaggaacaaatatcagctccacctctgagcccaaggaagaatgagtcaccccagagccctagagggtcagatggggggaaccccaccctgccccacccatctgaacactcattacactaaacacctcttggatttggaaaaaaaaaaaaaaaaaa

SEQ ID NO: 32024 - DNA, 3084 bp, Homo Sapiens
cttgggggcttcggggtctgcgctcgcggctgcctggactcagcaggcccctggaccatgtcccgcgccctgcggccaccgctcccgcctctctgctttttccttttgttgctggcggctgccggtgctcgggccgggggatacgagacatgccccacagtgcagccgaacatgctgaacgtgcacctgctgcctcacacacatgatgacgtgggctggctcaaaaccgtggaccagtacttttatggaatcaagaatgacatccagcacgccggtgtgcagtacatcctggactcggtcatctctgccttgctggcagatcccacccgtcgcttcatttacgtggagattgccttcttctcccgttggtggcaccagcagacaaatgccacacaggaagtcgtgcgagaccttgtgcgccaggggcgcctggagttcgccaatggtggctgggtgatgaacgatgaggcagccacccactacggtgccatcgtggaccagatgacacttgggctgcgctttctggaggacacatttggcaatgatgggcgaccccgtgtggcctggcacattgaccccttcggccactctcgggagcaggcctcgctgtttgcgcagatgggcttcgacggcttcttctttgggcgccttgattatcaagataagtgggtacggatgcagaagctggagatggagcaggtgtggcgggccagcaccagcctgaagcccccgaccgcggacctcttcactggtgtgcttcccaatggttacaacccgccaaggaatctgtgctgggatgtgctgtgtgtcgatcagccgctggtggaggaccctcgcagccccgagtacaacgccaaggagctggtcgattacttcctaaatgtggccactgcccagggccggtattaccgcaccaaccacattgtgatgaccatgggctcggacttccaatatgagaatgccaacatgtggttcaagaaccttgacaagctcatccagctggtaaatgcgcagcaggcaaaaggaagcagtgtccatgttctctactccacccccgcttgttacctctgggagctgaacaaggccaacctcacctggtcagtgaaacatgacgacttcttcccttacgcggatggccaccaccagttctggaccggttacttttccagtcggccggccctcaaacgctacgagcgcctcagctacaacttcctgcaggtgtgcaaccagctggaggcgctggtgggcctggcggccaacgtgggaccctatggctccggagacagtgcacccctcaatgaggcgatggctgtgctccagcatcacgacgccgtcagcggcacctcccgccagcacgtggccaacgactacgcgcgccagcttgcggcaggctgggggccttgcgaggttcttctgagcaacgcgctggcgcggctcagaggcttcaaagatcacttcaccttttgccaacagctaaacatcagcatctgcccgctcagccagacggcggcgcgcttccaggtcatcgtttataatcccctggggcggaaggtgaattggatggtacggctgccggtcagcgaaggcgttttcgttgtgaaggaccccaatggcaggacagtgcccagcgatgtggtaatatttcccagctcagacagccaggcgcaccctccggagctgctgttctcagcctcactgcccgccctgggcttcagcacctattcagtagcccaggtgcctcgctggaagccccaggcccgcgcaccacagcccatccccagaagatcctggtcccctgctttaaccatcgaaaatgagcacatccgggcaacgtttgatcctgacacagggctgttgatggagattatgaacatgaatcagcaactcctgctgcctgttcgccagaccttcttctggtacaacgccagtataggtgacaacgaaagtgaccaggcctcaggtgcctacatcttcagacccaaccaacagaaaccgctgcctgtgagccgctgggctcagatccacctggtgaagacacccttggtgcaggaggtgcaccagaacttctcagcttggtgttcccaggtggttcgcctgtacccaggacagcggcacctggagctagagtggtcggtggggccgatacctgtgggcgacacctgggggaaggaggtcatcagccgttttgacacaccgctggagacaaagggacgcttctacacagacagcaatggccgggagatcctggagaggaggcgggattatcgacccacctggaaactgaaccagacggagcccgtggcaggaaactactatccagtcaacacccggatttacatcacggatggaaacatgcagctgactgtgctgactgaccgctcccaggggggcagcagcctgagagatggctcgctggagctcatggtgcaccgaaggctgctgaaggacgatggacgcggagtatcggagccactaatggagaacgggtcgggggcgtgggtgcgagggcgccacctggtgctgctggacacagcccaggctgcagccgccggacaccggctcctggcggagcaggaggtcctggcccctcaggtggtgctggccccgggtggcggcgccgcctacaatctcggggctcctccgcgcacgcagttctcagggctgcgcagggacctgccgccctcggtgcacctgctcacgctggccagctggggccccgaaatggtgctgctgcgcttggagcaccagtttgccgtaggagaggattccggacgtaacctgagcgcccccgttaccttgaacttgagggacctgttctccaccttcaccatcacccgcctgcaggagaccacgctggtggccaaccagctccgcgaggcagcctccaggctcaagtggacaacaaacacaggccccacaccccaccaaactccgtaccagctggacccggccaacatcacgctggaacccatggaaatccgcactttcctggcctcagttcaatggaaggaggtggatggttaggtctgctgggatgggccctccaagcccaagcctcctgctccgggggcagaccgagactct

SEQ ID NO: 32025 - DNA, 2667 bp, Homo Sapiens
gagggtgggtcgaccccgggaattcggcacgagcggcggcggggccacccgcgagtccagcgtcgccgcagccccccaatgcggccgcgagaagcagcgggggggcaggcgatcgaaggagccttcacgtaaatgggtccagtcatgcctcccagtaagaagccagaaagctcaggaattagtgtctccagtggactgagtcagtgttacgggggcagcggtttctccaaggcccttcaggaagacgatgacctcgacttttctctgcctgacatccgattagaagagggggccatggaagatgaagagctgaccaacctgaactggctgcacgagagcaagaacttgctgaagagctttggggagtcggtcctcaggagtgtcagccccgtccaggacctggacgatgacacccccccatcccctgcccactctgacatgccctacgatgccaggcagaaccccaactgcaaacccccctactccttcagctgcctcatatttatggccatcgaggactctccaaccaagcgcctgccagtgaaggatatctacaactggatcttggaacattttccgtattttgcaaatgcacctactgggtggaaaaactcagtgagacacaatttatcattgaataagtgttttaagaaagtggacaaagagaggagtcagagtattgggaaagggtcgttgtggtgcatagacccagagtatagacaaaatctaattcaggctttgaaaaagacaccttatcacccacacccacacgtgttcaatacacctcccacctgtcctcaggcatatcaaagcacatcaggtccacccatctggccgggcagtaccttcttcaagagaaatggagcccttctccaagatcctgacattgatgctgccagtgccatgatgcttttgaatactccccctgagatacaagcaggttttcctccaggagtgatccaaaatggagcgcgggtcctgagccgagggctgtttcctggcgtgcggccgctgccaatcactcccattggggtgacagcggccatgaggaatggcatcaccagctgccggatgcggactgagagtgagccatcttgtggctccccagtggtcagcggagaccccaaggaggatcacaactacagcagtgccaagtcctccaacgcccggagcacctcgcccaccagcgactccatctcctcctcctcctcctcagccgacgaccactatgagtttgccaccaaggggagccaggagggcagcgagggcagcgaggggagcttccggagccacgagagccccagcgacacggaagaggacgacaggaagcacagccagaaggagcccaaggattctctgggggacagcgggtacgcatcccagcacaagaagcgccagcacttcgccaaggccaggaaggtccccagcgacacactgcccctcaaaaagagacgcaccgaaaagccccccgagagcgatgatgaggagatgaaagaagcggcagggtccctcctgcacttagcagggatccggtcctgtttgaataacatcaccaatcggacggcaaaggggcagaaagagcaaaaggaaaccacaaaaaattaaaaacaagtcactgatttgttttgaacttacgaccatttggtttcagcatgtcaggagatttctaatgatttgtggcaatatcagcaattttttttcttttttcttgtttggggtttggttttctttcttttcttttccttttattgggttttaatttgccccctcttctttgttttggacccttaagaattttatttttaaaggagattgaagccatagaactcatattgacactcagctgttttacaaaagcttttcattatctgaagacaaaaccgaaaaagccaaaattaccattgcttcctccagcttgtcagaaacctgtggctgaatccgcagggatgtcaacgtcaatatcacaggaacacacattcggcacctagaaggcacgtgggcaaagtaatcatcgttcaggcccaacccttaggtttaaaaagtcaggttgtccatcccattggggttcactgagtgaaggcacataaagcaattgaggaggaggaggaacccctcgtccccctaggagcagacccaagcttgtggcaccaggcatctgatggtgccaggaaagccactggaattgtcacacggcgagcacagagggccggccaccagtcctcgatgcttctgaaccctgaaccccgatgacatcttacgaggtggacgttggactgttcatgcgcatcgggtgtcagtgactcatggagaagaaatggggtaaatttttagtgatgttgctaatcattgaattctgttctctattaaattaagaaaatgttccaaaagccataagcctgaagattggccctgtgcacgcacgcacacacacacacacacacacacacacacacacacacacacgaaggagagagagagaaaactgatggggaaaacaagctgtgtcttcttaactgcccaagtgaaaagcaaccaagtccaggaaattacaatagctgttaaggaaaggaaataatggtacagatctttttctgtctatcaaaactatttgatccaagtgaaaaaaaaaaaaaaactagaaagctacggaacctgcaatgcggccgc

SEQ ID NO: 32026 - DNA, 5052 bp, Homo Sapiens
cggcgcttttccttcggactaagggagccgtcgaagagcgctcgccaaaggccagccgtttctccctacggtgccgccgctcctcctgcagccgcccgtaggtagcgggccgttttcctcacctgtccctgacaggcgccctcagggagccgcggtccgcgatgtcaagcgaggaaagctaccgggccatcctgcgttacctgacgaacgagcgcgagccgtatgcgccgggcaccgagggcaatgtcaagcgtaaaatccgaaaagctgccgcctgctacgtggtgcgcggcgggactctgtattaccagcggcggcagcggcaccgcaagaccttcgcggagctggaggtggtgctgcagccggagcgacgccgggacctcatcgaggcggcgcacctgggtcccggcggcactcaccacacccggcatcagacctggcactacttgtccaagacgtactggtggcgaggtatattgaagcaagtcaaagattacattaaacagtgtagcaaatgccaggagaaactagatcgatcccgtccaatatcagatgtttcagaaatgttggaagaattgggactagaccttgaatctggagaagaaagtaatgaatcggaagatgacctgagcaactttacttcatctccaactacagcatccaagcctgcaaaaaagaagccagtatccaaacatgaacttgtgtttgttgacaccaaaggagtggtaaaacgttcttctccaaaacattgtcaggctgtcttaaaacagctgaacgaacagagactttccaaccagttctgtgatgttactttgttaattgaaggagaagagtacaaagctcataaatctgttttgtcagcaaatagcgagtattttcgagatctttttattgagaaaggagctgtttccagtcatgaggctgtggtggatctttctggtttttgtaaggccagcttccttcctttactggaatttgcctatacttctgtactaagttttgatttctgtagcatggctgatgtagccatcttagctcgtcatcttttcatgtcagaagtcttagagatttgtgaaagtgtacataagctaatggaagagaagcagctaacagtatataagaagggcgaagtacaaacagttgcatccacccaggacttacgagtacagaatggaggtacagcacctcctgttgctagcagtgagggaaccacaacaagtttacctactgaacttggggattgtgaaattgtactactggtaaatggagaattgccagaagctgagcagaatggagaggtaggacgacagcctgagccccaggtttcttcagaggctgaatctgccctgtcatcagtaggatgtatagctgattcccatcctgaaatggagtctgttgatttaataacaaaaaacaaccagacagaactagaaacttcaaacaacagagaaaataacacagtttctaatatacaccctaaactttcaaaagagaatgtaattagtagctcgccagaggatagtggtatgggaaatgatatatcagctgaggatatttgtgccgaagacattccaaaacataggcagaaagttgaccaacctttaaaagatcaggaaaatctagttgcatcaacagcaaagacaaactttggccctgatgatgatacttatagaagcaggcttcgacaacgttctgttaatgaaggggcatatattcgactacacaagggaatggagaaaaagctgcagaaacggaaagccgttcccaagtcagcagttcaacaggtggctcagaagttagttcaaagaggaaaaaagatgaaacagccaaaaagagatgctaaagagaacacagaagaagcatctcataaatgtggggaatgtggaatggtttttcagagacgatacgcccttataatgcacaaactgaaacatgaaagagctagagattacaaatgtccattgtgtaaaaaacagtttcagtacagtgcctctttgcgagcacatcttattcgtcataccagaaaagatgcaccctcttcatcctcgtccaattccacgtctaatgaagcatcgggaacatcatctgagaagggcagaaccaagcgggaatttatatgttccatatgtggaagaacattacctaaattatattctctccgaatacatatgttaaagcacacaggtgtaaagccacatgcatgccaggtctgtggaaagacttttatctataagcatggtctaaaattacatcagagtcttcatcaatcacagaagcagttccagtgtgaactgtgtgttaagtcatttgttaccaaacggagtcttcaagaacatatgagtattcacacaggagagtccaagtacctttgctcagtttgtggaaagtcttttcataggggctctggactcagcaagcacttcaagaaacaccaaccaaagcctgaggttcgaggctatcattgtactcaatgtgaaaaaagtttctttgaagctagagatcttcgccagcacatgaacaaacatcttggtgtgaagccattccagtgccaattttgtgataagtgctatagttggaagaaagattggtattcccatgtgaagtctcattctgtcactgagccttataggtgtaatatatgtggcaaagaattttatgaaaaagctttgttcagaaggcatgtaaagaaagctacccatgggaagaaaggaagagcaaagcaaaacctggaacgggtgtgtgaaaaatgtggaagaaaattcactcagctaagagagtataggagacacatgaacaaccatgaaggagttaagccatttgagtgcttaacatgtggagtagcttgggctgatgcccgatctctaaaacgccatgtcagaacacatactggtgaacggccctatgtctgtcctgtatgtagcgaagcctacatagatgctcgaacactccgtaaacatatgactaaattccacagagactatgtgccttgcaaaattatgctggaaaaagacacccttcagtttcataaccaaggaactcaagtggcacatgctgttagcatcttaacagcaggcatgcaggaacaagaaagcagtggtcctcaagaacttgagactgtggtagtgacaggagaaactatggaagctctggaagctgttgcagctactgaagagtatccatcggtatctacactttctgaccaaagtattatgcaagtggttaattatgtattagcacaacagcaaggacagaagctatctgaagttgcagaagctattcaaactgttaaagtagaggtagcacatatttcaggaggagaatgagtatgttaatgaagataaaaagaagtgacatctcttgtacactgaactcacagaacatttgtttacaattctgtgtgactgtctgcttggagtttacatatcaaagttctgggctgtttggtaacgtaacgtttccaaacattttgtctggccaatgggttctatagaaaagaccgtttagtgtagagaaattgaaaacagatctattaggttggtgcaattgcttttgcaccaacctaatatttgatggcagtggtttatcatgatataccttttatgaattaatgtttataaatgactgtactgaatttaaaaccgtacagtttcatttgcattttgacattactttattatacattttgcatttaaaaggctgcaccagttggcttttcttctgttttattctcaaaatatagagattctgtgatttatttgccctgtttatggattaaaaagaaaattctaatataaagcatttcaataggatgcataggtatattacgttttttaaatgctttagatctgtgattcttgacttactatttattttatccccttttaagtcagggatgctttattctattttaaagcacttatgagttacatgttgtaatcaagtttgcacaatatatttatctatatgaggaacccataaatgaatagctaatttttaaaatgccattaaaatgcatgaaatgcttattaaaaccttactatactatttcttcaagggcaagtaaattgaccatgagaaaagaacacagttattaaacactgttgacaggaaaattctccttgataacataggacaattaatggaaaaaaaaattctcattatttgcaaagaatgaacaagttaatgaacaaacaaactagatttggtatgttttcagcttttgtatcatgtttaattgtttaatttggttgaaaaactgcagttgagaaatcagatagcaatatagacattcacagcagctctgtggataccatgtaattgtcaggtaatttcagaatgttgaaaattattcagtgcagccctcatagtatcatacttgaagaaattgattaccgttccactaaattgttgaagataaattatttttaaaggttatgaaaactaagttatattaattcatatgtttgatttttaaatcccacctcctcaagctatccaattttctgactttgaaaataaccatgagagatgccacatttctctctgggaaactaccactcaaagaataattgttaaaaattaagcttttaggtattagaagctgttataaagtataaaattaagatataagcagatcacatgtaaatcattcctaaagcacaagaaaagaatgtgccttgatgtacatatattactaagttgcctctcccagtttactttaaaaatggctttaaggataaagaataaatgtgatagctgtgcatgcattatatatttgcatttgcaaatttcccattgttttaacagctgtgtggctgactttcaattttaagacgtgaattgacatacagcccataactttataatggctgctcatttatcttatctttcagttagtggaaaaacatttcaacctgactaaaatttggaattgtgtctttttatgttccatcctctgttgttactagatttagtttaaaaattgtgtatgaccattaatgtatgtcataaacatgtaaataaaagatgttgaatcttgttgaaagcgcggcc

SEQ ID NO: 32027 - DNA, 3523 bp, Homo Sapiens
gacttagcggcgagtggctccgtctccgcggacagagcgcgcgccccctggcccggcccgcgaggggctcccggcgcggtccccgagcatttcccgccgggtggagcgggccgagccaggcaggatgaccagccccgcggccgctcaaagccgggagatcgactgtttgagcctggaagcgcagaagctggcggaagcctggctcgctgcaaaacgggcggcccgcgcggaggctcgcgagatccgcatgaaggagctggagcggcagcagaaggaggtagaagagagaccagaaaaagattttactgagaaggggtctcgtaacatgccgggcctgtctgcagccacgctggcctctctgggtgggacttcctctcggagaggcagcggagacacctccatctccatcgacaccgaggcatccatcagggaaatcaaggactctctagcagaagttgaagagaaatataagaaggctatggtttccaatgctcagctagacaatgaaaagacaaacttcatgtaccaggttgataccctaaaagatatgttgctggagcttgaagaacagctggctgaatctaggcggcagtacgaagagaaaaacaaagaatttgaaagggaaaaacacgcccacagtatactgcaatttcagtttgctgaagtcaaggaggccctgaagcaaagagaggaaatgctcgagaaacatggaataatcctaaattcagaaatagctaccaatggagagacttccgacaccctcaataatgttggataccaaggtcctaccaagatgacaaaagaagagttaaatgccctcaagtcgacaggggatgggaccctaggaagagccagtgaagtggaggtgaaaaatgaaatcgtggcgaatgtggggaaaagagaaatcttgcacaatactgagaaagagcaacacgcagaggacacagtgaaggactgtgtggacatagaggtattccctgctggtgagaataccgaggaccagaaatcctctgaagacactgccccattcctaggaaccttagcaggtgctacctatgaggaacaggttcaaagccaaattcttgagagcagttctctccctgaaaacacagtacaggttgagtcaaatgaggtcatgggtgcacctgatgacaggaccagaactccccttgagccatccaactgttggagtgacttagatggtgggaaccacacagagaatgtgggagaggcagcagtgactcaggttgaagagcaggcaggcacagtggcctcgtgtcctttagggcatagtgatgacacagtttatcatgatgacaaatgtatggtagaggtcccccaagagttagagacaagcacagggcatagtttagagaaagaattcaccaaccaggaagcagctgagcccaaggaggttccagcgcacagtacagaagtaggtagggatcacaacgaagaagagggtgaagaaacaggattaagggacgagaaaccaatcaagacagaagttcctggttctccagcaggaactgagggcaactgtcaggaagcgacaggtccaagtacagtagacactcaaaatgaacccttagatatgaaagagcccgatgaagaaaagagtgaccaacagggagaggcattggactcatcgcagaagaagacaaagaacaagaaaaagaaaaacaagaagaaaaaatccccagtacccgtagaaacccttaaagatgttaaaaaagagttaacgtatcagaacacagatttaagtgaaattaaggaagaagagcaggtaaagtctactgacagaaagtcagcagtggaagcccaaaacgaggtgactgaaaatccaaaacagaaaattgcagcagaaagcagtgaaaatgttgattgtccggagaatcctaaaattaagttggatggaaaacttgaccaagaaggtgatgatgtacaaccagcagctgaggaggtactagctgatggagacacattagattttgaggatgacaccgctcaatcatcaggcccgagggctggtggtgaagaattagatgaaggtgttgcaaaagataatgctaaaatagatggtgccactcaaagcagtcctgcagaaccaaagagcgaagacgcagatcgctgcaccctgcccgaacatgaaagtccctcacaggacattagtgatgcctgtgaagcagaaagtacagagaggtgtgagatgtcagaacatccaagtcagaccgtcaggaaagctttagacagcaatagcctagagaacgatgacttgtcggcaccaggaagagagccagggcacttcaatccagaaagcagagaagataccagaggagggaatgagaagggcaaaagcaaagaagactgtaccatgtcctaagctgaggcaggcggcaggcgcggtgcacaggaagtctcagtgtgaaggggtcttttctctccactgccaatgtaagtagaatgttctaaattcatagagaggcactgtatgacaattaccaggtgctctactgctttaagttatagactgttacttgtagatttccatgtaatcattgaggttatcacccagattagaaagacatatttgttatcagtgtacgttctaattgagagcattccagtagtatcaaacaataatgtctactgtttatagtccacttaataaaaatagaggcatttactatttgccttaggctgataggaatgtgggttttcttgaccaaatatatcagcatctaattgaaatgaccaaatagcattcttagacttctgtattatgaatataattgatatttaaattaatgtcttgttcacatatgtgtactttcatatttgattttaaaatgtacattataacctgtatggtattttatttaaaggagataaacagccaaatagcaaataggtcactgaatgataagatttgcaccttagaacaataatcattttaaggataacaagtaaatgtctgaaagcatgaggggctttatttgcctttacctcatatgagtctttgatcttgaaccgatacttttggatctcattgttgatatacctgaatttactttgtaagagattttaacttcacttcatgctgatgatgtatcaaattcattttatagaaagatttaaagtttttttctggaagtgatatatgtcaaattacatttcctactgcagtatttgagcagggacagtcattttttaaatgtttttggccgggcgtggtggctcatgcctgtaatctcagtacattgggaggccaaggcaggtggatcacctgaggtcaagagttcgaggccagcctggccaacatggtgaaaccctgtctctactaaaaatacaaaaaattggccgggcgtgatggtgggcgcctgtaatcccagccactccagaggctgaggcaggagaatcgcttgaacctgcgaggcagagattgcagtgagccaagatcaagccattgtactccagcctggacaacaagagcgaaactctgtctaaaaaaaaaaaaaaaaaa

SEQ ID NO: 32028 - DNA, 2333 bp, Homo Sapiens
ggcacgaggctagagcgatgccgggccggagttgcgtcgccttagtcctcctggctgccgccgtcagctgtgccgtcgcgcagcacgcgccgccgtggacagaggactgcagaaaatcaacctatcctccttcaggaccaacgtacagaggtgcagttccatggtacaccataaatcttgacttaccaccctacaaaagatggcatgaattgatgcttgacaaggcaccaatgctaaaggttatagtgaattctctgaagaatatgataaatacattcgtgccaagtggaaaagttatgcaggtggtggatgaaaaattgcctggcctacttggcaactttcctggcccttttgaagaggaaatgaagggtattgccgctgttactgatatacctttaggagagattatttcattcaatattttttatgaattatttaccatttgtacttcaatagtagcagaagacaaaaaaggtcatctaatacatgggagaaacatggattttggagtatttcttgggtggaacataaataatgatacctgggtcataactgagcaactaaaacctttaacagtgaatttggatttccaaagaaacaacaaaactgtcttcaaggcttcaagctttgctggctatgtgggcatgttaacaggattcaaaccaggactgttcagtcttacactgaatgaacgtttcagtataaatggtggttatctgggtattctagaatggattctgggaaagaaagatgccatgtggatagggttcctcactagaacagttctggaaaatagcacaagttatgaagaagccaagaatttattgaccaagaccaagatattggccccagcctactttatcctgggaggcaaccagtctggggaaggttgtgtgattacacgagacagaaaggaatcattggatgtatatgaactcgatgctaagcagggtagatggtatgtggtacaaacaaattatgaccgttggaaacatcccttcttccttgatgatcgcagaacgcctgcaaagatgtgtctgaaccgcaccagccaagagaatatctcatttgaaaccatgtatgatgtcctgtcaacaaaacctgtcctcaacaagctgaccgtatacacaaccttgatagatgttaccaaaggtcaattcgaaacttacctgcgggactgccctgacccttgtataggttggtgagcacacgtctggcctacagaatgcggcctctgagacatgaagacaccatctccatgtgaccgaacactgcagctgtctgaccttccaaagactaagactcgcggcaggttctctttgagtcaatagcttgtcttcgtccatctgttgacaaatgacagatctttttttttttccccctatcagttgatttttcttatttacagataacttctttaggggaagtaaaacagtcatctagaattcactgagttttgtttcactttgacatttggggatctggtgggcagtcgaaccatggtgaactccacctccgtggaataaatggagattcagcgtgggtgttgaatccagcacgtctgtgtgagtaacgggacagtaaacactccacattcttcagtttttcacttctacctacatatttgtatgtttttctgtataacagccttttccttctggttctaactgctgttaaaattaatatatcattatctttgctgttattgacagcgatattattttattacatatcattagagggatgagacagacattcacctgtatatttcttttaatgggcacaaaatgggcccttgcctctaaatagcactttttggggttcaagaagtaatcagtatgcaaagcaatcttttatacaataattgaagtgttccctttttcataattactctacttcccagtaaccctaaggaagttgctaacttaaaaaactgcatcccacgttctgttaatttagtaaataaacaagtcaaagacttgtggaaaataggaagtgaacccatattttaaattctcataagtagcattgatgtaataaacaggtttttagtttgttcttcagattgatagggagttttaaagaaattttagtagttactaaaattatgttactgtatttttcagaaatcaaactgcttatgaaaagtactaatagaacttgttaacctttctaaccttcacgattaactgtgaaatgtacgtcatttgtgcaagaccgtttgtccacttcattttgtataatcacagttgtgttcctgacactcaataaacagtcactggaaagagtgccagtcagcagtcatgcacgctgataaaaaaaaaaaaaaaaaa

SEQ ID NO: 32029 - DNA, 5041 bp, Homo Sapiens
gcggccgcgactattcggtacctgaaaacaacgatggcatggaaaacacttcccatttacctgttgttgctgctgtctgttttcgtgattcagcaagtttcatctcaagatttatcaagctgtgcagggagatgtggggaagggtattctagagatgccacctgcaactgtgattataactgtcaacactacatggagtgctgccctgatttcaagagagtctgcactgcggagctttcctgtaaaggccgctgctttgagtccttcgagagagggagggagtgtgactgcgacgcccaatgtaagaagtatgacaagtgctgtcccgattatgagagtttctgtgcagaagtgcataatcccacatcaccaccatcttcaaagaaagcacctccaccttcaggagcatctcaaaccatcaaatcaacaaccaaacgttcacccaaaccaccaaacaagaagaagactaagaaagttatagaatcagaggaaataacagaagaacattctgtttctgaaaatcaagagtcctcctcctcctcctcctcttcctcttcttcttcaacaatttggaaaatcaagtcttccaaaaattcagctgctaatagagaattacagaagaaactcaaagtaaaagataacaagaagaacagaactaaaaagaaacctacccccaaaccaccagttgtagatgaagctggaagtggattggacaatggtgacttcaaggtcacaactcctgacacgtctaccacccaacacaataaagtcagcacatctcccaagatcacaacagcaaaaccaataaatcccagacccagtcttccacctaattctgatacatctaaagagacgtctttgacagtgaataaagagacaacagttgaaactaaagaaactactacaacaaataaacagacttcaactgatggaaaagagaagactacttccgctaaagagacacaaagtatagagaaaacatctgctaaagatttagcacccacatctaaagtgctggctaaacctacacccaaagctgaaactacaaccaaaggccctgctctcaccactcccaaggagcccacgcccaccactcccaaggagcctgcatctaccacacccaaagagcccacacctaccaccatcaagtctgcacccaccacccccaaggagcctgcacccaccaccaccaagtctgcacccaccactcccaaggagcctgcacccaccaccaccaaggagcctgcacccaccactcccaaggagcctgcacccaccaccaccaaggagcctgcacccaccaccaccaagtctgcacccaccactcccaaggagcctgcacccaccacccccaagaagcctgccccaactacccccaaggagcctgcacccaccactcccaaggagcctacacccaccactcccaaggagcctgcacccaccaccaaggagcctgcacccaccactcccaaagagcctgcacccactgcccccaagaagcctgccccaactacccccaaggagcctgcacccaccactcccaaggagcctgcacccaccaccaccaaggagccttcacccaccactcccaaggagcctgcacccaccaccaccaagtctgcacccaccactaccaaggagcctgcacccaccactaccaagtctgcacccaccactcccaaggagccttcacccaccaccaccaaggagcctgcacccaccactcccaaggagcctgcacccaccacccccaagaagcctgccccaactacccccaaggagcctgcacccaccactcccaaggaacctgcacccaccaccaccaagaagcctgcacccaccgctcccaaagagcctgccccaactacccccaaggagactgcacccaccacccccaagaagctcacgcccaccacccccgagaagctcgcacccaccacccctgagaagcccgcacccaccacccctgaggagctcgcacccaccacccctgaggagcccacacccaccacccctgaggagcctgctcccaccactcccaaggcagcggctcccaacacccctaaggagcctgctccaactacccctaaggagcctgctccaactacccctaaggagcctgctccaactacccctaaggagactgctccaactacccctaaagggactgctccaactaccctcaaggaacctgcacccactactcccaagaagcctgcccccaaggagcttgcacccaccaccaccaaggagcccacatccaccacctctgacaagcccgctccaactacccctaaggggactgctccaactacccctaaggagcctgctccaactacccctaaggagcctgctccaactacccctaaggggactgctccaactaccctcaaggaacctgcacccactactcccaagaagcctgcccccaaggagcttgcacccaccaccaccaaggggcccacatccaccacctctgacaagcctgctccaactacacctaaggagactgctccaactacccccaaggagcctgcacccactacccccaagaagcctgctccaactactcctgagacacctcctccaaccacttcagaggtctctactccaactaccaccaaggagcctaccactatccacaaaagccctgatgaatcaactcctgagctttctgcagaacccacaccaaaagctcttgaaaacagtcccaaggaacctggtgtacctacaactaagactcctgcagcgactaaacctgaaatgactacaacagctaaagacaagacaacagaaagagacttacgtactacacctgaaactacaactgctgcacctaagatgacaaaagagacagcaactacaacagaaaaaactaccgaatccaaaataacagctacaaccacacaagtaacatctaccacaactcaagataccacaccattcaaaattactactcttaaaacaactactcttgcacccaaagtaactacaacaaaaaagacaattactaccactgagattatgaacaaacctgaagaaacagctaaaccaaaagacagagctactaattctaaagcgacaactcctaaacctcaaaagccaaccaaagcacccaaaaaacccacttctaccaaaaagccaaaaacaatgcctagagtgagaaaaccaaagacgacaccaactccccgcaagatgacatcaacaatgccagaattgaaccctacctcaagaatagcagaagccatgctccaaaccaccaccagacctaaccaaactccaaactccaaactagttgaagtaaatccaaagagtgaagatgcaggtggtgctgaaggagaaacacctcatatgcttctcaggccccatgtgttcatgcctgaagttactcccgacatggattacttaccgagagtacccaatcaaggcattatcatcaatcccatgctttccgatgagaccaatatatgcaatggtaagccagtagatggactgactactttgcgcaatgggacattagttgcattccgaggtcattatttctggatgctaagtccattcagtccaccatctccagctcgcagaattactgaagtttggggtattccttcccccattgatactgtttttactaggtgcaactgtgaaggaaaaactttcttctttaaggattctcagtactggcgttttaccaatgatataaaagatgcagggtaccccaaaccaattttcaaaggatttggaggactaactggacaaatagtggcagcgctttcaacagctaaatataagaactggcctgaatctgtgtattttttcaagagaggtggcagcattcagcagtatatttataaacaggaacctgtacagaagtgccctggaagaaggcctgctctaaattatccagtgtatggagaaatgacacaggttaggagacgtcgctttgaacgtgctataggaccttctcaaacacacaccatcagaattcaatattcacctgccagactggcttatcaagacaaaggtgtccttcataatgaagttaaagtgagtatactgtggagaggacttccaaatgtggttacctcagctatatcactgcccaacatcagaaaacctgacggctatgattactatgccttttctaaagatcaatactataacattgatgtgcctagtagaacagcaagagcaattactactcgttctgggcagaccttatccaaagtctggtacaactgtccttagactgatgagcaaaggaggagtcaactaatgaagaaatgaataataaattttgacactgaaaaacattttattaataaagaatattgacatgagtataccagtttatatataaaaatgtttttaaacttgacaatcattacactaaaacagatttgataatcttattcacagttgttattgtttacagaccatttaattaatatttcctctgtttattcctcctctccctcccattgcatggctcacacctgtaaaagaaaaaagaatcaaattgaatatatcttttaagaattcaaaactagtgtattcacttaccctagttcattataaaaaatatctaggcattgtggatataaaactgttgggtattctacaacttcaatggaaattattacaagcagattaatccctctttttgtgacacaagtacaatctaaaagttatattggaaaacatggaaatattaaaattttacacttttactagctaaaacataatcacaaagctttatcgtgttgtataaaaaaattaacaatataatggcaataggtagagatacaacaaatgaatataacactataacacttcatattttccaaatcttaatttggatttaaggaagaaatcaataaatataaaatataagcacatatttattatatatctaaggtatacaaatctgtctacatgaagtttacagattggtaaatatcacctgctcaacatgtaattatttaataaaactttggaacattaaaaaaataaattggaggcttaaaaaaaaaaaaaaaaa

SEQ ID NO: 32030 - DNA, 2066 bp, Homo Sapiens
tcgcgctggagggcagccgcttagcgtgcgctcttgtccccgcaggtcgcagccaggcggcgggcgcgcccagccccggcccctggagcgcccgccgcggtccccacctccatggacgccttcaaggggggcatgagcctggagcggctgccggaggggttccggccgccgccgccgccaccccatgacatggggcccgccttccacctggcccggcccgccgacccccgcgagccgctcgagaactccgccagcgagtcgtctgacacggagctgccagagaaggagcgcggcggggaacccaaggggcccgaggacagtggtgcgggaggcacgggctgcggcggcgcagacgacccagccaagaagaagaagcagcggcggcaacgtacgcacttcacaagccagcagttgcaagagctagaggccacgttccagaggaaccgctaccccgacatgagcatgagggaggagatcgccgtgtggaccaacctcaccgagccgcgcgtgcgggtctggttcaagaacaggcgagccaagtggcgtaagcgcgagcgtaaccagcagctggacctgtgcaagggtggctacgtgccgcagttcagcggcctagtgcagccctacgaggacgtgtacgccgccggctactcctacaacaactgggccgccaagagcctggcgccagcgccgctctccaccaagagcttcaccttcttcaactccatgagcccgctgtcgtcgcagtccatgttctcagcacccagctccatctcctccatgaccatgccgtccagcatgggcccaggcgccgtgcctggcatgcccaactcgggcctcaacaacatcaacaacctcaccggctcctcgctcaactcggccatgtcgccgggcgcttgcccgtacggcactcccgcctcgccctacagcgtctaccgggacacgtgcaactcgagcctagccagcctgcggctcaagtccaaacagcactcgtcgtttggctacggcggcctgcagggcccggcctcgggcctcaacgcgtgccagtacaacagctgaccgccccgccgcaccacgcgggccggcggccggagcggggaagggcgcgggcgcggaggacgcacgcggggccccggctcgcaagccccagctcaccgcgccgcggacctcacacctgcgcagccccctcctcccacttcccactccgggttggttttgtgtttgcttttccggaccccactctgccctccaaaaagacaaaaaaaaaaaaaaaaaaaaaagcaaaaagacgtcggagaaaagtgccgcgaaaaaatggatgagttgcaatttctctcgggatggcgcgggtggtgtgtgtgtgttcccacgggccccggaggcccactccgcggagggcacgcggcgcggtaggcaagcgccgaggcccagcggccgggggaggacaacctcgtatcccgcgcccccgccgcgctggatccggactgagcggccgggcctgcggactggatgtgcggggcctggacttgcctaggatttcccgaccccgtacaaaccaagttgccctctccgagctaggcccggccgagagcgccttaactcgagtcggatccgtgttggggcgggcgttgggtttggggggacggtgcccccagcccaggatcgggcactcagtggagccgcacacggcccggcgcgcctggtagagcctcgctggccccgcgccccggagccctatattaaggccacggagcgacagcgggcagtgcgggcctggcgggaggtgggggaggtccatctcagaacaccccagccttgagcttagctgcaggcccaggccctctgctctgctcccgggctaggaggtggccctctgtctgggcgaacagccccctcctcaccgcccgccgtgcaagagtcgagccggcagagcaaggggcgcggccccagggccctgcgcccactttgcacacccgctctccggcccgcgcccctgtttacagcgtccctgtgtatgttggactgactgtaataaatctgtctatatcgactaaaaaaaaaaaaaaaaa

SEQ ID NO: 32031 - DNA, 1953 bp, Homo Sapiens
cgctcccacccgcccgtggcccgcgcccatggccgcgcgcgctccacacaactcaccggagtccgcgccctgcgccgccgaccagttcgcagctccgcgccacggcagccagtctcacctggcggcaccgcccgcccaccgccccggccacagcccctgcgcccacggcagcaatcgaggcgaccgcgacagtggtgggggacgctgctgagtggaagagagcgcagcccggccaccggacctacttactcgccttgctgattgtctatttttgcgtttacaacttttctaagaacttttgtatacaaaggaactttttaaaaaagacgcttccaagttatatttaatccaaagaagaaggatctcggccaatttggggttttgggttttggcttcgttttttctcttcgttgactttggggttcaggtgccccagctgcttcgggctgccgaggaccttctgggcccccacattaatgaggcagccacctggcgagtctgacatggctgtcagcgacgcgctgctcccatctttctccacgttcgcgtctggcccggcgggaagggagaagacactgcgtcaagcaggtgccccgaataaccgctggcgggaggagctctcccacatgaagcgacttcccccagtgcttcccggccgcccctatgacctggcggcggcgaccgtggccacagacctggagagcggcggagccggtgcggcttgcggcggtagcaacctggcgcccctacctcggagagagaccgaggagttcaacgatctcctggacctggactttattctctccaattcgctgacccatcctccggagtcagtggccgccaccgtgtcctcgtcagcgtcagcctcctcttcgtcgtcgccgtcgagcagcggccctgccagcgcgccctccacctgcagcttcacctatccgatccgggccgggaacgacccgggcgtggcgccgggcggcacgggcggaggcctcctctatggcagggagtccgctccccctccgacggctcccttcaacctggcggacatcaacgacgtgagcccctcgggcggcttcgtggccgagctcctgcggccagaattggacccggtgtacattccgccgcagcagccgcagccgccaggtggcgggctgatgggcaagttcgtgctgaaggcgtcgctgagcgcccctggcagcgagtacggcagcccgtcggtcatcagcgtcagcaaaggcagccctgacggcagccacccggtggtggtggcgccctacaacggcgggccgccgcgcacgtgccccaagatcaagcaggaggcggtctcttcgtgcacccacttgggcgctggaccccctctcagcaatggccaccggccggctgcacacaacttccccctggggcggcagctccccagcaggagtaccccgaccctgggttttgaggaagtgctgagcagcagggaatgtcaccctgccctgccgcttcctcccggcttccatccccacccggggcccaattacccatccttcctgcccgatcagatgcagccgcaagtcccgccgctccattaccaagagctcatgccacccggttcctgcatgccagaggagcccaagccaaagaggggaagacgatcgtggccccggaaaaggaccgccacccacacttgtgattacgcgggctgcggcaaaacctacacaaagagttcccatctcaaggcacacctgcgaacccacacaggtgagaaaccttaccactgtgactgggacggctgtggatggaaattcgcccgctcagatgaactgaccaggcactaccgtaaacacacggggcaccgcccgttccagtgccaaaaatgcgaccgagcattttccaggtcggaccacctcgccttacacatgaagaggcatttttaaatcccagacagtggatatgacccacactgccagaaga

SEQ ID NO: 32032 - DNA, 1382 bp, Homo Sapiens
cggatgaaggctatttgaagtcgccataacctggtcagaagtgtgcctgtcggcggggagagaggcaatatcaaggttttaaatctcggagaaatggctttcgtttgcttggctatcggatgcttatatacctttctgataagcacaacatttggctgtacttcatcttcagacaccgagataaaagttaaccctcctcaggattttgagatagtggatcccggatacttaggttatctctatttgcaatggcaacccccactgtctctggatcattttaaggaatgcacagtggaatatgaactaaaataccgaaacattggtagtgaaacatggaagaccatcattactaagaatctacattacaaagatgggtttgatcttaacaagggcattgaagcgaagatacacacgcttttaccatggcaatgcacaaatggatcagaagttcaaagttcctgggcagaaactacttattggatatcaccacaaggaattccagaaactaaagttcaggatatggattgcgtatattacaattggcaatatttactctgttcttggaaacctggcataggtgtacttcttgataccaattacaacttgttttactggtatgagggcttggatcatgcattacagtgtgttgattacatcaaggctgatggacaaaatataggatgcagatttccctatttggaggcatcagactataaagatttctatatttgtgttaatggatcatcagagaacaagcctatcagatccagttatttcacttttcagcttcaaaatatagttaaacctttgccgccagtctatcttacttttactcgggagagttcatgtgaaattaagctgaaatggagcatacctttgggacctattccagcaaggtgttttgattatgaaattgagatcagagaagatgatactaccttggtgactgctacagttgaaaatgaaacatacaccttgaaaacaacaaatgaaacccgacaattatgctttgtagtaagaagcaaagtgaatatttattgctcagatgacggaatttggagtgagtggagtgataaacaatgctgggaaggtgaagacctatcgaagaaaactttgctacgtttctggctaccatttggtttcatcttaatattagttatatttgtaaccggtctgcttttgcgtaagccaaacacctacccaaaaatgattccagaatttttctgtgatacatgaagactttccatatcaagagacatggtattgactcaacagtttccagtcatggccaaatgttcaatatgagtctcaataaactgaatttttcttgcgaaaaaaaaaaaaaaaaaaaaaaaaaaaaaaaaaaaaaaaaaaaaaaaaaa

SEQ ID NO: 32033 - DNA, 3297 bp, Homo Sapiens
tggtggcccgtctggctgtggaacccaccgaaagctgagagtctctctctcagccgtaaaggtcggactcgctgaagcaatcaggcccggttttgaagagttttttccccgacgctcgttcggtggtttcttgtgaggacgcggcagcccgtggagtcggctgagggaaaagcgaggcaaggcaggcgggtcgtcaaagtcctacattttagctttcagtgctgaacttccttctcccttaaattattataaacttttgctgctgtttaataaacgtgaagatgtctcgcagtcctgatgcgaaggaagaccctgtggagtgccctctttgcatggagcccttggagatagatgatatcaactttttcccttgcacctgtggctaccagatttgccgattttgttggcatcgaattcgcactgatgaaaatgggctttgtcctgcatgtagaaagccatatccagaagacccagcagtttataaaccactctcccaggaagagctgcaaaggataaagaatgagaaaaaacagaaacaaaatgagagaaaacagaaaatatcagaaaatcgcaaacatttggctagtgtacgtgtcgtacaaaaaaacctcgtctttgttgtaggtttatctcagcgcctagcagacccagaggttttaaaacgaccagaatattttgggaagtttggtaaaatacataaagttgtcatcaataatagcacatcatatgcaggctcacagggtccaagtgccagtgcttatgtaacctatatccggtcagaagacgctctcagagccatacagtgtgtcaacaatgtggtagtagatggcagaacacttaaggcatctctaggtacaacaaaatactgcagttacttcttaaagaatatgcagtgtccaaaacctgactgcatgtatcttcatgaattgggggatgaggcggccagcttcacaaaagaggaaatgcaggcgggtaaacaccaagaatatgaacagaagctacttcaagaattatataaattaaatcccaattttcttcagctatctacgggttcagttgataaaaataagaacaaagtgacaccactgcagaggtacgatacccccattgacaaaccttcagattctctcagtatagggaacggtgataattcccagcagatatctaacagtgatacgccttcaccaccacctggtttgtcaaaatccaatccagtcatccccatcagttcatccaatcacagtgcacggtccccttttgaaggggcagtaacagagtcacagtcgttattctcagacaattttcgccatcccaaccctatcccaagtgggcttcctccttttcccagctcccacagacatccagtgactggcctacagcaccagaaccacagagcctcttcacatcagaaacaatcccagtatcatcctctacagactggcaagcagcttttggctttggttcttctaaacaaccagagggatgacttgggttttgatcccttcgatgtcactcgaaaagccttagcagacctgattgagaaggaactgtccgttcaagaccaaccttccctttcgcccacatctcttcagaactcctcttcacacactacaaccgccaaaggtccaggctctggattcctgcatcctgctgcagctacaaatgccaattctctcaatagtaccttttcagtcttgccccagaggttccctcaatttcagcagcaccgagcggtttataattcattcagttttccaggccaggcagcccgctatccttggatggcctttccacgcaatagcatcatgcacttgaaccacacagcaaaccccacctcaaatagtaatttcttggacttgaatctcccgccacagcacaacacaggtctgggagggatccctgtagcaggtattccagcgtcttcaggaaacagtttagactctcttcaagatgacaatcctccacactggctaaaatcccttcaggccctcacagagatggacggccccagcgctgctccatcacagacccaccacagcgcccccttcagcacacagatcccgctgcacagagccagttggaatccctaccctcctccttcaaacccttccagcttccactccccacccccaggctttcagacggccttcagaccccccagcaaaacccccacagatttactacagagttcaacactggaccgccattaggcaaagaggagcaaccattagaaaatgcaggatttgtcccactctgttttctccctctcagcccaccacccacagctcccttctcatctcttatgttctgaagaatccagtacctgatcaattttttttctccctaaccccagatgcaatgcgatcacagggtcattaccatctctttattaattgtaaaaatttttgttgatccagcatttgagtgacactgttgaatgtttctaaaaatgcctttttaaggagagaaaaaaaaatcaaagggcagtctcaatacttagaaaattattgtttgtctgttgcgcataataatgacataatctgcttagcagaaaatgacgattaatctataggaaagctcaagtaaatgcattatcaactgcagaagtttgaaaaccaggttcatttacgtgagattgctaaatgcatgggggaaagcagtggtcctagcatccatcttgtattcagcttatcattattgcagggaaaatgcttttaatttaaattaatttttaattcttttggcaagttgatggcaaggacttgattgtgtcattaagcaaaagaatgtattggaagttgatggaaagacaaattcatctgtagtagtaactggccgattgctaaagagttcataaggaggtgagaagtaatttttttaaaggagaaaaattttttggctttagatttaaagtaaattgaaatgttttaaagaaaaaagtattcacagatttaatacctattaataatataagagctgaaatgtaagtcatttcttcagtccttctcctctgtcggaatcttttttgttttaccataaattcacctgacgagggcactctgagatagcactgctctggggccatctgatcaccatcgggagcaaatctctgacctccttgcctgcagcttttacttaaccctgtagtttctggacgtttgtgcagtattgaaaagacaggagaaaagcaaacagaaacctggttataacctgacgctaaaactaaaaacaaggaaatgtacctctttcttcagaattaaaactaaaatcttaaataaaacagaaaacttgatgatg

SEQ ID NO: 32034 - DNA, 1033 bp, Homo Sapiens
ccactaaagtgcaagaattacattgcactgtttctccactttttattttctcttaggcttttgtttctatttcaaacatactttcttggttttctaatggagtatatagtttagtcatttcacagactctggcctcctctcctgaaatccttttggatggggaaagggaaggtggggagggtccgacagtggcggtagagaggagactccggctggcgaccggggactggtggagtggggtgatagccaagccatgggagacaagaagagccccaccaggccgaagcggcacgcgaagccttcctcggatgagggttactgggactgtagcgtctgcaccttccggaacagcgccgaggccttcaagtgcatgatgtgcgatgtgcggaagggcacctccacccggaaacctcgacctgtctcccagttggttgcacagcaggttactcagcagtttgtgcctcctacacagtcaaagaaagagaaaaaagataaagtagaaaaagaaaaaagtgaaaaggaaacaactagcaaaaagaatagccataagaaaaccaggccaagattgaaaaatgtggatcggagtagtgctcagcatttggaagttactgttggagatctgacagtcattattacagactttaaggagaaaacaaagtcaccgcctgcatctagtgctgcctctgcagatcaacacagtcaaagcggctctagctctgataacacagagagaggaatgtccaggtcatcttcacccagaggagaagcctcatcattgaatggagaatctcattaaagtttattttctccaatttcttagtcacttctgtcctaccatgcaaatacacagattatgccaagaggtaccacattttcatgacagatacattcatgcacaatccataatttgagttttacataaaatagaaatttgttagaatttgttagattttattgcaatgatgcctaccaaacatttccagacttaacattttggtctctgcagttaagtgccatgaaaatgtggttgaat

SEQ ID NO: 32035 - DNA, 990 bp, Homo Sapiens
ggctgtgccaggtgcacatttagcacccgttgccttctctaggagccgctcctagcttgccttatcacatccacgtgacccctcagagcacagcagcttctgattctccatcctattttcttctcttgactgatacatttgggcacttctagggaattcagaaaccaagggaaggggggaagtgctggcttttgctcctgcccagctgaaaggcttgaaaacagttcagtaattctgggcaggtttctctccttaaattaaaatccaatatgggcccctctgtacttaacattccaaatgctcattccaaacactttgccaacgaaggcaaacagtagagaagttaaatacagtgctgcccttgaggctctccaagggaaaggcgaatgaatattctccaggccctctgcttattcctctctgcctattgtgaaggcaatcaggccagactattgagggcatctggcagcaggactcaggcaggtatgaagtagccagccacaagtgtgaaaaggaagagtgctgagagaaactgcctagtcatgtgatatccctaatgcactgtgctttcttccctcaagaaccaccccttctggttccgctgcatgtacatgctgatctggggcaagtttgtgctgtacaaatatgtcacctgttggctggtcacagaaggagtatgcattttgacgggcctgggcttcaatggctttgaagaaaagggcaaggcaaagtgggatgcctgtgccaacatgaaggtgtggctctttgaaacaaacccccgcttcactggcaccattgcctcattcaacatcaacaccaacgcctgggtggcccggtgagctgctggtggggagcctggaccctggttccttccttccactgtcttcccagattggagggcaggggtgtaccatgtcacccctatgcgtctttcccatctgggcagaaccccctgtcgctcacactgactttgacccccacctatacccc

SEQ ID NO: 32036 - DNA, 7224 bp, Homo Sapiens
aaaggttctaaatgtctgcggggctcagagccggatgtcacgtcgtcctcctctgccggttttctcttgggtccttttccgtgccgtcccgcgactccgcctctggccgcgcgtgtctggctgctaggccgacaccaaggactggccgggtacccgggaagaaagcacgtgctccagcagttgccgcgcccagccccgagagaggccctagggcgctgcgggctttcggggtccgcagtccccccgcgacgcgagccaacgggaggcgtcaaaagacccgggccttgtgtggcaggctcgcctggcgctggctggcgtggcccttggccgtcgtcacctgtggagagcacgtcttctctgccgcgccctctgcgcaaggaggagactcgacaacatgtcacccgcgctccaagacctgtcgcaacccgaaggtctgaagaaaaccctgcgggatgagatcaatgccattctgcagaagaggattatggtgctggatggagggatggggaccatgatccagcgggagaagctaaacgaagaacacttccgaggtcaggaatttaaagatcatgccaggccgctgaaaggcaacaatgacattttaagtataactcagcctgatgtcatttaccaaatccataaggaatacttgctggctggggcagatatcattgaaacaaatacttttagcagcactagtattgcccaagctgactatggccttgaacacttggcctaccggatgaacatgtgctctgcaggagtggccagaaaagctgccgaggaggtaactctccagacaggaattaagaggtttgtggcaggggctctgggtccgactaataagacactctctgtgtccccatctgtggaaaggccggattataggaacatcacatttgatgagcttgttgaagcataccaagagcaggccaaaggacttctggatggcggggttgatatcttactcattgaaactatttttgatactgccaatgccaaggcagccttgtttgcactccaaaatctttttgaggagaaatatgctccccggcctatctttatttcagggacgatcgttgataaaagtgggcggactctttccggacagacaggagagggatttgtcatcagcgtgtctcatggagaaccactctgcattggattaaattgtgctttgggtgcagctgaaatgagaccttttattgaaataattggaaaatgtacaacagcctatgtcctctgttatcccaatgcaggtcttcccaacacctttggtgactatgatgaaacgccttctatgatggccaagcacctaaaggattttgctatggatggcttggtcaatatagttggaggatgctgtgggtcaacaccagatcatatcagggaaattgctgaagctgtgaaaaattgtaagcctagagttccacctgccactgcttttgaaggacatatgttactgtctggtctagagcccttcaggattggaccgtacaccaactttgttaacattggagagcgctgtaatgttgcaggatcaaggaagtttgctaaactcatcatggcaggaaactatgaagaagccttgtgtgttgccaaagtgcaggtggaaatgggagcccaggtgttggatgtcaacatggatgatggcatgctagatggtccaagtgcaatgaccagattttgcaacttaattgcttccgagccagacatcgcaaaggtacctttgtgcatcgactcctccaattttgctgtgattgaagctgggttaaagtgctgccaagggaagtgcattgtcaatagcattagtctgaaggaaggagaggacgacttcttggagaaggccaggaagattaaaaagtatggagctgctatggtggtcatggcttttgatgaagaaggacaggcaacagaaacagacacaaaaatcagagtgtgcacccgggcctaccatctgcttgtgaaaaaactgggctttaatccaaatgacattatttttgaccctaatatcctaaccattgggactggaatggaggaacacaacttgtatgccattaattttatccatgcaacaaaagtcattaaagaaacattacctggagccagaataagtggaggtctttccaacttgtccttctccttccgaggaatggaagccattcgagaagcaatgcatggggttttcctttaccatgcaatcaagtctggcatggacatggggatagtgaatgctggaaacctccctgtgtatgatgatatccataaggaacttctgcagctctgtgaagatctcatctggaataaagaccctgaggccactgagaagctcttacgttatgcccagactcaaggcacaggagggaagaaagtcattcagactgatgagtggagaaatggccctgtcgaagaacgccttgagtatgcccttgtgaagggcattgaaaaacatattattgaggatactgaggaagccaggttaaaccaaaaaaaatatccccgacctctcaatataattgaaggacccctgatgaatggaatgaaaattgttggtgatctttttggagctggaaaaatgtttctacctcaggttataaagtcagcccgggttatgaagaaggctgttggccaccttatccctttcatggaaaaagaaagagaagaaaccagagtgcttaacggcacagtagaagaagaggacccttaccagggcaccatcgtgctggccactgttaaaggcgacgtgcacgacataggcaagaacatagttggagtagtccttggctgcaataatttccgagttattgatttaggagtcatgactccatgtgataagatactgaaagctgctcttgaccacaaagcagatataattggcctgtcaggactcatcactccttccctggatgaaatgatttttgttgccaaggaaatggagagattagctataaggattccattgttgattggaggagcaaccacttcaaaaacccacacagcagttaaaatagctccgagatacagtgcacctgtaatccatgtcctggacgcgtccaagagtgtggtggtgtgttcccagctgttagatgaaaatctaaaggatgaatactttgaggaaatcatggaagaatatgaagatattagacaggaccattatgagtctctcaaggagaggagatacttacccttaagtcaagccagaaaaagtggtttccaaatggattggctgtctgaacctcacccagtgaagcccacgtttattgggacccaggtctttgaagactatgacctgcagaagctggtggactacattgactggaagcctttctttgatgtctggcagctccggggcaagtacccgaatcgaggctttcccaagatatttaacgacaaaacagtaggtggagaggccaggaaggtctacgatgatgcccacaatatgctgaacacactgattagtcaaaagaaactccgggcccggggtgtggttgggttctggccagcacagagtatccaagacgacattcacctgtacgcggaggctgctgtgccccaggctgcagagcccatagccaccttctatgggttaaggcaacaggctgagaaggactctgccagcacggagccatactactgcctctcagacttcatcgctcccttgcattctggcatccgtgactacctgggcctgtttgccgttgcctgctttggggtagaagagctgagcaaggcctatgaggatgatggtgacgactacagcagcatcatggtcaaggcgctgggggaccggctggcagaggcctttgcagaagagctccatgaaagagttcgccgagaactgtgggcctactgtggcagtgagcagctggacgtcgcagacctgcgcaggctgcggtacaagggcatccgcccggctcctggctaccccagccagcccgaccacaccgagaagctcaccatgtggagacttgcagacatcgagcagtctacaggcattaggttaacagaatcattagcaatggcacctgcttcagcagtctcaggcctctacttctccaatttgaagtccaaatattttgctgtggggaagatttccaaggatcaggttgaggattatgcattgaggaagaacatatctgtggctgaggttgagaaatggcttggacccattttgggatatgatacagactaactttttttttttttgccttttttattcttgatgatcctcaaggaaatacaacctagggtgccttaaaaataacaacaacaaaaaacctgtgtgcatctggctgacacttccctgcttctggttttcgaagactatttagtggaaccttgtagaggagcagggtcttcctgcagtgcctggaaaacaggcgctgtttttttgggaccttgcgtgaagagcagtgagcagggttcctgtggtttccctggtccctctgagatggggacagactgaagacagaggtcgtttgatttcaaagcaagtcaacctgcttttttctgtttttacagtggaatctaggaggccacttagtcgtctttttttcctcttagaagaaaagcctgaaactgagttgaatagagaagtgtgaccctgtgacaaaatgatactgtgagaaatggggcattttaatctaagtggttataacagtggattctgacggggaaggtgtagctctgttctcttcggaagacctcgttttctaaaggctggactaaatggctgcagaactccctttggcaaaaggcatgcgctcactgcttgcttgtcagaaacactgaagccatttgccccagtgtggtcaagcagccatgctttctgggcattttcgtcctcccataatttcatatttccgtacccctgaggaaacaaaaaggaaatgaggagagaaagttactgttaagggtggttaacattttttttgttttgttttgttttggtttttttttttttgagacagagtctggctctgtcgcccaggctggagtgcaggggcgcaatctcggctcatagcaagctccgcctcctgggttcatgccattctcctgcctcagcctccagagtagctgggactacaggtgcccgccaccacacccggctaattttttgtgtttttacaaaatacaaaaaagtagagacaggatttcactgtgttagccaggatggtcttgatctcccgacctcgtgatctgcccacctcagcctcccaaaatgctgggattacaggcgtgagccaccgagcctggccggttaacatcttttaattgtttccaggattgagcaggttctcagctgggctctgatatcccgtgcggagttggacaagtgggcagcataaagtcactcatttcttaccattttattcccctcaattctcaatatattcagtaatgaagaatggtgccaccactcaagcaacaagcctcaaactcacccatgtcatctttttcttggatgattgcagttatttcaaaaatttgcatgcaaaatatacactcatcctacttcaagatggtggtggcaatagtcaggagaaggtagcattggagtcctggtttgattcgaaggatgaagacgaagaagcaagggaggaacaaatgaagaaccatctttgttcatgaataggaatattcaagattataaaggtatcaggtctcctaaaattgatctatggatttaataccattttcaatggaaattccaacagattttattgaatgaaacaagcaggtgtttatatggagtagcaaaggacttaaaattaccaaatgcttctaaatatgaaggagaggttggggacacgcaccctatgtgataccaagttttattgtcaagacagtgtcatggtgcagaggtaggcattctgagcaggggaacaaaataagggcctagaaactcacccgtgcatatgttgacctttgcaaaatgacctggtgacatggcaagtcagtggggacaggaaggaccactccctaagtaatcccagaacaatggctattcatgtgggaaaaaaagaaattttactttctctcaccttacctggtgataagttccaaatatgttaagggctttaatacaaaaagcaaaaattgtcagtgtttggatgaaaaaagccttagggcaggaaagaatctcttgagacataaagtagtaatcataaaggacaagatggttaagtcaattctgttaaaactcaaggcttatattaagcaaacacttgaagtgagaagatgatccacaacttgagaagacatttataatacaaataactgatgaaggattcataatcacaaatatagagaattcctatttaaaaaaatagaaaaatagtgaagactacacaagaggaaatagggcttttaaataaatagatgttctgtagcattggtcagggaaatatgaattaggaccacaatgagattccattttatatccataagatttgcaaaggttgggtctgacagtaccagttgttagatctgtagggacttgtacaacattgtggatgtgtaaacaggcaccactgctttaaaaaacaattatcccttacagacttgaacatttgcagaccttatgatcttgcttccaactcccacctgtatgtccagcaaactcttgcatgtggccactaggaggaatgtgtaagaatgttcatagttacatatttataatagttaataactggaaaaagtgaaatgtatgtctgtctacaggaaaataggtgaataattagatatatgtattcattctacgggatattattcagtagtggaaatgagtgaactacagctatacctcacaataagaatgaatctcagaaaatattaaggaaaaaagcaagtttgaagagaccacatggggcgtactatttttattgagcccaaaaacaagcaaaaccaaagaatatgtagtctaagcatacgtatacaataaaactatgctattaaaaaaaaaggtaactgataaaccaaaattgagcatagtaattacccacagaaggaggaagtggaagggacaggagcacataggtagatgccaagttatgcagctgttctggttcctcctggtaggcttacaagtgtttactatatgctattaatacattatactttataactaatagataacagttttttacatattaaatatgttctacttaaatatattataaaaaataaaggcaaagtggaatgataacctaaaaaaaaaaaaaa

SEQ ID NO: 32037 - DNA, 1837 bp, Homo Sapiens
agaagagcgggctaagacgccggaggaggtggcggcggctgggagaggcgagggttctggccgattttagcatcgaaactaggagaaataagaatggctgtagaggaacttcagtctataataaagagatgtcaaatcctagaagagcaagactttaaagaagaggattttggcctatttcagttagctgggcaaagatgcatagaagaagggcacacagaccagctattagaaattattcaaaatgaaaagaataaggtcatcatcaagaatatgggctggaatctcgttggtcctgttgttcgatgccttttgtgtaaagataaagaggatagtaaaagaaaagtttattttttgatctttgatttattggtaaagttatgcaatccaaaggaattattgttgggtttgcttgaactgattgaagagccctctggaaaacagatatcccaaagtattcttcttttgcttcagccattacaaacagtgattcagaaacttcataacaaggcatattcaattggattagcattgtctaccctttggaatcagctatctcttcttcctgttccatactcaaaagaacaaatacaaatggatgactatggcctttgtcagtgttgcaaggccttaatagagttcactaagccttttgtggaagaagtcattgataacaaagaaaactcactggaaaatgaaaagttaaaggatgaattactgaaattttgtttcaaaagcttgaaatgccctttgctgacagcacaattctttgaacagtctgaagaaggtggaaatgatcctttcaggtattttgcatcagaaataataggttttttatcagcaattggacaccctttccccaaaatgatttttaatcatggaaggaaaaagagaacttggaattaccttgaatttgaagaagaagaaaataaacagttagcagactcaatggcttctctggcatatctagtatttgtacagggcatccatattgatcagcttccaatggtcttaagcccattgtaccttttgcagtttaatatggggcacattgaagtctttttgcaaagaacagaagagtctgttatctccaaaggattggagctgctggagaatagtttattgagaatagaagacaatagtctactttaccagtacttagaaatcaagagttttcttactgtacctcagggcttagtgaaagtaatgacactttgccccattgagacactgaggaaaaagagtttagctatgcttcagctgtatattaacaagttggattcacaaggcaaatatacattatttagagaacacgtaacaacaaatggtttacaggaccacagttgatttcccttcttgatttggtactttttctcccagagggtgcagaaacagatttactgcaaaactcagataggattatggcttcattaaatttattgaggtatttggttatcaaagataatgaaaatgacaatcaaactggattatggacagaacttggaaatattgagaataatttcttaaagccacttcatataggacttaatatgtcaaaagcacattatgaaggcagaaattaaaaatagccaagaggcccagaaatctaaagatctttgttctataactgtaagtggagaagagatccctaatatgcctcctgaaatgcagcttaaggtcctgcattcagctcttttcacatttgatttgattgaaagtgttctagctcgagtggaagaactcattgaaataaaaacaaagtctacctctgaagaaaatattgggataaagtgaaagttccatttcctaaataaaaactaataaaatatagtacctc

SEQ ID NO: 32038 - DNA, 9750 bp, Homo Sapiens
ccacaccgagcaccagcttctccgacgccgggaagccgctgtcgccgccgctacctctccctgttgccgccgcctcagatctcttcatgccgctgtaagctcggaggccaaggatgcggagtaggcttcccccagcgcttgccgccctgggcgcggccctactcctgtcttccattgaggcagaagttgacccaccttcagacttgaattttaaaattatagatgaaaatactgttcatatgtcatgggcagaaccagttgatccaattgtgggttacagaataacggtggaccctacaacggatgggcctactaaagaatttaccctttcagctagtaccactgaaactttattgtcagaacttgtacctgaaacagagtatgtggtgacaataacttcatatgatgaagtagaagaaagtgtaccagttataggacaactaacaattcaaacaggtagttcgacaaagccagtggagaagaaacctggaaaaaccgagatacaaaaatgctctgtcagtgcctggactgatttggttttcctcgtggatggctcttggagtgtgggaagaaataatttcaagtacattttagacttcattgctgctcttgtgtctgcttttgacattggggaagagaagacaagagttggagttgttcaatacagctctgacaccaggactgaatttaacttaaatcagtactaccaaagggatgaacttcttgctgcaataaaaaaaattccatataaaggtggcaacacaatgacaggggatgccattgattatttagttaaaaatactttcacggaatctgctggggcaagagttggctttcctaaagtggcaattattattacggatggaaaatcccaggatgaagtggaaattccagcaagagagcttcgtaatgttggagttgaagttttctccttgggcattaaagctgcagatgcaaaagaactcaaacaaattgcctccacaccttcactgaaccatgttttcaatgtggccaactttgatgcaattgtggatattcagaatgagatcatctcccaggtgtgctcaggagttgatgagcagcttggtgaattggttagtggagaagaagttgttgagcctccttcaaatttgattgccatggaagtctcttcaaaatatgttaagctaaattggaatccatctcctagtccagtgactggctacaaagtcatcctcacaccaatgactgcaggaagccgacagcacgctctgagtgtggggcctcagacaaccacgctcagtgttcgcgacctctcagcagacacggagtaccagatcagtgtttccgccatgaagggaatgacatccagtgaacccatttcaataatggagaagactcagccaatgaaagttcaagtggaatgttcacgtggtgtggatataaaagccgatattgtgtttttggttgatggctcctatagcattgggattgcaaactttgttaaagttagagcctttttggaagttcttgtaaaaagttttgaaatttcaccaaatagggtccagattagtcttgtgcaatacagccgggatcctcatactgagttcactttgaaaaaattcaccaaagttgaagatataattgaagcaataaacaccttcccttacagaggaggatctacaaatactggcaaagcaatgacttatgtcagagagaaaatatttgtgcctagcaagggatcaagaagcaatgtgccaaaggtcatgattcttatcacggatgggaaatcatcagatgctttcagagatcctgcgataaaactgaggaattcagatgttgaaatctttgcagttggtgtgaaggatgccgttcgctcagaattggaagctattgcctctcctcctgcagagacccatgtgttcacagtggaagattttgatgcttttcagaggatatcttttgaactcacacagtctatctgtcttagaattgagcaagaattggcagctataaagaagaaagcttacgtccctccaaaggatcttagtttttcagaagtgacttcttatggtttcaaaaccaactggtctccagctggagaaaatgttttttcatatcacatcacctacaaggaagcggctggggatgatgaggtcactgtggtggagccagcatcgagcaccagtgttgttctcagcagcctgaagccagagaccttgtatttggtcaatgtgactgcggagtatgaggatggcttcagcattcccttagctggagaggagaccaccgaagaagtaaaaggagcacctcgaaacctaaaggtgacagatgagactacagatagtttcaaaattacttggactcaagctccagggagagttttaagatgtcgaattatatatagaccagttgctggtggagagagcagagaagttaccaccccacccaatcagaggaggagaacactggagaacttgattccagacacgaaatatgaagtatctgtaattcctgaatacttctcaggacctggtactccattaactggaaatgcagccactgaagaagttagagggaatccaagagacttaagagtttctgaccctacgacgtctactatgaaattatcttggagtggggcaccaggaaaagtgaaacagtatctcgtcacatataccccagtggcagggggtgaaactcaagaggtcactgtgaggggagatacaaccaatacggtgctgcagggattgaaggaagggacacaatacgccttatctgtgacagcactgtatgcgtctggggctggcgacgccctctttggtgaaggaacaacacttgaagaacgtggttctcctcaagatttagttactaaagacatcactgacacatcaattggggcttattggacatctgctccaggaatggttcgcggttacagggtctcatggaaatcactttatgatgatgttgacactggagagaaaaatctgcctgaagatgcaattcatacgatgatagaaaatctgcagccagagaccaaatacagaatttcagtatttgccacttacagcagtggagaaggagaacctttgactggagatgccacaactgaattatctcaagattccaaaaccctgaaagtagatgaagaaacagaaaacacaatgagagttacatggaaaccagcaccagggaaagtcgtcaactaccgtgttgtctatcgccctcatgggagagggaagcaaatggttgctaaggtgccccccacagtcacttcgacagtgttaaagcgacttcagccacagaccacatatgacatcacagttcttcctatttacaagatgggagaaggaaagcttaggcaaggatcaggaacaacagcttctcggtttaagtctcctagaaacctcaaaacatctgacccaaccatgtcaagcttccgagtgacttgggagcctgcccctggggaagtgaagggttataaagtcacattccaccctacgggggatgacagaagactgggggagttagtggttggaccctatgacaacacagttgttttggaggaacttagggctggtaccacctataaagtaaatgtttttggaatgtttgatggaggagaaagctcaccacttgttggacaagaaatgacaaccctttccgacacaactgttatgccaattttatcttctgggatggagtgtctcaccagagctgaggcagacattgtgttgctggtggatggatcatggagcatcggccgggcaaattttagaaccgtgaggagtttcatttctcgtattgtggaagtctttgacattggccccaaaagagtacaaattgctcttgctcagtatagtggggatcccagaacagagtggcagttaaatgcacacagagacaagaagagcttgttgcaagctgtggcaaacttgccgtacaaaggaggcaatactctcacaggcatggctttgaatttcattcgccaacagaacttcaggacccaagctggcatgagacctcgagctcgaaaaattggtgtgctcattactgatggaaaatcacaagacgatgttgaagcaccttcaaagaaactcaaggatgagggagtggagctgtttgctattggtattaaaaatgctgatgaagtcgaattaaagatgattgcaactgatcctgatgatacccatgactacaatgtggcagattttgagtcactctccaggatagtggatgatctcaccattaatttgtgtaacagtgtcaaaggtccaggtgatttggaagcaccttctaacttagttatttctgagcgaacccatcgttcttttagagtgagctggacaccaccttctgacagtgtggatcgatataaggtggaatactatccagtttctggagggaaacgtcaagaattttatgtgagtcgaatggaaactagcacagtgctgaaagatctgaaacctgaaactgaatatgttgtcaatgtgtattctgtggtagaagatgaatatagtgagcctctgaaggggacagaaaaaaccttgccagtgcctgtagtcagcctgaatatttatgatgttggccctaccaccatgcatgtgcagtggcagcctgtgggaggagctactggctacatcttgtcatacaaacctgttaaggacacagagccaacaagacccaaagaggtgcgtttggggccaacagtgaatgacatgcagctgactgaccttgttcccaacacggagtatgcagtcacagtccaggctgtcctgcacgacctcactagtgaacctgtcactgttcgggaagtcaccttgcctttacccagacctcaggatctgaaactcagagatgtgactcacagcactatgaatgtcttttgggaacctgtgcctggaaaagtgcgtaaatatattgttcgatacaaaacaccagaagaggatgtcaaagaggtagaggtggacagatcagagaccagcacttccctcaaagacctcttctcacagaccttgtacacagtcagcgtttctgcagtacatgacgagggggagtctcctccagtgactgctcaagaaactacccgacccgtgccagccccaacaaacttaaagattactgaagtaacatcagagggtttcagagggacttgggatcatggagcttcagatgtgtctctctacagaataacttggggaccttttggaagctcagataagatggagaccatcttaaatggagatgaaaacactttggtgttcgaaaacctgaaccccaacaccatctatgaagtttccattactgccatctatgctgatgagtcagaaagtgatgacctgattggcagtgagcgcactctgcctatcttaacaacacaagctcccaaaagtgggccacgaaaccttcaagtgtacaatgcaacatctaacagcctgactgttaagtgggatcctgctagtggtcgtgtgcagaaatataggatcacttatcagccttccacaggggaaggcaatgagcaaacgaccacaataggaggacggcagaacagtgtggtcctgcagaaactgaagccagacactccttacactatcaccgtatcctctctgtatcctgatggtgaaggaggtcggatgacgggaagaggcaagaccaaacctctaaacactgtaaggaacctgagagtgtatgacccttctaccagcactctgaatgtccgctgggaccatgcagagggaaatcctcgtcagtacaagctcttctatgcaccagcagcaggtggtccagaggaactggtaccaatccccgggaataccaattatgccattcttaggaatctgcagccagatacctcatacactgtgactgtagttcccgtttatactgaaggtgatgggggacgcacatcagatactggaaggacattgatgagaggactggcaagaaatgtccaagtatacaatcctacacctaacaggctcggtgttcgctgggaccctgcaccaggacctgtgctgcaatatcgcgttgtgtattctcctgtggatggcacaagaccctcagaatctatagtagtgccaggaaacacgcgcatggtgcatctggagcggctgattccggacacactctattccgtgaaccttgtggctctgtactcggatggagagggaaatcccagccctgcccagggccgaacgctaccacgcagtggaccaaggaacctgagagtctttggtgaaacaaccaatagcctctcggtagcctgggatcatgctgatgggccagttcagcagtacaggatcatctattctcccactgttggtgatccaattgatgaatataccacagtcccaggcagaagaaacaatgtaatactgcagcccctgcaacctgacactccatataaaattactgttattgctgtttatgaagatggagatggtggccatctaacaggaaatggaagaactgtgggactccttcctcctcagaacatacacatctctgacgaatggtatacaagattcagggtgtcctgggatccttcaccttctccagttcttggatataaaatagtatataagccagtgggttccaatgagcccatggaagcctttgttggagaaatgacatcatataccttacacaatctcaatcccagcaccacctacgatgtgaatgtttatgctcaatatgattctggactcagtgtccccttgacagatcaaggcactacattatatttaaatgtaacagatctgaaaacttaccagattgggtgggatacattctgtgtcaaatggtcacctcaccgggcagccacctcctacaggctaaaactaagccctgcagatggaaccaggggacaagaaattacagtgcgtggatcagaaaccagtcactgcttcactggcctttcaccagacactgattatggtgtcactgtttttgtgcagacaccaaatctcgagggaccaggagtctctgttaaagaacataccactgtgaaaccaacagaagcccctacagagccacccacacctcctccccctcccaccattccaccagcccgggatgtatgcaaaggggccaaggcagatattgtgttcttgactgatgcctcctggagcattggggacgataattttaacaaagttgtaaaattcatcttcaatactgtgggaggctttgatgaaatcagtcctgctgggattcaggtttcatttgtgcaatacagcgatgaggtcaagtctgagttcaagctgaacacgtacaatgacaaggccctagcccttggggccctccagaatattaggtacagaggaggaaacacaagaacaggcaaggccctcacgtttatcaaggagaaagtcttgacttgggagagcggcatgaggaagaatgtccctaaggtgttggttgtggtcacggacggtcggtcccaggatgaggtcaagaaggcggctttggtcatccagcagtcagggttcagtgtctttgtagttggtgtggctgatgtcgactacaatgagcttgccaacattgccagcaaaccaagtgaacggcacgtgttcattgtggacgactttgaatcttttgagaagatcgaagacaatcttattacatttgtttgtgaaactgccacttcaagttgtcctctcatttatttggatggctacacctcaccaggttttaaaatgcttgaagcatacaacctgacagaaaagaattttgcttctgtacaaggagtatctttggagtcagggtctttccccagctactcagcatacaggattcagaagaatgcgtttgtgaatcagcctacagcagacctacacccaaatggactccctccttcatacacgattatattattattcagacttctcccagaaactcccagtgacccttttgcaatttggcaaatcacagacagagactacaaaccacaagttggagtgattgcagatccttctagcaagacgttatcattctttaacaaggatacaagaggcgaggtgcaaactgttacatttgacacagaagaagtaaagacattattttatggaagttttcacaaggttcatattgtagtgacctcaaaaagtgttaagatttacattgactgctatgaaattatagaaaaagacatcaaggaagctggaaatataacaactgatggttatgaaattcttggaaaactccttaaaggggaaaggaaatcagccgcattccaaatccagagttttgacattgtctgcagtccagtgtggaccagtagagacagatgctgtgatattccctctaggagagatgagggaaaatgccctgcttttccaaattcttgcacatgtacacaggacagcgttggacctccaggacctccaggccctgcaggaggacctggtgctaaaggtcccagaggtgaaagaggtatcagtggggcaattgggccccctggtcctcgtggagacataggtcctccaggcccccagggtcctccaggccctcagggacccaatggactctctattccgggagagcaaggtcgccaagggatgaaaggtgatgctggagagccaggacttccaggccgaacaggaaccccaggattacctggcccaccaggaccaatgggacctccaggagacagaggcttcactggaaaagacagtgcaatgggacccaggggcccaccagggcggccgggaagcccaggctccccaggagtcacaggaccaagtgggaagccaggaaaacctggagatcatggcagaccaggtccatctgggttgaaaggagaaaaaggtgataggggagacattgcttcccagaacatgatgcgagcagttgcaagacaagtctgtgaacaattgataagtggtcagatgaacagattcaatcagatgctgaatcagattccaaatgattaccagtccagtcgcaaccagccaggcccgccgggtccaccgggacctcctggtagcgcaggagccagaggagaacctgggcctggggggcggccaggcttcccgggcacaccagggatgcagggaccccctggggaacgaggtttgccaggagagaaaggtgaaaggggtactggatcttcaggacctcgggggctgcctgggcccccaggtccacaaggagaatccagaacaggtccaccagggtccacaggttcaagaggtccccctggcccccctggccgtcctggaaactcaggtatccagggccccccaggtcctcctggatactgtgattcttctcagtgtgccagcatcccatacaacgggcaaagctatccaggttccggctaacacattttctaagtcgccagtgctgcttacagtttgaatacatgaaaatcctgtttctgagatgtttgcgcacgtgcttattaggaaatgagtctgtatggaaatctcaccacagataatggttaacgaaccgggtcgacatcacaaaggagggtggagactctttttactaacttgaatgagacaaaagcagtggtgtcagtttataatcctgatgcatttcagtaataatgtagaaaaacattattttaaaaaagttccaacacacagccatgaggagccatgaggagcctcagttttgaaagaggtgcataataaaactactaaccagaggagtctatgccattttaagaaaaacaattaacctggttaaagagaaatgtcttatgtaaataataaactaattgtggcttgtaaaaaaaaaaaaaaaaaaaaaaaaaaaaaa

SEQ ID NO: 32039 - DNA, 4233 bp, Homo Sapiens
ggacgaggtcttcttcaacagcgaggtggacgagaaagtgggcccgcgccgcccgccgcgaagctgaggccgccgcccgagggcagcgcgggggcctgcgccccggtgcccgccgccgccgccgtcgccgcggggcccgagcccgcccccgccggccccgccaagcccgccggccccgccgcgctggccgcccgcgccggccccggccccgggcccggccccggccccggccccggccctggcaagcccgccggccccggcgccgcgcaaactttgaatgggagcgccgcgctgctgaactcgcaccacgccgccgcacctgctgtcagcctggtcaacaacgggcccgccgcgctgctgccgctgcccaagcccgccgcccccgccgccgccccgcccccgccaccccccgcgcccgccactctggcccggccgcccggccaccccgccggacccccgaccgccgcgctcgccgtgccgccccccgccgccgcccagaacgggggcagcgccggggcagcccccgcccccgccccggccgccgggggccccgcgggggtcagcggccaacccgggcccggcgcggcggctgcggcgccggcgccgggggtcaaggccgagtcgcccaagagggtggtgcaggcggcgcccccggcggcgcagaccctggcggccagcggcccggccagcacggcggccagcatggtcatcgggccaactatgcaaggggcgctgcccagcccggccgccgtcccgccgcccgcccccgggacccccaccgggctgcccaaaggcgcggccggcgcagtgacccagagcctgtcccggacgcccacggccaccaccagcgggattcgggccaccctgacgcccaccgtgctggccccccgcttgccgcagccgcctcagaacccgaccaacatccagaacttccagctgcccccaggaatggtcctcgtccgaagtgagaatgggcagttgttaatgattcctcagcaggccttggcccagatgcaggcgcaggcccatgcccagcctcagaccaccatggcgcctcgccctgccacccccacaagtgcccctcccgtccagatctccaccgtacaggcacctggaacacctatcattgcacggcaggtgaccccaactaccataattaagcaagtgtctcaggcccagacaacggtgcagcccagtgcaaccctgcagcgctcgcccggcgtccagcctcagctcgttctgggtggcgctgcccagacggcttcacttgggacggcgacggctgttcagacggggactcctcagcgcacggtaccaggggcgaccaccacttcctcagctgccacggaaactatggaaaacgtgaagaaatgtaaaaatttcctatctacgttaataaaactggcttcatctggcaagcagtctacagagacagcagctaatgtgaaagagctcgtgcagaatttactggatggaaaaatagaagcagaagatttcacaagcaggttataccgagaacttaattcttcacctcaaccttaccttgtgcctttcctgaagaggagcttacccgccttgagacagctgacccccgactccgcggccttcatccagcagagccagcagcagccgccaccgcccacctcgcaggccaccactgcgctcacggccgtggtgctgagtagctcggtccagcgcacggccgggaagacggcggccaccgtgaccagtgccctccagccccctgtgctcagcctcacgcagcccacgcaggtcggcgtcggcaagcaggggcaacccacaccgctggtcatccagcagcctccgaagccaggagccctgatccggcccccgcaggtgacgttgacgcagacacccatggtcgccctgcggcagcctcacaaccggatcatgctcaccacgcctcagcagatccagctgaacccactgcagccagtccctgtggtgaaacccgccgtgttacctggaaccaaagccctttctgctgtctcggcacaagcagctgctgcacagaaaaataaactcaaggagcctgggggaggttcgtttcgggacgatgatgacattaatgatgttgcatcgatggctggagtaaacttgtcagaagaaagtgcaagaatattagccacgaactctgaattggtgggcacgctaacgcggtcctgtaaagatgaaaccttcctcctccaagcgcctttgcagagaagaatattagaaataggtaaaaaacatggtataacggaattacatccagatgtagtaagttatgtatcacatgccacgcaacaaaggctacagaatcttgtagagaaaatatcagaaacagctcagcagaagaacttttcttacaaggatgacgacagatatgagcaggcgagtgacgtccgggcacagctcaagttttttgaacagcttgatcaaatcgaaaagcagaggaaggatgagcaggagcgggagatcctgatgagggcagcaaagtctcggtcaagacaagaagatccagaacagttaaggctgaaacagaaggcaaaggagatgcagcaacaggaactggcacaaatgagacagcgggacgccaacctcacagcactagcagcgatcgggcccaggaaaaagaggaaagtggactgtccggggccgggctcaggagcagaggggtcgggccccggctcagtggtcccaggcagctcgggtgtcggaacccccagacagttcacgcgacaaagaatcacgcgggtcaacctcagggacctcatattttgtttagaaaatgaacgtgagacaagccattcactgctgctctacaaagcattccttaagtgacacaggaggacgcctggggactttttatatatttgcagattacgcctttttgtaacgagcaaatgggatattgtttaaaaaacagccacctctttacaatggaacagttttatattcctgtttctaaatcagctcttcagtgtgaaagaaaacacgtttctgtaacagagagaacacaaaggcctgtggatactcttaaaggacaattaaatcttaactcatcttgattgagtggccttcctgccaaacaagccatatataaagactgatggaatcgttagcaaataattagctgccctctgtcaactcatagcagtttctgcattatttgtgcattttggtttagttctacctaacttactatgtaggtgtatgtctacagccgatgacctcatttcgtttattttatttttgtaatagtcagttggcaaagcaaactgattttttagactatttatcttccttcccttcccctcccaccccgctctcctctctgccccctgccctcccctcccctcccttcccctccactccgctgagaatcctggaggaatacacaattcatcgttgcacccccacctcagagtgtaatcgcatttctgcttggtagaggccgagcccagcaaaggtggctccttctgaatgtgtggtcagcatctgtacaaatgcattttatttgctatagtttgtaaagctgtaaagttaaaagagatgaaaaccttttcagcataaatatattttacttgcactgtgttttttagctaaaagtgaaaacctagattaaataaaatcaaagttgagaagaatcatcaaaagactgtttctcggtgtgaatcaagtgttgaaaaatggttggtgtattttgtcagtaattgtacataacttttggcacatgacatagaaatggctatgtaaactataattattttgctaagagactgtatgcaagccttgggccgactttacagacgtccagagcaaagccccttctttgtacctatttttttattacaaatatactaattggttctttctattttcagaggttattgtatgaaattgtctattgatagtacttttatgactgtaaatactctggctttctccgtgtgaattctcacattagactttaattcgagcgcgtgtgaactgaacgctgatcagtattttttatcaacacctgagaactgttacaccttttattttgtcttttaggaaatccctgtctttccattttttcatgtaaattttgcacagttacttgttcatatgtaaatattttactttcagaaatgaagtttttaattgctattgttttatataggattgaaagaaaattaactcctttattaaaaacaaatttatctgtaaaaaaaaaaaaaaaaaaaa

SEQ ID NO: 32040 - DNA, 3832 bp, Homo Sapiens
cggcggcggcggcgcctggagcggcgtgcgtaatgtcggcactttgctggggccgcggagcggcggggctcaaacgagccctacggccttgcggccgcccgggactccccggcaaagaagggaccgccggtggcgtctgcggccccaggaggagctcgtccgccagcccccaggagcaagaccaagaccgcaggaaggactggggccacgtggagctgctggaggtgctccaggcgcgggtgcggcagctgcaggctgagagcgtgtcggaggtggtggtgaacagggtggatgtggcgcggctcccagaatgtggcagtggagatggtagcctccagccacccaggaaggtccagatgggggccaaggatgccaccccggtgccctgtggccgctgggcaaagatactggagaaggataagcggacccagcagatgcgtatgcagcggttgaaggcgaagctgcagatgccattccagagcggggagttcaaggcgctgaccaggcgcctgcaggtggagccccggctcctgagcaagcagatggccgggtgcctggaggactgcacgcgccaggcccccgagagcccctgggaggagcagctggcccggctgctgcaggaggcccctgggaagctgagcctcgatgtggagcaggccccgtcggggcagcactcgcaggcccagctctcaggtcagcagcagaggctcctggccttcttcaagtgctgcctgctcactgaccagctgcccctcgcccaccacctgctggtcgtccaccacggccagcggcagaagcggaagctgctcacgctggacatgtacaacgccgtgatgcttggctgggcgcggcagggtgctttcaaggagctggtatatgtgttattcatggtgaaggatgccggcttgaccccggacctgctgtcctatgcggctgccctccagtgcatggggaggcaggaccaggacgccgggaccatcgaaaggtgtctggaacagatgagccaggaggggctgaagctgcaggcactcttcaccgccgttctgctgtctgaggaggatcgggccactgttctgaaggccgtgcacaaggtgaagcccaccttcagcctcccgccgcagctgccgcccccggtcaacacctccaagctgctcagggacgtgtatgccaaggatgggcgtgtgtcctacccgaagctgcacctgcccttgaagaccctgcagtgcttctttgagaagcagctccacatggagctggccagcagggtgtgcgtggtgtccgtggagaagcccacgttgccaagcaaggaggtcaagcacgcgcggaagaccctgaagaccctgcgggaccaatgggagaaagcactgtgccgggcgctgcgggagaccaagaaccgcctagagcgcgaggtgtacgagggccggttctcactttaccccttcctgtgcctgctggacgagcgcgaggtggtgcggatgctcctgcaggtcctgcaggcgctgcccgcccaaggtgagtccttcaccaccctggcccgggagctgagtgcgcgcactttcagccggcacgtggtgcagaggcagcgggtcagtggccaggtgcaggcgctgcagaaccactacaggaagtacctctgcttgctggcctccgacgccgaggtgcccgagccctgcctgccgcggcagtactgggaggagctgggggcgcccgaggccctgcgggagcagccctggcccctgccagtgcagatggagctgggcaagctgctggcggagatgctggtgcaggctacgcagatgccatgcagcctggacaagccgcatcgttcctctcggcttgtccccgtgctctaccacgtgtattccttccgcaacgtccagcaaatcggcatcctgaagccgcacccggcctacgtgcagctgctggagaaggccgcggaacccacgctgaccttcgaggcggtggatgtacccatgctttgccccccgctgccctggacatcgccgcactctggtgctttcctgctcagccccaccaagctgatgcgcacggtggaaggcgccacgcaacaccaggagctgctggaaacctgcccacccaccgcgctgcatggcgcactggacgccctcacccaactgggcaactgcgcctggcgcgtcaacgggcgcgtgctggacctggtgctgcagctcttccaggccaagggctgcccccagctaggcgtgccggccccgccctccgaggcgccccagccgcccgaggcccacctgccgcacagcgccgcgcccgcccgcaaggccgagctgcgccgtgagctggcgcactgccagaaggtggcccgggagatgcacagcctgcgggcggaggcgctgtaccgcctctcgctggcgcagcacctgcgggaccgcgtcttctggctgccgcacaacatggacttccgcggccgcacctacccctgcccgccgcacttcaaccacctgggcagcgacgtggcgcgggccctgctggagttcgcccagggccgcccgctcggcccgcacggcctggattggctcaagatccacctggtcaatctcacggggttgaagaagcgggagccgctgcggaagcgcctggcctttgcggaggaggtgatggatgacatcctggactccgcggaccaacccttgacgggccgaaagtggtggatgggcgcggaggaaccctggcagacgctggcctgctgtatggaggtggcgaacgctgtgcgcgcctccgaccctgccgcctatgtctcccacctccccgtccatcaggacggctcttgcaacggcctgcagcattatgctgctctgggccgcgacagcgtgggcgccgcctccgtcaacctggagccctcggatgtgccgcaggacgtgtacagcggcgtggccgcgcaggtggaggtgttccgtaggcaggacgcccagcggggcatgcgggtggcacaggtgctggaaagtttcatcacccgcaaggtggtgaagcagacggtgatgacggtggtgtacggggtcacgcgctatggcgggcgcctgcagattgagaagcgcctccgggagctgagcgactttccccaggagttcgtgtgggaggcctctcactatctcgtacgccaggtcttcaagagtctacaggagatgttctcggggacccgggccatccagcactggctgaccgagagtgcccgcctcatctcccacatgggctctgtggtggagtgggtcacacccctgggcgtccccgtcatccagccgtatcgcctggactccaaggtcaagcaaataggaggtggaattcagagcatcacctacacccacaacggagacatcagccgaaagcccaacacacgtaagcagaagaacggcttcccgcccaacttcatccactcgctggactcctcccacatgatgctcaccgccctgcactgctacaggaagggcctgaccttcgtctctgtgcacgactgttactggactcacgcagctgatgtctccgtcatgaaccaggtgtgccgggagcagtttgtccgcttgcacagcgagcccatcctgcaggacctgtccagattcctggtcaagcggttctgctctgagccccagaagatcttggaggccagccagctgaaggagacactgcaggcggtgcccaagccaggggccttcgacctggagcaggtgaagcgttccacctacttcttcagctgacaccccgtgagccttgtcagtgtgtaaataaagctcttttgccaccccccaaaaaaaaaaaaaaaaaaaaaaaaaaaaaaaaaaaaaaaaaaaaaaaaaaaaaaaaa

SEQ ID NO: 32041 - DNA, 185 bp, Homo Sapiens
cgtgcttcatctcctgtcaggttccaatactgtgttgcagtgggagcccaaactttccccagtgtgagtgctcccagcaagaaagtggcaaagcagatggccgcagaggaagccatgaaggccctgcatggggaggcgaccaactccatggcttctgataaccaggtagggcgttttcctactca

SEQ ID NO: 32042 - DNA, 10358 bp, Homo Sapiens
  misc_feature (9596)..(9596): n is a, c, g, or t
  misc_feature (9648)..(9648): n is a, c, g, or t
  misc_feature (9952)..(9952): n is a, c, g, or t
  misc_feature (10033)..(10033): n is a, c, g, or t
  misc_feature (10054)..(10054): n is a, c, g, or t
aacaaaatggcggcggcagcggtgtcgctttgtttccgcggctcctgcggcggtggcagtggtagcggcctttgagctgtggggaggttccagcagcagctacagtgacgactaagactccagtgcatttctatcgtaaccgggcgcgggggagcgcagatcggcgcccagcaatcacagaagccgacaaggcgttcaagcgaaaacatgaccgctgagcccatgagtgaaagcaagttgaatacattggtgcagaagcttcatgacttccttgcacactcatcagaagaatctgaagaaacaagttctcctccacgacttgcaatgaatcaaaacacagataaaatcagtggttctggaagtaactctgatatgatggaaaacagcaaggaagagggaactagctcttcagaaaaatccaagtcttcaggatcgtcacgatcaaagaggaaaccttcaattgtaacaaagtatgtagaatcagatgatgaaaaacctttggatgatgaaactgtaaatgaagatgcgtctaatgaaaattcagaaaatgatattactatgcagagcttgccaaaaggtacagtgattgtacagccagagccagtgctgaatgaagacaaagatgattttaaagggcctgaatttagaagcagaagtaaaatgaaaactgaaaatctcaaaaaacgcggagaagatgggcttcatgggattgtgagctgcactgcttgtggacaacaggtcaatcattttcaaaaagattccatttatagacacccttcattgcaagttcttatttgtaagaattgctttaagtattacatgagtgatgatattagccgtgactcagatggaatggatgaacaatgtaggtggtgtgcggaaggtggaaacttgatttgttgtgacttttgccataatgctttctgcaagaaatgcattctacgcaaccttggtcgaaaggagttgtccacaataatggatgaaaacaaccaatggtattgctacatttgtcacccagagcctttgttggacttggtcactgcatgtaacagcgtatttgagaatttagaacagttgttgcagcaaaataagaagaagataaaagttgacagtgaaaagagtaataaagtatatgaacatacatccagattttctccaaagaagactagttcaaattgtaatggagaagaaaagaaattagatgattcctgttctggctctgtaacctactcttattccgcactaattgtgcccaaagagatgattaagaaggcaaaaaaactgattgagaccacagccaacatgaactccagttatgttaaatttttaaagcaggcaacagataattcagaaatcagttctgctacaaaattacgtcagcttaaggcttttaagtctgtgttggctgatattaagaaggctcatcttgcattggaagaagacttaaattccgagtttcgagcgatggatgctgtaaacaaagagaaaaataccaaagagcataaagtcatagatgctaagtttgaaacaaaagcacgaaaaggagaaaaaccttgtgctttggaaaagaaggatatttcaaagtcagaagctaaactttcaagaaaacaggtagatagtgagcacatgcatcagaatgttccaacagaggaacaaagaacaaataaaagyaccggtggtgaacataagaaatctgatagaaaagaagaacctcaatatgaacctgccaacacttctgaagatttagacatggatattgtgtctgttccttcctcagttccagaagacatttttgagaatcttgagactgctatggaagttcagagttcagttgatcatcaaggggatggcagcagtggaactgaacaagaagtggagagttcatctgtaaaattaaatatttcttcaaaagacaacagaggaggtattaaatcaaaaactacagctaaagtaacaaaagaattatatgttaaactcactcctgtttcccttcctaattccccaattaaaggtgctgattgtcaggaagttccacaagataaagatggctataaaagttgtggtctgaaccccaagttagagaaatgtggacttggacaggaaaacagtgataatgagcatttggttgaaaatgaagtttcattacttttagaggaatctgatcttcggagatccccacgtgtaaagactacacccttgaggcgaccgacagaaactaaccctgtaacatctaattcagatgaagaatgtaatgaaacagttaaggagaaacaaaaactatcagttccagtgagaaaaaaggataagcgtaattcttctgacagtgctatagataatcctaagcctaataaattgccaaaatctaagcaatcagagactgtggatcaaaattcagattctgatgaaatgctagcaatcctcaaaggggtgagcaggatgagtcacagttcttcttcagatactgatattaatgaaattcatacaaaccataagactttgtatgatttaaagactcaggcggggaaagatgataaaggaaaaaggaaacgaaaaagttctacatctggctcagattttgatactaaaaagggcaaatcagctaagagctctataatttctaaaaagaaacgacaaacccagtctgagtcttctaattatgactcagaattagaaaaagagataaagagcatgagtaaaattggtgctgccagaaccaccaaaaaaagaattccaaatacaaaagattttgactcttctgaagatgagaaacacagcaaaaaaggaatggataatcaagggcacaaaaatttgaagacctcacaagaaggatcatctgatgatgctgaaagaaaacaagagagagagactttctcttcagcagaaggcacagttgataaagacacgaccatcatggaattaagagatcgacttcctaagaagcagcaagcaagtgcttccactgatggtgtcgataagctttctgggaaagagcagagttttacttctttggaagttagaaaagttgctgaaactaaagaaaagagcaagcatctcaaaaccaaaacatgtaaaaaagtacaggatggcttatctgatattgcagagaaattcctaaagaaagaccagagcgatgaaacttctgaagatgataaaaagcagagcaaaaagggaactgaagaaaaaaagaaaccttcagactttaagaaaaaagtaattaaaatggaacaacagtatgaatcttcatctgatggcactgaaaagttacctgagcgagaagaaatttgtcattttcctaagggcataaaacaaattaagaatggaacaactgatggagaaaagaaaagtaaaaaaataagagataaaacttctaaaaagaaggatgaattatctgattatgctgagaagtcaacagggaaaggagatagttgtgactcttcagaggataaaaagagtaagaatggagcatatggtagagagaagaaaaggtgcaagttgcttggaaagagttcaaggaagagacaagattgctcatcatctgatactgagaaatattccatgaaagaagatggttgtaactcttctgataagagactgaaaagaatagaattgagggaaagaagaaatttaagttcaaagagaaatactaaggaaatacaaagtggctcatcatcatctgatgctgaggaaagttctgaagataataaaaagaagaagcaaagaacttcatctaaaaagaaggcagtcattgtcaaggagaaaaagagaaactccctaagaacaagcactaaaaggaagcaagctgacattacatcctcatcttcttctgatatagaagatgatgatcagaattctataggtgagggaagcagcgatgaacagaaaattaagcctgtcactgaaaatttagtgctgtcttcacatactggattttgccaatcttcaggagatgaagccttatctaaatcagtgcctgtcacagtggatgatgatgatgacgacaatgatcctgagaatagaattgccaagaagatgcttttagaagaaattaaagccaatctttcctctgatgaggatggatcttcagatgatgagccagaagaagggaaaaaaagaactggaaaacaaaatgaagaaaacccaggagatgaggaagcaaaaaatcaagtcaattctgaatcagattcagattctgaagaatctaagaagccaagatacagacataggcttttgcggcacaaattgactgtgagtgacggagaatctggagaagaaaaaaagacaaagcctaaagagcataaagaagtcaaaggcagaaacagaagaaaggtgagcagtgaagattcagaagattctgattttcaggaatcaggagttagtgaagaagttagtgaatccgaagatgaacagcggcccagaacaaggtctgcaaagaaagcagagttggaagaaaatcagcggagctataaacagaaaaagaaaaggcgacgtattaaggttcaagaagattcatccagtgaaaacaagagtaattctgaggaagaagaggaggaaaaagaagaggaggaggaagaggaggaggaggaggaagaggaggaggaagatgaaaatgatgattccaagtctcctggaaaaggcagaaagaaaattcggaagattcttaaagatgataaactgagaacagaaacacaaaatgctcttaaggaagaggaagagagacgaaaacgtattgctgagagggagcgtgagcgagaaaaattgagagaggtgatagaaattgaagatgcttcacccaccaagtgtccaataacaaccaagttggttttagatgaagatgaagaaaccaaagaacctttagtgcaggttcatagaaatatggttatcaaattgaaaccccatcaagtagatggtgttcagtttatgtgggattgctgctgtgagtctgtgaaaaaaacaaagaaatctccaggttcaggatgcattcttgcccactgtatgggccttggtaagactttacaggtggtaagttttcttcatacagttcttttgtgtgacaaactggatttcagcacggcgttagtggtttgtcctcttaatactgctttgaattggatgaatgaatttgagaagtggcaagagggattaaaagatgatgagaagcttgaggtttctgaattagcaactgtgaaacgtcctcaggagagaagctacatgctgcagaggtggcaagaagatggtggtgttatgatcataggctatgagatgtatagaaatcttgctcaaggaaggaatgtgaagagtcggaaacttaaagaaatatttaacaaagctttggttgatccaggccctgattttgttgtttgtgatgaaggccatattctaaaaaatgaagcatctgctgtttctaaagctatgaattctatacgatcaaggaggaggattattttaacaggaacaccacttcaaaataacctaattgagtatcattgtatggttaattttatcaaggaaaatttacttggatccattaaggagttcaggaatagatttataaatccaattcaaaatggtcagtgtgcagattctaccatggtagatgtcagagtgatgaaaaaacgtgctcacattctctatgagatgttagctggatgtgttcagaggaaagattatacagcattaacaaaattcttgcctccaaaacacgaatatgtgttagctgtgagaatgacttctattcagtgcaagctctatcagtactacttagatcacttaacaggtgtgggcaataatagtgaaggtggaagaggaaaggcaggtgcaaagcttttccaagattttcagatgttaagtagaatatggactcatccttggtgtttgcagctagactacattagcaaagaaaataagggttattttgatgaagacagtatggatgaatttatagcctcagattctgatgaaacctccatgagtttaagctccgatgattatacaaaaaagaagaaaaaagggaaaaaggggaaaaaagatagtagctcaagtggaagtggcagtgacaatgatgttgaagtgattaaggtctggaattcaagatctcggggaggtggtgaaggaaatgtggatgaaacaggaaacaatccttctgtttctttaaaactggaagaaagtaaagctacttcttcttctaatccaagcagcccagctccagactggtacaaagattttgttacagatgctgatgctgaggttttagagcattctgggaaaatggtacttctctttgaaattcttcgaatggcagaggaaattggggataaagtccttgttttcagccagtccctcatatctctggacttgattgaagattttcttgaattagctagtagggagaagacagaagataaagataaaccccttatttataaaggtgaggggaagtggcttcgaaacattgactattaccgtttagatggttccactactgcacagtcaaggaagaagtgggctgaagaatttaatgatgaaactaatgtgagaggacgattatttatcatttctactaaagcaggatctctaggaattaatctggtagctgctaatcgagtaattatattcgacgcttcttggaatccatcttatgacatccagagtatattcagagtttatcgctttggacaaactaagcctgtttatgtatataggttcttagctcagggaaccatggaagataagatttatgatcggcaagtaactaagcagtcactgtcttttcgagttgttgatcagcagcaggtggagcgtcattttactatgaatgagcttactgaactttatacttttgagccagacttattagatgaccctaattcagaaaagaagaagaagagggatactcccatgctgccaaaggataccatacttgcagagctccttcagatacataaagaacacattgtaggataccatgaacatgattctcttttggaccacaaagaagaagaagagttgactgaagaagaaagaaaagcagcttgggctgagtatgaagcagagaagaaggtactgaccatgcgtttcaacataccaactgggaccaatttaccccctgtcagtttcaactctcaaactccttatattcctttcaatttgggagccctgtcagcaatgagtaatcaacagctggaggacctcattaatcaaggaagagaaaaagttgtagaagcaacaaacagtgtgacagcagtgaggattcaacctcttgaggatataatttcagctgtatggaaggagaacatgaatctctcagaggcccaagtacaggcgttagcattaagtagacaagccagccaggagcttgatgttaaacgaagagaagcaatctacaatgatgtattgacaaaacaacagatgttaatcagctgtgttcagcgaatacttatgaacagaaggctccagcagcagtacaatcagcagcaacagcaacaaatgacttatcaacaagcaacactgggtcacctcatgatgccaaagcccccaaatttgatcatgaatccttctaactaccagcagattgatatgagaggaatgtatcagccagtggctggtggtatgcagccaccaccattacagcgtgcaccacccccaatgagaagcaaaaatccaggaccttcccaagggaaatcaatgtgattttgcactaaaagcttaatggattgttaaaatcatagaaagatcttttatttttttaggaatcaatgacttaacagaactcaactgtataaatagtttggtccccttaaatgccaatcttccatattagttttacttttttttttttttaaatagggcataccatttcttcctgacatttgtcagtgatgttgcctagaatcttttacacacgctgagtacagaagatatttcaaattgttttcagtgaaaacaagtccttccataatagtaacaactccacagatttcctctctaaatttttatgcctgcttttagcaaccataaaattgtcataaaattaataaatttaggaaagaataaagatttatatattcattctttacatataaaaacacacagctgagttcttagagttgattcctcaagttatgaaatacttttgtacttaatccatttcttgattaaagtgattgaaatggttttaatgttcttttgactgaagtctgaaactgggctcctgctttattgtctctgtgactgaaagttagaaactgagggttatctttgacacagaattgtgtgcaatattcttaaatactactgctctaaaagttggagaagtcttgcagttatcttagcattgtataaacagccttaagtatagcctaagaagagaattcctttttcttctttagtccttctgccattttttattttcagttatatgtgctgaaataattactggtaaaatttcagggttgtggattatcttccacacatgaattttctctctcctggcacgaatataaagcacatctcttaactgcatggtgccagtgctaatgcttcatcctgttgctggcagtgggatgtggacttagaaaatcaagttctagcattttagtaggttaacactgaagttgtggttgttaggttcacaccctgttttataaacaacatcaaaatggcagaaccattgctgactttaggttcacatgaggaatgtacttttaacaattcccagtactatcagtattgtgaaataattcctctgaaagataagaatcactggcttctatgcgcttcttttctctcatcatcatgttcttttaccccagtttccttacatttttttaaattgtttcagagtttgttttttttttagtttagattgtgaggcaattattaaatcaaaattaattcatccaatacccctttactagaagttttactagaagatgtattacattttattttttcttaatccagttctgcaaaaatgacctataaatttattcatgtacaattttggttacttgaattgttaaagaaaacattgtttttgactatgggagtcaactcaacatggcagaaccatttttgagatgatgatacaacaggtagtgaaacagcttaagaattccaaaaaaaaaaaaaaaaaaaaaaaaaaagaaaactgggtttgggctttgctttaggtatcactggattagaatgagtttaacattagctaaaactgctttgagttgtttggatgattaagagattgccatttttatcttggaagaactagtggtaaaacatccaagagcactaggattgtgatacagaatttgtgaggtttggtggatccacgcccctctcccccactttcccatgatgaaatatcactaataaatcctgtatatttagatattatgctagccatgtaatcagatttatttaattgggtggggcaggtgtgtatttactttagaaaaaatgaaaaagcaagatttatggaaatatttgaaggcagtacactctggccaactgttaccagttggtatttctacaagttcagaatattttaacctgatttactagacctgggaattttcaacatggtctaattatttactcaaagncatagatgtgaaaattttaggcaaccttctaaatctttttcaccatggatgnaactataacttaaagaattaatacttagaagggttaattgggaaatcagagtttgaaataaaacttgggaccactttgtatacactcttcttcacttggacattttaggctatattaatatgtactttgagtataacattcaaggcttttaacaaatattttaaaggacaaaaaaatcacgtcagttaaaatactaaaaggctcatttttatatttgttttaggatgttttaaatagttgcaatgggttaaaaatggatgatttaaaatgttggcttgtaaatacagttttgcctgctaaattnctccacattttgtaaacccgttttatttccttggggtgtaaagcgtttttgcttagtaatgtgatattgtatatgttttgncccagttgtatagtaatgttncagccatcatccagctttggctgctgaaatcatacagctgtgaagacttgcctttgtttctgttagactgcttttcagttctgtattgagtatcttaagtactgtagaaaagatgtcacttcttcctttaaggctgttttgtaatatatataaggactggaattgtgtttttaaagaaaagcattcaagtatgacaatatactatctgtgttttcaccattcaaagtgctgtttagtagttgaaacttaaactatttaatgtcatttaataaagtgaccaaaatgtaaaaaaaaaaaaaaaaaa

SEQ ID NO: 32043 - DNA, 7122 bp, Homo Sapiens
gcgcgtgtctggctgctaggccgacaccaaggactggccgggtacccgggaagaaagcacgtgctccagcagttgccgcgcccagccccgagagaggccctagggcgctgcgggctttcggggtccgcagtccccccgcgacgcgagccaacgggaggcgtcaaaagacccgggccttgtgtggcaggctcgcctggcgctggctggcgtggcccttggccgtcgtcacctgtggagagcacgtcttctctgccgcgccctctgcgcaaggaggagactcgacaacatgtcacccgcgctccaagacctgtcgcaacccgaaggtctgaagaaaaccctgcgggatgagatcaatgccattctgcagaagaggattatggtgctggatggagggatggggaccatgatccagcgggagaagctaaacgaagaacacttccgaggtcaggaatttaaagatcatgccaggccgctgaaaggcaacaatgacattttaagtataactcagcctgatgtcatttaccaaatccataaggaatacttgctggctggggcagatatcattgaaacaaatacttttagcagcactagtattgcccaagctgactatggccttgaacacttggcctaccggatgaacatgtgctctgcaggagtggccagaaaagctgccgaggaggtaactctccagacaggaattaagaggtttgtggcaggggctctgggtccgactaataagacactctctgtgtccccatctgtggaaaggccggattataggaacatcacatttgatgagcttgttgaagcataccaagagcaggccaaaggacttctggatggcggggttgatatcttactcattgaaactatttttgatactgccaatgccaaggcagccttgtttgcactccaaaatctttttgaggagaaatatgctccccggcctatctttatttcagggacgatcgttgataaaagtgggcggactctttccggacagacaggagagggatttgtcatcagcgtgtctcatggagaaccactctacattggattaaattgtgctttgggtgcagctgaaatgagaccttttattgaaataattggaaaatgtacaacagcctatgtcctctgttatcccaatgcaggtcttcccaacacctttggtgactatgatgaaacgccttctatgatggccaagcacctaaaggattttgctatggatggcttggtcaatatagttggaggatgctgtgggtcaacaccagatcatatcagggaaattgctgaagctgtgaaaaattgtaagcctagagttccacctgccactgcttttgaaggacatatgttactgtctggtctagagcccttcaggattggaccgtacaccaactttgttaacattggagagcgctgtaatgttgcaggatcaaggaagtttgctaaactcatcatggcaggaaactatgaagaagccttgtgtgttgccaaagtgcaggtggaaatgggagcccaggtgttggatgtcaacatggatgatggcatgctagatggtccaagtgcaatgaccagattttgcaacttaattgcttccgagccagacatcgcaaaggtacctttgtgcatcgactcctccaattttgctgtgattgaagctgggttaaagtgctgccaagggaagtgcattgtcaatagcattagtctgaaggaaggagaggacgacttcttggagaaggccaggaagattaaaaagtatggagctgctatggtggtcatggcttttgatgaagaaggacaggcaacagaaacagacacaaaaatcagagtgtgcacccgggcctaccatctgcttgtgaaaaaactgggctttaatccaaatgacattatttttgaccctaatatcctaaccattgggactggaatggaggaacacaacttgtatgccattaattttatccatgcaacaaaagtcattaaagaaacattacctggagccagaataagtggaggtctttccaacttgtccttctccttccgaggaatggaagccattcgagaagcaatgcatggggttttcctttaccatgcaatcaagtctggcatggacatggggatagtgaatgctggaaacctccctgtgtatgatgatatccataaggaacttctgcagctctgtgaagatctcatctggaataaagaccctgaggccactgagaagctcttacgttatgcccagactcaaggcacaggagggaagaaagtcattcagactgatgagtggagaaatggccctgtcgaagaacgccttgagtatgcccttgtgaagggcattgaaaaacatattattgaggatactgaggaagccaggttaaaccaaaaaaaatatccccgacctctcaatataattgaaggacccctgatgaatggaatgaaaattgttggtgatctttttggagctggaaaaatgtttctacctcaggttataaagtcagcccgggttatgaagaaggctgttggccaccttatccctttcatggaaaaagaaagagaagaaaccagagtgcttaacggcacagtagaagaagaggacccttaccagggcaccatcgtgctggccactgttaaaggcgacgtgcacgacataggcaagaacatagttggagtagtccttggctgcaataatttccgagttattgatttaggagtcatgactccatgtgataagatactgaaagctgctcttgaccacaaagcagatataattggcctgtcaggactcatcactccttccctggatgaaatgatttttgttgccaaggaaatggagagattagctataaggattccattgttgattggaggagcaaccacttcaaaaacccacacagcagttaaaatagctccgagatacagtgcacctgtaatccatgtcctggacgcgtccaagagtgtggtggtgtgttcccagctgttagatgaaaatctaaaggatgaatactttgaggaaatcatggaagaatatgaagatattagacaggaccattatgagtctctcaaggagaggagatacttacccttaagtcaagccagaaaaagtggtttccaaatggattggctgtctgaacctcacccagtgaagcccacgtttattgggacccaggtctttgaagactatgacctgcagaagctggtggactacattgactggaagcctttctttgatgtctggcagctccggggcaagtacccgaatcgaggctttcccaagatatttaacgacaaaacagtaggtggagaggccaggaaggtctacgatgatgcccacaatatgctgaacacactgattagtcaaaagaaactccgggcccggggtgtggttgggttctggccagcacagagtatccaagacgacattcacctgtacgcagaggctgctgtgccccaggctgcagagcccatagccaccttctatgggttaaggcaacaggctgagaaggactctgccagcacggagccatactactgcctctcagacttcatcgctcccttgcattctggcatccgtgactacctgggcctgtttgccgttgcctgctttggggtagaagagctgagcaaggcctatgaggatgatggtgacgactacagcagcatcatggtcaaggcgctgggggaccggctggcagaggcctttgcagaagagctccatgaaagagttcgccgagaactgtgggcctactgtggcagtgagcagctggacgtcgcagacctgcgcaggctgcggtacaagggcatccgcccggctcctggctaccccagccagcccgaccacaccgagaagctcaccatgtggagactcgcagacatcgagcagtctacaggcattaggttaacagaatcattagcaatggcacctgcttcagcagtctcaggcctctacttctccaatttgaagtccaaatattttgctgtggggaagatttccaaggatcaggttgaggattatgcattgaggaagaacatatctgtggctgaggttgagaaatggcttggacccattttgggatatgatacagactaactttttttttttttgccttttttattcttgatgatcctcaaggaaatacaacctagggtgccttaaaaataacaacaacaaaaaacctgtgtgcatctggctgacacttacctgcttctggttttcgaagactatttagtggaaccttgtagaggagcagggtcttcctgcagtgcctggaaaacaggcgctgtttttttgggaccttgcgtgaagagcagtgagcagggttcctgtggtttccctggtccctctgagatggggacagactgaagacagaggtcgtttgatttcaaagcaagtcaacctgcttttttctgtttttacagtggaatctaggaggccacttagtcgtctttttttcctcttagaagaaaagcctgaaactgagttgaatagagaagtgtgaccctgtgacaaaatgatactgtgaaaaatggggcattttaatctaagtggttataacagtggattctgacggggaaggtgtagctctgttctcttcggaagacctcgttttctaaaggctggactaaatggctgcagaactccctttggcaaaaggcatgcgctcactgcttgcttgtcagaaacactgaagccatttgccccagtgtggtcaagcagccatgctttctgggcattttcgtcctcccataatttcatatttccgtacccctgaggaaacaaaaaggaaatgaggagagaaagttactgttaagggtggttaacattttttttgttttgttttgttttggttttttttttttgagacagagtctggctctgtcgcccaggctggagtgcaggggcgcaatctcggctcatagcaagctccgcctcctgggttcatgccattctcctgcctcagcctccagagtagctgggactacaggtgcccaccaccacacccggctaattttttgtgtttttacaaaatacaaaaaagtagagacaggatttcactgtgttagccaggatggtcttgatctcccgacctcgtgatctgcccacctcagcctcccaaaatgctgggattacaggcgtgagccaccgagcctggccggttaacatcttttaattgtttccaggattgagcaggttctcagctgggctctgatatcccgtgcggagttggacaagtgggcagcataaagtcactcatttcttaccattttattcccctcaattctcaatatattcagtaatgaagaatggtgccaccactcaagcaacaagcctcaaactcaaccatgtcatctttttcttggatgattgcagttatttcaaaaatttgcatgcaaaatatacactcatcctacttcaagatggtggtggcaatagtcaggagaaggtaacattggagtcctggtttgattcgaaggatgaagacgaagaagcaagggaggaacaaatgaagaaccatctttgttcatgaataggaatattcaagattataaaggtatcaggtctcctaaaattgatctatggatttaataccattttcaatggaaattccaacagattttattgaatgaaacaagcaggtgtttatatggagtagcaaaggacttaaaattaccaaatgcttctaaatatgaaggagaggttggggacacgcaccctatgtgataccaagttttattgtcaagacagtgtcatggtgcagaggtaggcattctgagcaggggaacaaaataagggcctagaaactcacccgtgcatatgttgacctttgcaaaatgacctggtgacatggcaagtcagtggggacaggaaggaccactccctaagtaatcccagaacaatggctattcatgtgggaaaaaaagaaattttactttctctcaccttacctggtgataagttccaaatatgttaagggctttaatacaaaaagcaaaaattgtcagtgtttggatgaaaaaagccttagggcaggaaagaatctcttgagacataaagtagtaatcataaaggacaagatggttaagtcaattctgttaaaactcaaggcttatattaagcaaacacttgaagtgagaagatgatccacaacttgagaagacatttataatacaaataactgatgaaggattcataatcacaaatatagagaattcctatttaaaaaaatagaaaaatagtgaagactacacaagaggaaatagggcttttaaataaatagatgttctgtagcattggtcagggaaatatgaattaggaccacaatgagattccattttatatccataagatttgcaaaggttgggtctgacagtaccagttgttagatctgtagggacttgtacaacattgtggatgtgtaaacaggcaccactgctttaaaaaacaattatcccttacagacttgaacatttgcagacgttatgatcttgcttccaactcccacctgtatgtccagcaaactcttgcatgtggccactaggaggaatgtgtaagaatgttcatagttacatatttataatagttaataactggaaaaagtgaaatgtatgtctgtctacaggaaaataggtgaataattagatatatatattcattctacgggatattattcagtagtggaaatgagtgaactacagctatacctcacaataagaatgaatctcagaaaatattaaggaaaaaagcaagtttgaagagaccacatggggcgtactatttttattgggcccaaaaacaagcaaaaccaaagaatatgtagtctaagcatacgtatacaataaaactatgctattaaaaaaaaaaggtaactgataaaccaaaattgagcatagtaattacccacagaaggaggaagtggaagggacaggagcacataggtagatgccaagttatgcagctgttctggttcctcctggtaggcttacaagtgtttactatatgctattaatacattatactttataactaatagataacagttttttacatattaaatatgttctacttaaatatattataaaaaataaaggcaaagtggaatgtttaaaaaaaaaaaaaaaaaaaaaaaa

SEQ ID NO: 32044 - DNA, 8239 bp, Homo Sapiens
gcgctcttccggcagcggtacgtttggagacgccgggaacccgcgttggcgtggttgactagtgcctcgcagcctcagcatgggggaacatggcctggagctggcttccatgatccccgccctgcgggagctgggcagtgccacaccagaggaatataatacagttgtacagaagccaagacaaattctgtgtcaattcattgaccggatacttacagatgtaaatgttgttgctgtagaacttgtaaagaaaactgactctcagccaacctccgtgatgttgcttgatttcatccagcatatcatgaaatcctccccacttatgtttgtaaatgtgagtggaagccatgagcgcaaaggcagttgtattgaattcagtaattggatcataacgagacttctgcggattgcagcaactccctcctgtcatttgttacacaagaaaatctgtgaagtcatctgttcattattatttctttttaaaagcaagagtcctgctatttttggggtactcacaaaagaattattacaactttttgaagacttggtttacctccatagaagaaatgtgatgggtcatgctgtggaatggccagtggtcatgagccgatttttaagtcaattagatgaacacatgggatatttacaatcagctcctttgcagttgatgagtatgcaaaatttagaatttattgaagtcactttattaatggttcttactcgtattattgcaattgtgttttttagaaggcaagaactcttactttggcagataggttgtgttctgctagagtatggtagtccaaaaattaaatccctagcaattagctttttaacagaactttttcagcttggaggactaccagcacaaccagctagcacttttttcagctcatttttggaattattaaaacaccttgtagaaatggatactgaccaattgaaactctatgaagagccattatcaaagctgataaagacactatttccctttgaagcagaagcttatagaaatattgaacctgtctatttaaatatgctgctggaaaaactctgtgtcatgtttgaagacggtgtgctcatgcggcttaagtctgatttgctaaaagcagctttgtgccatttactgcagtatttccttaaatttgtgccagctgggtatgaatctgctttacaagtcaggaaggtctatgtgagaaatatttgtaaagctcttttggatgtgcttggaattgaggtagatgcagagtacttgttgggcccactttatgcagctttgaaaatggaaagtatggaaatcattgaggagattcaatgccaaactcaacaggaaaacctcagcagtaatagtgatggaatatcacccaaaaggcgtcgtctcagctcgtctctaaacccttctaaaagagcaccaaaacagactgaggaaattaaacatgtggacatgaaccaaaagagcatattatggagtgcactgaaacagaaagctgaatcccttcagatttcccttgaatacagtggcctaaagaatcctgttattgagatgttagaaggaattgctgttgtcttacaactgactgctctgtgtactgttcattgttctcatcaaaacatgaactgccgtactttcaaggactgtcaacataaatccaagaagaaaccttctgtagtgataacttggatgtcattggatttttacacaaaagtgcttaagagctgtagaagtttgttagaatctgttcagaaactggacctggaggcaaccattgataaggtggtgaaaatttatgatgctttgatttatatgcaagtaaacagttcatttgaagatcatatcctggaagatttatgtggtatgctctcacttccatggatttattcccattctgatgatggctgtttaaagttgaccacatttgccgctaatcttctaacattaagctgtaggatttcagatagctattcaccacaggcacaatcacgatgtgtgtttcttctgactctgtttccaagaagaatattccttgagtggagaacagcagtttacaactgggccctgcagagctcccatgaagtaatccgggctagttgtgttagtggattttttatcttattgcagcagcagaattcttgtaacagagttcccaagattcttatagataaagtcaaagatgattctgacattgtcaagaaagaatttgcttctatacttggtcaacttgtctgtactcttcacggcatgttttatctgacaagttctttaacagaacctttctctgaacacggacatgtggacctcttctgtaggaacttgaaagccacttctcaacatgaatgttcatcttctcaactaaaagcttctgtctgcaagccattccttttcctactgaaaaaaaaaatacctagtccagtaaaacttgctttcatagataatctacatcatctttgtaagcatcttgattttagagaagatgaaacagatgtaaaagcagttcttggaactttattaaatttaatggaagatccagacaaagatgttagagtggcttttagtggaaatatcaagcacatattggaatccttggactctgaagatggatttataaaggagctttttgtcttaagaatgaaggaagcatatacacatgcccaaatatcaagaaataatgagctgaaggataccttgattcttacaacaggggatattggaagggccgcaaaaggagatttggtaccatttgcactcttacacttattgcattgtttgttatccaagtcagcatctgtctctggagcagcatacacagaaattagagctctggttgcagctaaaagtgttaaactgcaaagttttttcagccagtataagaaacccatctgtcagtttttggtagaatcccttcactctagtcagatgacagcacttccgaatactccatgccagaatgctgacgtgcgaaaacaagatgtggctcaccagagagaaatggctttaaatacgttgtctgaaattgccaacgttttcgactttcctgatcttaatcgttttcttactaggacattacaagttctactacctgatcttgctgccaaagcaagccctgcagcttctgctctcattcgaactttaggaaaacaattaaatgtcaatcgtagagagattttaataaacaacttcaaatatattttttctcatttggtctgttcttgttccaaagatgaattagaacgtgcccttcattatctgaagaatgaaacagaaattgaactggggagcctgttgagacaagatttccaaggattgcataatgaattattgctgcgtattggagaacactatcaacaggtttttaatggtttgtcaatacttgcctcatttgcatccagtgatgatccatatcagggcccgagagatatcatatcacctgaactgatggctgattatttacaacccaaattgttgggcattttggctttttttaacatgcagttactgagctctagtgttggcattgaagataagaaaatggccttgaacagtttgatgtctttgatgaagttaatgggacccaaacatgtcagttctgtgagggtgaagatgatgaccacactgagaactggccttcgattcaaggatgattttcctgaattgtgttgcagagcttgggactgctttgttcgctgcctggatcatgcttgtctgggctcccttctcagtcatgtaatagtagctttgttacctcttatacacatccagcctaaagaaactgcagctatcttccactacctcataattgaaaacagggatgctgtgcaagattttcttcatgaaatatattttttacctgatcatccagaattaaaaaagataaaagccgttctccaggaatacagaaaggagacctctgagagcactgatcttcagacaactcttcagctctctatgaaggccattcaacatgaaaatgtcgatgttcgtattcatgctcttacaagcttgaaggaaaccttgtataaaaatcaggaaaaactgataaagtatgcaacagacagtgaaacagtagaacctattatctcacagttggtgacagtgcttttgaaaggttgccaagatgcaaactctcaagctcggttgctctgtggggaatgtttaggggaattgggggcgatagatccaggtcgattagatttctcaacaactgaaactcaaggaaaagattttacatttgtgactggagtagaagattcaagctttgcctatggattattgatggagctaacaagagcttaccttgcgtatgctgataatagccgagctcaagattcagctgcctatgccattcaggagttgctttctatttatgactgtagagagatggagaccaacggcccaggtcaccaattgtggaggagatttcctgagcatgttcgggaaatactagaacctcatctaaataccagatacaagagttctcagaagtcaaccgattggtctggagtaaagaagccaatttacttaagtaaattgggtagtaactttgcagaatggtcagcatcttgggcaggttatcttattacaaaggttcgacatgatcttgccagtaaaattttcacctgctgtagcattatgatgaagcatgatttcaaagtgaccatctatcttcttccacatattctggtgtatgtcttactgggttgtaatcaagaagatcagcaggaggtttatgcagaaattatggcagttctaaagcatgacgatcagcataccataaatacccaagacattgcatctgatctgtgtcaactcagtacacagactgtgttctccatgcttgaccatctcacacagtgggcaaggcacaaatttcaggcactgaaagctgagaaatgtccacacagcaaatcaaacagaaataaggtagactcaatggtatctactgtggattatgaagactatcagagtgtaacccgttttctagacctcataccccaggatactctggcagtagcttcctttcgctccaaagcatacacacgagctgtaatgcactttgaatcatttattacagaaaagaagcaaaatattcaggaacatcttggatttttacagaaattgtatgctgctatgcatgaacctgatggagtggccggagtcagtgcaattagaaaggcagaaccatctctaaaagaacagatccttgaacatgaaagccttggcttgctgagggatgccactgcttgttatgacagggctattcagctagaaccagaccagatcattcattatcatggtgtagtaaagtccatgttaggtcttggtcagctgtctactgttatcactcaggtgaatggagtgcatgctaacaggtccgagtggacagatgaattaaacacgtacagagtggaagcagcttggaaattgtcacagtgggatttggtggaaaactatttggcagcagatggaaaatctacaacatggagtgtcagactgggacagctattattatcagccaaaaaaagagatatcacagctttttatgactcactgaaactagtgagagcagaacaaattgtacctctttcagctgcaagctttgaaagaggctcctaccaacgaggatatgaatatattgtgagattgcacatgttatgtgagttggagcatagcatcaaaccacttttccagcattctccaggtgacagttctcaagaagattctctaaactgggtagctcgactagaaatgacccagaattcctacagagccaaggagcctatcctggctctccggagggctttactaagcctcaacaaaagaccagattacaatgaaatggttggagaatgctggctgcagagtgccagggtagctagaaaggctggtcaccaccagacagcctacaatgctctccttaatgcaggggaatcacgactcgctgaactgtacgtggaaagggcaaagtggctctggtccaagggtgatgttcaccaggcactaattgttcttcaaaaaggtgttgaattatgttttcctgaaaatgaaaccccacctgagggtaagaacatgttaatccatggtcgagctatgctactagtgggccgatttatggaagaaacagctaactttgaaagcaatgcaattatgaaaaaatataaggatgtgaccgcgtgcctgccagaatgggaggatgggcatttttaccttgccaagtactatgacaaattgatgcccatggtcacagacaacaaaatggaaaagcaaggtgatctcatccggtatatagttcttcattttggcagatctctacaatatggaaatcagttcatatatcagtcaatgccacgaatgttaactctatggcttgattatggtacaaaggcatatgaatgggaaaaagctggccgctccgatcgtgtacaaatgaggaatgatttgggtaaaataaacaaggttatcacagagcatacaaactatttagctccatatcaatttttgactgctttttcacaattgatctctcgaatttgtcattctcacgatgaagtttttgttgtcttgatggaaataatagccaaagtatttctagcctatcctcaacaagcaatgtggatgatgacagctgtgtcaaagtcatcttatcccatgcgtgtgaacagatgcaaggaaatcctcaataaagctattcatatgaaaaaatccttagagaagtttgttggagatgcaactcgcctaacagataagcttctagaattgtgcaataaaccggttgatggaagtagttccacattaagcatgagcactcattttaaaatgcttaaaaagctggtagaagaagcaacatttagtgaaatcctcattcctctacaatcagtcatgatacctacacttccatcaattctgggtacccatgctaaccatgctagccatgaaccatttcctggacattgggcctatattgcagggtttgatgatatggtggaaattcttgcttctcttcagaaaccaaagaagatttctttaaaaggctcagatggaaagttctacatcatgatgtgtaagccaaaagatgacctgagaaaggattgtagactaatggaattcaattccttgattaataagtgcttaagaaaagatgcagagtctcgtagaagagaacttcatattcgaacatatgcagttattccactaaatgatgaatgtgggattattgaatgggtgaacaacactgctggtttgagacctattctgaccaaactatataaagaaaagggagtgtatatgacaggaaaagaacttcgccagtgtatgctaccaaagtcagcagctttatctgaaaaactcaaagtattccgagaatttctcctgcccaggcatcctcctatttttcatgagtggtttctgagaacattccctgatcctacatcatggtacagtagtagatcagcttactgccgttccactgcagtaatgtcaatggttggttatattctggggcttggagaccgtcatggtgaaaatattctctttgattctttgactggtgaatgcgtacatgtagatttcaattgtcttttcaataagggagaaacctttgaagttccagaaattgtgccatttcgcctgactcataatatggttaatggaatgggtcctatgggaacagagggtctttttcgaagagcatgtgaagttacaatgaggctgatgcgtgatcagcgagagcctttaatgagtgtcttaaagacttttctacatgatcctcttgtggaatggagtaaaccagtgaaagggcattccaaagcgccactgaatgaaactggagaagttgtcaatgaaaaggccaagacccatgttcttgacattgagcagcgactacaaggtgtaatcaagactcgaaatagagtgacaggactgccgttatctattgaaggacatgtgcattaccttatacaagaagctactgatgaaaacttactatgccagatgtatcttggttggactccatatatgtgaaatgaaattatgtaaaagaatatgttaataatctaaaagtaatgcatttggtatgaatctgtggttgtatctgttcaattctaaagtacaacataaatttacgttctcagcaactgttatttctctctgatcattaattatatgtaaaataatatacattcagttattaagaaataaactgctttcttaataaaaaaaaaaaaaaaaaaaaaaaaaaaaaaaaaa

SEQ ID NO: 32045 - DNA, 2530 bp, Homo Sapiens
cagcttccctgtggtttcccgaggcttccttgcttcccgctctgcgaggagcctttcatccgaaggcgggacgatgccggataatcggcagccgaggaaccggcagccgaggatccgctccgggaacgagcctcgttccgcgcccgccatggaaccggatggtcgcggtgcctgggcccacagtcgcgccgcgctcgaccgcctggagaagctgctgcgctgctcgcgttgtactaacattctgagagagcctgtgtgtttaggaggatgtgagcacatcttctgtagtaattgtgtaagtgactgcattggaactggatgtccagtgtgttacaccccggcctggatacaagacttgaagataaatagacaactggacagcatgattcaactttgtagtaagcttcgaaatttgctacatgacaatgagctgtcagatttgaaagaagataaacctaggaaaagtttgtttaatgatgcaggaaacaagaagaattcaattaaaatgtggtttagccctcgaagtaagaaagtcagatatgttgtgagtaaagcttcagtgcaaacccagcctgcaataaaaaaagatgcaagtgctcagcaagactcatatgaatttgtttccccaagtcctcctgcagatgtttctgagagggctaaaaaggcttctgcaagatctggaaaaaagcaaaaaaagaaaactttagctgaaatcaaccaaaaatggaatttagaggcagaaaaagaagatggtgaatttgactccaaagaggaatctaagcaaaagctggtatccttctgtagccaaccatctgttatctccagtcctcagataaatggtgaaatagacttactagcaagtggctccttgacagaatctgaatgttttggaagtttaactgaagtctctttaccattggctgagcaaatagagtctccagacactaagagcaggaatgaagtagtgactcctgagaaggtctgcaaaaattatcttacatctaagaaatctttgccattagaaaataatggaaaacgtggccatcacaatagactttccagtcccatttctaagagatgtagaaccagcattctgagcaccagtggagattttgttaagcaaaccgtgccctcagaaaatataccattgcctgaatgttcttcaccaccttcatgcaaacgtaaagttggtggtacatcagggaggaaaaacagtaacatgtccgatgaattcattagtctttcaccaggtacaccaccttctacattaagtagttcaagttacaggcaagtgatgtctagtccctcagcaatgaagctgttgcccaatatggctgtgaaaagaaatcatagaggagagactttgctccatattgcttctattaagggcgacataccttctgttgaataccttttacaaaatggaagtgatccaaatgttaaagaccatgctggatggacaccattgcatgaagcttgcaatcatgggcacctgaaggtagtggaattattgctccagcataaggcattggtgaacaccaccgggtatcaaaatgactcaccacttcacgatgcagccaagaatgggcacgtggatatagtcaagctgttactttcctatggagcctccagaaatgctgttaatatatttggtctgcggcctgtcgattatacagatgatgaaagtatgaaatcgctattgctgctaccagagaagaatgaatcatcctcagctagccactgctcagtaatgaacactgggcagcgtagggatggacctcttgtacttataggcagtgggctgtcttcagaacaacagaaaatgctcagtgagcttgcagtaattcttaaggctaaaaaatatactgagtttgacagtacagtaactcatgttgttgttcctggtgatgcagttcaaagtaccttgaagtgtatgcttgggattctcaatggatgctggattctaaaatttgaatgggtaaaagcatgtctacgaagaaaagtatgtgaacaggaagaaaagtatgaaattcctgaaggtccacgcagaagcaggctcaacagagaacagctgttgccaaagctgtttgatggatgctacttctatttgtggggaaccttcaaacaccatccaaaggacaaccttattaagctcgtcactgcaggtgggggccagatcctcagtagaaagcccaagccagacagtgacgtgactcagaccatcaatacagtcgcataccatgcgagacccgattctgatcagcgcttctgcacacagtatatcatctatgaagatttgtgtaattatcacccagagagggttcggcagggcaaagtctggaaggctccttcgagctggtttatagactgtgtgatgtcctttgagttgcttcctcttgacagctgaatattataccagatgaacatttcaaattgaatttgcacggtttgtgagagcccagtcattgtactgtttttaatgttcacatttttacaaataggtagagtcattcatatttgtctttgaatc

SEQ ID NO: 32046 - DNA, 545 bp, Homo Sapiens
atggccctgctactggccctcagcctgctggttctctggacttccccagccccaactctgagtggcaccaatgatgctgaagactgctgcctgtctgtgacccagaaacccatccctgggtacatcgtgaggaacttccactaccttctcatcaaggatggctgcagggtgcctgctgtagtgttcaccacactgaggggccgccagctctgtgcacccccagaccagccctgggtagaacgcatcatccagagactgcagaggacctcagccaagatgaagcgccgcagcagttaacctatgaccgtgcagagggagcccggagtccgagtcaagcattgtgaattattacctaacctggggaaccgaggaccagaaggaaggaccaggcttccagctcctctgcaccagacctgaccagccaggacagggcctggggtgtgtgtgagtgtgagtgtgagcgagagggtgagtgtggtctagagtaaagctgctccacccccagattgcaatgctaccaataaagccgcctggtgtttacaact

SEQ ID NO: 32047 - DNA, 2534 bp, Homo Sapiens
  misc_feature (2527)..(2527): n is a, c, g, or t
ggcacgagcttgctcgcggagagaggagctaggagcctcggccaatgggagccggcgttgttggaggccacggcggcgcagccccaaagcgagcgaagctagggtcgccgccactgccgcaggaggcgtgaggggataaaaacattcagatggcagatcacagtttttcagatggggttccttcagattccgtggaagctgctaaaaatgcaagtaacacagaaaagctcacagatcaggtgatgcagaatcctcgagttctggcagctttacaggagcgacttgacaatgtccctcacaccccttccagctacatcgaaactttacctaaagcagtaaaaagaagaattaatgcattgaaacaacttcaggtgagatgtgctcacatagaagccaagttctatgaagaggtacatgacttggaaagaaagtatgcagcgctataccagcctctctttgacaagagaagagaatttatcaccggcgatgttgaaccaacagatgcggaatcggaatggcacagtgaaaatgaagaggaagagaaattggctggagacatgaaaagtaaagtagtcgtcacagaaaaagcagcggcaacggctgaagagccagatcccaaaggaattccagagttctggtttaccatcttcagaaatgtggacatgctgagtgaattagtccaggaatatgatgaaccaatcttgaaacacctgcaggatattaaagtgaaattttctgaccctggacagcctatgtcttttgtgttagagttccactttgaacccaacgactactttaccaactcagtcctgacaaaaacctacaagatgaaatcagaaccagataaggctgatcccttttcctttgaaggtcctgagattgtggactgtgacgggtgtactattgactggaagaaaggaaagaatgttactgtcaaaaccatcaagaaaaagcagaagcataagggtcgaggcactgttagaacaattacgaaacaagtacccaatgagtcctttttcaacttcttcaatccattgaaagcatccggggatggagaatcactggatgaagattctgaattcacattagcctctgattttgaaattggacactttttccgtgagcggatagtcccgcgggctgtgctgtacttcactggggaggccatagaagatgatgacaattttgaagaaggtgaagaaggagaagaggaggaattagaaggtgacgaggagggagaagacgaggatgatgcggaaattaaccccaaggtgtaatttttgtctgttaatcattcatacgtttctagaaggaacccagccagccggcggaatgcaagcagcagtaggaagcggaggcgggtgcctggcagaccggctgtcgggactccaggcctgtgggcggggcctcggtccttgccgcagcacaatcccgtggacagagcttactccatctaactcgttttcaagtgcatgattttcactttcacttttcctttttccttattattttgattaacttgtacagtggcaactgaaatgcatttcagaaataggaggtttcgtccagcaccctctgcagccttggtgcctgtagctctggacttccctgggcctttccctgtgggagggccctgtagacacatcagggtggggtgggggtcacttggcaaaaagggccgaggtctggtgatgtggttcccaggatcttggaacctctcccacccctcctgcagttggactgaattctaccctttcatccgaagaaacccacttgctgtttccagccgctgaatctgctgagtgtgcagcctgcatcacctgctgtatgccgatcatctcagaaagggctgtgtagagtagggccctgttctccttaggatgttgcttcttgatttttttttttttttaggggtgggtcagggttgtgacacaccagcccaggtgagagctgctgcgggtcacctcatatttatttatcccttcttgcctgtgaggactgcggcttttcgctgtggctcgtccttaacgtttctgaaccaccttggtgccctgagcaggaagatgtgccacttcctagcaggcgcaaggcctgtgcggaagaaacgccgctccctgccaccagggctgaagatgcgagcccgtcctcatgacgcaggcgccaccctgctgccggagccgggcttcggcatcttctccactgagggactgggctgggaagtcctgcgtttcagtggagcgtatgagcgtcaagtcctgctttctcagtagccccattgcggggccccaccattcatcctgtctgaaggtcctgggtttggtgtgaccgcttggcggctggtgggtggggttttcaagtgggtgacggcgctctccggcaaccggggatggccgtgtccgcactgaccaggcctgtggagagtgctcggcctaaccttagaacacaattgtaactgaaaacagtgttttcaatttgtacagaatagttagaatattctaataaagtggtgaaacattgaaaaaaaaanaaaaaaa

SEQ ID NO: 32048 - DNA, 6085 bp, Homo Sapiens
cgggcaggtccggaggcggctgcaggagctggatggggagctggaggcggcgcttggactgctggacatcatcctggccaagaacccgtccggcctgacccagtacatccctgttttggtcgactcttttctgcccttgctgaagtctcccctggctgctcccaggatcaagaaccccttcttgtccttggctgcctgtgtcatgccctctaggctcaaggctttgggcactttggtgagccacgtgaccctgcgcctgctgaagccagagtgtgtcctggataagtcctggtgccaggaagagctgtcggtggctgtgaagagggcggtgatgctgctgcacacccacaccatcaccagcagggtgggcaagggggagccaggtgctgcgcccttgtccgcgccagccttctccttagtcttcccgtttctgaagatggtgctgacggagatgccccaccacagtgaggaggaggaggagtggatggcccagattcttcagatcctcactgtccaagcccagctgagggcctcccccaacaccccacccgggcgggtggacgagaatggcccggagttgctgcctcgcgtggccatgctgcgtcttctgacttgggtgatcgggacgggctcgcctcgcttacaggttctggcttcagacaccctgaccaccctgtgtgccagcagcagtggtgatgatggctgtgcctttgcagagcaggaggaggtggacgtgctgctctgtgccttgcagtccccgtgtgccagcgtgcgggaaaccgtgctccgggggctgatggaactccacatggtattgccagcacctgatactgatgagaagaatggcctgaaccttctgcggagactctgggtggtcaagtttgacaaggaggaggagatccggaagctggctgagaggctctggtcaatgatgggcctagacctgcagccagacctctgctccttgctgattgacgacgtgatctatcatgaggcggctgtaaggcaggcaggggccgaagccctctcccaagcagtggcacgttaccagcggcaggcggcggaggttatgggcaggctcatggagatttaccaggaaaagctctaccggccgcccccagtgctggatgctttgggacgagttatttcagaatctcctccagatcagtgggaagccaggtgtggcttggcgttggccctcaacaagctctcccagtatttggacagctctcaggtgaagccactctttcagttttttgtccctgatgccctcaatgaccgacacccagatgtccggaagtgcatgttggatgcagccctcgcaacgctcaacactcatgggaaggagaacgtcaactcgctgttgccagtattcgaggagttcctgaagaacgcgcccaatgatgccagctatgatgctgtgcgacagagtgtggtggtcctgatgggctctctggccaagcacctggacaagagtgaccccaaagtgaagcccattgttgccaagctcatcgctgccctctccaccccctcccagcaggtccaggagtccgtagccagctgcttgccacccctcgtgccagccatcaaggaggatgctggagggatgatccagaggcttatgcagcagctgctggagtcagacaagtacgcagagcgcaaaggggccgcctatggcctggcgggcctggtgaagggcctgggcatcctctcgctgaagcaacaggagatgatggcggcactgactgatgccatccaagataagaagaacttccgccggcgagagggagccctctttgccttcgagatgctctgcaccatgctggggaaactttttgagccgtatgtggttcacgtgctgccccatctgctcctgtgctttggggatggaaaccagtatgtgcgtgaggctgcagatgactgtgccaaggctgtgatgagcaacttgagtgctcacggggtgaagctggtgctcccctccttactggctgccctggaggaggaatcgtggcggaccaaagctgggtcagtggagcttcttggggcaatggcgtactgtgctcctaagcagctgtcatcctgtctacccaacattgtgcccaagcttacggaggtgctgaccgactcccatgtcaaagtccagaaggctggacagcaggcgctcaggcagatcggctccgttatcaggaacccggagatcctggccattgctccagtcctcctggatgtcctgacggatccctccaggaagacccagaagtgcttgcagaccctgctggacaccaagtttgtccacttcattgatgccccatccctggccctcatcatgcccattgtccagagagccttccaggaccgttccacggacacgcggaagatggcagcccagattattggcaacatgtactccctgacagaccagaaggacttggctccgtacctgcccagcgtgacgcctggcctgaaagcatcgcttttggaccctgtgcctgaggtgcggaccgtatctgcaaaggcccttggggtcatggtgaagggcatgggggagtcgtgctttgaggacttgctgccgtggctgatggagacactgacctatgagcagagctctgtggatcgctcaggcgctgcacaggggttggctgaggtcatggccggtttgggggtggagaagttggagaagttgatgccagaaatcgtggctacagccagcaaagtggacattgcaccccatgtccgagatggctacattatgatgtttaactacctgcccatcacctttggagacaagtttactccttatgtggggcccatcatcccctgtatcctcaaagctcttgctgatgagaatgagtttgtgcgtgacaccgccctgcgcgcgggccagcgggttatctccatgtacgctgagacagccatcgccctgctgctgccccagctagagcaaggcctctttgatgacctttggagaatcaggttcagctctgttcagctccttggggatctcctgtttcacatctcaggagtcactgggaagatgaccacagaaactgcctctgaggatgataactttggaactgcccagtccaacaaggcgatcatcactgccctgggggtagagcggcggaaccgggtgttggcagggctgtacatgggccgctcagacacccagctggtggtgcggcaggcgtccctgcatgtctggaagattgttgtctccaataccccccgcaccttgcgtgagatcctacccactctctttgggctcctgctgggtttcctggccagcacgtgtgcagataagagaacgattgcagcgagaacattgggagatcttgtgcggaagttaggggagaaaatcctccccgagatcatccccatccttgaggaaggcctgaggtctcagaagagcgatgagaggcagggtgtgtgcattggcctaagtgagatcatgaagtccaccagccgggatgccgtgctgtatttctctgaatccctcgtgcccacggcaaggaaggctttgtgtgacccactggaggaggtcagagaggcggcagccaagactttcgagcagctgcattccaccatcggccaccaggctctggaggacattctcccatttttactaaagcagctggatgacgaggaggtgtcagagtttgccttggatggtctgaagcaagtcatggctattaagagtcgtgtggtgctgccctaccttgtgcccaagctgacaacgccacctgtcaacacccgggtgctggctttcctttcgtcagtggctggtgatgccctcacccgtcatcttggcgtgatcctcccagcggtcatgctggccctgaaggaaaagcttgggaccccagatgagcagctggagatggccaattgtcaggctgtgatcctctccgtagaggatgacacagggcaccggatcatcatcgaggatctgctggaggccacccgcagccctgaggtgggcatgaggcaagctgctgccatcatcctcaacatctactgttcccgctcaaaggctgactacaccagccacctgcggagcctggtctcgggcctgatccgcctcttcaatgactccagccctgtggttctggaggagagctgggatgccctaaatgccatcactaagaagctggatgctggcaaccagttggcactcattgaagagctgcacaaggaaatccggctcatagggaacgagagcaaaggcgagcatgtgccaggattctgcctcccgaagaagggagtgacctccatccttccagtgttgcgggaaggagtcctgactggcagccctgagcagaaggaggaggcagccaaagccttaggcttggtaatccgcctgacctcggctgacgtcctgaggccctccgtggtcagcatcactggccctctgatccgcatcctgggggacaggttcagctggaatgtgaaggcggctctgctcgagacactcagcctcttgttggctaaggttgggattgccctgaagcccttcctgccccagctgcagaccactttcaccaaagccctgcaggactccaaccggggggtgcgcctgaaggccgcagatgctctggggaagctcatttccatccacattaaggtggaccccctcttcacagagctgctcaatggcatccgcgccatggaggacccaggtgtcagggacaccatgctgcaggccctgaggtttgtgattcagggagcaggggccaaagtggatgccgtcatccggaaaaacatcgtctcactcctgctgagcatgctgggacacgatgaggacaacactcgcatctcctcagccgggtgcctaggggaactgtgtgcctttttgactgaagaggagcttagtgccgttctacagcagtgcttgctggcggacgtgtccggcattgactggatggttcggcacgggcggagcctggcactttccgtggctgtgaatgtggctcctggcagactttgtgccggcagatatagcagtgatgttcaggaaatgatcctgagcagtgccacggcggacaggatccccattgcggtgagcggggtccggggcatgggctttctcatgagacaccacatcgagacaggcggagggcagttgccgcgcaaactttccagcctgttcgttaagtgtctgcagaacccatccagcgacatcaggctggtggctgagaagatgatctggtgggcaaataaggacccactgcctcccctggacccccaggccatcaagcccatcctgaaggctcttcttgacaacaccaaggataagaacaccgtggtcagggcctacagcgaccaggcaattgtcaacctcctcaagatgcggcagggtgaagaggtgtttcagtccctctccaagatcctggatgtggccagtttggaggtgctgaacgaggttaaccgaaggtccctgaagaagctggccaagccaggccgactccacggagcaggtggacgacaccatcctgacatgagaggcctgggcagcagcagcattgccgctccacatctttgctcaatgttttcatttttgaaaatacatttgttccaatggggagcttggaagatggcgttcccagaaagtattttaatatcaatagaccacagccaaagccttaaatcaaacccacacacaactgaaaattgcctcctccatctctcaccttttcctgtggagaagagaaggaaaagcacacgcatgcgcctcagcaaatggcagcccaggagctgtttgtccagtttagcatggctaggtctggaactataatagcagggtcagactgtgggttcctcttctcctgtgcttgagctctggtttgagagctggcgctaccaacctttttcctatatcccgagtggggcacagacggtggatctctgcccagtgtggtgtgtctggcttggcttttcaatattgtgaggtctgaatggatctgatccctgtcagatgaaaatgattcacagctctggcagttcccaagtctggggaggggtataggtttgaaaggctgtttgaaagaggaatgtttaataaaggctttgattaaaaaaaaaaaaaaaaaaa

SEQ ID NO: 32049 - DNA, 1789 bp, Homo Sapiens
gcgcgctcgtcgccgaggcgagctaagccgccgctcgccatggggagccccgcacatcggcccgcgctgctgctgctgctgccgcctctgctgctgctgctgctgctgcgcgtcccgcccagccgcagcttcccaggatcgggagactcaccactagaagacgatgaagtcgggtattcacaccctagatataaagataccccgtggtgctcccccatcaaggtgaagtatggggatgtgtactgcagggcccctcaaggaggatactacaaaacagccctgggaaccaggtgcgacattcgctgccagaagggctacgagctgcatggctcttccctactgatctgccagtcaaacaaacgatggtctgacaaggtcatctgcaaacaaaagcgatgtcctacccttgccatgccagcaaatggagggtttaagtgtgtagatggtgcctactttaactcccggtgtgagtattattgttcaccaggatacacgttgaaaggggagcggaccgtcacatgtatggacaacaaggcctggagcggccggccagcctcctgtgtggatatggaacctcctagaatcaagtgcccaagtgtgaaggaacgcattgcagaacccaacaaactgacagtccgggtgtcctgggagacacccgaaggaagagacacagcagatggaattcttactgatgtcattctaaaaggcctccccccaggctccaactttccagaaggagaccacaagatccagtacacagtctatgacagagctgagaataagggcacttgcaaatttcgagttaaagtaagagtcaaacgctgtggcaaactcaatgccccagagaatggttacatgaagtgctccagcgacggtgataattatggagccacctgtgagttctcctgcatcggcggctatgagctccagggtagccctgcccgagtatgtcaatccaacctggcttggtctggcacggagcccacctgtgcagccatgaacgtcaatgtgggtgtcagaacggcagctgcacttctggatcagttttatgagaaaaggagactcctcattgtgtccacacccacagcccgaaacctcctttaccggctccagctaggaatgctgcagcaagcacagtgtggccttgatcttcgacacatcaccgtggtggagctggtgggtgtgttcccgactctcattggcaggataggagcaaagattatgcctccagccctagcgctgcagctcaggctgttgctgcgaatcccactctactccttcagtatggtgctagtggataagcatggcatggacaaagagcgctatgtctccctggtgatgcctgtggccctgttcaacctgattgacacttttcccttgagaaaagaagagatggtcctacaagccgaaatgagccagacctgtaacacctgacatgatggttcctctcttggcaattcctcttcattgtctacatagtgacatgcacacgggaaagccttaaaaatatccttgatgtacagattttatttgtaattttaaaagtctattttattatgagctttctttgcacttaaaaattagcatgctgctttttgtacttggaagtgtttcaaaaaattatatgaccatatttactctttctaacctttctttactccatcatggctggttgatttgtagagaaattagaacccataaccatacacaggctatcaacatgttattcaatgtgacacctaactcttttctattttgttttttaagtaagacttttattaataaaacg

SEQ ID NO: 32050 - DNA, 3923 bp, Homo Sapiens
gagccagcgagccagcgcgcgcgggcgggcggacagatcggagccgagcggggccgggcggggcgctccctgcagggctctgcgcggcgtgccgcggcggccgcgggctccggccccgggccatgagcccctccgcgactcggcgctgagcccgccaccggtccagcgccccaggacccgccgccggctgccggcttgccgaagccccctcaggatcccctcaacaaggatggaactgaaggccgaggaggaggaggtgggtggcgtccagccggtgagcatccaggccttcgccagcagctccacactgcacggcctggcccacatcttctcctacgagcggctgtctctgaagcgggcactgtgggccctgtgcttcctgggctcgctggctgtgctgctgtgtgtgtgcacggagcgtgtgcagtactacttccactaccaccatgtcaccaagctcgacgaggtggctgcctctcagcttaccttccctgctgtcacgctgtgcaacctcaacgagttccgctttagccaagtctccaagaatgacctgtatcatgctggggagctgctggccctgctcaacaacaggtatgagataccagacacacagatggcagatgaaaagcagctggagatactgcaggacaaagccaacttccgcagcttcaaacccaaacccttcaacatgcgtgagttctacgaccgagctgggcacgacattcgagacatgctgctctcctgccacttccggggggaggtctgcagcgctgaagacttcaaggtggtcttcacacgctatggaaagtgctacacgttcaactcgggccgagatgggcggccgcggctgaagaccatgaaggatgggacgggcaatgggctggaaatcatgctggacatccagcaggacgagtacctgcctgtgtggggggagactgacgagacgtccttcgaagcaggcatcaaagtgcagatccatagtcaggatgaacctcctttcatcgaccagctgggctttggcgtggccccaggcttccagacctttgtggcctgccaggagcagcggctcatctacctgcccccaccctggggcacctgcaaagctgttaccatggactcggatttggatttcttcgactcctacagcatcactgcctgccgcatcgactgtgagacgcgctacctggtggagaactgcaactgccgcatggtgcacatgccaggggatgccccatactgtactccagagcagtacaaggagtgtgcagatcctgctctggacttcctggtggagaaggaccaggagtactgcgtgtgtgaaatgccttgcaacctgacccgctatggcaaagagctgtccatggtcaagatccccagcaaagcctcagccaagtacctggccaagaagttcaacaaatctgagcaatacataggggagaacatcctggtgctggacattttctttgaagtcctcaactatgagaccattgaacagaagaaggcctatgagattgcagggctcctgggtgagctgctgatgacacctgtccccttctcatgccatgggcatggcgtggctccctatcatccaaaagcagggtgctcacttctgtcccatgagggtcctccaccccagaggcccttccccaaaccctgttgtcttggtgacatcgggggccagatggggctgttcatcggggccagcatcctcacggtgctggagctctttgactacgcctacgaggtcattaagcacaagctgtgccgacgaggaaaatgccagaaggaggccaaaaggagcagtgcggacaagggcgtggccctcagcctggacgacgtcaaaagacacaacccgtgcgagagccttcggggccaccctgccgggatgacatacgctgccaacatcctacctcaccatccggcccgaggcacgttcgaggactttacctgctgagccccgcaggccgctgaaccaaaggcctagatggggaggactaggagagcgrgggggcccccagctgcctcctcacatctgccctgggractccccacactccggggcagatctttcctcttgtctgtggtaaggaaggagtcttgaccatagagtcctctctctgcctctatcccattcyttttacatttaacaaaactaatctaaaaaagaactaaaaagggagaacggggcaagggacctcaggctgcccctctctcctccatgctgcctcccctagctcccagcctgaattctgtctatctagctgtctgccatctgagtgtccatctacattctgctgccaccagtcaccaaaggcccttcccagtgaggggtggaagggatctctggggtctggaatttggccccaaaccagagaatgtaccttaagggggagggctagtgtgggggagggaggcttccccagccttaagagaccctctcagcccagtgactgtccccaaacccaagtctcctggcaggaactaaaacctcagccccactctctcacaccatgtggaatctcgtgggggtcggggatccccttaagaagtggtaatggggacaagatgcggccctggtgctgtaggctacatcctgatacctataagttcacccccaccccacagctgctggagagaaatcccaagaggcagcccttcctcaccatcccattaaagacckggctggttagcgtccagctcagggagaagggcgctagtgcctaacctcactggtccctctcccggaggcccttgtagagggccacgtccataaattttcttatggaactctcccacatcctcttccccaacttcatttgcttctctcaacaacctcatctgcattttctatttctatatgatacagactctatattgctatatctctgtatatactttcccagccctgtctgtctccaccccatcccctcttgtctctgagaaccattctcccaccccaagttccaccttctatgtttctactccctccctggtctctgaatgccttygcctgtataaagagttggactctctcccctggtgtctgtactgtgtacacacatccctctgagaagcacaaggagacgacacgcgcattgtaacctttgcactgtctcagtggcgacaaaggaagctgtgaatcacaagctctgcctctttctggcctcaccctctcccccaacccgggcaccctcggccctccctgcagccttaacattctcttcccctgctcctcctatcccattgccctctgcccagctgacagtggcatccccagggaaggggttgctgtagagatagcccccacccaggggatggaggtctaccctggacactaagccaagtgtgtcagagacagaagggagctggggattggcgactcctgaagttggggcagtgggatgctgacaggcagaagctgaggtcctcagtcagtggcctttcctccttctgggtgcccagccccctttcctcacctgatacccaagcccaccacttttattttctggtgaggtgggtttgggaggaaagagaggcctagaggaggagttgaaagctctgctgttgtctcaccctatcttaatgagagacaagtgaggtggagggcctgccccccctccctccaccagacactccttccaggcctgagccccaacccctcttcaggccttccttccctagctgtgtcttggtcttcaatcccagaacaggacctgtgagcagctgcattggcctggagctggagagtaaggctgtaggatctttggaatctcttggttcctaagagtttcctcagagatcatacctccccagagggaagcaggaatgaggccaaaaagtgtgcattggataggggaacagcaggcagggctctgggtgacgcatgcctctggtctaataaactgggtttcaaccaaaaaaaa

SEQ ID NO: 32051 - DNA, 4278 bp, Homo Sapiens
cgggaggagcggggtccgcgcggcggacgaggcgggggcaggaggcgcaggcagagcgagcgcgggaggtcgccgcagcacagaggacaccgcgcgccgccgctcaacatggtcgctgcgcacgctgcccattcttcctcctctgccgagtggatcgcctgcctggataaaagaccactggagcgatccagcgaagatgtggatataatcttcactcgactgaaagaagttaaagcttttgagaaatttcacccaaatctccttcatcagatttgcttatgtggttattatgagaatctggaaaagggaataacattatttcgccagggtgatattggaacaaactggtatgctgtcctggcagggtctttggatgttaaagtatctgagaccagcagtcaccaggatgctgtgaccatctgtaccctgggaattgggacggcctttggagagtccattctggacaacacaccccgccatgcaaccatcgttaccagggagagcagtgaactgctccgcatcgagcagaaggacttcaaggcactatgggagaaatatcgacagtatatggcaggacttctggctcctccttatggtgttatggaaacgggctctaacaatgacaggattcctgacaaggagaacacacctctcattgaacctcacgttcctcttcgtcctgctaacaccattaccaaggtcccttcagagaagatcctcagagctggaaaaattttacgaaatgccattctctctcgagcacctcacatgataagagatagaaaataccacctaaagacatacagacaatgctgtgtgggaactgaactggtggactggatgatgcagcagacaccatgtgttcactcccggactcaagctgttggcatgtggcaagtcctgttagaagatggtgttctcaaccacgtggaccaggagcaccatttccaagacaaatatttattctatcgatttctggatgatgagcacgaggatgcccctttgcctactgaggaggagaagaaggagtgtgatgaggagctccaggacaccatgctgctgctgtcacagatgggccccgacgcccacatgaggatgatccttcgcaaaccacctggccagaggactgtggatgacctagagattatctatgaggagcttcttcatattaaagccttatcccatctttctaccacagtgaaacgagagttagcaggtgttctcatttttgagtctcacgccaaaggagggactgtgttgtttaaccagggggaagaaggtacctcctggtacattattctaaaaggatcagtgaatgtagtcatttacggcaagggtgtggtctgcaccctgcatgaaggagatgacttcggcaagttagcactagtgaatgatgccccacgagctgcctctatcgtcttacgagaagataactgccatttcttaagagtagacaaggaggatttcaaccggatcctaagggacgtggaggcgaatacagtcagacttaaagaacatgaccaagatgtcttggtgctggagaaggtcccagcagggaacagagcttctaatcaaggaaactcacagcctcagcaaaagtatactgtgatgtcaggaacacctgaaaaaattttagagcattttctagaaacaatacgccttgaggcaactttaaatgaagcaacagattctgttttaaatgactttattatgatgcactgtgtttttatgccaaatacccagctttgcccggcactggtggcccactaccacgcacagccttcacaaggtacagaacaggagaaaatggattatgccctcaacaataagaggcgagtcatccgcctggttctacagtgggctgccatgtatggagacctcctgcaagaggatgacgtatctatggccttcctggaggagttttatgtatctgtatcagatgatgcccggatgattgctgccctcaaggagcaactgccagagttggagaagattgtcaagcaaatctcagaagatgcaaaggcaccacaaaagaagcacaaggttcttttgcaacagttcaatacgggcgatgagagagcccagaagcgccagcctatccgcggctctgatgaagttctgtttaaggtctattgcatggaccacacctacacaaccattcgggtgccagtggccacttcggtgaaggaagtcatcagtgcagttgccgacaagctgggctccggggagggcctgatcatagtcaagatgagttccggaggagaaaaggtggtgctcaaacctaatgatgtttcagtatttacgacgctcaccattaatggacgcctgtttgcttgcccgcgagagcaattcgattcactgactcccttaccagaacaggaaggcccaactgttggaacagtgggaacttttgaactgatgagctccaaagatttagcataccagatgacaatttatgattgggaactcttcaactgcgtgcatgagctggagctaatctatcacacatttggaaggcataattttaaaaagaccacagcaaacttggatttgttcctgaggagatttaatgaaattcagttttgggtcgtcactgagatctgcctttgttctcagctcagcaagcgtgttcagctattaaaaaaatttattaagatagcagcccactgtaaggagtataaaaatctgaattccttttttgccatcgtcatgggactaagtaacattgctgtgagccgcttggcactaacgtgggagaaactgccaagcaagttcaagaagttctatgcggagtttgaaagtttaatggacccttcaaggaaccacagggcctacaggctgacagtagctaagctggaacctcctctcatccccttcatgcctttgctcattaaagatatgacatttactcatgaggggaacaagacgttcattgacaatctagtaaactttgaaaaaatgcgcatgattgcaaatacggccagaacagtgagatactacaggagccaacccttcaatcctgatgcagctcaagctaataagaaccatcaggatgtccggagttatgtacggcaattaaatgtgattgacaaccagagaactttatcacagatgtcacacagattagagcctcgtcgaccatagacatttcaaatgcccaaagcaacagtttgtctccagtccacaatctttcaaaaatgccatttatgctactactgactgtattgccactagagaattctacaaaacaagcaaaaacacatcctgagacacctcagggctgcattcagcttaccagctacctagcaagagaaggaattatttgacatgcctaaagcttacacactctagcttaggaatccccagtttgtggctaccctgtttcatttccacttgtgccatcttctttgctgaagtgttgaataaggcccacgtgaagagtttggtagaaatagccttgtcaagagaactagcaagcccctgacatttttttctaagagtgtttatgggatgagatgtgctacaaatgggatagatttggataaaattttaactcaacatcttgatttggagcctggggtttcgggaaggtgttgaggaatctatagaagtccaaattataggttgtattcttccatcttcattgtcttacctctgaaggaatagaacctgaccacattattatgaaacattatggctgtttatgtaatttagggaggactggtctgtaatttctgaatgtatatagaataatatttatgtttacaatgtaacttttcaaaatttacaaatcaggattatatacataagaattccactaagaaatgccaagattcttaaatttgccagcgttaaagtagaaaataacatttcagaagagcacaatatgcataaaacatttttcaaaattgaaatattttcctgggcattaaaaacctttactattggctacaaatttattgtacctgatgaaaacatattttctggacttaaatgttattacaaatatcttaattttcagtaattgttttgcactttcaaagattgtaaatagttcattcaatcaatggtatagagttatttatttgctacataatagatactgtgccaaataattactttttatttattttatttagtacgtaattttgaagtacattttttcctgttttcacaattagactacatttaatgtgtaggaattgtatgtatgtatatcttctgtaaataacatctagtatcttcactaaatataattgtcgaccgggaaaaaaaaaa

SEQ ID NO: 32052 - DNA, 3713 bp, Homo Sapiens
attaacaggccgtggttaggaaggacggagaaggggcgttcgctcctttgggacttttcatgcctcgtttttttttcagatgtggcttggtctgggcgcaaggtcccagcagccagcttaagcttactcttctgtgaaaggggaaagtatcccctgtggaaagcggttaaacttgtggagggggtgcgggacgtgagttcttccccatgccaggcgaatggtgtggccttgagctggtccaggagccggctcgacgtgtctgagggaggcccggagggggcggggaggtggcccacagaacgcgggttctgtaaagagacgttgggaagattcgattccgagaagaggaagaaccggattgaaagagagccaggccgctgagggggagggggctgctaagatggcgtcggcctcctccgggccgtcgtcttcggtcggtttttcatcctttgatcccgcggtcccttcctgtaccttgtcctcagcatctggaatcaagagacccatggcatctgaggtgccttatgcctctggcatgcccatcaagaaaataggccatagaagtgttgattcctcaggagagacaacatataaaaagacaacctcatcagccttgaaaggtgccatccagttaggcattacccacactgtggggagcctgagtaccaaaccagagcgtgatgtcctcatgcaagatttctacgtggttgagagtatcttctttcccagtgaagggagcaacctgacccctgctcatcactacaatgactttcgtttcaagacctatgcacctgttgccttccgctacttccgggagctatttggtatccggcccgatgattacttgtattccctctgcagtgagccgctgattgaactctgtagctctggagctagtggttccctattctatgtgtccagcgacgatgagttcattattaagacagtccaacataaagaggcggaatttctgcagaagctgcttccaggatactacatgaacctcaaccagaaccctcggactttgctgcctaaattctatggactgtactgtgtgcaggcaggtggcaagaacattcggattgtggtgatgaacaatcttttaccaagatcggtaaaaatgcatatcaaatatgacctcaaaggctcaacctacaaacggcgggcttcccagaaagagcgagagaagcctcttcccacatttaaagacctagacttcttacaagacatccctgatggtctttttttggatgctgacatgtacaacgctctctgtaagaccctgcagcgtgactgtttggtgctgcagagcttcaagataatggattacagcctcttgatgtcaatccataatatagatcatgcacaacgagagcccttaagcagtgaaacacagtactcagttgatactcgaagaccggccccccaaaaggctctgtattccacagccatggaatccatccagggagaggctcgacggggtggtaccatggagactgatgaccatatgggtggcatccctgcccggaatagtaaaggggaaaggcttctgctttatattggcatcattgacattctacagtcttacaggtttgttaagaagttggagcactcttggaaagccctggtacatgacggagacactgtctcagtgcatcgcccaggcttctacgctgaacggttccagcgcttcatgtgcaacacagtatttaagaagattcccttgaagccttctccttccaaaaagtttcggtctggctcatctttctctcggcgagcaggctccagtggcaactcctgcattacttaccagccatcggtctctggggaacacaaggcacaagtgacaacaaaggcagaagtggagccaggcgttcaccttggtcgtcctgatgttttacctcagactccacctttggaggaaatcagtgagggctcgcctattcctgaccccagtttctcacctctagttggagagactttgcaaatgctaactacaagtacaaccttggaaaagcttgaagttgcagagtcagagttcacccattaagcgcaaagcctcagaagacctggaacaagattctgccatctctgtgatcccaagatgtcagcccttgccccagcaatgctgaattttcttctacttggtcatcaaaaaaggagtgtaatagaagtgaggggagctgctcctccatcttcttcctgaagaagaaccttctctccttcctcttcctcatgaatgggccttagtgcctcagagagttgaggaccgcagcatcccctccactccagagttgggtggtacggattttcaactggccaaccctttgcctccactattgaatttttttcagacccccattcttcatgctggaaatgggattgctggacttggcagctttctttcccctcgtctttgactaggaaccggactcttaatttcctcaggacagactagctggcacattatccctaccttagttctttctctctgactcctggaagaatactcctgtaatctctgtaaaggtttttgggggataagggtgtttaaccacctcccagctttcttcttcttttttttttctgaaaaaaggaaaaagcacacagcacacaatttcaagccattttcagatcagaactccagaagtgttgacaagatgcctattcgtagagttccctcagaagagccatggtgtttatgaagagaagagtagtgattgctctgccagaagcagctcctctttaaactcctcctctcttgatgaatttcttaaggctgaaggaatgaagagagtgggacatggggtaatctttatcccttttgttaaaacaggaggcagccatgggctgggagatcatagcccttcctaggcagaatcctgttcactgccaggctatagtaattattactattttgcaatttgaaatatattctggttgtttttctaaatgtgaagacttaccaaatgaattttagatcattctccagaggagattttttttgctcttctcatcttttccaacagtgttctcctgtttgtggagctaaggtaaagaggggacacttctgtctgtttaacagacagtccatatctgtgaggccagcaaatattttcttaaactcatggggagacagcagattcttgccttggtgaggtcattgctgtgccatatgtcctacccccctgtcttcatgcagggaagttggaaatgggggctacatatgccctctcctccccgtctacaagagttgtggttttccatctgatccttccactcttgtcaggggaagaagggggcctggtatctcaggcagattgttgaattcctgttctatcccttctctatcccaccctgccttgataatatgttagcccataccccaaataactgtctatattagacacccccagccagtttctggctgcctgtctttgctgccatgttttttacaagaaggaaagaattcttgctatttttttttcataatttactatttatgatgtatttaagtgttttattaaggacagagttctgttaggggtgggagggaatatttgagggagggctgggtcttagggaaaggaatggggaagcaacatttttattaagtgttactatttgcctctactttgtattgttcagaaatggcaaatacaatataaaagtgatatatggttttaatgtaataaactttaatgagttattta

SEQ ID NO: 32053 - DNA, 2010 bp, Homo Sapiens
gattaacaggccgtggttaggaaggacggagaaggggcgttcgctcctttgggacttttcatgcctcgtttttttttcagatgtggcttggtctgggcgcaaggtcccagcagccagcttaagcttactcttctgtgaaaggggaaagtatcccctgtggaaagcggttaaacttgtggagggggtgcgggacgtgagttcttccccatgccaggcgaatggtgtggccttgagctggtccaggagccggctcgacgtgtctgagggaggcccggagggggcggggaggtggcccacagaacgcgggttctgtaaagagacgttgggaagattcgattccgagaagaggaagaaccggattgaaagagagccaggccgctgagggggagggggctgctaagatggcgtcggcctcctccgggccgtcgtcttcggtcggtttttcatcctttgatcccgcggtcccttcctgtaccttgtcctcagcatctggaatcaagagacccatggcatctgaggtgccttatgcctctggcatgcccatcaagaaaataggccatagaagtgttgattcctcaggagagacaacatataaaaagacaacctcatcagccttgaaaggtgccatccagttaggcattacccacactgtggggagcctgagtaccaaaccagagcgtgatgtcctcatgcaagatttctacgtggttgagagtatcttctttcccagtgaagggagcaacctgacccctgctcatcactacaatgactttcgtttcaagacctatgcacctgttgccttccgctacttccgggagctatttggtatccggcccgatgattacttgtattccctctgcagtgagccgctgattgaactctgtagctctggagctagtggttccctattctatgtgtccagcgacgatgagttcattattaagacagtccaacataaagaggcggaatttctgcagaagctgcttccaggatactacatgaacctcaaccagaaccctcggactttgctgcctaaattctatggactgtactgtgtgcaggcaggtggcaagaacattcggattgtggtgatgaacaatcttttaccaagatcggtaaaaatgcatatcaaatatgacctcaaaggctcaacctacaaacggcgggcttcccagaaagagcgagagaagcctcttcccacatttaaagacctagacttcttacaagacatccctgatggtctttttttggatgctgacatgtacaacgctctctgtaagaccctgcagcgtgactgtttggtgctgcagagcttcaagataatggattacagcctcttgatgtcaatccataatatagatcatgcacaacgagagcccttaagcagtgaaacacagtactcagttgatactcgaagaccggccccccaaaaggctctgtattccacagccatggaatccatccagggagaggctcgacggggtggtaccatggagactgatgaccatatgggtggcatccctgcccggaatagtaaaggggaaaggcttctgctttatattggcatcattgacattctacagtcttacaggtttgttaagaagttggagcactcttggaaagccctggtacatgacggagacactgtctcagtgcatcgcccaggcttctacgctgaacggttccagcgcttcatgtgcaacacagtatttaagaagattccctgcgttcaccttggtcgtcctgatgttttacctcagactccacctttggaggaaatcagtgagggctcgcctattcctgaccccagtttctcacctctagttggagagactttgcaaatgctaactacaagtacaaccttggaaaagcttgaagttgcagagtcagagttcacccattaagcgcaaagcctcagaagacctggaacaagattctgccatctctgtgatcccaagatgtcagcccttgccccagcaatgctgaattttcttctacttggtcatcaaa

SEQ ID NO: 32054 - DNA, 1579 bp, Homo Sapiens
aaaacactaaggggagcgcgcgaagctgaacttggcgctcgatgggggccgttagccgccctagagcgcgcggagccgcagaggcgtagctggactacaacgcagtgcatctcgggaggccaactcgactggactgggtgagaggacagaggtggctcgatgggcggcccgaaggccggggatcatggcgggaaggcgggcccagccaggttcagccccgccccgacccgccgctccccacccccggccggcctcgcgtgccttcccgcagcactgccgtccccgggatgctgagcgcccaccgtctccccgcagccccctcatgcccggctgcgagctgcccgtgggcacctgcccggacatgtgcccggccgccgagcgcgcccagcgcgaaagggagcaccgcctgcaccgcttggaggtggtgccgggttgccgccaggacccgccccgcgcggatccgcagcgcgcggtgaaggagtacagccgacccgccgccggcaagccccggcccccgcccagccagttgcgtccgccctccgtgctgctggccaccgtgcgctacctggccggtgaggtggcggagagcgccgacatcgcccgcgccgaggtggccagcttcgtggcagaccgcttgcgagctgtgcgcctggacctggcgctgcagggagcgggcgacgccgaggcagcggtggtgctggaggcggcgctggccacgctgctggccgtagtggcgcggctcgggcccgacgcggcgcggggacccgcggacccggtgctgctgcaggcccaggtgcaggagggcttcggctcgctgcggcgctgctacgcgcggggcgccgggccgcacccccgccaacccgccttccagggcctctttctgctctataacctgggtgagtcgggatcctggcggctgggcagagcgtggggacaggagcccaccatgacagtggaggctcggtggaagccctgcatgaggttctacagctgcctgctgccctgcgcgcctgcccgcccctccgcaaggccttggcggtagatgctgccttccgagagggcaatgctgcccgcctgttccgtctgctccagaccctgccctacctgccaagttgcgctgtgcagtgccatgtgggccatgcccgccgggaagccctggcccgcttcgctcgtgcctttagcacccccaagggccagaccttgcctctgggcttcatggtcaacctcttggccctggatggactcagggaagcacgggacctgtgccaggcccacgggctgcccttggacggagaggagagagttgtgttcctgaggggtcgctacgtggaggaagggctaccgcctgccagtacgtgcaaggtgttagtggagagcaaacttcgaggacgtaccctggaggaggtggtcatggcagaggaggaagatgagggcacggacagacctgggtccccagcctgaggagggagcgtgagcctcccagagccccaggactgggccagagcacttaggtttctttttccatggtttccaggtaataaaaggaacttgttttgttggtaaaaaaaaaaaaaaaaaa

SEQ ID NO: 32055 - DNA, 1198 bp, Homo Sapiens
cctttatgtctagcacatttgatgaaataaaaaacttctgaatctgaatagaagttctactgtttcaggcttgaaccttttacatgctcaagagattcaaatggtctctgtgtgtagatcatgccaccgcctccaaagcctaatccacatcacttctgagaggcaaggctgagcatatggtgacatcagctctgtgttgagatggtgatgaggatgatggctcgctggccaggcagggcagccgaaggtcagggacctgtcctaactaactgcagccttgcctttagtgtttgtcattctcagatacaacacggtatgtccagtgtccgtttttattactttaaagcatttgagggcttaattgtgtatagtagaaatactattttagacaaataattatctgtgtacagatatttgatatactctaagtaaattttctaatttcactaagtacgtttttaggctcctctcaaatactgcgtattgaagaaaaaaatctgacaccaccgagccaaagatgcttttttgtctgttttcgttgtttaacagaatggaaagagtaatgcatagtgcttcctggtgtctcctgattgattgattgtgcacaaagtaggacgataaataaataaaatggagtctgatgggacattgattaaaggtgaaggatgattgatatatagatcatgaaaagaaaaatgaatggcaggaaaaaaagtttggtccttaatatactttggcctagttaaaatatgtgcctttttggtgtgttttgttcatcactacaagataaaaaggaaacattacaactcaagtctttaaaaagttcatttattgaaaatcatatgtataacctagcatacgaatgagcagatttaaacacataacttcaagccatttctgaaaacatacaccaggagctctgctcagctagagtcagactccagctccagcccgactgcgtgcggggacagcgcccgcgttgatgaggaccagccccactgcaggctgaggcggtgtcaccctgggaaggtcgtggtgcgttgtggcatattaagtctaaaccagatgaatgtaaatatctctttgtaaatcatttatttcactctgttccatccaggtcagcaatcagattgtggcatgctgggtaactggaaaaaataataaaaagtaagtttcaataaaaaaaaaaaaaaaaaaa

SEQ ID NO: 32056 - DNA, 1792 bp, Homo Sapiens
tgcagatgccctgtgccgtgcagctcagcatgcataggtggggtagttggttgatgagcttttctttaggagaacagattttgagctatctttttttgttggaaccctgcacacaactgtcattatgtagatggttttcctctcaggtggttggttttctccagagaagaacccttgaatctcctgcctgtggaggtggacgtgtggttggtgttctgggtgccccttgccctgagctctgttctccatggtgcctgtttcctgggtctgcagccccttctcagtttctctgaagagtaaacctctcccctgcttggggaggagcatgggggttacgtagtagcctggctgcataacatgggcttagtagctcagttttccatcatgaaccagagcctcatctttcatggttcctgtgcctccgagggctgggctactggggtgtctgtcagtccagatggctttgttctcaagtttcctccacagtggatatgaatgtttgcaacttacactcaattacaacgctttcctctacttttctccaagtttgctgaaatctttatttgtggatatctcctctctttttgctttgtcctcataggttaaaacgttttaaaattccctaacagtaggaaatttagtagggttttggaagggagaggaggtgtaagatggtcactcttccatgtttaactggaagtggaaagtctaggcttttgcttcaggcctgggaggtgcacatgaaacagtccctcccagtggctgcctggggggtccctgaagggtgtgagaccaccgtgaatcctggggcagggcacttgcagtacatgtgctatgtgtttgctagtattgttttagatgtttgatctcctagcctttgcttttctttgtatttttcctgctttagtccatttcccttctagctccttctgttctcatttatcttctgctgctgcttggagttacattttcagcaagtctgtaacacctctctgaaccaaaggctctcaagttcatctttctttctccaagcctacgcctgtgctgctgtcatgagtggcgagcttctgtttcttctgtcttcttgtcagtcccaagtgcccttttacagagaatgcctgtttttcactgtctagctcagttaccaggagtccctgtgaatgacacccacaggtccctcaaagaagtcagatttctcttggacctgataaagcaaacaaaatgtgacccaagcaggctgagttggacgggtcccttcttaccttcgccctctgccatgttgacattcttatctgatggcacaggctgggagttcaggatccacttagatggggtccgttcaggggataccagcgttcacatttttccttttaagaaagggtcttggcctgaatgttccccatccggacacaggctgcatgtctctgtgagtgtcaaagctgccatgaccatctcggtaacctactcttactccacaatgtctatattcactgcagggctctatgattagtccataatgtaaatgcctggcccaagacgtatggcctgagtttatccaaggcccaaacaattaccaaacattcctcttagatagaagacagatttctttcccttggcaaagatcttctactaagatatgttacaggatgttttacattctcttggtcttataataacaccacgcccaatccagtatttgatgcgtcggtggtcactcggaaggttgttattttaaaaatacttattgttctcagtctgcagttctcacagctgtaaaaaaaaaaaaaaaaaa

SEQ ID NO: 32057 - DNA, 1717 bp, Homo Sapiens
tcgctcgctcctccttcgcttcgcctcgccgccgccatgcaggaaatcatcgccagcgtggaccacatcaagtttgacttggagatcgcggtggagcagcagctgggggcgcagccgctgcccttccccggcatggacaagtcgggcgctgctgtctgtgaattctttttgaaagctgcctgcggcaaagggggcatgtgtccgtttcgccacatcagtggtgagaagacagttgtgtgcaaacactggctgcgtggcctatgcaagaaaggggaccagtgtgagttcctgcatgagtatgacatgaccaagatgcccgagtgctacttctactccaagttcggggagtgcagcaacaaggaatgtcccttcctgcacatcgaccccgagtccaagatcaaggactgtccttggtatgaccgcggcttctgcaagcacggtcccctctgcaggcaccggcacacacggagagtcatctgtgtgaattacctcgtgggattctgcccggaggggccctcgtgtaaattcatgcaccctcgatttgaactgcccatgggaaccaccgagcagcccccactgccacagcagacacagcctccagcaaagcaaagtaacaatccgccattacaaaggtcgtcctccttgatccagttaacgagtcagaactcttctcccaatcagcagagaaccccgcaggtcatcggggtcatgcagagtcaaaacagcagcgcgggcaaccggggaccccggccactggagcaggtcacctgttacaagtgtggcgagaaaggacactacgccaacagatgcaccaaagggcacttggcctttctcagtggacagtgacagcagctggagccagctccgagcagcccgggggccccgctgttgggagtgtgcatttaactgtttcatgcgcttgttggcgcgactgtggctcgagctggcccgcagacacgtgggtttcatcactctgaggggccacgtctgttagtttcctatcattttgccgtagtattttttgaaaaagggacatgtgtcctgtgggtccctgcagtcgacatcatgtttggctgggcatcgatgcctcctttctgggactcccggcacaactcccctcatccagggagggaggcagctgctggggaggggcttggctaggtagttctgtgtggcggtggtcattcccctcattaaacaccagttcttggtgacgccaggggctggtaggtcattcaaagctgtggccagctcacgcctgcttcctccctccctgccctgctgaatcctaaagctgtgcctatatctgtgatttgaatgagggagccctttggggcaaattcaggtgcccccattgcctcaggctggccctggtcccaggtggcagcggttgaggaggggtacagggctctcaagcctgaggttttcttctctgggcttaattttctcttggggtacgtgcctgacagtgtttaaggtgtccgttgaactggagttgcagacttttaaatagatgaccccttcagatcatctgtgcctacctcctgcccatcaggcgtctacactgtcactcagacacctgtggcatgtggaggagactgccctgtcctgagcctggaaaatgtgaaactgtctcctgcaacctgctgggcatgtgggcctggctgtgttcaattgcaagaacaatttttatgaaatggattaaagcttgtttttt

SEQ ID NO: 32058 - DNA, 2730 bp, Homo Sapiens
aagtttaagtgaatatgcggcttgggctccaaaagttgctgtacggtattttattttaaagtagaaatctgtccgcttttcacttacggaggccttacagtgtgtgttctgtgttacttgagtttatacgcactgcagaatttgtttatcctgctcttttggaaacgtattccggaagcgaaaccctgagtaatcggaagtggttaggagtgagagagctgctggatatgcggagggactgggcgggtcggcttccgaatggaagaggtctgtgagaagttaacctggtgataccgatccgaagagcctatcaagtgaagccccctgaaatacggagaataagaatcttagaggttgttcagcagaagtcttggagtgcattttcagtggttaaggtgaaaaaatgactactaaaaatttagaaaccaaagtcaccgttacttcatccccaatccgaggagcaggagatggaatggaaactgaggaaccacctaaatctgttgaagttacctccggagtccaatctagaaagcatcatagtcttcagagtccatggaagaaagcagttccatcagagagcccaggagttcttcagctagggaaaatgctcactgaaaaagcaatggaagttaaagctgtaagaatattagttcccaaagctgctataactcatgatatccccaacaaaaatacaaaggttaagtctctgggacatcataaaggagaattccttggtcagtcagagggagttatagaacctaataaggaactctcagaggtaaagaatgtattggaaaagctcaagaattctgaaagaaggttactacaggacaaagaaggtctttcaaaccagctccgtgtacagacagaggtaaatcgtgagttaaaaaagttactggtggcttctgttggggatgatcttcagtatcactttgaacgtctagcccgtgagaaaaatcagcttattttagaaaatgaagccctaggtcgaaacacagctcagctttctgaacagttagaacgtatgtcaatacagtgtgatgtatggcgaagtaaattccttgcaagcagggtaatggcagatgagttaaccaactcaagagcagctttacagcgtcaaaaccgtgatgcacacggggctatacaagatctcctaagtgaacgggaacagtttcgtcaagaaatgatagctacccagaaattattggaggagctcttagtttccttgcaatggggaagagagcaaacttactcccctagtgtacaaccccacagcacagcagagctagcattaacaaatcacaagttggcaaaagcagtaaattctcatcttctgggaaatgttggcattaacaatcaaaaaaagattccatcaacagttgaattctgcagcaccccagctgagaaaatggctgaaacggttctaagaattttagatccagttacctgcaaagagagttcacctgataatccattttttgagtcttcaccaaccaccttacttgctacaaagaaaaatattggacgatttcatccctatactagatatgaaaatataactttcaattgctgcaatcactgccggggagaactgattgccctttaacagtcaatatgttggaggcatgctaaggtacttccttattacccaagagtcattattatttgggagctggggttcttacaatgctagaaataatatcacttcctatttacataatgtatacacccaaagatattttatgtactagactccagattaccctttcttaataaatatctcagggtaaggaaagaaagaaactgtatagatatatttaaaatagagaatactttccaagcaatacatgatacttttcctaaaagactctaaaagaaaaagattctgtaactctcttttagcaccaaattattgtttatcttgctggatattttatatgaacagtgttaatttagatgcactaaagcaaaggtaggcaaactacaaccatgagtcaaacatggccacacccattcatttgctattgtctaagcctggttttggccactacaactgcagagttgaatagatgcagcagatcctttacagaaaagttttctgacctcaattctaaagtaattgtagtagggaggctggaggactttctttccctttatggtaattttttgagctacaaaagaggccttgcagaaatggggtgaagggattaatcttttaaaaataaatgctatatattaggaaaataaaaaatattttagagccaagttaacaagtacttcaggaaaacatgctagttttatgcagggcattctgtattccaaatggatacaatccgacatatataaaagaaacagattcttaactattgactcttatttagcaaatgcaacagacaagaatatccaacttgatatttataaaaggtagactttttccaaaagtgtataagctcaaagaaaaaatgcaacctgtcaattaatatatactatgtaatatatattattgtgtatttatgattagccatcataaatgcccattgcttggcctttaagaataatcacaaaatatttatattaaattatacaaatttgttgcagaagtgcctgtgagagaaatcttcaaaagacaaacctggtcaaataataataattttaatgtcaatgattttttttgtctgactcatctgagttatatttagttttcaagtggcaataaatttatctaccttc

SEQ ID NO: 32059 - DNA, 14131 bp, Homo Sapiens
gatcgtggaagcctccaactccagcacagggggggcccgcactccttggtgcctccgcagtcttcgaacagacggggaaactgaggccctaagaggcctaaagcctacacttccccgcggaatgcggcgggcgcgggcgggttaaaggggcggggccggcgctggcccagcccgcggctccccccagcgccctcgccccggcgctccctagcccggcgcggcccggcagcgagagcggcgccatggaggccaccggggtgctgccgttcgtgcgtggcgtggacctcagcggcaacgacttcaaggtgagccgggccgggcgcgtgccgggcctccctgcaggccttctcttccgcccggcccgcttggcctccgcttcctgtcccgctcggctccaggccctgcgtgtcccagggactgcggccggggcggggtggggctctcccctggccaggaatggacctccgaggcctccgcccagtgcctgtacggggagaccgaggctgggcaggccggggacggacgcttgggctcggagtcccgccgggggcccggccgggagcccccaccccgcgtccgtgttctcggtctaggctggatggtggcctggggatcgggcgagcctccccgcccctctgaggtcacacgcccaagccaggccctgactcagggatggctgcccggctgcccaggggcgggtgtggagccgactcatcactgccctctccccgccaccgccacccgccatactgtgtgatcctgggcctctcagatcacttcccctctcagagcctaggctttctcagccggtgaaggggcttaaaagtctcctccttggacgcaaggagtatagtgagatttgttggtgtggagagtgtgtcaggccggtgtgccaggtgctgggtggcagttgtctgagcagctgctggactgagagaaaagggaccggagcccagccctccgcagccagtgggtggggcggcggggtggttccaggactcaagaatgagacaggcattgcctgaccaaaggggaagcagagaaagagagggagggagagctggctggagggtcagcctcaccttcagggtgggtgactggcagggtcggcctgggttgttggtctggggctggggccgaggaggcaggtttttcctgcgtttacctgcctgtgtacacacctttgaccccaagtacaagtggctacaccacttttccctgaccccatccccaccaccctaacctggggtccccgttcctctttgctgaactgggagagtccgagtcaccagctgggaatgtggcgctagggggaaaggaatatcagccgcaggcactgaaggcacctactgccccagacttggtgccacaagggctggaggtgccgaggtgggcgttcacacaccaggggagtgcagtgatgctggcctgccctgcagggtggggagccacggtctccgcaagcaagggtttgaccctggccgtgagttgccagtgtgctgatggcaggatgagggcacaggtggcgcctttgcaaaggcttggaagggggatcccccaccccaggcagccagtcagagtgtggaatgctaggtgaaggaatttgagccgagctaaccacagagccggatgctgggctttcacctgaaacaagccagttttgtcctggccctcctggggcccagaatccagtaggagagacaaatcttaggccaacacttttgtcacgggggggcttaaaattcccattctatgggtgaagaaattgaggcacaatgatgaaatgacttgtctgtgttctcacagatggtgagagttggttctgtggctccccaaaggctcccatgggctggaggagccatagaaggtggtgagcaggggctctgtgcttcaccttgacatccttcccccagggcggctacttccctgagaatgtcaaggccatgaccagcctgcggtggctgaagctgaaccgcactggcctctgctacctgcccgaggagctggccgccctgcagaagctggtaagggggtttgggcgggcaggggagggtccctgtggatgagccaggtgggcagagcctgtggagaaggcagacaacttctccagagagaggaacaccgacagctatgagcagagctggaagaaagggagtgggcaccctgtccagggaggtgtgcaagaagaggccgggtgagtgagggagggaagctgcaggggtagttgggccagtgtggctgaggccttcctggatggtgcagagttgtggaggcaggcagggactctggacaccccacccaccctgctgagcctgtgctccccattccggcccaggaacacttgtctgtgagccacaacaacctgaccacgcttcatggggagctgtccagcctgccatcgctgcgcgtgagtgctggccgggaggccaccgagcttggggttggggccaaggtccggtcagggacgtgaagcctgggctagacaccaagctgggccagcatttctgcccacctccgtgtcaggctcagaggctcaggtgtcacagaggggccctctcattagaggttacagcagtgccctgtgtaaagtaacccatgtggatcagagaattccatcaggaaaaaggtaaagaaatccaaaatcttaccagccgttatggacaataactacagtaataatagccaagactggctgagcaatgttcccactattctgttaggattttttcatatgctctagccctccactaatgttgcagaagagaaacttggccaccaaggcagattacttgccccaggtcacagagccaggcagtggtagagctggtgttgagtggggtttggccgggagcaccgtgtaccttctacccaagacttgaacgtcccagaacatcaggcccttggccagaccctgtaggcctcaacgagggccatcccatctgaagtcagagccctggagatgtttagggcacagcttctgacttggactctctgagttcaaagctgggctttgccacttcctggtgatgtgactttgtacaaatcgcttctaccttctgggcctcctctgcaagtgcagtggttgggaggggcagcagtgaccccgtgaagcagcagcagggtgccgcacaggcattcagactggagaagtggcggggcagctccggtgactcccgttgtcacttggagtcacgacaccattctctggccctgttccctcatgctcaagctttctgcatgtctgtaaggtatgaggaggtgtcagtcttaagttagggagagaaagcagacttcctctccatccagattctgatttctctgtggtccacttctctccctctgttctgaaaaccctgactcagaccttacccctatctcaccttctggaattaagaagaagagaaatggtttgaacagaaaaggttccctgagggccctgtgctggggctccggggcacatttgagctgggctttgaggcatgaataggagctcactgggaggctaggaagagcgctccaggagagggagctatttgatcaaaggccagaggtgagagagtcctcaggcctggcctctggtgagctgcctgaggaggtgtccctctctagactctgttccttcctgagagtggaagccaggaattatagactcttatggtttattcccaggccatcgtggcccgagccaacagtctgaagaattccggagtccccgatgacatcttcaagctagatgatctctcagtcctggtcagtggctacccactcacctggcccctgtgctagccggaccattcaatccccactcactataaaagtccctggggccattgttatcccattttgcagatgggaaaactgagtcttggagtggataataccttgcctgaggtcacttttggagtcagatccctaacacaggcactcttcctcccaagtccctggctgtctccctttggccctgaagccccctcatctacccccacacccaactcagtgccctgcctgatccccaagcttggcagacgcctggtggggaggagactcccctgacctgggtcttgccccttctacccaggacttgagccacaaccagctgacagagtgcccgcgggagctggagaacgccaagaacatgctggtgctgaacctcagccacaacaggtgccaggccagtggggggcagggggcaggtgggccctgtggggtggctggtgctgactcaggtggctcctgctccccacccgtagcatcgacaccatccccaaccagctcttcatcaacctcactgacctactatacctggacctcagcgagaaccgcctggagagcctgcccccgcagatgcgccgcctggtgcacctgcagacgctcgtgctcaatggaaaccccctgctgcatgcacagctccggtgggcgccccctcggaccgcactcctgcagaagccaccctgaggagtctggccgggccccttcacttcccagggccctaacccttctcccttaggcccagccatccctccgtgcaggcagcacccctcagtgtacaacctcctaagtatcatgtccacctctcagtcctgtcttcccgcttacacaccccgcaaccacccttgggcttgtcccttcaaccagatgtgacctcacacctaccctctgggccctgtgcttttggtcctgccctgccaagccccacccttaacactccctaggtgggccctggccctgaccactcacgtcaccctggcaggcagctcccagcgatgacggccctgcagaccctgcacctgcggagcacccagcgcacccagagcaacctgcccaccagcctggagggtctgagcaacctcgcaggtcaggcagccccaggagcccctctgagctcgggccccctctgggccctcttgcttccttgggtggaaggggttgaaccctgctcttcggaccaatacccagagggaaaaggctggagttatgttacagtgacttttgcgattatgatgatgccttaacactgactttatgcctagaaaactcccccgcaacccccatgtgagggagtttgtccaaatggagaaacttgggcgcacagcagttgtcacttgcctaagccacacagctcagaggtggcagagctggggttcacactagggctggctgccctggcacctggtgtatgggccccagctgatgcaccccaccctgcaccccagacgtggatctgtcctgcaatgacctgacacgggtgcccgagtgtctgtacaccctccccagcctgcgccgcctcaacctcagcagcaaccagatcacggagctgtccctgtgcatagaccagtgggtgcacgtggaaactctgaacctgtcccgaaatcagctcacctcactgcccgtgcgtctgaggccctcagtagggggatgggaggaaggccgtgagcctggccctgacctcccacccctgcccgttccccctccagtcagccatttgcaagctgagcaagctgaagaagctgtacctgaattccaacaagctggactttgacgggctgccctcaggcattggcaagctcaccaacctggaagagttcatggctgccaacaacaacctggagctggtccctgaaagtctctgcaggtgctgggcagggctggggctagcagaggcacttgcagcacagagaaccccgggatcgtagtcagagcccaccttgtggtctgtgcaagtcagacaaaatgaagatgggttaattcaccttttcttttcttttcttttcttttttgtttttgagacagagtctcgctctgtcgcctgggctggaatgtagtggtgcaatctcggctgactgcagcctctgtctcccaggttcaagcgaatctcctgcctcagcctcctgagtagctgggattataggcgtgcgctaccacgcccggctctttttgtatttttagtagagatggggtctcaccatgttggccaggctggtcttgaatgcctgtcctcaaatgatcagcctcccaaagtgctgggattacaggtgtgagccaccacgcccggcccagttaactcacctttgtggatgaagaccacagtcccatgccagccattcccaacttgagcccctgagagcacccttcggggggcactgttagggacaaggccacatgacgtgggaacgcagtgttgcttctctccccttctggagatcacagtgcccgtaacatggtctcttggctctgagaagtccttcaggcagagaatggagacccccgccagttcctctgaccctacctgcctcccctccccaggactaggggttttcttgcccacttccccttgtctgtcacctgcctgaggccctggctggccctgtcttcacaggtgcccaaagctgaggaaacttgtcctgaacaagaaccacctggtgaccctcccagaagccatccatttcctgacggagatcgaggtcaggcatgctgggtttgagagggctcaagagagacaagcaaggggtgtgccctggagcaagggggacccagcagaggcctcctgagggaggtggccagtgccagggtgcccgtggggagaaggtgggccccacctccctgcatccagagtacattccacagtctcatttaagcccccagccagccccagaggtgggtgggaggagaacccagttccctgacctctcagccctggcggctgcagacaagagcaagaaactggattggtgtgtctgggaggtaggacccaggctcagtgccggctctgctcaccctatggggcaggtcctggatgtgcgggagaaccccaacctggtcatgccgcccaagcccgcagaccgtgccgctgagtggtacaacatcgacttctcgctgcagaaccagctgcggctagcgggtgcctctcctgctaccgtggctgcagctgcagctggtgagtggggaaaggtctggcctgggaacgggggctcctctccaggcctcaaatgacacatctgtaaattgggtggcatacagctttctggaccctggtgggtggagttggcccctggttggtcgcatgcccaagggggcagcaggcccagtgagggctcagctgtttgcccctcccctaagcagggagtgggcccaaggaccctatggctcgcaagatgcgactgcggaggcgcaaggattcagcccaggatgaccaggccaagcaggtgctgaagggcatgtcagatgttgcccaggagaagaacaaaaagcaggaggtgagccaggccagggttgggacaaggcagggagccttagcttctgctgaaggccgaccctggccttgaccctggccaagagggacggggggtgctgggcagaaagaacagctgtgcaaaggccctgaggtgtgggtagcaagtaaagactggcctgagtggcttcacagagtcaagccgtgctctgtgactctgcccccaggagagcgcagatgcccgggcccccagcgggaaggtgcggcgttgggaccagggcctggagaagccccgccttgactactccgagttcttcacggaggacgtgggccagctgcccggactgaccatctggcagatagagaacttcgtgcctgtgctggtggaggaagccttccacggcaagttctacgaggctgactgctacattgtgctcaaggtgagggctgggcatgctgttaggggccatgtggcccagtaccttcctctaagatggctcagtccccaactccagagttttgttcagggaggccaggtgggaggtgggcaggctgcaggaggtggtccaggcacaggggcagtacaaagcccctggggctgggaagcctgtgctgttcagagtggcgtctccggggtggccggaagaccaggatgaaagctgatgtggccggtgccttggcttccagacctttctggatgacagcggctccctcaactgggagatctactactggattggcggggaggccacactcgacaagaaagcttgctctgccatccacgctgtcaacttgcgcaactacctgggtgctgagtgccgcactgtccgggaggagatgggcgatgagagcgaggagttcctgcaggtgccagcccgttaaaattgggggtgggcagagtggggttcccagggaactctggtgcaggggcagtgggcccaaggcaggtaggcagaacaggtgggcaggcagggagctggggttaaagggggtggatcaacgatactgtgcgggacctaaggcagaccgcagggtgaggtctaaggtggccaaagcctgggtcagcaaaggagagttctggaacgcggggcagaattcagccgggcaaggataagggtacaggctgggcatgggagctagaccagtgggctgacacaggggagctgagagtagggtggaaggggtgttgccaagagcagtgagaaggcagggccaaaacctgttattaggaggcaaggacacacctggatgccaaggaggtggggccaagggcgggaccagagtccagtcttgaataaattactgagcagtgttagccgccagctggttacacctagacatatgttcgcatgtacacacacgtggagtttatgcacacaccccacccgccccgagttttttttacccacattcacccaggtttccactcttccatgaacccacttgcttgtgtaccctgatatgcgtgcatctaaacatgctgctggcatctttacaaacgtgggtgaacgtgtccatatttttcatacatcccaacaccccgacgtgtgtatgtttatagacacagatgtgtatgttttattttagacagactctcgctttgttgcccaggctggagtgcagtggcacaatcttggctcactgcaacctccgcccccagggttcaagcgattctcctgcctcagcctcccaagtagctgggattacaggcatgtgctaccacgcctagctaatttttgtatttttttagtagtgatggggttttgccatgttggccaggctggtctcgaactcctgaccttaggtgatccacccgccttggcctcccaaagtactaagattacaggcatgagccaccgtgcccagccagatctgttttttttgttgttgtttgtttgtttgtttgtttgttttaagacagagttttgctgttgttgcccaggctggagtacaatggcacaatctcagctcactgcaacctccgcctcccaggttcaaacaattctcctgcctcagcctcccgagtagctgggattacaggcatgcaccaccacgcctggctaatttatgtatttttagtagagacagggtttctccatgttggtcaggctggtctccaactcctgacctcaggtgatccacccacctcagactcctgaagtgctgggattacaggcatcatagatttgtagcactcaattcacctgtatgcaactctgtacccccacctgaggggcagtggttggtgggggagggggcagctcagtgatgaagaaccacaccctcacacacacaggtgtttgacaacgacatctcctacattgagggtggaacagccagtggcttctacactgtggaagacacacactatgtcaccaggtgagggtgtgtgggcagtggggggtatggacctggagtctgctggcaaggggtggaggggagggtgttggggctaagttaggcccttggtgcctacactgagccactcttgccctgcgcccaggatgtatcgtgtgtatgggaaaaagaacatcaagttggagcctgtgcccctcaaggggacctctctggacccaaggtgagccccaacaatgtgaggtgggggtgcttcatcctcagcctcctccccaccagtgggggcaggtgtgggcctcttagaagaggaggccctctagcaattcctgcccacgagcttggcggggggtccctggggcttacccagaaaccccatagtgagggattttttttggtggggtcaggagcatggggtgaccattgccccatgcaccatcacagctccttcctgccccttcttgtccaggtttgttttcctgctggaccgagggctagacatctacgtatggcggggggcccaggccacactgagcagcaccaccaaggccaggtacaaggacaccgtggggtcttttgtgtgaaggaaaggggtgtgagcctcgctgatgactttgcatcctgctctcaggctctttgcagagaaaattaacaagaatgagcggaaagggaaggctgagatcacactgctggtgcagggccaggagctcccagagttctgggaggcactgggtggggagccctctgagatcaagaagcacgtgcctgaagacttctggccgccgcagcccaagctgtacaaggtgagccctgctgctgaggcccaccttggcctcccaagttcacccaccgactgggggaatggactacacaccgatgtagttggctttgggctccatctcgactttggtggggagagggtgccaccttctggacaaggaacagtatgagcaaaggtctggaggctgcttttgagaagtagcctcacggagtctttccaggatggtggggccgtaggggagacagaagcacctagtgccagggctgggaaccttggctcaattatctagattcttgtgaacaggaaagggacacgttaattagaaatggcatgaagggcctggagagggcaggcagggaaaactccatttaaaagcccttctgaaaggatatccctaaaaagaccttgaaggggagggggaaacagaagcagtcagtgagccacgctgcagggcagggctggttccagagcagagggctgtgtgggtgaggttcctgtctccagatcccttccctgccatgctcatccttcctgccaggtgggcctgggcttgggctacctggagctgccacagatcaactacaagctctccgtggaacataagcagcgtcccaaggtggagctgatgccaagaatgcggctggtaagagatgcaggaggagggcgtggggccagatccctccccgttggctgggctttgacctccagactcccggtccgcagctgcagagtctgctggacacgcgctgcgtgtacattctggactgttggtccgacgtgttcatctggctcggccgcaagtccccgcgcctggtgcgcgctgccgccctcaagctgggtcaggagctgtgcgggatgctgcaccggccacgccatgccacggtcagccgcagcctcgagggcaccgaggcgcaggtgcgcttgcagcttcggaggcccctccccaggatccttcgcaccctgacatgccctgacccctgtggcttcactacctccctacagagctgggcccaaacccacctcctctttgctgactctgcccaggccccgccccctctgcaagctgcccctcctattcctacctccgtgtccgaggccccgcctcccaagccccgccctagatctcccttgggtcccgcctcaagcctcgggctacttcctccaactctaatcatgccgcacccctcatggttagttgatggcctccctggcaggtgttcaaggccaagttcaagaattgggacgatgtgttgacggtggactacacacgcaatgcggaggccgtgctgcagagcccgggtctctccgggaaggtgaaacgcgacgccgagaagaaagaccagatgaaggctgacctcactgcgcttttcctgccgcggcagccgcccatgtcgctggccgaggtgggggcagggccgggaccggggcgcgggggggggggtggggggcaggccgagggcggggcctatgcgcagagcgcgctcagacctgccgcggggcgggtccctctcacctgcaggcggagcagctgatggaggagtggaacgaagacctagacggcatggagggtttcgtgctggagggcaagaagtttgcgcggctgccggaagaggagtttggccacttctacacgcaggactgctacgtcttcctctgcaggtaccacctcagcactcccttccccaagtccctcccctggtgctgggggctcgagcccctgctcacaaccttccaacccggcaggtactgggtgcctgtggagtacgaggaggaggaaaagaaggaagacaaggaggagaaggccgagggcaaagaaggcgaggaagcaaccgctgaggcagaggagaagcagccagaggaggacttccagtgcatcgtgtacttctggcagggccgtgaagcctccaatatgggctggctcaccttcaccttcagcctgcaaaagaagttcgagagcctcttccctgggaagctggaggtgtgcctggcagccccgcgagcccgaggccaggcggaggggtgtggtggggctcagacccagcgaaggttaggctcccgaggggcaggtgggggtccagggagctgcccctaacacttccacatccccaggtggtacgcatgacgcagcagcaggagaaccccaagttcctgtcccatttcaagaggaagttcatcatccaccggggcaagaggaaggcggtccagggcgcccaacagcccagcctctaccagatccgcaccaacggcagcgccctctgcacccggtgcctggctgggggaggacgcagtggcgagcaagcgtcagggagccaggcctgaatccttgctgatgccccatcccttccacaggtgcatccagatcaacaccgactccagcctcctcaactccgagttctgcttcatcctcaaggtggggttgtgggtgtgagccaggactccgtggaccaaggggtggggtgtttgggggctgagtcagctgcgaacacccccacccctgcacactccccaggttccctttgagagtgaggacaaccagggcatcgtgtatgcctgggtgggccgggcatcagaccctgacgaagccaagttggcagaagacatcctgaacaccatgtttgacacctcctacagcaagcaggtcaggaggcgggcgggcaggcgggcacacacagaggagccagggcaggcaggggccctgggctggactggcctttcccgcaggttatcaacgaaggtgaggagcctgagaacttcttctgggtgggcattggggcacagaagccctatgatgacgatgccgagtacatgaaacacacacgtctcttccggtgaggccagggccctgaccctcccctcagtcctggcactgctgcttatgacctctggcctcaccttgacccttgattcccaggtgctccaacgagaagggctactttgcagtgactgagaaatgctccgacttttgccaagatgacctggcagatgatgacatcatgttgctagacaatggccaagaggtgtgatgttgccactagccctgcccatccaaggaggcgcccatagacttacttacaaatgggaattctcgggccaggagcaaggggctgttcccaggcacccatgcaaccgtatctcccctgctgcccccacaggtctacatgtgggtggggacccagactagccaggtggagatcaagctgagcctgaaggcctgccaggtaatctgggtggagggagggccgaggtgggcctgtgggcagggcagggtcatcacccaaggctcgctgtccccttgccaggtatatatccagcacatgcggtccaaggaacatgagcggccgcgccggctgcgcctggtccgcaagggcaatgagcagcacgcctttacccgctgcttccacgcctggagcgccttctgcaaggccctggcctaagacaggctggcacagccccaggcttggtgaggaagaggaaggggcctcatccactgtctgctagcaaagaatgtactcaggtgacaccacctgctccagccacgtccagtgccacagtccccagtagcctcaagcagcaccaatggggatgaccctgacaggtgccctcaggggtctgggaaatccaactctctccacagtgtgagtgcacgtgtgaagccccctcactcttccgctagggataaagcagatgtggatgccctttaagagatattaaatgcttttattttcaatattaaaaatcagtatttttaatattaaaatggcgctaatttt

SEQ ID NO: 32060 - DNA, 2751 bp, Homo Sapiens
ggctcagccgcaagatggcggcgctggcggaggagcagacggaggtggcggtcaagctagagcctgagggaccgccaacgctgctacctccgcaggcgggggacggcgcaggcgagggtagcggcggcactaccaacaacggccccaacggcggcggcgggaacgttgcggcgtcgtcgtccactggcggggatggcgggacccccaagcccacggtggctgtctccgccgctgccccggcgggggcggccccggtgcccgccgctgctccggacgccggcgctccgcatgaccgacagactctactggccgtgctgcagttcctacggcagagcaaactccgcgaggccgaagaggcgctgcgccgtgaggccgggctgctggaggaggcagtggcgggcgccggagccccgggagaggtggacagcgccggcgctgaggtgaccagcgcgcttctcagccgggtgaccgcctcggcccctggccctgcggcccccgaccctccgggcactggcgcttcgggggccacggtcgtctcaggttcagcctcaggtcctgcggctccgggtaaagttggaagtgttgctgtggaagaccagccagatgtcagtgccgtgttgtcagcctacaaccaacaaggagatcccacaatgtatgaagaatactatagtggactgaaacacttcattgaatgttccctggactgccatcgggcagagttgtcccaacttttttatcctctgtttgtgcacatgtacttggagctagtctacaatcaacatgagaatgaagcaaagtcattctttgagaagttccatggagatcaggaatgttattaccaggatgacctacgagtattatctagtcttaccaaaaaggaacacatgaaagggaatgagaccatgttggattttcgaacaagtaaatttgttctgcgtatttcccgtgactcgtaccaactcttgaagaggcatcttcaggagaaacagaacaatcagatatggaacatagttcaggagcacctctacattgacatctttgatgggatgccgcgtagtaagcaacagatagatgcgatggtgggaagtttggcaggagaggctaaacgagaggcaaacaaatcaaaggtattttttggtttattaaaagaaccagaaattgaggtacctttggatgacgaggatgaagagggagaaaatgaagaaggaaaacctaaaaagaagaagcctaaaaaagatagtattggatccaaaagcaaaaaacaagatcccaatgctccacctcagaacagaatccctcttcctgagttgaaagattcagataagttggataagataatgaatatgaaagaaaccaccaaacgagtgcgccttgggccggactgcttaccctccatttgtttctatacatttctcaatgcttaccagggtctcactgcagtggatgtcactgatgattctagtctgattgctggaggttttgcagattcaactgtcagagtgtggtcggtaacacccaaaaagcttcgtagtgtcaaacaagcatcagatcttagtcttatagacaaagaatcagatgatgtcttagaaagaatcatggatgagaaaacagcaagtgagttgaagattttgtatggtcacagtgggcctgtctacggagccagcttcagtccggataggaactatctgctttcctcttcagaggacggaactgttagattgtggagccttcaaacatttacttgtttggtgggatataaaggacacaactatccagtatgggacacacaattttctccatatggatattattttgtgtcagggggccatgaccgagtagctcggctctgggctacagaccactatcagcctttaagaatatttgccggccatcttgctgatgtgaattgtaccagattccatccaaattctaattatgttgctacgggctctgcagacagaactgtgcggctctgggacgtcctgaatggtaactgtgtaaggatcttcactggacacaagggaccaattcattccttgacattttctcccaatgggagattcctggctacaggagcaacagatggcagagtgcttctttgggatattggacatggtttgatggttggagaattaaaaggccacactgatacagtctgttcacttaggtttagtagagatggtgaaattttggcatcaggttcaatggataatacagttcgattatgggatgctatcaaagcctttgaagatttagagaccgatgactttactacagccactgggcatataaatttacctgagaattcacaggagttattgttgggaacatatatgaccaaatcaacaccagttgtacaccttcattttactcgaagaaacctggttctagctgcaggagcttatagtccacaataaaccatcggtattaaagaccttttggaagctactatttttaaaaagggagactaaaagcaaatacctcagtgattaatatttaagctacagagaatgtttttgtctatatggatctggaagtatgctgcttggaaaaatctgaacaggacagttccacgtttctatagcaaccacatttgactaatttccgttagttgaataagaggtattatgatcatggaggggacatttatggtgctttggattgtgtggaaactatgcattttctgttcaaatgctattttaatttattacatttagaaaaaaagttgatttcaaaaaaaaaaaaaaaaaa

SEQ ID NO: 32061 - DNA, 3921 bp, Homo Sapiens
actcactatagggctcgagcggccgcccgggcaggtggggctccgcgggcctggagcacggccgggtctaatatgcccggagccgaggcgcgatgaaggagaagtccaagaatgcggccaagaccaggagggagaaggaaaatggcgagttttacgagcttgccaagctgctcccgctgccgtcggccatcacttcgcagctggacaaagcgtccatcatccgcctcaccacgagctacctgaagatgcgcgccgtcttccccgaaggtttaggagacgcgtggggacagccgagccgcgccgggcccctggacggcgtcgccaaggagctgggatcgcacttgctgcagactttggatggatttgtttttgtggtagcatctgatggcaaaatcatgtatatatccgagaccgcttctgtccatttaggcttatcccaggtggagctcacgggcaacagtatttatgaatacatccatccttctgaccacgatgagatgaccgctgtcctcacggcccaccagccgctgcaccaccacctgctccaagagtatgagatagagaggtcgttctttcttcgaatgaaatgtgtcttggcgaaaaggaacgcgggcctgacctgcagcggatacaaggtcatccactgcagtggctacttgaagatcaggcagtatatgctggacatgtccctgtacgactcctgctaccagattgtggggctggtggccgtgggccagtcgctgccacccagtgccatcaccgagatcaagctgtacagtaacatgttcatgttcagggccagccttgacctgaagctgatattcctggattccagggtgaccgaggtgacgggttacgagccgcaggacctgatcgagaagaccctataccatcacgtgcacggctgcgacgtgttccacctccgctacgcacaccacctcctgttggtgaagggccaggtcaccaccaagtactaccggctgctgtccaagcggggcggctgggtgtgggtgcagagctacgccaccgtggtgcacaacagccgctcgtcccggccccactgcatcgtgagtgtcaattatgtactcacggagattgaatacaaggaacttcagctgtccctggagcaggtgtccactgccaagtcccaggactcctggaggaccgccttgtctacctcacaagaaactaggaaattagtgaaacccaaaaataccaagatgaagacaaagctgagaacaaacccttaccccccacagcaatacagctcgttccaaatggacaaactggaatgcggccagctcggaaactggagagccagtccccctgcaagcgctgctgctcctccagaactgcagccccactcagaaagcagtgaccttctgtacacgccatcctacagcctgcccttctcctaccattacggacacttccctctggactctcacgtcttcagcagcaaaaagccaatgttgccggccaagttcgggcagccccaaggatccccttgtgaggtggcacgctttttcctgagcacactgccagccagcggtgaatgccagtggcattatgccaaccccctagtgcctagcagctcgtctccagctaaaaatcctccagagccaccggcgaacactgctaggcacagcctggtgccaagctacgaagcgcccgccgccgccgtgcgcaggttcggcgaggacaccgcgcccccgagcttcccgagctgcggccactaccgcgaggagcccgcgctgggcccggccaaagccgcccgccaggccgcccgggacggggcgcggctggcgctggcccgcgcggcacccgagtgctgcgcgcccccgacccccgaggccccgggcgcgccggcgcagctgcccttcgtgctgctcaactaccaccgcgtgctggcccggcgcggaccgctggggggcgccgcacccgccgcctccggcctggcctgcgctcccggcggccccgaggcggcgaccggcgcgctgcggctccggcacccgagccccgccgccacctccccgcccggcgcgcccctgccgcactacctgggcgcctcggtcatcatcaccaacgggaggtgacccgctggccgcccgcgccaggagcctggacccggcctcccggggctgcggcgccaccgagcccggcaaatgcgcacgacctacattaatttatgcagagacagctgtttgaattggaccccgccgccgacttgcggatttccaccgcggaggccccgcgcgccggtgccgagggccgaggagcgcccgggtccgggcaggtgaccgcccgcctctgtcctgcgagggccggtgcgacccagttgctgggggcttggtttcctcaccttgaaatcgggcttcacgcgtcttgccttgtccccaacgttccacaacagtcccgctgggggattgaagcggtttcactccgcaaatatcctccactttcaggagggaaaacccaccctaccacagtccgctcttccaagtggacggcagacctgggaggggacgcctgtgtcacgagcccttttagatgcttaggtgaaggcagaagtgatgattgtaagtcccatgaatacacaactccactgtctttaaaagtcattcaagagtctcattatttttgtttttatttaaccctttcttcaatacaaaaagccaacaaaccaagactaagggggtgaccatgcaattccattttgtgtctgtgaacataggtgtgcttcccaaatacattaacaagctcttacttccccctaacccctatgaactcttgataacaccaagagtagcaccttcagaatatattgaataggcattaaatgcaaaaatatatatgtagccagacagtttatgagaatgaccctgtcaagcttcattattacgtggcaaaatccctctggcccacacagatctgtaattcactaggctcgtgtttgctacaaatagtgctaataaagttaaattgcacgtgcaatacggaacactgtcaatggactgcaccttgtgaaggaaaaacatgcttaagggggtgtaatgaaaatgatgtagacattttaagcattttctacacagcgagaaaacttcgtaagaacatgttacgtgtgcaacaggtaaacagaaatcctttcataaagcaccagcagtgtttaaaaaatgagcttccattaatttttactttttatgggttttgcttaaagatctcaacatggaaaaatcctgtcatggctctgaactgcacaatgcattgaaccgccgtccttcaattttcttcacactatcaacactgcagcattttgctgctttatcaaaatggtttattttaggaaactttttccacctttctgaatggaaagaggttttcacaaatgttttaaactcatcgttctaaaatcaagtgcacctacaccaactgctctcaaaatgtgaactgacttttttttttttttttttgccaaccctgtgtcacttagtgaggacctgacacaatccctacagggtgtctgtcagtgggcctcatggtaagagtcacaatttgcaaatttaggaccgtgggtcatgcagcgaaggggctggatggtaggaagggatgtgcccgcctctccacgcactcagctatacctcattcacagctccttgtgagtgtgtgcacaggaaataagccgagggtattatttttttatgttcatgagtcttgtaattaaaccgtgattcttgaaaggtgtaggtttgattactaggagataccaccgacatttttcaataaagtactgcaaaatgcttttgtgtctaccttgttattaacttttggggctgtatttagtaaaaataaatcaaggctatcggagcagttcaataacaaaggttactgttgagaaaaaagaccctatcatagatttacaag

SEQ ID NO: 32062 - DNA, 2013 bp, Homo Sapiens
  misc_feature (301)..(301): n is a, c, g, or t
  misc_feature (1707)..(1707): n is a, c, g, or t
  misc_feature (1722)..(1722): n is a, c, g, or t
  misc_feature (1756)..(1756): n is a, c, g, or t
  misc_feature (1880)..(1880): n is a, c, g, or t
  misc_feature (1882)..(1882): n is a, c, g, or t
  misc_feature (1885)..(1885): n is a, c, g, or t
  misc_feature (1887)..(1887): n is a, c, g, or t
gaattccaatcagaacaagctgttctcagacattaatctgaatgatcaggagtggcaagaattaatagatgaattggacaacacggttcctgaggatgacatacaggacctgttcaacgaagactttgaagagaagaaggagccagaattctcgcagacagcaactgagcacccctctctcccaggagagtgcgagcgtgaagagcgacccctctcactctcccttcggacatgtctccatgggatctccccaggcgaggtcttcttcttctggtcctcccttttcttctgtctccacggncactagtttaccttctggtgacagcactcccgcaggtccaaaccctgcaagctcaccagcaaacttgtgcttgtccagtccccttcaaaacttccaaaccaagcccacactccaggccaagctccacctcggcctggaaatggttatctcctgaatccggcagcagtgacagtggccggttcagcgtcagggcctgtggctgtgcccagctctgacatgtctccagcagaacagctcaaacagatggctgcacagcagcaacaaagggccaaactcatgcagcagaaacagcaacagcaacagcagcagcagcagcagcagcagcaacagcactcaaatcagacttcaaattggtctcccttaggacctccctctagtccatatggagcagcttttactgcagaaaaaccaaatagcccaatgatgtacccccaagcctttaacaaccaaaaccctatagtgcctccaatggcaaacaacctgcagaagacaacaatgaataactacctccctcagaatcacatgaatatgatcaatcagcagccaaataacttgggtacaaactccttaaacaaacagcacaatattctgacttatggcaacactaaacccctgacccacttcaatgcagacctgagtcagaggatgacaccaccagtggccaaccccaacaaaaaccccttgatgccgtatatccagcagcagcaacagcagcagcaacagcaacagcagcagcagcagcagcagcagccgccacctccacagctccaggcccccagggcacacctgagcgaagaccagaaacgcctgcttctcatgaagcagaaaggagtgatgaatcagcccatggcttacgctgcacttccatcccacggtcaggtaagtgtgaaagtgacacactcttcgagcagttcttgtggtgcatttcaagactgtcgatgtgtgatgttctacaaagcttccactgtagtggggtctaattgcctgcagaaaacctctttacaacatcctcaggtagtggccaggtttggagtgttctttttccatttctcctaagaaatggaaaagggtggcatgataaactttcgtgtatttcagtgtctaggaatcaaacttcttttattcccaactgcagataagaattacataaaattctcactctgagggagggaggctgcagaggtcactccaccaaacacggcactacctctgtagcttctctcccagcttgcatgatcccaggctctgggtggtgggaagcaggggacattcagggctgtctacaacagttttataaggccctgagcagccttcgagttttttaaattttattttagtgaatacatgcattaaaataaaacaacaacaacaacaacaacaaaaacacaaagaggctagagatttcnccgtttctacccccnaaataacgcttgctatcaagactttggagggggntgggggaaaagaatttaaaagccaaataatttttttttcataaaaagtaaaagctaccataaaacatttttttttctgtcacactgattaaatttcttctgaaaagccgcacatatagacaaancnaancnaaaattcctgaactggacaaacagcaaatactcaacagggttgttaacctaggtaacagttcagtagtttaaagaatcttttagacatctggaagcctttctattcattcctcagtacagtgttcc

SEQ ID NO: 32063 - DNA, 4678 bp, Homo Sapiens
gagccgccgggccggcggggaggcgggggaggtgttttccagctttaaaaaggcaggaggcagagcgcggccctgcgtcagagcgagactcagaggctccgaactcgccggcggagtcgccgcgccagatcccagcagcagggcgcgggcaccggggcgcgggcagggctcggagccaccgcgcaggtcctagggccgcggccgggccccgccacgcgcgcacacgcccctcgatgactttcctccggggcgcgcggcgctgagcccggggcgagggctgtcttcccggagacccgaccccggcagcgcggggcggccgcttctcctgtgcctccgcccgccgctccactccccgccgccgccgcgcggatgccaagcaccagctttccagtcccttccaagtttccacttggccctgcggctgcggtcttcgggagaggagaaactttggggcccgcgccgcgcgccggcggcaccatgaagtcagcggaggaagaacactatggctatgcatcctccaacgtcagccccgccctgccgctccccacggcgcactccaccctgccggccccgtgccacaaccttcagacctccacaccgggcatcatcccgccggcggatcacccctcggggtacggagcagctttggacggtgggcccgcgggctacttcctctcctccggccacaccaggcctgatggggcccctgccctggagagtcctcgcatcgagataacctcgtgcttgggcctgtaccacaacaataaccagtttttccacgatgtggaggtggaagacgtcctccctagctccaaacggtccccctccacggccacgctgagtctgcccagcctggaggcctacagagacccctcgtgcctgagcccggccagcagcctgtcctcccggagctgcaactcagaggcctcctcctacgagtccaactactcgtacccgtacgcgtccccccagacgtcgccatggcagtctccctgcgtgtctcccaagaccacggaccccgaggagggctttccccgcgggctgggggcctgcacactgctgggttccccgcggcactccccctccacctcgccccgcgccagcgtcactgaggagagctggctgggtgcccgctcctccagacccgcgtccccttgcaacaagaggaagtacagcctcaacggccggcagccgccctactcaccccaccactcgcccacgccgtccccgcacggctccccgcgggtcagcgtgaccgacgactcgtggttgggcaacaccacccagtacaccagctcggccatcgtggccgccatcaacgcgctgaccaccgacagcagcctggacctgggagatggcgtccctgtcaagtcccgcaagaccaccctggagcagccgccctcagtggcgctcaaggtggagcccgtcggggaggacctgggcagccccccgcccccggccgacttcgcgcccgaagactactcctctttccagcacatcaggaagggcggcttctgcgaccagtacctggcggtgccgcagcacccctaccagtgggcgaagcccaagcccctgtcccctacgtcctacatgagcccgaccctgcccgccctggactggcagctgccgtcccactcaggcccgtatgagcttcggattgaggtgcagcccaagtcccaccaccgagcccactacgagacggagggcagccggggggccgtgaaggcgtcggccggaggacaccccatcgtgcagctgcatggctacttggagaatgagccgctgatgctgcagcttttcattgggacggcggacgaccgcctgctgcgcccgcacgccttctaccaggtgcaccgcatcacagggaagaccgtgtccaccaccagccacgaggccatcctctccaacaccaaagtcctggagatcccactcctgccggagaacagcatgcgagccgtcattgactgtgccggaatcctgaaactcagaaactccgacattgaacttcggaaaggagagacggacatcgggaggaagaacacacgggtacggctggtgttccgcgttcacgtcccgcaacccagcggccgcacgctgtccctgcaggtggcctccaaccccatcgaatgctcccagcgctcagctcaggagctgcctctggtggagaagcagagcacggacagctatccggtcgtgggcgggaagaagatggtcctgtctggccacaacttcctgcaggactccaaggtcattttcgtggagaaagccccagatggccaccatgtctgggagatggaagcgaaaactgaccgggacctgtgcaagccgaattctctggtggttgagatcccgccgtttcggaatcagaggataaccagccccgttcacgtcagtttctacgtctgcaacgggaagagaaagcgaagccagtaccagcgtttcacctaccttcccgccaacgttccaattataaaaacagaacccactgatgattatgagcctgctccaacctgtggaccggtgagccaggggttaagtcctctcccaagaccatactacagccagcagctcgcgatgccacccgaccccagctcctgcctcgtggccggcttcccgccctgtccgcagagaagcaccctgatgccagcagcccctggcgtgagccccaagctccacgacctttctcccgctgcctacaccaagggcgttgccagcccgggccactgtcacctcggactcccgcagccggccggagaggcccccgccgtccaggacgtgcccaggccagtggccacgcaccccggctcgcccgggcagccacccccggccctgctgccacagcagtaaatgaaataatacgaaatgacctctccagcacgagcacccactcctagttgccacattggagcactcagttcagcaggggtatgctgacttcagcagacaaagacttttgaataaataaactgaactcacacctggtaccactcagaacctccaactgactgaatgccaggagctgaacattaatatgtgcaaagattggctctccaacaagaaggaaagcagggaggaagggagaccactgtgtcacctggaggagaagtcatctcatgacaacagaagggaggtggccgggctgagcacgggagacccaccgtgcaggggcctttcatgggaacggcccacacgcagtttgaccccacgcccagcccttctggcacccctggggttcaatactggaagtgccttatttaaccagaccatcagggcatcatagaattgagcattgaatttgctactgtaggagtatttttaggagcagaaactgcaaacacatttcattgtgaggttttaccctctgtatgaatgaagagaatgctggaaggctgcgagaggactctagtatgagtctccaacatttggaacgtttcctgggctgtcacgtacactcctgctgccttacacagtgcattttagaatcttccagtctgtcatctcagctcttttgtaacatgcttcccttgtctgcgcggttgaaaccgtaggcttgttcatagtcgcatgctcgcatctttgtttttaatctggcttcgaacatagcacaagtaacttgaatagcacatcaataggttactggacaaaagcagaaaaacctgttacaggatagcctgcatttgcatgtgtgtacatatctaggcatctatttatgtataaataataacagagccgacgtgtcctcgcccaggagggcttccctgtcagcaataaccggcatccgttttggaacctgcgtctggggctccagtcgctgctcttgctggcgtccatcgccgcctcggacggccgtgcattttctcgtctcacgcagttcgaggaggaccctagaaagccaggagctgtgattgacagtagctgtaggttaccagacggcaacattagaaagtgattgtaaataacatgcaacctaagtgtaatatatttgttcagttataagatgattgtttcacagaagccttaccactctctgcttcatctaagaaaaccaataccaaaaacgccactttaatgctcagccctgcgttgtgtgttttcagatgagttactgttaacaggtaggttcgtgtaggccttgctgggcactctgtacaattagttgcttattacgtatgattactcgcagcgatctattgttccatataaccaaaaagcatggtttattcattgaaacacggttgacctgaactcgtgccttaggaattaatgcccccttatggaacctgcctgaattgcacctgcgggtggaggctccggctgtgaagtcactgaacagaacgtcgctgatggagaaagggctcccgcagaaggaacggcctgtaccgtgcgctccggcacaatcgcgtctcttgtgtctcactcacggaaagaaacaacctgaaggccatcccgtcggtctgcacgtaaccgtgaagacgtgtggccgcgtcccacctgcggctgggtaccctgcacccggcactgtaggagtcacgtgcagcctttctcaggggactgtcattgaaaaggaaacgtttgatgtctgtgtcagctgtctttgtagttaggaaatagatccaataaagccgtatttttttgctggaaaaaaaaaaaaaaaaaaaaaaaaaaaaaaaaaaaaaaa

SEQ ID NO: 32064 - DNA, 2116 bp, Homo Sapiens
agaattcagcggccgctgaattctagcaaaggcaccatgcctctgcgggatgaaaccctccgagaggtgtgggcctctgacagtgggcatgaagaagaaagcctgagcccggaggccccgcggcgccccaaacagcgacccgccccggcacagaggctaaggaagaagaggacggaggcccccgaatccccctgccccacgggatccaagccccggaagcccggagctgggcggagggggaggccgcgggaggagccttccccagacccagcccaggcccgggcgccgcagacggtctacgccaggttcctcagggaccccgaggccaagaagcgcgacccccgggaaacctttctggtagcccgtgccccagacgcggaggacgaggaggaggaggaagaggaggacgaggaggacgaggaagaggaggcagaggaaaagaaagagaaaatccttctgcctcccaagaagcccctgagagagaagagctccgcagacctgaaggagaggagggccaaggcccagggcccaaggggagacctgggaagccctgaccccccaccgaaacctctgcgtgttaggaataaggaagctccagcaggggaggggaccaagatgagaaagaccaagaagaaagggtctggggaggccgacaaggacccctcagggagcccagccagtgcgaggaagagcccagcagccatgtttctggttggggaagrcagtcctgacaagaaagccctgaagaagaaaggcactcccaaaggcgcgaggaaggaggaagaagaggaggaggaggcagctacggtgataaagaacagcaatcaaaagggcaaagccaaaggaaaaggcaaaaagaaagcgaaggaggagagggccccgtctccccccgtggaggtggacgaaccccgggagtttgtgctccggcctgccccccagggccgcacggtgcgctgccggctgacccgggacaaaaagggcatggatcgaggcatgtatccctcctacttcctgcacctggacacggagaagaaggtgttcctcttggctggcaggaaacgaaaacggagcaagacagccaattacctcatctccatcgaccctaccaatctgtcccgaggaggggagaatttcatcgggaagctgaggtccaacctcctggggaaccgcttcacggtctttgacaacgggcagaacccacagcgtgggtacagcactaatgtggcaagccttcggcaggagctggcagctgtgatctatgaaaccaacgtgctgggcttccgtggcccccggcgcatgaccgtcatcattcctggcatgagtgcggagaacgagagggtccccatccggccccgaaatgctagtgacggcctgctggtgcgctggcagaacaagacgctggagagcctcatagaactgcacaacaagccacctgtctggaacgatgacagtggctcctacaccctcaacttccaaggccgggtcacccaggcctcagtcaagaacttccagattgtccacgctgatgaccccgactatatcgtgctgcagttcggccgcgtggcggaggacgccttcaccctagactaccggtacccgctgtgcgccctgcaggccttcgccatcgccctctccagtttcgacgggaagctggcttgcgagtgaccccagcagcccctcagcgcccccagagcccgtcagcgtgggggaaaggattcagtggaggctggcagggtccctccagcaaagctcccgcggaaaactgctcctgtgtcggggctgacctctcactgcctctcggtgacctccgtcctctccccagcctggcacaggccgaggcaggaggagcccggacggcgggtaggacggagatgaagaacatctggagttggagccgcacatctggtttcggagttcgcctgcgccgctgtgcccccctcctccccgcgccccagtcaattcctgtccgggagcagtagtcattgttgttttaacctcccctctccccgggaccgcgctagggctccgaggagctggggcgggctaggaggagggggtaggtgatgggggacgagggccaggcacccacatccccaataaagccgcgtccttggca

SEQ ID NO: 32065 - DNA, 1715 bp, Homo Sapiens
cagcggcggcagcggcggcagtagcagcagatgctgcagggccttctgggctccgacgacgaggaacaggaagaccccaaagactactgcaagggcggctaccaccctgtgaagatcggcgacgtgttcaatgggcggtaccacgtggtgcgcaaactgggctggggccacttctccaccgtctggctctgctgggacatccagcgcaagcgctttgtggccctcaaagtggtgaagagtgcggggcattacacggagacagctgtggatgagatcaagctcctgaaatgtgtccgggacagcgaccccagtgaccccaaaagagagaccattgtccagctcattgatgacttcaggatctcaggagtcaatggagtccatgtgtgcatggtgctggaggtgctgggccaccagctcctcaaatggatcatcaagtccaactaccagggcctgcccgtgccctgcgtgaagagcatcgtgaggcaggtgctgcacggcctggactacctccacaccaagtgcaagatcatccacacggacatcaagcccgagaacatcttgctgtgtgtgggggacgcttacatcaggcgcctggctgccgaggccacggagtggcaacaggcaggggcgccgcccccctcccgctccatagtcagcactgccccccaggaggtcttgaccggtaagctgtccaaaaacaagaggaagaagatgaggcgcaaacggaaacagcagaagcggctgctggaggagcggctgcgggacctgcagaggctggaggccatggaggctgccacccaggctgaggactctggcttgagactagacgggggcagcggctccacatcctcttcaggcttctccggctccctcttctctcctgcctcctgctccatcctctccggctcgtccaatcagcgagagaccgggggcctcctgtcgcctagcacaccattcggtgcctcgaacctcctggtgaaccccctggagccccaaaatgcagataagatcaagatcaagatcgcagacctgggcaacgcctgctgggtgcacaagcacttcacggaagacatccagactcggcagtaccgggccgtcgaggtgctgatcggcgccgaatacggccccccggcagacatctggagcacagcctgcatggccttcgagctggccactggtgactacctgttcgagccgcattctggagaagactacagtcgtgatgaggaccacatcgctcacatagtggagcttctgggggacatccccccagccttcgccctctcaggccgctattcccgggagttcttcaaccggagaggagagctgcggcacatccacaatctcaagcactggggcctgtacgaggtactcatggaaaagtacgagtggcccctagagcaggccacacagttcagcgcctttctgctgcccatgatggagtacatccccgaaaagcgggccagtgccgctgactgcctccagcacccctggctcaacccctaggcccggctgtggctccacctccagctctccgtgccttaagggaaaagcgggacagctcccaccaccctgctgggcgccagttctccacaaccacagggcagagagacgctggagccaggcccggctctcagagcgtgttctgcctgagacccccgtgagggctctcggagaaagtgtgtgtattcctttcttaataaagtgtggactga

SEQ ID NO: 32066 - DNA, 2100 bp, Homo Sapiens
acatcactgcgctggccgtccaaggtccgccgccccaccatgccgcccccgccgctgctgctgctccttacagtcctggtcgtcgccgctgcccggccggggtgcgagtttgagcggaaccccgccgccacctgcgtggacctgcagctcaggacctgcagcgatgccgcctacaaccacaccaccttccccaacctgcttcagcaccggtcgtgggaggtggtggaggccagctccgagtacatcctgctgagcgttctacaccagctcctggaaggccagtgcaacccggacctgcggctgctgggctgtgctgtgctggccccccggtgtgagggcggctgggtgcgcagaccctgccggcacatctgcgagggcctgcgggaggtctgccagcccgccttcgacgccattgacatggcctggccctacttccttgactgccaccgctacttcacgagagaggacgagggctgctatgacccgctggagaagcttcggggaggcctggaggctgacgaggcactgccctcagggctgccgcccaccttcatccgcttcagccaccactcctacgcccagatggtgcgtgtgctgaggcggacggcctcccgctgtgcccacgtggccaggacctacagcatcgggcgcagcttcgacggcagggagctgctggtcatcgagttctccagccgccccggccagcacgagctgatggagcccgaggtgaagctcatcggcaacattcatggcaacgaggtggcgggccgggagatgctcatctacctagcccagtacctgtgctctgagtacctgcttggtaacccccgcatccagcgcctgctcaacaccacccgcatccacctgctgccctccattaaccctgacggctatgaggtggcagctgccgagggtgccggctacaacgggtggacgagcgggaggcagaacgcgcagaacctggatctgaaccgaaatttcccggacctgacgtccgagtactaccggctggcggagacccgcggcgcacgcagcgaccacatccccatcccccagcactactggtggggtaaggtggccccggagacaaaggcaatcatgaagtggatgcagaccataccctttgtgctctcagccagccttcatgggggcgacctggtggtgtcctaccccttcgacttctccaagcacccccaggaggagaagatgttttctcccacgcccgacgagaagatgttcaagctgctgtccagagcctacgctgacgtccaccccatgatgatggacaggtcggagaataggtgtggaggcaatttcctgaagagggggagcatcatcaacggggcggactggtacagcttcacgggaggcatgtccgatttcaactacctgcacaccaactgctttgagatcacggtagagctgggctgtgtgaagttcccccccgaggaggccctgtacacactctggcagcacaacaaggagtcactcctgaatttcgtggagacggtgcaccggggcatcaaaggtgtggtgacagataaattcggcaagccagtcaaaaacgcccggatctcagtcaaaggcattcgccacgacatcaccacagccccagatggtgactactggagactgctgcccccaggtatccacattgtcattgcccaagcccctggctacgccaaagtcatcaagaaagtcatcatccccgcccggatgaagagggctggccgtgtggacttcattctgcaacctctggggatgggacccaagaactttattcatgggctgcggaggactgggccccacgacccgctgggaggtgccagctctttgggggaggccacggagcccgacccgctccgggcgcgcaggcagccctcggccgacgggagtaagccctggtggtggtcctacttcacatcgctgagcacccacaggccacgctggctgctcaagtactagccccggccccagcacccgccaggatgtggagaccgaggcccatctccgcatcccgggctcctggctcttgattttgtctgccacagacatcccacaaagccgctgccattttattaaagtgttttgatccacaaa

SEQ ID NO: 32067 - DNA, 3310 bp, Homo Sapiens; identical to SEQ ID NO: 29334

SEQ ID NO: 32068 - DNA, 2323 bp, Homo Sapiens
ctgcggtggcggcagcggtgggagatgccggggcggccggcggaggtccatgtggcgctctaggtgggatgccagcgtcctgaaggcggaggccctggccctcctccctgcggcctgggcatggcattctcccagtcccacgtgatggccgctcggcggcaccagcacagccggctcatcatcgaggtggacgagtacagctccaaccccacccaggccttcaccttctacaacatcaaccagggccgcttccagccaccgcatgtgcagatggtggacccggtgcctcacgatgcccccaaacctccaggctacacccgcttcgtctgcgtctctgatacccactcgaggacggaccccatccagatgccgtacggcgacgtgctgatccacgctggggacttcactgagctggggctcccgagcgaggtgaagaagttcaacgagtggctgggcagcctgccctacgagtacaagatcgtgatcgcaggcaaccacgagctgacctttgaccaggagttcatggccgacctcatcaagcaggacttttactacttcccatctgtgtcgaagctgaagccggagaactatgagaatgtgcagtcgctgctgaccaactgcatctaccttcaggactcggaggtcaccgtgcggggcttccggatctatggctccccatggcagccctggttctacggctggggcttcaacctcccgcgaggccaagccctgctggagaaatggaacctcattcccgaaggcgtagacatcctgataacccatggaccaccactgggcttcctggactgggtccccaagaagatgcagcgggtgggctgtgtggagctgctcaacacggtgcagaggcgcgtccagccgcggttacatgtctttggccacatccacgaagggtatggtgtcatggcagatgggacgaccacctatgtgaatgcgtccgtatgcactgtgaactaccagcccgtgaacccgcccatagtcatcgacctccccacaccccggaactcctgactgctccccactgcccctgccctgcccgcccgtgtcagctccacaggcctggcccggccactgttccttccatgctgagttgcctggacgacccatctggctgcggggactggcctagcaggcaggtcagggccttggaacgactctttagccttctgtcacctggagttgggaccctgcgcatccccatcaggggttctgtgctcatttactttttctgcgtgtacatcctgcgtgtacctcgttaaaggacctactaagctcatggccctgtcatgtttgggaaatgactaaatcttcattcttctcccttggacgccctcctggtttgggaagctgctgctcttgaatgggttttggaagttacacaaaatctccctctaaccacgggtctgtgtggcggcatgcccctgggttggggtgggtgggaggattcgtgagctgcacacagacagtccctttctctcctcccaagtgagggaggagacaggcccaagggggaggccctccgagggagcatttagggacatctcaggaattcagaccgcacctggccaggcccacagctgtttgcctggcattgttcccccctttttcttcccataggcatttttgtttacttgaacaatgacctgagtgtcctaggcattcactcggagcctggatgatgggggctggttctacagaatgagccactggcattcgtgcccaggaccagtgagagcgttcccagtcatggggggatgacccttggtcccacggggaacacactgctctgtagaatgcggtagcctggatggagggtctgcaggcttaggctgcagcaggcctgccatgggtgtgaacccatgtccaggcacgcaccgacacacatgcacgcacgcacccctcttaattgaaccaagtgggtcctgtgtttctcttttctgccccgtagtgaggttctgttccttggatgcggcttcccttgcaccgttaggattctgtctggcatgcctgcagccgaggaagcccaggaccagccggccctgtgaattggagggtggcacagggaccgagcgggccccaggctccagcagccccaccttggacagcttctttttcttctttgaattaggactggagggggtggggccagggcggtggtgggaaccggtagggcctagatgaggggcaggcagtcaggcagaaatgggcaagttcagggtcagattctgtcgttatttaatattttgttcatcatggactttttctgcatttattttgatttttaacgttgccctcgtgccgaatt

SEQ ID NO: 32069 - DNA, 2424 bp, Homo Sapiens
cctggaactctagcacgccgagtgaacttgaatctttggctatttaaggaggactgggtttgttgtgaagttgcggtgatccagcgcagagccccgtcctgattgatcgcatcgcggggctcagatgactgtaaaatgaatagatgaaattcttgcttctcgaagattttcttgggcatctcccggaaagtgcgttttaaggcgaagtcatgatgtattctcccatctgtctcactcaggatgaatttcacccattcatggaagcacttcttccacatgtccgtgcaattgcctatacttggttcaacctgcaggctcgaaaacgcaagtactttaaaaagcatgagaagcgaatgtcaaaggatgaagaaagagcagtcaaagatgagcttctcagtgaaaagcctgaaatcaaacagaagtgggcatccaggctccttgccaaactgcgcaaagatattcgccaggagtatcgagaggactttgtgctcaccgtgactggcaagaagcacccgtgctgtgtcttatccaatcccgaccagaagggtaagattaggagaatcgactgcctgcgacaggcagacaaagtctggcgtctggatctagtcatggtgatcctgttcaaaggcatccccttggaaagtaccgatggagagcggctcatgaaatccccacattgcacaaacccagcactttgtgtccagccacatcatatcacagtatcagttaaggagcttgatttgtttttggcatactacgtgcaggagcaagattctggacaatcaggaagtccaagccacaatgatcctgccaagaatcctccaggttaccttgaggatagttttgtaaaatctggagtcttcaatgtatcagaacttgtaagagtatccagaacgcccataacccagggaactggagtcaacttcccaattggagaaatcccaagccaaccatactatcatgacatgaactcgggggtcaatcttcagaggtctctgtcttctccaccaagcagcaaaagacccaaaactatatccatagaygaaaatatggaaccaagtcctacaggagacttttacccctctccaagttcaccagctgctggaagtcgaacatggcacgaaagagatcaagatatgtcttctccgactactatgaagaagcctgaaaagccattgttcagctctgcatctccacaggattcttccccaagactgagcactttcccccagcaccaccatcccggaatacctggagttgcacacagtgtcatctcaactcgaactccacctccaccttcaccgttgccatttccaacacaagctatccttcctccagccccatcgagctacttttctcatccaacaatcagatatcctccccacctgaatcctcaggatactctgaagaactatgtaccttcttatgacccatccagtccacaaaccagccagtcctggtacctgggctagcttggttcctttccaagtgtcaaataggacacccatcttaccggccaatgtccaaaattacggtttgaacataattggagaacctttccttcaagcagaaacaagcaactgagggaaaaagaaacacaacaatagtttaagaaattttttttttaaataaaaaaaaggaaaagaggaagactggacaaaacaacacaaaggcagaaaggaaagaaactgaagaaagaagataatagaccagcaattgcagcacttacaatcactaattcccttaaggttaaactgtaatgacataaaaagggtcgatgatatttcactgatggtagatcgcagcccctgcaacgtagcctttgttacatgaagtccgctgggaaatagatgttctgtctctatgacaatatattttaactgactttctagatgccttaatatttgcatgataagctagttttattggtttagtattcttgttgtttacgcatggaatcactattcctggttatctcaccaacgaaggctaggaggcggcgtcagagatgctgggtgacagagccatgagccagccattttataagcactctgatttctaaaagttaaaaaaaatatatgaaatctctgtagcctttagttatcagtacagatttattaaatttcggcccttaacccagccttttccagtgtgtaacccagtttgaaatcttaaaaaaagaaaaaatgaaaaaaaaaggaaaaaaagaaaaaaggaaaaaaacagtttgaacacaaaggctctatggaagaaatgcctctatgtaggtgaagtgttctctctgcatgcaacagtaaaaattaatataatattttccccacaaaagaaacacttaacagagggcaagtgcaatttattaaatttatattcttaaagggggaattcatggattattaaggtccttcaggcccttggggactctta

SEQ ID NO: 32070 - DNA, 3743 bp, Homo Sapiens
ttgcgggaaagagccaaaccctggcgttggggggcccgggcggggagcccctcccgcggtccacagcgacgcctgcccagccctcctccccttccggctccggcacggggccccgaggcgttcggaggccaggcgggtttctgtcaggcccggggaggaggggcgggcggggcggccgctgcctccccgggacgggccgtaccacgcggacggggaggacggggccaggggactgcagggcggctgcaccgcccgggggcggggtgcggacgggccggcgggctccccggggcggggcgggagggcggggcgtggggcggacggaaccaccggggcggggtgggaggtaacgggacgggcgcgaccatggcgcggtgagggagcgggggtggggatcggtccgggggaggcctgaggccgctggcttgtgcgctgtctccgccgcccccctctttcgccgccgccgccgccgccccgggcatgtcgtccaactgcaccagcaccacggcggtggcggtggcgccgctcagcgccagcaagaccaagaccaagaagaagcatttcgtgtgccagaaagtgaagctattccgggccagcgagccgatcctcagcgtcctgatgtggggggtgaaccacacgatcaatgagctgagcaatgttcctgttcctgtcatgctaatgccagatgacttcaaagcctacagcaagatcaaggtggacaatcatctcttcaataaggagaacctgcccagccgctttaagtttaaggagtattgccccatggtgttccgaaaccttcgggagaggtttggaattgatgatcaggattaccagaattcagtgacgcgcagcgcccccatcaacagtgacagccagggtcggtgtggcacgcgtttcctcaccacctacgaccggcgctttgtcatcaagactgtgtccagcgaggacgtggcggagatgcacaacatcttaaagaaataccaccagtttatagtggagtgtcatggcaacacgcttttgccacagttcctgggcatgtaccgcctgaccgtggatggtgtggaaacctacatggtggttaccaggaacgtgttcagccatcggctcactgtgcatcgcaagtatgacctcaagggttctacggttgccagagaagcgagcgacaaggagaaggccaaggacttgccaacattcaaagacaatgacttcctcaatgaagggcagaagctgcatgtgggagaggagagtaaaaagaacttcctggagaaactgaagcgggacgttgagttcttggcacagctgaagatcatggactacagcctgctggtgggcatccacgacgtggaccgggcagagcaggaggagatggaggtggaggagcgggcagaggacgaggagtgtgagaatgatggggtgggtggcaacctactctgctcctatggcacacctccggacagccctggcaacctcctcagctttcctcggttctttggtcctggggaattcgacccctctgttgacgtctatgccatgaaaagccatgaaagttcccccaagaaggaggtgtatttcatggccatcattgatatcctcacgccatacgatacaaagaagaaagctgcacatgctgccaaaacggtgaaacacggggcaggggccgagatctcgactgtgaaccctgagcagtactccaaacgcttcaacgagtttatgtccaacatcctgacgtagttctcttctaccttcagccgagaccgagagactggatatggggtcggggatcgggacttagggagaagggtgtatttgggctagatgggagggtgggagcgagatcgggtttgggagggctttagcaatgagacttgcagcctgtgacaccgaaagagactttagctgaagaggagggggatgtgctgtgtgtgcaccagctcacaggatgtaaccccaccttctgcttacccttgattttttctccccatttgacacccaggttaaaaaggggttccctttttggtaccttgtaaccttttaagataccttggggctagagatgacttcgtgggtttatttgggttttgtttctgaaatttcattgctccaggtttgctatttataatcatatttcatcagcctacccaccctccccatctttgctgctctcagttcccttcaattaaagagatacccagtagacccagcacaagggtccttccagaaccaagtgctatggatgccagattggagaggtcagacacctcgccctgctgcatttgctcttgtctggattaactttgtaatttatggagtattgtgcacaacttcctccacctttcccttggattcaagtgaaaactgttgcattattcctccatcctgtctggaatacaccaggtcaacaccagagatctcagatcagaatcagagatctcagaggggaataagttcatcctcatgggatggtgaggggcaggaaagcggctgggctcttggacaccctggttctcagagaaccctgtgatgatcacccaagccccaggctgtcttagcccctggagttcagaagtcctctctgtaaatcctgcctcccactaggtcaagaggaactagagtacctttggatttatcaggaccctcatgtttaaatggttatttccctttgggaaaacttcagaaactgatgtatcaaatgaggccctgtgccctcgatctatttccttcttccttctgacctcctcccaggcactcttacttctagccgaactcttagctctgggcagatctccaagcgcctggagtgctttttagcagagacacctcgttaagctccgggatgaccttgtaggagatctgtctcccctgtgcctggagagttacagccagaaaggtgcccccatcttagagtgtggtgtccaaacgtgaggtggcttcctagttacatgaggatgtgatccaggaaatccagtttggaggcttgatgtgggttttgacctggcctcaccttggggctgtttttccttgttgccccgctctagacttttagcagatctgcacccacaggcttttttggaaggagtggcttcctcgaggtgttccacctgcttcggagcctgccacccaggccctcagaactgaccacaggctgctctggccaggagagaaacagctctgttgttctgcattgggggaggtacattcctgcatcttctcaccccctcaaccaggaactggggatttgggatgagatatggtcagacttgtagataaccccaaagatgtgaagatcgcttgtgaaaccattttgaatgaatagattggtttcctgtggctccctccaaacctggccaagcccagcttccgaagcaggaaccagcactgtctctgtgcctgactcacagcatataggtcaggaaagaatggagacggcattcttggacttcactggggctgctggattggatgggaaaccttctggaagaggcagatgggggtcaaaccactgccttgccccaggaaggggccataggtaggtctgaacaactgccggaagaccactacatgacttagggaacttgaaaccaactggctcatggagaaaacaaatttgacttgggaaagggattatgtaggaataatgtttggacttgatttccccacgtcataatgaagaatggaagtttggatctgctcctcgtcaggcgcagcatctctgaagcttggaaagctgtcttccagggttgtaa

SEQ ID NO: 32071 - DNA, 1228 bp, Homo Sapiens
gaggttagaaggcacaggtggcgagatgagccgggtaccagcgttcctgagcgcggccgaggtggaggaacacctccgcagctccagcctcctcatcccgcctctagagacggccctggccaacttctccagcggtcccgaaggaggggtcatgcagcccgtgcgcaccgtggtgccggtgaccaagcacaggggctacctgggggtcatgcccgcctacagtgctgcagaggatgcactgaccaccaagttggtcaccttctacgaggaccgcggcatcacctcggtcgtcccttcccaccaggctactgtgctactctttgagcccagcaatggcaccctgctggcggtcatggatggaaatgtcataactgcaaagagaacagctgcagtttctgccattgccaccaagtttctgaaacctcccagcagtgaagtgctgtgcatccttggggctggggtccaggcctacagccattatgagatcttcacagagcagttctcctttaaggaggtgaggatatggaaccgcaccaaagaaaatgcagagaagtttgcagacacagtgcaaggagaggtacgggtctgttcttcggtccaggaggctgtggcaggtgcagatgtgatcatcacagtcaccctggcaacagagcccattttgtttggtgaatgggtgaagccaggggctcacatcaatgctgttggagccagcagacctgactggagagaactggatgatgagctcatgaaagaagctgtgctgtacgtggattcccaggaggctgccctgaaggagtctggagatgtcctgctgtcaggggccgagatctttgctgagctgggagaagtgattaagggagtgaaaccagcccactgtgagaagaccaccgtgttcaagtctttgggaatggcagtggaagacacagttgcagccaaactcatctatgattcctggtcatctggtaaataaaacaaaggaacttgatgttgagatggatgcttgaggaatattactgctggttctcataatttctagagtaaatgagggagtccagtccccagtgaactctccttttgtgcttatcatgttttaccttaaatgctgagatcctcatttatgtttgtagttggaaagcaaagctaggtagccatttcttctgttctaccaagttataatagcattcatttccctttatatttccctgaaataaagcacattccaattgtg

SEQ ID NO: 32072 - DNA, 2343 bp, Homo Sapiens
attccggagcgtttgcggcttcgcttcatggccgctctcccgcccctcctgggatctgtggggagctggggagcccgcagcggcccggagccggagctggcgagccgagcggagacctgtgcgccgcgcctctgaggcgcagcatgtgaagcggagacggcatccagtggggggcgagcctctcagccggccgggatggctaccacggccgagctcttcgaggagccttttgtggcagatgaatatattgaacgtcttgtatggagaaccccaggaggaggctctagaggtggacctgaagcttttgatcctaaaagattattagaagaatttgtaaatcatattcaggaactccagataatggatgaaaggattcagaggaaagtagagaaactagagcaacaatgtcagaaagaagccaaggaatttgccaagaaggtacaagagctgcagaaaagcaatcaggttgccttccaacatttccaagaactagatgagcacattagctatgtagcaactaaagtctgtcaccttggagaccagttagagggggtaaacacacccagacaacgggcagtggaggctcagaaattgatgaaatactttaatgagtttctagatggagaattgaaatctgatgtttttacaaattctgaaaagataaaggaagcagcagacatcattcagaagttgcacctaattgcccaagagttaccttttgatagattttcagaagttaaatccaaaattgcaagtaaataccatgatttagaatgccagctgattcaggagtttaccagtgctcaaagaagaggtgaaatctccagaatgagagaagtagcagcagttttacttcattttaagggttattcccattgtgttgatgtttatataaagcagtgccaggagggtgcttatttgagaaatgatatatttgaagacgctggaatactctgtcaaagagtgaacaaacaagttggagatatcttcagtaatccagaaacagtcctggctaaacttattcaaaatgtatttgaaatcaaactacagagttttgtgaaagagcagttagaagaatgtaggaagtccgatgcagagcaatatctcaaaaatctctatgatctgtatacaagaaccaccaatctttccagcaagctgatggagtttaatttaggtactgataaacagactttcttgtctaagcttatcaaatccattttcatttcctatttggagaactatattgaggtggagactggatatttgaaaagcagaagtgctatgatcctacagcgctattatgattcgaaaaaccatcaaaagagatccattggcacaggaggtattcaagatttgaaggaaagaattagacagcgtaccaacttaccacttgggccaagtatcgatactcatggggagacttttctatcccaagaagtggtggttaatcttttacaagaaaccaaacaagcctttgaaagatgtcataggctctctgatccttctgacttaccaaggaatgccttcagaatttttaccattcttgtggaatttttatgtattgagcatattgattatgctttggaaacaggacttgctggaattccctcttcagattctaggaatgcaaatctttattttttggacgttgtgcaacaggccaatactatttttcatctttttgacaaacagtttaatgatcaccttatgccactaataagctcttctcctaagttatctgaatgccttcagaagaaaaaagaaataattgaacaaatggagatgaaattggatactggcattgataggacattaaattgtatgattggacagatgaagcatattttggctgcagaacagaagaaaacagattttaagccagaagatgaaaacaatgttttgattcaatatactaatgcctgtgtaaaagtctgtgcttacgtaagaaaacaagtggagaagattaaaaattccatggatgggaagaatgtggatacagttttgatggaacttggagtacgttttcatcgacttatctatgagcatcttcaacaatattcctacagttgtatgggtggcatgttggccatttgtgatgtagccgaatataggaagtgtgccaaagacttcaagattccaatggtattacatctttttgatactctgcatgctctttgcaatcttctggtagttgccccagataatttaaagcaagtctgctcaggagaacaacttgctaatctggacaagaatatacttcactccttcgtacaacttcgtgctgattatagatctgcccgccttgctcgacacttcagctgagattgaatttacaaaggaatt

SEQ ID NO: 32073 - DNA, 1242 bp, Homo Sapiens
cgcgcagccatggcagtcaccgcccaggcagcccgcaggaaggagcgcgtcctctgcctgtttgacgtggacgggaccctcacgccggctcgccagaaaattgaccctgaggtggccgccttcctgcagaagctacgaagtagagtgcagatcggtgtggtgggcggctctgactactgtaagatcgctgagcagctgggtgacggggatgaagtcattgagaagtttgattatgtgtttgccgagaacgggacggtgcagtataagcacggacgactgctctccaagcagaccatccagaaccacctgggggaggagctgctgcaggacttgatcaacttctgcctcagctacatggccctgctcaggctgcccaagaagcgtggaaccttcatcgagttccggaatggcatgctgaacatctcgcccatcggccggagctgcaccctggaggagaggatcgagttctccgaactggacaagaaagagaagatccgggagaagttcgtggaagccctgaaaacagagtttgctggcaaagggctgaggttctctcgaggaggcatgatcagctttgacgtcttccccgagggctgggacaagcgctactgcctggatagcctggaccaggacagcttcgacaccatccacttctttgggaacgagactagccctggtgggaacgactttgagatctttgccgacccccggactgttggccacagcgtggtgtctcctcaggacacggtgcagcgatgccgggagattttcttcccagagacagctcatgaggcgtgaccggggcccacatctgtgtgtcgtgacttctgaagagtttggcctaggcctaaagagaggtcctggtgttggatagatgccagggcccctcctctggcccaggacgcctgctgcaagcccacccagatggggccagagtctgtgtggacaaccgtccccagccagtctgctcctagtggcactggcttcgtcctcccagggcccagagtgttccccatgctccacctggtggcccaggccacagctgctgcttgtatttcggtacagaagaggtttctttctgcaccaggaggaggcgtgctcaagtatcggtacgagatctagcctgccctgcctgcctgccctgggcgatgaggtacggtggggaaggtgcctattttagagaactttgtcacagtattaaagttcccagaacaaagtaggtgtcagctgaaaaaaaaaaaa

SEQ ID NO: 32074 - DNA, 8665 bp, Homo Sapiens
ggtaccggtccggaattcccgggtcgacccacgcgtccggaatcggacgccccaggcatatacaagctgagtttcagccatggaaaaactccatgggcatgtgtctgcccatccagacatcctctccttggagaaccggtgcctggctatgctccctgacttacagcccttggagaaactacatcagcatgtatctacccactcagatatcctctccttgaagaaccagtgcctagccacgcttcctgacctgaagaccatggaaaaaccacatggatatgtgtctgcccacccagacatcctctccttggagaaccagtgcctggccacactttctgacctgaagaccatggagaaaccacatggacatgtttctgcccacccagacatcctctccttggagaaccggtgcctggccaccctccctagtctaaagagcactgtgtctgccagccccttgttccagagtctacagatatctcacatgacgcaagctgatttgtaccgtgtgaacaacagcaattgcctgctctctgagcctccaagttggagggctcagcatttctctaagggactagacctttcaacctgccctatagccctgaaatccatctctgccacagagacagctcaggaagcaactttgggtcgttggtttgattcagaagagaagaaaggggcagagacccaaatgccttcttatagtctgagcttgggagaggaggaggaggtggaggatctggccgtgaagctcacctctggagactctgaatctcatccagagcctactgaccatgtccttcaggaaaagaagatggctctactgagcttgctgtgctctactctggtctcagaagtaaacatgaacaatacatctgaccccaccctggctgccatttttgaaatctgtcgtgaacttgccctcctggagcctgagtttatcctcaaggcatctttgtatgccaggcagcagctgaacgtccggaatgtggccaataacatcttggccattgctgctttcttgccggcgtgtcgcccccacctgcgacgatatttctgtgccattgtccagctgccttctgactggatccaggtggctgagctttaccagagcctggctgagggagataagaataagctggtgcccctgcccgcctgtctccgtactgccatgacggacaaatttgcccagtttgacgagtaccagctggctaagtacaaccctcggaagcaccgggccaagagacacccccgccggccaccccgctctccagggatggagcctccattttctcacagatgttttccaaggtacatagggtttctcagagaagagcagagaaagtttgagaaggccggtgatacagtgtcagagaaaaagaatcctccaaggttcaccctgaagaagctggttcagcgactgcacatccacaagcctgcccagcacgttcaagccctgctgggttacagatacccctccaacctacagctcttttctcgaagtcgccttcctgggccttgggattctagcagagctgggaagaggatgaagctgtctaggccagagacctgggagcgggagctgagcctacgggggaacaaagcgtcggtctgggaggaactcattgaaaatgggaagcttcccttcatggccatgcttcggaacctgtgcaacctgctgcgggttggaatcagttcccgccaccatgagctcattctccagagactccagcatgggaagtcggtgatccacagtcggcagtttccattcagatttcttaacgcccatgatgccattgatgccctcgaggctcaactcagaaatcaagcattgccctttccttcgaatataacactgatgaggcggatactaactagaaatgaaaagaaccgtcccaggcggaggtttctttgccacctaagccgtcagcagcttcgtatggcaatgaggatacctgtgttgtatgagcagctcaagagggagaagctgagagtacacaaggccagacagtggaaatatgatggtgagatgctgaacaggtaccgacaggccctagagacagctgtgaacctctctgtgaagcacagcctgcccctgctgccaggccgcactgtcttggtctatctgacagatgctaatgcagacaggctctgtccaaagagcaacccacaagggcccccgctgaactatgcactgctgttgattgggatgatgatcacgagggcggagcaggtggacgtcgtgctgtgtggaggtgacactctgaagactgcagtgcttaaggcagaagaaggcatcctgaagactgccatcaagctccaggctcaagtccaggagtttgatgaaaatgatggatggtccctgaatacttttgggaaatacctgctgtctctggctggccaaagggttcctgtggacagggtcatcctccttggccaaagcatggatgatggaatgataaatgtggccaaacagctttactggcagcgtgtgaattccaagtgcctctttgttggtatcctcctaagaagggtacaatacctgtcaacagatttgaatcccaatgatgtgacactctcaggctgtactgatgcgatactgaagttcattgcagagcatggggcctcccatcttctggaacatgtgggccaaatggacaaaatattcaagattccaccacccccaggaaagacaggggtccagtctctccggccactggaagaggacactccaagccccttggctcctgtttcccagcaaggatggcgcagcatccggcttttcatttcatccactttccgagacatgcacggggagcgggacctgctgctgaggtctgtgctgccagcactgcaggcccgagcggcccctcaccgtatcagccttcacggaatcgacctccgctggggcgtcactgaggaggagacccgtaggaacagacaactggaagtgtgccttggggaggtggagaacgcacagctgtttgtggggattctgggctcccgttatggatacattccccccagctacaaccttcctgaccatccacacttccactgggcccagcagtacccttcagggcgctctgtgacagagatggaggtgatgcagttcctgaaccggaaccaacgtctgcagccctctgcccaagctctcatctacttccgggattccagcttcctcagctctgtgccagatgcctggaaatctgactttgtttctgagtctgaagaggccgcatgtcggatctcagaactgaagagctacctaagcagacagaaagggataacctgccgcagatacccctgtgagtgggggggtgtggcagctggccggccctatgttggcgggctggaggagtttgggcagttggttctgcaggatgtatggaatatgatccagaagctctacctgcagcctggggccctgctggagcagccagtgtccatcccagacgatgacttggtccaggccaccttccagcagctgcagaagccaccgagtcctgcccggccacgccttcttcaggacacagtgcaacagctgatgctgccccacggaaggctgagcctggtgacggggcagtcaggacagggcaagacagccttcctggcatctcttgtgtcagccctgcaggctcctgatggggccaaggtggcaccattagtcttcttccacttttctggggctcgtcctgaccagggtcttgccctcactctgctcagacgcctctgtacctatctgcgtggccaactaaaagagccaggtgccctccccagcacctaccgaagcctggtgtgggagctgcagcagaggctgctgcccaagtctgctgagtccctgcatcctggccagacccaggtcctgatcatcgatggggctgataggttagtggaccagaatgggcagctgatttcagactggatcccaaagaagcttccccggtgtgtacacctggtgctgagtgtgtctagtgatgcaggcctaggggagacccttgagcagagccagggtgcccacgtgctggccttggggcctctggaggcctctgctcgggcccggctggtgagagaggagctggccctgtacgggaagcggctggaggagtcaccatttaacaaccagatgcgactgctgctggtgaagcgggaatcaggccggccgctctacctgcgcttggtcaccgatcacctgaggctcttcacgctgtatgagcaggtgtctgagagactccggaccctgcctgccactgtccccctgctgctgcagcacatcctgagcacactggagaaggagcacgggcctgatgtccttccccaggccttgactgccctagaagtcacacggagtggtttgactgtggaccagctgcacggagtgctgagtgtgtggcggacactaccgaaggggactaagagctgggaagaagcagtggctgctggtaacagtggagacccctaccccatgggcccgtttgcctgcctcgtccagagtctgcgcagtttgctaggggagggccctctggagcgccctggtgcccggctgtgcctccctgatgggcccctgagaacagcagctaaacgttgctatgggaagaggccagggctagaggacacggcacacatcctcattgcagctcagctctggaagacatgtgacgctgatgcctcaggcaccttccgaagttgccctcctgaggctctgggagacctgccttaccacctgctccagagcgggaaccgtggacttctttcgaagttccttaccaacctccatgtggtggctgcacacttggaattgggtctggtctctcggctcttggaggcccatgccctctatgcttcttcagtccccaaagaggaacaaaagctccccgaggctgacgttgcagtgtttcgcaccttcctgaggcagcaggcttcaatcctcagccagtacccccggctcctgccccagcaggcagccaaccagcccctggactcacctctttgccaccaagcctcgctgctctcccggagatggcacctccaacacacactacgatggcttaataaaccccggaccatgaaaaatcagcaaagctccagcctgtctctggcagtttcctcatcccctactgctgtggccttctccaccaatgggcaaagagcagctgtgggcactgccaatgggacagtttacctgttggacctgagaacttggcaggaggagaagtctgtggtgagtggctgtgatggaatctctgcttgtttgttcctctccgatgatacactctttcttactgccttcgacgggctcctggagctctgggacctgcagcatggttgtcgggtgctgcagactaaggctcaccagtaccaaatcactggctgctgcctgagcccagactgccggctgctagccaccgtgtgcttgggaggatgcctaaagctgtgggacacagtccgtgggcagctggccttccagcacacctaccccaagtccctgaactgtgttgccttccacccagaggggcaggtaatagccacaggcagctgggctggcagcatcagcttcttccaggtggatgggctcaaagtcaccaaggacctgggggcacccggagcctctatccgtaccttggccttcaatgtgcctgggggggttgtggctgtgggccggctggacagtatggtggagctgtgggcctggcgagaaggggcacggctggctgccttccctgcccaccatggctttgttgctgctgcgcttttcctgcatgcgggttgccagttactgacggctggagaggatggcaaggttcaggtgtggtcagggtctctgggtcggccccgtgggcacctgggttccctttctctctctcctgccctctctgtggcactcagcccagatggtgatcgggtggctgttggatatcgagcggatggcattaggatctacaaaatctcttcaggttcccagggggctcagggtcaggcactggatgtggcagtgtccgccctggcctggctaagccccaaggtattggtgagtggtgcagaagatgggtccttgcagggctgggcactcaaggaatgctcccttcagtccctctggctcctgtccagattccagaagcctgtgctaggactggccacttcccaggagctcttggcttctgcctcagaggatttcacagtgcagctgtggccaaggcagctgctgacgcggccacacaaggcagaagactttccctgtggcactgagctgcggggacatgagggccctgtgagctgctgtagtttcagcactgatggaggcagcctggccaccgggggccgggatcggagtctcctctgctgggacgtgaggacacccaaaacccctgttttgatccactccttccctgcctgtcaccgtgactgggtcactggctgtgcctggaccaaagataacctactgatatcctgctccagtgatggctctgtggggctctgggacccagagtcaggacagcggcttggtcagttcctgggtcatcagagtgctgtgagcgctgtggcagctgtggaggagcacgtggtgtctgtgagccgggatgggaccttgaaagtgtgggaccatcaaggcgtggagctgaccagcatccctgctcactcaggacccattagccactgtgcagctgccatggagccccgtgcagctggacagcctgggtcagagcttctggtggtaaccgtcgggctagatggggccacacggttatggcatccactcttggtgtgccaaacccacaccctcctgggacacagcggcccagtccgtgctgctgctgtttcagaaacctcaggcctcatgctgaccgcctctgaggatggttctgtacggctctggcaggttcctaaggaagcagatgacacatgtataccaaggagttctgcagccgtcactgctgtggcttgggcaccagatggttccatggcagtatctggaaatcaagctggggaactaatcttgtggcaggaagctaaggctgtggccacagcacaggctccaggccacattggtgctctgatctggtcctcggcacacaccttttttgtcctcagtgctgatgagaaaatcagcgagtggcaagtgaaactgcggaagggttcggcacccggaaatttgagtcttcacctgaaccgaattctacaggaggacttaggggtgctgacaagtctggattgggctcctgatggtcactttctcatcttggccaaagcagatttgaagttactttgcatgaagccaggggatgctccatctgaaatctggagcagctatacagaaaatcctatgatattgtccacccacaaggagtatggcatatttgtcctgcagcccaaggatcctggagttctttctttcttgaggcaaaaggaatcaggagagtttgaagagaggctgaactttgatataaacttagagaatcctagtaggaccctaatatcgataactcaagccaaacctgaatctgagtcctcatttttgtgtgccagctctgatgggatcctatggaacctggccaaatgcagcccagaaggagaatggaccacaggtaacatgtggcagaaaaaagcaaacactccagaaacccaaactccagggacagacccatctacctgcagggaatctgatgccagcatggatagtgatgccagcatggatagtgagccaacaccacatctaaagacacggcagcgtagaaagattcactcgggctctgtcacagccctccatgtgctacctgagttgctggtgacagcttcgaaggacagagatgttaagctatgggagagacccagtatgcagctgctgggcctgttccgatgcgaagggtcagtgagctgcctggaaccttggctgggcgctaactccaccctgcagcttgccgtgggagacgtgcagggcaatgtgtactttctgaattgggaatgaagatgtgccactcgggaataatgataccccttgtgctagagatgcaaagcctgaagacactggtagcttttaataattataaaattaataatttcttgataattataaaaatgaagtgtcaaaaaatctcaagtgtaggcctgcctgtgttctcatgtggatttagaacaggaggatattctatgtgtatgtatatgtacattctaatgtgtgtctcttcttattcaacattaatccttactagaaccacaagaaagtgaatgaaatctttagtaggtactcttttgaaactaggttytagaattcttgcatcactcgcgggccctaggaccctaggatgccattcttgccaggaggaggaatgagagtgatgttggccaacattcaatttgaacagagcatggaagacctttcagttcatcgggaaagaatgagggagggagaataagtcagtcatgcatcagggcatttagaaagagctatgtttctgtcacagagacagcccttttctcagaactacccagaggaggccgggcatggtggctcacgcttgtaatcccagcactttgggaggccgaggtgggcagatcacgaggtcaggagatcaagaccatcctggctaacatagtgaaaccctgtctctactaaaaaatacaaaaagttaaccaggcatgtagcggccgctctagaggatccaagctt

SEQ ID NO: 32075 - DNA, 6803 bp, Homo Sapiens
ggagctcggttggaaaccccccgaggcataataggcgctcgataaatgtgcaataggtgaacatgtggtggcttgcaggcgtctggggggagacagcaggttctgggctgggcagggaattattggatcaacgggcatcttacaggaaagactctcagctccctgccgcctaggactgtccagcccatctatgccctctccccagcctgtgccccaaagctggagctgccactctaggggtgaggggtggggtggggagggggaggcgaagcactgcggcctgagttgcaggtggggggaggggaggcggagcttctttgttgcagaaggtgccaggagggggcagggccagtggagaggtgggaggtgggagaggccccagccaggggctgggacaggtggctgggtccctggggagcaataagtcccgcttgggcgctgtggggaggcccttcctaactcccaaacaccatctgtgagggctgggggtgggggcagagtagcgtgtgcagaggactgttcctggggagaggccctgtgaccagcggcctcctccctggggagctggcggtacaatggccctctgggcccacggcctcccgccgctgctgctgacccagatgaacaattggggcagggctgagccccaggcacctactttcccccaccccagaagccaccagacgttctgcagaccccagtcctggctcacagggaagctgagctggagacaaagccagcccctctgatgagggtggaagaggctgctggccactgtccctcttgcagcctggctggcagccagtctggcagtggccctgacgtccagagacagcttgggtttccccagaggcttgtctctggccagtgggacccctctgtcaggcctgggcttttctctccactgtcccagaatgatgatctcagcccccatagtccccccagggttcctcccacccttagggtggggtgtcggggggtgggggttgggagccagaaggaccttgaagagggtggttgggacgtttcaggttctaagcttgacccacagagcggagcgtgagccccgtcaggttgaggtccctcaacttgtaaaggacacaattccattctctttatcaggaagctgaggggcaggggccctgtggcagagagagagccccttagccctctctgttcagtcctccggtgcccccatccctgtgcatctgtggctgtcacatgcagatgtgtggcaaggagaaggtgcccaccagccagtgtcagttgctccaggagccaagccaggtgccctatcaccctgtcttcccgttcctcccctccatggtcaggccctcctgctccctcctctggtccttcagtttcccctaggaggcttccgtgtcctcctgcccctcctctccccaacagcgggatgcgtctacctctccattctcttcctcctggtccttgctcatctctggtcgtgtccagggtagcacccacgtggcctcctccaccagctgcaggcctggcctcccatctgaaacggggcattcaggcctcgatgctggccctgcacggaacttgttccctgcccctccctgggatgcttggcctcctctgtcaaggacctgaaagtcggaggggaggaggtttctctgaccagagctgttcctggaccctctttggtggtgtcgctcccaggcacagctaccccatccccagctagtccccaggccacccagctgggcttctgcctcagtttccctgcccaaacgtgctgtgacgtagggcagtgggctccgggttgcgaccagccccttcccatgattaaaccctactccctgcccctgcagaggggtcctcaacagctaaccaagcccccgaaccccaagaagccaccccatcccaccctccagcttccatgtcctccctgccagctgggcccgtggcagaggtgcccctagaaacttgcagacccagggagctttgggatcagaatctggcctggtgcaggggatgctggcctcatgtcttagcccagctcaggcccatgggggtgccccccttcctcaacatgggcaggagacactccaatttgtgcagctctcgacttgggcctgatgccacttgagactcatcaaatccaacagcttcagagcgcgtgctgagtaacaggcatctggcaggtgaggaaacaggagcccaagacatgcagccagaaatggggcagttggattcaaaattagacctgaccgaatcctgggttccttctactcgagtagatgctgctttggggatgacccttcaactggtggttacttggcttccctacctggggaacatccagggcctctgctgtcagacccggggccttgcctgcctgatggtcttcagggaggaggcgacccagacccccgtccagcacgtggcacagccccaggagcagtaaagacctggctgtgggcccaggaccctgctgggtggtcccccacgggctgcgaaggctgagctgcccccctccagacccctcccgccagcgcattcctggctccccggcccctcccctggctcccgggcctcccagcccccttccccgctggcccagcccgcgtctgaatctgcttctgattccagctctgcgatgaggccccctcccctcccctgcctccttcccgacccgagcagccccgcccccggctgggcccgggcttgcgcctgctgcgccccccaccccctcctggcacagctcgtccgccctcgctgcagccgggaggaggcggcggcccgtgcaccgcaggccccgcccgcccacggcccttcccgggaggccgggagacctgctccgcccggccctcggtgggtgagtgcgagcggcgggtggggcctccgcgggcggaggcaccgggagcgggggcgacgcctgtcatcgctctaggcccagcgggaggacgcgccaacatccccgctgctgtgctgggcccggggcgtgcccgccgctgctcccacctctgggccgggctggggccgcccgggggccctgttcctcggcattgcgggcctggtgggcagagccgcggagagggcttcttttccccaagggcagcgtcttggggcccggccactggctgacccgcagcggctccggccatgcctggctggccctgggggctgctgctgacggcaggcacgctcttcgccgccctgagtcctgggccgccggcgcccgccgacccctgccacgatgaggggggtgcgccccgcggctgcgtgccaggactggtgaacgccgccctgggccgcgaggtgctggcttccagcacgtgcgggcggccggccactcgggcctgcgacgcctccgacccgcgacgggcacactcccccgccctccttacttccccagggggcacggccagccctctgtgctggcgctcggagtccctgcctcgggcgcccctcaacgtgactctcacggtgcccctgggcaaggcttttgagctggtcttcgtgagcctgcgcttctgctcagctcccccagcctccgtggccctgctcaagtctcaggaccatggccgcagctgggccccgctgggcttcttctcctcccactgtgacctggactatggccgtctgcctgcccctgccaatggcccagctggcccagggcctgaggccctgtgcttccccgcacccctggcccagcctgatggcagcggccttctggccttcagcatgcaggacagcagccccccaggcctggacctggacagcagcccagtgctccaagactgggtgaccgccaccgacgtccgtgtagtgctcacaaggcctagcacggcaggtgaccccagggacatggaggccgtcgtcccttactcctacgcagccaccgacctccaggtgggcgggcgctgcaagtgcaatggacatgcctcacggtgcctgctggacacacagggccacctgatctgcgactgtcggcatggcaccgagggccctgactgcggccgctgcaagcccttctactgcgacaggccatggcagcgggccactgcccgggaatcccacgcctgcctcggtgaggccttggagggtggcctggggaccttggacacaaccagcctgcccctgacccatccctccctgcagcttgctcctgcaacggccatgcccgccgctgccgcttcaacatggagctgtaccgactgtccggccgccgcagcgggggtgtctgtctcaactgccggcacaacaccgccggccgccactgccactactgccgggagggcttctatcgagaccctggccgtgccctgagtgaccgtcgggcttgcaggggtgagccaccaccggccacctgcaggccctcaccctctgacttcccagatccccagacaggcttctgaccaggcccttcccacctctgtcctcagcctgcgactgtcacccggttggtgctgctggcaagacctgcaaccagaccacaggccagtgtccctgcaaggatggcgtcactggcctcacctgcaaccgctgcgcgcctggcttccagcaaagccgctccccagtggcgccctgtgttagtgagtgaccctgccccgcctcagccaccaagccaaggccaccccagctccctgctgttgtcccgtctattccccgagccctgcagatctctctgcccctccatcgcaggccattctccctccctctctgcagagacccctatccctggacccactgaggacagcagccctgtgcagccccagggtgagtggacacaggacagggccccagactggcatgactttgggggagggggctctgggaggagagggtggggaaagggagtctgtgccagcctcccaccttctacccagactgtgactcgcactgcaaacctgcccgtggcagctaccgcatcagcctaaagaagttctgcaagaaggactatggtaggtgccctcaggcctcccgcggaccttcccaccttcctcctctccctaccttccctcctccgccagcttccccttggaacgccttgacccttgctgggccccaaggcccatcctcatccctcaggtcctccacgggcagcgaccccgccccttcagcccccactgccctcctggtgtcctccccgtgcctccccctaccgcgggcaggccgccccttcctgaccccgccccctctcgctctccccgcagcggtgcaggtggcggtgggtgcgcgcggcgaggcgcgcggcgcgtggacacgcttcccggtggcggtgctcgccgtgttccggagcggagaggagcgcgcgcggcgcgggagtagcgcgctgtgggtgcccgccggggatgcggcctgcggctgcccgcgcctgctccccggccgccgctacctcctgctggggggcgggcctggagccgcggctgggggcgcggggggccgggggcccgggctcatcgccgcccgcggaagcctcgtgctaccctggagggacgcgtggacgcggcgcctgcggaggctgcagcgacgcgaacggcgggggcgctgcagcgccgcctgagcccgccggctgggcagggcggccgctgctcccacatctaggcgcacgttcaccctgtgccttcgcctgccaaggagtccttgctcgcgtcgcgcgtgtcgccacctgggccgccgccccgtccccgccggcagctccctcggtacctcccgtctggccctggggggatgtgaccggcgcacggacagcccgccccgcacagaggcagatgatatggcacacccggaggaccccatggtctcccgccctctggctgtcggccctgtcccaggggcactgggatacccggaaggctgtgaatccttcgtgatgccgggccctctcggggatctcagatcatccccggggccgctgtgatgcacccccacctgtgcggcgacccgccaggagcgcactgacctccccaaagactgtggccaccgcaggcgccttggacccccatgggggacagggcgtcccctgcctcctgcagccccacgagggcggcggccttggccctgcggctgggcgtccgcgtccgggcgccccgcggcgtctgctgccgggtcccgtaactttcttggccgcctgtgtccccgtctgccggctccgtccggccgtccctctctctgccgcgtctctgaccctcggcgccacagctcctcagctcagggcccgtcccagaacctccttccagcccttctcccccgactcgggaagggacgtcgtgcccacgcggttccggatccacgcgtgacccggccggaccgcgactccgacaggcggctgtccgggcccccgatgccctcggcagggccgtgccaccccccgccccttgttgtccccccgggaccggcactgccgtttgcctcctctccgcacgggaccggttcccggccggccccagcttccgccgctgcggccgccgaccgtcagcgcgcatgcccagagccgggcaggccggagccccgccggctctccggggtgggcacagggcgacagctcggcgggggcggggccgagcacgcgcgtgcgcagaaaggccggcgcggcaggctgaggagaaagcggcgcgcggaggtgggtgcgctcggggcgtgcggggggcgcgcggcggggtggcgggtggcggggccgggtccccgctgtcaccgcggtcggcgcgtgctgggggcgggagcgtgggggccgggctgcgtgccccattcgaggcggggatccccggccacgcgcgggttgggggctccagagcccggcaccgcccggcgctgcagctgcggcttggcct

SEQ ID NO: 32076 - DNA, 5293 bp, Homo Sapiens
caagagcggaggaccaggaaccagagagagagagagagaaaagagagaggagagacagagcgcttgggggcgaaaggagagagggagggaagggtgggtaaggaggagagagcggtctgctgcaaaccccaggaggagagcttggagcccaagccagaactcgagccctagccggagccgttcacagggaggcggctgccgggaccgtcagccctgcatgatgcatctccggctcttctgcatcctgctcgccgcggtctcaggagccgagggctggggctactacggctgcgacgaggagctggtgggtcccctgtatgcacgctccctgggcgcctcctcctactacagtctccttactgcgccgcgattcgccaggctgcacggcataagcgggtggtcaccacggattggggatccgaatccctggctccagatagacttaatgaagaagcaccggatccgggccgtggccacacagggctcctttaattcttgggactgggtcacacgttacatgctactctacggcgaccgagtggacagctggacaccgttctaccagcgagggcacaactcgaccttctttggtaacgtgaacgagtcggcggtggtgcgccatgacctgcacttccacttcactgcgcgctacatccgcatcgtgcccctggcctggaacccacgcggcaagatcggcctgaggctcggcctctatggctgcccatacaaggccgacatactctatttcgacggcgacgatgccatctcctaccgcttcccgcgaggggtcagccgaagcctgtgggacgtgttcgccttcagcttcaagaccgaggagaaggacggtcttctgctgcacgccgagggcgcccagggcgactacgtgacgctcgagctggagggggcacacctgctgctgcacatgagcctgggcagcagccctatccagccaagaccaggtcacaccaccgtgagcgcaggcggagtcctcaatgaccagcactggcactatgtgcgggtggaccgatttggccgcgatgtaaatttcaccctggacggctatgtgcagcgctttattctcaatggagacttcgagaggctgaacctggacactgagatgttcatcggaggtctggtgggcgccgcgcggaagaacctggcctatcggcataacttccgcggctgcatagaaaacgtaatcttcaaccgcgtcaacatcgcagacctggccgtgcggcgccattcccggatcaccttcgagggtaaggtggcttttcgttgcctggacccggtaccgcaccctatcaacttcggaggccctcacaacttcgttcaagtgcccggtttcccacgccgtggccgcctggcagtctcatttcgcttccgcacctgggacctcaccgggcttctccttttctcccgtctgggggacgggctgggccacgtggagctgacgctcagcgaagggcaggtcaacgtgtccatcgcgcagagcggccgaaagaagcttcagttcgctgctgggtaccgactgaatgacggcttttggcacgaggtgaattttgtggcacaggaaaaccatgcagttatcagcattgatgatgtggaaggggcagaggtcagggtctcatacccgttgctgatccggacagggacctcatatttctttgggggttgtcccaagccagccagtcgatgggactgccactccaaccagacggcattccatggctgcatggagctgctcaaggtggatggtcaactggtcaacctgactctggtggagggccggcggcttggattctatgctgaggtcctctttgatacatgtggcatcactgataggtgcagccctaacatgtgtgagcatgatggacgctgctaccagtcttgggatgacttcatttgctactgcgaactgacgggctacaagggagagacctgccacacacctttgtataaggaatcctgtgaggcttatcggctcagtgggaaaacttctggaaacttcaccattgatcctgatggcagtggccccctgaagccatttgtagtgtactgtgatatccgagagaaccgagcgtggacagttgtgcggcatgacaggctgtggacaactcgagtgacaggttccagcatggagcggccattcctgggggctatccagtactggaatgcatcctgggaggaagtcagtgcccttgccaatgcttcccagcattgtgaacagtggatcgagttctcctgctacaattcccggctgctcaacactgcaggaggctacccctacagcttttggattggccgaaatgaggagcagcacttctactggggaggctcccagcctgggatccagcgctgtgcctgtggtctggaccggagctgtgtggaccctgccttgtactgcaactgtgacgctgaccagccccagtggagaactgacaagggactgctgacctttgtggaccatctgcctgtcactcaggtagtgataggggatacgaaccgctccacttctgaggcccagttcttcctgaggcctctgcgctgctatggcgatcgaaattcctggaacaccatttccttccacaccggggctgcactacgcttccccccaatccgtgccaaccacagcctggatgtctccttctacttcaggacctctgctccctcgggggtcttcctagagaatatggggggcccttactgccagtggcgccgaccttatgtgcgggtggaactcaacacatcccgggatgtggtcttcgcctttgatgtggggaatggggatgagaacctcacagtacactcagacgactttgagttcaatgatgacgagtggcacctggtccgggctgaaatcaacgtgaagcaggcccggctccgagtggatcaccggccctgggttctgcggcctatgccactgcagacctacatctggatggagtatgaccagcccctctatgtgggatctgcagagcttaagagacgcccctttgtgggttgcttgagggccatgcgtctgaacggagtgactctgaacctggagggccgtgccaatgcctctgagggtacctcacccaactgcacaggccactgtgcccaccctcggctcccctgtttccatggaggccgctgcgtggagcgctatagctactacacgtgtgactgtgacctcacggcttttgatgggccatactgcaaccacgatattggtggtttctttgagccgggcacctggatgcgctataacctacagtcagcgctgcgctctgcagccagggagttctcccacatgctgagccggccagtgccaggctatgagcctggctacatcccgggctatgatactccgggctatgtgcctggctaccatggccccgggtaccgcctgcccgactacccccggcctggtcggcctgtgcccggttaccgtgggcctgtctacaacgttacgggagaggaggtctccttcagcttcagcaccagctccgcccctgctgtcctgctctacgtcagttcctttgttcgtgactacatggctgtgctcatcaaggatgatgggacccttcagctgcgatatcagctgggcaccagtccctacgtgtaccagctaaccactcgaccagtgaccgatggccagccccatagcatcaatatcacccgtgtttaccggaacctcttcatccaggtggactacttcccactgacagagcagaagttctcgctgttggtggacagccagttggactcacccaaggccttgtatttagggcgtgtgatggagacaggagtcattgacccggagatccagcgctacaacaccccaggtttctcaggctgcctgtctggtgttcgattcaacaacgtggctcccctcaagacccacttccgaacccctcgacccatgactgctgagctagctgaggcccttcgagttcagggagaactgtccgaatctaattgcggagctatgccacgtcttgtttcagaggtgccacctgagcttgatccctggtatctgcccccagacttcccctactaccatgatgaaggatgggttgccatacttttaggctttttggtggcctttctgctgctggggctggtgggaatgttggtgctcttctatctgcaaaatcatcgctataagggctcctaccataccaatgagcccaaggctgcccacgagtaccatcctggcagcaaacctcccctacccacttcaggccctgcccaggtccccacccctacagcagctcccaaccaagctccagcctcagccccagccccagccccaactccagccccagcccctggcccccgggatcagaacctaccccagatcctggaggagtccaggtctgaatgagtcagaagggcttctgggaccaattccagctcctgacattcccccagtcctgcctctcccccatcctatcagggacatttggctcctcttagctggctctgctcatccagaggatattcccccatcccccccccatcaagtttggtgggcagagctacagatgggacccaagggagtggccgagcctcactgcctaaaccaatgcccttctcatccctgtttccccaggctcctggctgtttatctgccccaaaggagaagcctcatggggttgacataggtcctttctgccatctctgttccagctgctgtcagggattaacaacagagtgtaggggagattaactgcctcccttccaatagacactatcagcagggacagatgtgtgggagtgcagggctgcagagggtatggggggaggaggctgctaaaccctatcccccagcctcccccctgccctgaagatcttccatttgcttccactcagctggaggctcaagagggcttgatggctgtcccctgcccccctccttttgttttgtacacagagaccaagaggcctcagtttagcaccttagtacctccgctgcttcacttgctttagccaaagccataaaaaacctgcaacgtagagaaaataatgcagataccctgactagccagccctctactcctccaaccttttccaagatatgcaatggcctttgtgcctgcccaaaggcttcgcccctccagtgcatgaggaaccctctttcctccgctcagagatgctgcttcatttacccaggaggtcatattctttatatatattttttgttgcaaagtgtctctctagagaaactctatatattattcgaatttttaaattatttgtttatatataaaagaaaagctcaattggcaaaaaaaaaaaaaaaaaa

SEQ ID NO: 32077 - DNA, 2564 bp, Homo Sapiens
gccatcttctgcggccgttgcgacatggagggcgagatggcagtgcgggtgacggccgctcatacggcagaagcccaggccgaagccgggcgggaagcgggcgagggtgcagttgcggcggtggcggcggccttggcccccagcggcttcctcggcctcccggcgcccttcagcgaggaagatgaggacgatgtgcacagatgcggccgctgccaggcagagttcaccgccttggaggattttgttcagcacaagattcagaaggcctgccagcgggcccctccggaggccctgcctgccacccctgccaccacagcgttgctgggccaggaggtggtgccggcagcaccaggcccagaggagcccatcactgtggcccacatcgtggtggaggcggcctctctggcagcagacatcagccacgcatctgaccttgttggtggtgggcacatcaaagaggtcatcgtggctgctgaggcggagctgggagacggtgagatggccgaggccccgggcagcccccaccagcaggggctggggctcgcaggggagggtgagcaggcccaggtgaagctactggtgaacaaggatggccgctatgtgtgtgcgctgtgccacaagaccttcaagacgggcagcatcctcaaggcccacatggtcactcacagcagccgcaaggaccacgagtgcaagctctgtggggcctccttccgcaccaagggctcactcatccggcaccaccggcggcacacggatgagcgcccctacaagtgctccaagtgtggaaagagcttccgggagtcgggtgcactgacccggcacctcaagtctctcaccccctgcacagagaaaatccgcttcagtgtgagcaaggacgtggttgtcagcaaagaggacgcacgtgcaggttctggagctggagctgccggcttggggacagccacatcatcggtgacaggcgagcctatagagacttcacccgtgattcacctggtgacagatgccaagggcaccgtcatccacgaagtccacgtccagatgcaggagctgtccctgggcatgaaagccctggccccagagccccccgtctcccaggagctcccctgctccaggaagggcagccgtgagaacctgctgcaccaggccatgcagaactccggcatcgtccttgagcgcgctgctggggaggagggtgccctggagccagctcctgctgccgggtccagtccccagcccctggcagtggcagccccgcagctgccggtactggaagtgcagccgctggagacacaggtggccagcgaggcctcagcggtgcccaggacccacccatgtcctcagtgcagtgagaccttcccgacagcagccaccctggaggcccacaagaggggccacaccgggccgaggccgttcgcctgcgcgcagtgtggcaaggccttccccaaggcctacctgctcaagacagaccaggaggtgcacgtgcgtgagcgccgtttccgctgtggcgactgcgggaagctctacaagaccattgcccatgtgcgtggccaccggcgcgtccactcagacgagcggccctacccttgtcccaagtgtggcaagcgctacaagactaagaacgcacagcaggtgcacttcaggacacacctggaggagaagccgcacgtgtgccagttctgcagccgtggcttccgagagaagggctcactggtgcggcacgtgcgacaccacacaggcgagaagccgttcaagtgctacaagtgcggccgtggcttcgccgagcacggcacgctgaaccggcacctgcgcaccaaagggggctgcctgctggaggtggaggagttgctggtgtctgaggacagccccgcggcagccaccaccgtcctcacggaagacccgcacacagtgttggtggagttctcgtccgtggtagctgacacccaggagtatatcatcgaggccactgcggacgatgcggagaccagtgaggccacggagatcatcgagggcacccagacagaggtggacagccacatcatgaaggtggtgcagcagatcgtgcacccacgtagcgccggccaccagatcatcgtgcagaacgtcaccatggacgaggagacggcgctgggccccagaggggctgccgccgacaccatcaccatcgccacccccgagagcctgacagagcaggtggccatgacgctggcctcggccatcagcgagggcactgtgcttgccgcccgggcagggacaagtggcactgaacaggccactgtgaccatggtgtcatcagaggacatcgagatcctggagcatgcaggcgagctggtcatcgcctcgccggagggccagctggaggtgcagacggtcatcgtctagcatgaggtctgcggggtcctggccgggcagggacagggcagaggactctgaagcgccccacccatgcctgcctggcctggtagagaagatggcacaggatggaggcgccccaagacggacagtgtacataagagtttcttgttgctttacaataaaacatgagaacctgccaaaaaaaaaaaaaa

SEQ ID NO: 32078 - DNA, 4919 bp, Homo Sapiens
ttgctgtcaggtgactctcccgtggcgccatggcggaagcagtggagcaggaaactgggtcccttgaagaatctacagatgagtctgaggaagaagagagcgaagaggaacccaagctgaagtatgaaaggctttccaatggggtaactgaaatacttcagaaggatgcagctagctgcatgacagtccatgacaagtttttggcattgggcacacattatggcaaggtttatttacttgatgtccaggggaacatcactcagaagtttgatgtaagtcctgtgaagataaatcagattagcttggatgaaagtggagagcacatgggtgtgtgttcagaggatggcaaggtgcaggtatttggactgtattctggagaagaatttcacgagacttttgactgtcccattaaaattattgctgtgcacccacatttcgtgagatccagttgcaagcagtttgtgaccggagggaagaagctgctactgtttgaacggtcttggatgaacagatggaagtctgctgttctgcatgaaggggaagggaacataaggagtgtgaagtggagaggccatctgattgcttgggccaataatatgggtgtgaagatttttgacatcatctcaaagcaaagaatcaccaatgtgccccgggatgatataagtcttcgcccagacatgtatccctgcagcctctgctggaaggacaatgtgacactgattattggctgggggacttctgtcaaggtgtgctcagtgaaggaacggcatgccagtgaaatgagggatttgccaagtcgatatgttgaaatagtgtctcagtttgaaactgaattctacatcagtggacttgcacctctctgtgatcagcttgttgtactttcgtatgtaaaggagatttcagaaaaaacggaaagagaatactgtgccaggcctagactggacatcatccagccactttctgagacttgtgaagagatctcttctgatgctttgacagtcagaggctttcaggagaatgaatgtagagattatcatttagaatactctgaaggggaatcacttttttacatcgtgagtccgagagatgttgtagtggccaaggaacgagaccaagatgatcacattgactggctccttgaaaagaagaaatatgaagaagcattgatggcagctgaaattagccaaaaaaatattaaaagacataagattctggatattggcttggcatatataaatcacctggtggagagaggagactatgacatagcagcacgcaaatgccagaaaattcttgggaaaaatgcagcactctgggaatatgaagtttataaatttaaagaaattggacagcttaaggctattagtccttatttgccaagaggtgatccagttctgaaaccactcatctatgaaatgatcttacatgaatttttggagagtgattatgagggttttgccacattgatccgagaatggcctggagatctgtataataattcagtcatagttcaagcagttcgggatcatttgaagaaagatagtcagaacaagactttacttaaaaccctggcagaattgtacacctatgacaagaactatggcaatgctctggaaatatacttaacattaagacataaagacgtttttcagttgatccacaagcataatcttttcagttctatcaaggataaaattgttttattaatggattttgattcagagaaagctgttgacatgcttttggacaatgaagataaaatttcaattaaaaaggtagtggaagaattggaagacagaccagagctacagcatgtgtatttgcataagcttttcaagagagaccaccataaggggcagcgttaccatgaaaaacagatcagtctttatgctgaatatgatcgaccaaacttacttccctttctccgagacagtacccattgcccacttgaaaaggctcttgagatctgtcaacagagaaactttgtagaagagacagtttatcttctgagccgaatgggtaatagccgaagtgccctgaagatgattatggaggaattacatgatgttgataaagcaatcgaatttgccaaggagcaagatgatggagagctgtgggaagatttgattttatattccattgacaaaccaccatttattactggcttgttaaacaacattggcacacatgttgacccaattctactgattcaccgtattaaggaaggaatggagatccccaatttgagagattccttggttaaaattctgcaagactacaatttgcaaattctgcttcgtgaaggctgcaagaagattctcgtagctgactctttgtccttactgaagaaaatgcaccgaactcaaatgaaaggtgttcttgttgatgaggagaacatctgtgagtcgtgcctttcccctattcttccatcagatgcagctaagcccttcagcgtggtggtcttccattgccggcacatgttccacaaggagtgcctgcccatgcccagcatgaactctgctgcacagttctgcaacatctgcagtgctaagaaccgtggaccaggaagtgcaattttggagatgaaaaaatagctcatttctccttgtcagtctccttgtcaccactctttttgagactgtttttgcaacaacaaaagcatttgttgacactcgtgctgttaagagatttgtttatgtttatattatactcaaaaacaatttcttcatctattcctgtactaatggtttctctttgcagttcacagagaatttggggctctcttcatgccttgaaattttggggtccatagtgaatattttgttatttatttgtttggctcattctttatatagtaatggaaacataagtctaggagttagaaatgaattttttagaccttagtaaaaccatttaaccataaaatggacaactgagaattctcccagctgcctgaaagcgtcgccaactgtggttatcctgcaagctgctacctgcaacttggacgttgtttccacgtgctctgctggctacgattcttgcattctgggtttggcttttttctgtgtcatcaactatggttatcctctaaataggcatttaatgaaacattgtacaaattgtcactcatttgatgacacctgggaataacattagcaggctgatgtcctgcaccattatgtttactaatcacatgttctgtgtgctgtgacgactgtcaaagagtatctggccatggcggacactcagcatttgttgattgaataaatgttagctcttctcattgtgaaggactcacttttactgggataaacaaatgcagttaagaattctggcacccttgtaaggaagaaaagagagttcaacaccttcgagtctgagcgcttgtggctagagtttgccaggagggaggaaaccagtgaccctgaaaactgagggtgcctcaggagcagtgggaccacctgatgctgaaggacggactaatgatgtttcctcttgccttctctggtgcctccattgccctccatggaacagagcatatcatagaaggagaaaaattccaacttgtaattgtgtcttacagttactggcttcatcttccttgggatatatggtcatcctctaatgagtgtaaaagtgcgcaaaacacatccttattgttcctgatctcttagtcccataaatgggaacaaatacagctttctgcttctttctttttggggaaaggacagggtgctagtgagtactgacagcatgccagctaccaaagtcacccagccattcccatgagcagcagttcatttaattgtcacagcgtcgccaggaagaagatctgataaacctaggtttacagataaagaaagcaaaatgtagagatgttgttgaggtcacagaggtgactgcctaacttcagagcagggcttctgatccctttaagaaattacagggccagccgggcatggtggctcacgcccgtaatcccagggctttgggaagccttggcgggtggatcacctgagatcgcacgttcgagaccggcctgaccaacatggagaaaccccatctctactaaaaacacaaattagccaggcatggtggtacatgcctgtaatcccggctactcaggaggctgaggcaggagaatcacttgaccccaggagacatatgttgtggtgagctgaggtctcgccattgcactccagcctgggcaacaagagcaaaactccgtctcaaaaaagaaaagaaaagaaaagaaatcatagggccaagttcaaaggaaatgcacagaacatatcttcacattagagttaagaattctctagcaaacaacagatttttttgttgttgttagtcacaaatacttagaactggaaggcgctttgttattattgaatgtacccctcagccttctcagcatttccttatcccaagactagtgtgctttctgctacactgctagttttcagttttgttcttacccaattgttttttcttttcaacattaccaatttacagattcagtttattacatttacattaatcctcacttatgatttgagcaagctcatttccagaaaagtttactttaagatcatcaataggatttgctaatttcagtgaagtcattttgcttcaggggtaaattatcctagttaccaagtcctatttggacataaagaaaatcctacttatagaaaaggagaaaataattaaacagtcttcatttttaagtaactgatttaaaaggaaaataataaaatatgttcgtttatcatttcagaaattgctgtaacacactggaaaattcctgaacaatatagattttatcgttaataaaaaacactagctttcgttccttagaatgtcttttcttttgaataaacagtattgggtgatttaaaaaaaaaaaaaaaaaaaaa

SEQ ID NO: 32079 - DNA, 4156 bp, Homo Sapiens
  misc_feature (1121)..(1121): n is a, c, g, or t
cccactatgttggccaggatggtcttgatttcttgacctcgtgttctgcccgcctctacctcccaaagtgccgggattacaggcgtgactgctgtgcccggccccagcatcacttttatagctttctgtgcctcttcctctgggccttggtgtatgaagccacttgcctttctctgttgggaagcgagcagaatcagattgctactcatgatgcagtccgggcagggcatactgtcacctttggctgtggacacagttgtcaggataggggagaagccctttaggtccgtcttcttgacacagccctcctacctggttacgctggtgctttcgcttggtttagacaaccaagacacttgagaattatgctgtcctcagaatgtctgatgaaaagaacagattcactttttggacacaatgcccattagccatctttggcagtgtttctgatcaaaggttccccatgcctgctctaggaaagtaaacttttttcagaataaatcctcaaatggattactgagtagtctttgcaccattcccatcagcctaatcagactgaatggtcacgctcagtgcaaaaagctgttttgctgttaggatgtttcagtgtttcttgtctttcctggaacagttcagttgtttaaatttagtaattcaatcctgaccagtgtaaacccacttaattattgcagcctaaagaattcagctacttctactcttcataaatgtgcccaagtaaatatgtgtttttaatattcaaccctggaaaattagtaattcagatgataaaagctcatgttttggtgtctttgtactcagattgtgaacaggcatatttcactgatttagacttagtatacttgatgagaatgctcaggttgaagagatagttctgtcagcaatccaacatctatagcaatgtggaaaaagtaatcaactcatatttcacgaatttgatgtatgttgtgatttagagggcatgagataaagtttatatttgaactgtgtggggtagggggaagaagaggttgcttaagcaaatgggggggtgattgaggaacaagatgtctctaagatgagaagttattttcttgcatcatagaagcactctythyacccgngagtgattgtgttaactataaatcatttatatctgtacattaaagcagattccctcaattaggcaaatttggttagccaagcccaagttattgtttgtacttgaaagtaataaagctgcatttccttaaaaatatattctgtagttaagactttgtcttgctttccggaattcctgtttttcttttcctctagagacctcggcttgcaactggatcaaacgctgtcgaaaggatgtaaataggcagagcaactgttaccaagaaggccaccacccccacccaaaggcagtgaggagtgtggggcttcgtctgggctcccccgagtctcaacagtaatcaacagtcaggtgttgattgcaacttttcaaggtcagccaccgggagtagcctattccctctaggaaccttggagggcataccttgctgggactcaacttggctgagaaatgcacaagatgccaaaggaggaaggattatagggggcgtgtgtgtgacccccaagaccgatcttccgctatcaccctaatctccggttccccgctacccgggcgggggtgagtatgtgacatgtgcctaactctcagcagcaacttcggcagcaggtgtcgatcctaactaagcaggagctgcggctgccgggtgtgccctcaccaagccatgcgagccccgggcgcgcttctcgcccgcatgtcgcggctactgcttctgctactgctcaaggtgtctgcctcttctgccctcggggtcgcccctgcgtccagaaacgaaacttgtctgggggagagctgtgcacctacagtgatccagcgccgcggcagggacgcctggggaccgggaaattctgcaagagacgttctgcgagcccgagcacccagggaggagcagggggcagcgtttcttgcgggaccctcctgggacctgccggcggccccggaccgtgacccggctgcaggcagaggggcggaggcgtcgacagccggacccccgggacctccaaccaggccacctgtcccctggaggtggaaaggtgctcggggtcaggagccttctgaaactttggggagagggaaccccacggccctccagctcttccttcagatctcagaggaggaagagaagggtcccagaggcgctgtcatttccgggcgtagccaggagcagagtgtgaagacagtccccggagccagcgatcttttttactgtccaaggagagccgggaaactccagggttcccaccacaagcccctgtccaagacggccaatggactggcggggcacgaagggtggacaattgcactcccgggccgggcgctggcccagaatggatccttgggtgaaggaatccatgatcctgggggtccccgccggggaaacagcacgaaccggcgtgtgagactgaagaaccccttctacccgctgacccaggagtcctatggagcctacgcggtcatgtgtctgtccgtggtgatcttcgggaccggcatcattggcaacctggcggtgatgtgcatcgtgtgccacaactactacatgcggagcatctccaactccctcttggccaacctggtcttctgggactttctcatcatcttcttctgccttccgctggtcatcttccacgagctgaccaagaagtggctggtggaggacttctcctgcaagatcgtgccctatatagaggtcgcttctctgggagtcaccactttcaccttatgtgctctgtgcatagaccgcttccgtgctgccaccaacgtacagatgtactacgaaatgatcgaaaactgttcctcaacaactgccaaacttgctgttatatgggtgggagctctattgttagcacttccagaagttgttctccgccagctgagcaaggaggatttggggtttagtggccgagctccggcagaaaggtgcattattaagatctctcctgatttaccagacaccatctatgttctagccctcacctacgacagtgcgagactgtggtggtattttggctgttacttttgtttgcccacgcttttcaccatcacctgctctctagtgactgcgaggaaaatccgcaaagcagagaaagcctgtacccgagggaataaacggcagattcaactagagagtcagatgaactgtacagtagtggcactgaccattttatatggattgggcattattcctgaaaatatctgcaacattgttactgcctacatggctacaggggtttcacagcagacaatggacctccttaatatcatcagccagttccttttgttctttaagtcctgtgtcaccccagtcctccttttctgtctctgcaaacccttcagtcgggccttcatggagtgctgctgctgttgctgtgaggaatgcattcagaagtcttcaacggtgaccagtgatgacaatgacaacgagtacaccacggaactcgaactctcgcctttcagtgccatacgccgtgaaatgtccacttttgcttctgtcggaactcattgctgaaggacagtacttggttgggtcagatttatttgtttgattttcatatcccgtgaaagtttttaattcatatttttccttatagggaaaaatgcaaaaaagaaacaataaagaaagaaatattaactactgtagaactgattttacaaattaatatttgtgctttgaaaaaaagtttctatttagttatttaagaagaatgagaaggccaatagttttagattattttatctggtatggtgctaatattttatttgaaaaaagttactgcaacttaacttaaaattgctaacgttttttcttcttttaaaaatacaattattgtatattaattatagcaatgtgattttgtaggttattttatatttgagttgtgattgaaagtatgttgtatatggtattgtgagatgatttgtacttggaagcattcacaaagtagcaccaaataaattacactttattctttaatgtcattgtcaatctacttttaaccaatattcaataaatcttctaattgccttaaaaaaaaaaaaaaaaaa

SEQ ID NO: 32080 - DNA, 1368 bp, Homo Sapiens
ataaagtgcctgccctctagcctctactcttccagttgcggcttattgcatcacagtaattgctgtacgaaggtcagaatcgctacctattgtccaaagcagtcgtaagaagaggtcccaatcccccactctttccgccctaatggaggtctccagtttcggtaaaagtttcatttgatctgaatagtattaaaataaaatacctggatgaggaagatgaagaggtgctggaagcccaggaagcacacatcaaggctcccttgccagcagggtgctgccaataaaaggtagtcacgtggaatttggaatgtggaaaggaggtagaagtcatcctttcctcccctgtagcagcaggcgtgcaggctctggtggtcagctggactccatactcccccaccagtcaccagcctggggaccgtggggctgcaaggacctcagcagcggtgtcccaagtttcctgacttcttccatcctctggaaatcagctgtgtttgctgaggataatggcctcaagatccatctgtgttcctacaaaagagatgatcttgttcttttttatgattgcacatcttttgttctaacgtttggtccttcaccttggttcctgacacaaggattcctaaatcccttggaattttctgcatgataggagcatcctttgttctcatgaggtgactcttggtgggctccttatttggggactggtcaccaaaaatacctaactatggttggaagcttagtgctttcagccccattccccatcctctgggatggggagcagagctggagctcgatcatgcctgcgtgacaaagcctccagaaaaatccttgaaagacaggacatggagagctgctgggttggcgaacacatccatgtgccgggaggatggtgcaccccaactccacaaggacccttccagacctcaccctgtgtatctcttcatctggctgttcatttagcagctccgagggcaggcatggtggctcatgcctgtagtcccagcactttgggaggccgaggcaggtggttcatctaaggtctggagttcgagaccagcctggccaacatagcgagagcagctccggtggcgggaggagtggcagcggccaggcagcccagcttcgcgaaggctgtaggcacaccgcggccagcaggcacctggcacccaccttccctgctgccaggatgcccaagaaaaaggtcagctccaccgaaggggctgccatggaagagcccaagaggagatcagcgcaattgtcagctaaacctcctgcaaaagtggaagcgaagccgaaaaaggcagcagcgaaggataaattttcagacacaaaagtgcaaaaaaaaaaaaaaaaaaaaaaaaaaaaaaa

SEQ ID NO: 32081 - DNA, 1923 bp, Homo Sapiens
atggcggcgggggggacagggggcctgcgggaggagcagcgctatgggctgtcgtgcggacggctggggcaggacaacatcaccgtactgcatgtgaagctcaccgagacggcgatccgggcgctcgagacttaccagagccacaagaatttaattccttttcgaccttcaatccagttccaaggactccacgggcttgtcaaaattcccaaaaatgatcccctcaatgaagttcataactttaacttttatttgtcaaatgtgggcaaagacaaccctcagggcagctttgactgcatccagcaaacattctccagctctggagcctcccagctcaattgcctgggatttatacaagataaaattacagtgtgtgcaacaaacgactcgtatcagatgacacgagaaagaatgacccaggcagaggaggaatcccgcaaccgaagcacaaaagttatcaaacccggtggaccatatgtagggaaaagagtgcaaattcggaaagcacctcaagctgtttcagatacagttcctgagaggaaaaggtcaacccccatgaaccctgcaaatacaattcgaaagacacatagcagcagcaccatctctcagaggccatacagggacagggtgattcacttactggccctgaaggcctacaagaaaccggagctacttgctagactccagaaagatggtgtcaatcaaaaagacaagaactccctgggagcaattctgcaacaggtagccaatctgaattctaaggacctctcatataccttaaaggattatgtttttaaagagcttcaaagagactggcctggatacagtgaaatagacagacggtcattggagtcagtgctctctagaaaactaaatccgtctcagaatgctacaggcaccagccgttcagaatctcctgtatgttctagtagagatgctgtatcttctcctcagaaacggcttttggattcagagtttattgatcctttaatgaataaaaaagcccgaatatctcacctgacgaacagagtaccaccaacactaaatggtcatttgaatcccaccagtgaaaaatcggctgcaggcctcccactgccccctgcggctgctgccatccccacccctccaccgctgccttcaacctatctgcccatctcacatcctcctcagattgtaaattctaactccaactcccctagcactccagaaggccgggggactcaagacctacctgttgacagttttagtcaaaacgatagtatctatgaggaccagcaagacaaatatacctctaggacttctctggaaaccttaccccctggttccgttctactaaagtgtccaaagcctatggaagaaaaccattcaatgtctcacaaaaagtccaaaaagaagtctaaaaaacataaggaaaaggaccaaataaaaaagcacgacattgagactattgaggaaaaggaggaagatcttaagagagaagaggaaattgccaagctaaataactccagtccaaattccagtggaggagttaaagaggattgcactgcctccatggaaccttcagcaattgaactcccagattatttgataaaatatatcgctatcgtctcctatgagcaacgccagaattataaggatgacttcaatgcagagtatgatgagtacagagctttgcatgccaggatggagactgtagctagaagatttatcaaactagatgcacaaagaaagcgcctttctccaggctcaaaagagtatcagaatgttcatgaagaagtcttacaagaatatcagaagataaagcagtctagtcccaattaccatgaagaaaaatacagatgtgaatatcttcataacaagctggctcacatcaaaaggctaataggtgaatttgaccaacagcaagcagagtcatggtcctag

SEQ ID NO: 32082 - DNA, 1071 bp, Homo Sapiens
ggacacgcaggtttccgagacactaaagcgttttgcagggaaggtgacaacagccagtgtaaaggaacggagagaaatcctcagtgaacttgggaagtgtgttgctggaaaagatcttccagagggagcagtgaaggggctctgcaaattgttctgcttgactctgcatcgatatagagatgcagcctcccgcagggccttgcaggcagccatccagcagttggctgaggcccagccagaagccactgctaagaaccttctacactctctgcagtcttctggtataggctccaaagcaggtgttcccagtaagagcagtggctctgccgccttgctggccttgacctggacctgcctcctggtgcgcattgtctttccatcgagagccaagcgacaaggagacatctggaacaaactggtggaagtgcagtgcctgctcttgctggaggtgctgggtggctcccacaagcacgccgtggatggtgctgtgaagaaactcacgaagctgtggaaagagaaccccgggctggtggaacagtacttgtcagccattctcagcctagagcccaaccagaactatgctggcatgctggggctgctggtgcagttctgcacgagtcacaaggagatggacgtggtcagtcagcacaagagcgccctactggacttttacatgaagaacatcctgatgagcaaagtcaagcctccgaagtacctgttggatagctgtgcccctctgctccgatacctgtcccactcagaatttaaggatctgatactgcccaccatacagaagtccttactgaggagtccagagaatgttattgaaactatttctagtctgctggcatcagtgacgcttgacctcagccagtatgccatggacatcgtgaaaggactggctggtcacctgaaatccaacagtccccgcctgatggatgaagctgtgctggcactgcggaacctggcacgccagtgcagtgactcttcggccatggagtccctgaccaagcacctatttgctatcctcggaggctcggaaggaaaactaactgttgtagcccagaagat

SEQ ID NO: 32083 - DNA, 3394 bp, Homo Sapiens
  misc_feature (3200)..(3200): n is a, c, g, or t
acatagagataaagggaatgaactataaagacactggcatctctgtttcccacaaatcaagacattcatgaaattaatgactaacttacaatgaattttttagaggtgtgtctcataaggaaaaacctggatgatatgggaccccgcaggtgattgggggcgtagcctggagtgagggtttggctggtgtagcttggagtgaggccccctggcgtggagtcttgaggcctgctgagggcgtgagatggcatgaggcgaagagagggccatggcaccgactccgagatgggtcaaggacccgtacgggagtcgcaatcctcagaccctcccgcgctccagttccggataagcgagtataagccgctgaacatggcgggagtggagcagcccccgagccccgagctgcggcaggaaggcgtgaccgaatacgaagatggcggggccccggcgggagatggcgaggcgggcccccaacaggcggaggaccacccccagaatcctccagaagatcccaatcaggaccccccagaggatgatagcacctgtcagtgccaggcgtgcgggcctcaccaagccgcgggtccagatcttggttcctctaatgatggctgccctcagctgttccaggagcggtcagtcatagtggagaactcctcaggctctaccagcgcttctgagctcctcaaacccatgaagaagaggaagcgcagggaataccagagcccatcagaggaggagtcggagccagaggccatggagaagcaagaagaaggaaaggacccagagggacaacccactgctagcaccccagagagtgaggagtggagcagcagccagcctgcaacaggtgagaagaaggaatgctggtcgtgggagtcctacctagaggagcagaaggccattactgctccagtcagcctcttccaggactcccaggcagtcactcacaacaagaatggcttcaaactgggcatgaagttggaaggcattgaccctcaacacccgtccatgtacttcatcctcaccgtggctgaggtatgtggctatcgcctacgcctgcactttgatgggtattctgagtgccatgacttctgggtcaatgccaactcccctgacattcaccctgctggctggttcgagaagacgggccacaagctgcagcttcccaaaggttacaaggaggaggagttcagctggagccagtacatgtgcagcacaagagctcaggctgcccccaagcacatgtttgtgagccagagccacagtcccccacccttgggcttccaggtgggcatgaagctggaggctgttgaccgcatgaacccgtcccttgtctgcgtggccagtgtgaccgatgtggtggacagccgcttcctggtgcactttgacaactgggatgatacttatgactactggtgtgatcccagcagcccctacatccacccagtgggctggtgccagaagcaaggaaagcccctcacccctccacaagactacccagaccctgataacttctgttgggagaaatatctggaagaaactggggcctctgctgtccccacctgggccttcaaggtgcgaccccctcacagcttcctggtcaatatgaagctggaggctgtggaccgcaggaacccagccctgattcgcgtggccagcgtggaggatgtggaggaccatcggataaagatccactttgatggctggagtcatggctatgatttctggatcgacgctgatcacccagacatccaccctgccggctggtgctccaagacaggacatcccctgcagcctcctctcggacccagagagcccagctctgcctcccctgggggctgtccccctctcagctataggagcctgccccacactaggacctccaaatacagctttcaccaccggaagtgccccactcctggttgcgacggctctggccatgtcacaggcaagttcacagctcaccattgcctctcaggctgcccactggctgagaggaaccagagccggctgaaagcggagctgtctgacccggaggcctcagcccgcaagaagaacctctcaggcttctccccaaggaagaagcctcgccatcacggccgaattggacgccctccgaagtatcgaaagattccgcaggaagatttccagaccctcacgcccgatgtcgtgcaccagtccctcttcatgtcagccctgtcggcccaccctgaccgctcactctcagtgtgctgggagcagcactgcaagctcctgccaggagtagcgggcatctcagcctcgacagtcgccaagtggaccatcgatgaggtcttcggctttgttcagaccctgacaggttgtgaggaccaagcacgcctcttcaaagacgaggcaagaatagtcagagtgacccatgtatctgggaagactctagtctggactgtggcccagcttggggaccttgtgtgctcagatcatcttcaggaaggaaaaggcatcctggagacaggagtccattcactcctctgctctctacccactcatttgcttgccaaacttagctttgccagtgatagtcaatattaaagtgtacttttttcccctttaatccaatatagttgataattaaagtgtattttgaatgacacagatattgtgatttactgcaaggatcctaacacacacttaaaatcaagagccaaggagtagtgagttgtagataaaaaaagaatgtcagctttggagacagtctgggtttaaatcccagttctgtcaatttgagctgtttactgtctctgagcctacatcttcttgtctgtaaaatggagataaaatgggtttaatgaggtctaccttgcagagccattgtgagcattggaaatgatgaatgaatcataccagaacgtctagtataattacagtcatgcattgcttaacgatggggatacattcttagaaatgtgtcactaggcaattctgtcattgtgtaaacattataggatgtacttacacaaacctagatgttatatgtatttttatttacatgtatattttcacatgaaataccaaatgtcacagcattattactgaatgtcagtcatttcccctacttgatctgcaatgccaatatcaagggccatgtatcaggtttctgtatatgttccactataatcttatgggaccatggttttaaatgtggaatcattgacagaaatgtntttatgtagcatatggctgtgtatcactagtatataatagagcaatattatggaggaatatgtagatccaatcactttacctatacaaaatgactgctatggtgggaacacaataaacaccagttttgacttttaaaaaaaaaaaaaacaaaaaaaaaaaaaaaaagcggccgctgaattcacctgcccgggcg

SEQ ID NO: 32084 - DNA, 13359 bp, Homo Sapiens
  misc_feature (8374)..(8374): n is a, c, g, or t
  misc_feature (9044)..(9044): n is a, c, g, or t
ggatcctaaggatgtgacactggttttcaacaacatgcttagagaactcatgaagtggattgggtgtcaacccagtgaacatgtttttatttaatttattttttgaagtttatgtggtgatggtgtggctttccgaaatgggcaaatattcagaaaatcttttgcattttcttctgtcaggaatggggaaggggagtgggggcacaatctgagaaaggacacctgtgctgttctaggcatcgctggcaagtttgtgggaagggatgggcaagggtgagtgggtttgctccacaccgtcctgtgctgctcgagaggacctgggacgtgcgagggaaacgtgggtgacggtgcctaggctgcggcccttcactgctgtgctgggttcctgcagcctgctacgtttcccttggcaatgtaaatgaagatggaggggtcgtttcgtgatttcctgctgctgagaataaatgtcttgttaaaaacgtggcaacggttactcttaggtgccatggatcgatgtcagggtggtcagctctggactaagccacccacctccaatttgtacaacagtattgatacatagggctacactcattactgttcaagtgttctatgttaagagttgtgtttaatttctaaagattaaaaaaagcaaaaaaattggtgctaaaccttcacccctgagcacgctcagtgagactggtcatgcaagcatttacagtgccatgctcctcaagccgattttttcttgtagaaatgttgccctatttgtcttctccaatgtatggtatgttattttattttattattttattttattttattttattttatcgagggggggtacgatacctgccatttaagaaaatgaatagaaaattttaaaacccgagaaatgggggaaaaaaaatcagtgcacaagaattgggctggttaggcccagcaccacactgaagtgggctcagtggtttttggagtgaagaagccttactccctgcacattccctcatgctcccacacaagtccagcaatggaaatgcttgggttcctcttgctttgtcaggggactcaggagtcgaccaagggaaaccatttggccccgtgaggaatgggcattgtcagtatccgtcctgaacggggcctagtcaggaagcggtctagaagtgtacggtcacggtcgcctcatgaaagtgtgtagcaggtggctctcaggaaaaataccaagtctggatcatccatgtggcagctttgcatagggagaggatagctccgaactggaactgaactgccttctctgcacgcttgaccaaagcagtgatgaaggcgctggtggtggcgcgcggcgcggcgcggcgatggcggcgggtggcagcgatccgcgggctggcgacgtagaggaggacgcctcacagctcatctttcctaaaggttgggctcggggctgccaaactcccccgcgccacttcgcgtggtcgccgcaggcctggcgttatgcgcgcttcgcccaaggccctgcctaagcggcggcttgggcaagccccaccgcggcgtggggctggggagggaacatggccttgggagggaccatggccttgggagggaccgcctgggcaactgggttattttatgtgataaactgcgaagttccggggacctgtgtcaaagataaacaaagccggacactcaggtggtaaggacagatttttaaacagtaatatactgttgcactagggaaaagagcccagcgtgaaccgaactcaacttcgattagtacagaacctctgggcgttttaacggagaattagggaataaggatgtggtgagcgggagctcgggggagtcggggaagtgagaaatgtaaaaaagcgggaagaggaggattggtccgtgtgaacgcagcttggtttgttgactggcgcacctgtggaagttaggcccctaccctcccacagaggcagagagacagagtcctatcttcagctgttggctggaacaaattattttggcagccttgagttttctcacgcacgcactttaagtggttggggagggtattcctagggatgaggtcttcagctcaaaaacttgaaaatgtatacagctgtcttacactttattgatttattgatttattgattgagatagggtctcgccctcttgttgaggctggagtatagtggcatgatcagagcccactgcaacctcaacctctcaaccgctcaagctatcctcccacctcagcctcccaagtagctgagaccacagatgcacgcccccatacctggcccattaaaaaaattttttcgtaaagacagggtctcactatgtcgcccaggctggtctcaaactcctgggcttaagttaatcacggcacctgacctatcttattcttttattcattcattcatttacttatttagagacagagtctcactctgttgcccaggctggggtgcagtggtacgaactcggctcactgcaacctccgtctcctgggctcaagtgattatcctgcctcagcctcccgagtagctgggattacaggtgcccaccaccacacccggctaatttttgtattttcagtagagctggggtttcaccatgttggccagcctgttctcgaactcgtgacctcaggtgatccacccagctcggcctcccagagtgctgggattactgatgtgagccattgcctggcaaaataataaatttaaaattaaaacggaaatactaccctctaagaaataaaaaatataaaaatgaaaaaatgtttattatgtgttttttgtattttatggtttaatacgttagaacttactattttagttgttaatttattttttttaattttttttttaattttattttgagatagggtttcactctgtcacccaggctggagtgcagtgatgtgatttcggctcactgcaacctacccctcctagtttcaagccatcctgcctcagcctcccaagtagctgggaatacaggcgcctgccaccatgcccagctaatttttgtgtttttagtagggacggtgtttcaccatgttggccaggctggtctcgaactcctgacctcaagtgatccacccaccttggccttcccagtgctgagattacaggtgtgagccacctcaccctgccttttttttttttttttttttttttttttttttttttttttgagacgggatctcattctgctacctaggttggagtgcagtggtgtgatcacagctcactgcagcctcaaccttccctaggctcaggttatcctctcacctcacttcagcctctggaatacttgggactacaagtgcaggccaccactcctggctaatttttgtatttttttgtggagacaaggtttcaccatgtggcccaggctggtcttgaactcctgggctcaggtaatctgcccgcctcgaccacccaaagtgttagaaagtataggtgtgagccactgcacctggcctattaatggtggtaatgacgtatcctcggtaaaatttccagatgacatacagccaaggagttgtttttccttttttagcaacagagattaattatggccattgttcttaaaatatttgcacaagagaaaataacaggcagatcccctgatctatttccttttgtttctaaataaattgtgtgtgtgtgtgtgtgtgtatgtgcgcgcgtgtgcgcgccttcacttgaaaatgttccttgggattagccatggggagaagtcttggatccctcctctccatagttacacaaaagtgtctgaactgcctcccccatccccattttgttgatgctgaatcctgggaatgcctcccaaaagctctgtggtaggtctcagacaccactttcctaggcactctgagttacagtttggctgcctcgaccttccttggttgaagggagtgagggtaatgtattagtagtacttgggtattgttcttaatgagaaatagggacagttgaccagtttcctggtgtcctaaaagttccattcctttccatttaacaagtaatttggtttagtgcagaaagggaccatctctcttttttttttttttttttttttttgagacggagtttcactgttgttgccttaggctggagtgcagtggcacaatctcggctcactgcaacctccacctcccgggttcaagcaattctcctgcctcggcctcctgagtaggtgggagtacagtcatgtgccaccactcccgactaatttttgtatttttagtagagatggggtttcaccatgttaggctggtctcgaactcctgacctcaggtgattcacctgccttggcctcccaaagtgttgggattacaggcgtgagccactgcgcttagcctgggaggcatctcttaacattgatttttccaggacctgtaaaagcatcaaagttccaacaaacagatttgtaactgattagctgctgcttccctttttttttttttttttttggcctgatgtcatttgttactgtcacttcagagtttggaggttctgcagtcctgatacataatgccttttcctctactcattgctgtgaggcagtagtttcttctgtacctacactgcctcagtgttaaggattaaaagaggtaactttccctggtatacaaataggctctcactgtagtaaatccccctgttataggctagaagactgaaaaagaaggtgttctgaggttttcgtttaaactctcctgccctcaggtagaaaacagtttttggttacctattttttaatttatattttaattttatttcaatagtgctccaactgtattggcagcctattctatttagtagcaatgagtacctttcaaataaaaatacagtttcctcctgacccaccacttaaaactatctgtgttgtaaaaggaaaatgaagctcttgtcagttacctggcttgagaaatgggaaggcattactctgagggaggtgttagtgatttccctgatagtaaacagacccatagcacatctaaatgtgaaattgcaagtcgttttggcttttcctcactgttgcttcctcttcagtgtggggttataaacatgaattcatgtttatgaatggttcctactctaagggaactcactgttaagagaaaggcagataaaaactatctctaatactttgagataaacattaggaacataagatcctgcaggaacgtaagggagagaatgattttcccaagggtaacagcattttttaacagaactattgtagaaatgtagaaggtcgccgtatattatgaaaaggggccatgggtttctttttctctcaaacctaattcttaaaaattgcttataacatttgtgtgtgcacaaaaatagattttggggtacattatatttatttccagacacttggccctatttaacatgtaacaattcttaaaattgagagtataatactagcattatggaagtaggaagatgatgagctgatgccggctagagggaaggaattgtcagtgtactcttgaaatcagtaactagtctatgtgtcattacttagtagcatgtctaggtcaggtttttggtgtcagaatctagctcagacaagctaaatgttagtgtctcgtgaactccactgtgccttgtggtatgtaactgtgccttgtggtatgtaactgtgggtgaacttaaagatgtggagtagctgcaggcataaaaaggaaggagatcccagcctgggcagtgtggtgaaacccccatctctaccaacaacacacagggtgtggtggcgtgtgcctgcagtccagctacctgggaggccgagatggggatggggcatcacctgaactcagggaggtcaaggctgcagtgaattgtattcatgccactacactccagcctgggtgacagattgagactctgtctcaaaaaaaaaaataaaagaacgaaatcatatcttttgcagcaacatggatggagctggaggccattcacttaagcaattaacacaggaacaaaagaccaagcacctcacattcttataagtgggagttaaaccttgagtacatatggacagaagggaacaacagacactgaggcctagttgagggggtgggtggtgcagattgaaaaactatgtatcagtactatgcttatcacttggatgacaaaatagtctgttcgccaaaccttcacaacacccattttcccctgtagtacagacctgcacatgcactctgaacctaaaataaaagttcaaaaaaaagcagatgtggagtaggaaacccctcgatttctgcaggggcagagaaatgttcaaatgcacagtgaacatttagaagcaaacttttgaaggagtattttcagctgccatttatgcttcttacaaatagagtttgaaacagctgagacacttctaaattcagaagttcatatgcttctggaacatcgaaagcagcagaatgagagtgcagaggacgaacaggagctctcagaagtcttcatgaaaacattaaactacacagcccgtttcagtcgtttcaaaaacagagagaccattgccagtgttcgtaggtgagtgctaaaagaaagtttttattaatccaaaccattggacaactgcatgtagaatgctgtcccctccccctttcccaggtgtcacttgtgaatttaagtaaaataatgttaggctgggcatggtggctcacacccagcactttggaaggttgaggcagcagatcacttgaggccaggtgttcaagaccagcctggtcgatatagcaaaaacccgtctctgctaaaaatgcaaaaaattagctggtggtacacaccattaatcctagctgctcaggaggccgaggcgggagaatcgcttgaatctgtaggccaaggttgcagtgagccgagattgcgcaactgcactccaacctgggcaacttagaagaccagaatttcagccaggtgtggtggcttacacctgtaatccacactttgtggagctgaggtggaccagtctcttgaggccaggagttcaagaccagcatgtgcaacatggtgaaactcgtgtccctacaaaaaaaatacagaaattagccaggtgtggtggcaggtacctgtggtcctagttacttgggaggctgaagtgggaggatcatgtgagcctgggaggttgaggctttagtgagctgtgattgtgccactgtactccagtctgggaacagattcaaatatgaatctgtcatattttgtgtaagtccagtatgtgtgatctaaatggtactgttagtggggaagtaactttttttgttattttttttagagatggggagacttactatgttgtccaggctggtctcaaactcctggcctcaattgatcctccaaccttagccccccaaagtgctgggattggccgggtgcagtggctcatgcctgtaattccagcactttgggagaccaagatgggcacatctcttgcggtcaggagttcaagaccagcctgaccaaaatggtgaaatctcgtctactaaaaatacaaaaattagctgggcgtggtagcgcatgcctgtagtcccagctacttgggagcctgagaaaggagaattgcttgaacccgggagagggaggtagcagtcagccaagatcgtgccactgcactgcagcccgggtgacatagagtgagactccatctcaaaaaaaacaaagtcctcgaattagaggtaagccaccatgtccagcctatagatagatagatagatagataatagtatttgtacctatgtatgaggtacatatgatattttgttacttagaatgtgtaatgagtatgttagggtattgagggtattgatcatttctatgtattaggaacatgtcaagtctcccttagctatttttattttatgtatttattcattgattttagagacaaggtctcactgtgttgcccaggctgaagacgtcttgaactcctggactcaagtgatcctcctgccttggcctcccaaagtgctaggattacaggcatgagctgctaagcctggcctcttctaccttttttttgttttgtttcgttttgttttgagacagtctcacttcatcacccagattggagtgtagtggtgcggtcttggctcactgcaacctccacctcccaggttaaagcagttctcatgcctcagccttccaaatagctgggactacagacacacaccaccacacccggctaatttttttagttttttgtttttttggttttgtttgtttgtttgtttgtctgttttgagacggagtctagttctgtcacccaggctggagtgcagtggcgtgatcttggctcactgcagcctccgcctcccgggttcaagcaattctcctgcctcagcctcccgagtagntgggagtagcccgccagtgcacccagctaatttttgtgtttttagtagagacggggtttcaccacgttggccaggctggtcttgaactcctgacctccgttgatccacccgcctcggcctcccaaagtgctgggattacaggcgtgagccactgcgccttggcaatttttgtatttttagtagagacggggtttcgccatggtgctcaggctggtctcgaactcctcacgtcaagtgattacccaccttggcctctcagagtgctggaattacaggtgtgagccactacacctggccgtctagatatttttaaatactagctacgtttgatcccttttttcctgttgattactctttgatttttgttgtttatttgtttttgattattttgattttttttttttccttttgattagcttgctactccagaaaaagcttcataagtttgagttggcctgtttggccaacctttgcccagagactgctgaggagtccaaggctctaatcccaaggttagtaccagttgtgataagttctctgtatactggataaattcctacaaatagaattggtgtgtctaaaatgtgtatgcgttatatatttgggtacataattgccaatattgaatgaaagtgccttttttttttttttttttttttttgaaacggantttcgctcttgttgcccaggctggagtgcagtggtgtgatctcggctcaccacaacctctgtctcctgggttcaagcgattctcctgcctcagcctcccgagtagctgggattacaggcacgcaccaccacacttggctaattttgtgtttttagtagagatggggtatctccatgttggtcaggctagtcgcgaactcccagcctcagttgatccacccgcctcggcctcccagagtgctgggattacaggcgtgagccaccgtgcccagccaaaagtgcccttttaacagtgtgtgagaatgatggttttataccacaccaagtgatacgcaaaaatatgaaacagctggaacttctgtccgctgatggtaggattgtgagtgttaattagaacaatcattttggagagtgatttggctatgtctggtaaagatgaatatactccaagttccaaaaatccattcctggtacatatcctaaaggtaactcacacaaatttagaaggagacgtatattttagtgttcattgctgcattgttttgtttttagtagacatggggtttcaccgtgttggccaggctggtctcaaacttctggcctcaagtgatctgcctgcctcagcctcacaagtgctgggattacaggcatgagccgcggtgcccagcctcatgctccactgctaatgatagcagaaatttgataatctcttggccagtaagaaaatggataaatgaatcattgtataatcatacaatgtttattatacagcagtaaaaaaaaaatcaatgaactagaaccacatggaatatcaacatatgccagaatgaattttgaggaaaaaaattgcagaaggataaatacagtatgatgccatttcttataaagtttgaaactatgctgcatattatttacgtatccataaatgtgtagtgagtataaaaatatgtatggcaaaacaaattttttttaaatgtatggcaatgataaatactaaattgaggatggtggttatttctggggaaggagggaaggtactggtctaggagagtatacacagccatccacttttcctgcttattaaagaactctgggctgggcgcagtggtttaagcctgtaatcccagcactttgggaggccgaggcaggtggatcacaaggtcaggaggttgagaccatcctggccaacatggtggaactccatctctactaaaatacaaaattagctgggtgtggtggtgtgcgactgtagtcccggctactcgggaggctgaagtaggggaatcactggaacccgagaggtgatggttgcagtgagccgagattgcgccactgcactccagtttggcaatagagcgacactctgtcccaaaaaaaaactctggccaggtgtggtggctcacacctgtcatcccagcactttgggaggttgataccattagaaaacatgaagacagtaaatgaaaaaatgcagggccgggcgtggtggctcatgcctgtaatcccagcactttgggaggttgagacaggaggatcaccctgaggtcaggagttcgagaccagcctcgccagtggtgaaaccccgtctctactaaaaatataaaaattagctgggtgagggctgggtgtggtggcttacgcctgtaatcccagcactttgggaggctgaggcgggcggatcacgaggtcaggagatcgagaccgtcctggataacacagtgaaaccctgtctctactaaaaatacaaaaaattagctgggcgtggtggcgggcacctgcagtcccagctacttgggaggctgaggcaggagaatggtgggaatccggaaggcggagcttgcagtgagccgagattgcgccactgcactcccagcctgggcgacagagcaagactccgtttggtaggctgagacaggagaatcacttgaaccctggaggtggaggttttggtgagccgagatcatgccacttcactctagcctaagaggcaagagcgaaactccatctcaaaaaaaagaaaaaaaaaaacctctaagtcaagtggggctaactgtaaaggtatattttttataccttttatcttttatatgtttgaaatattttgtaatgttttatcaggaaaagtggaaaagaaatccagatgaaaggtaaaggtgttagagatgtgggcagtagattagcacgcctcaaagaagagtgcggggaaattgccagtcgccaaatcactcatttcttttcattttcttgtagcttggagggacggtttgaagatgaggagctgcagcagattcttgatgatatccagacaaagcgcagctttcagtattaatctccaaacatcactgctgctcggagaaaccacatccccaggcataacaccaccttcccactgtctggggctgacttgcacagaaattctgttgaagacagttgagaattcctttggagaaaacagcccagcttggcgtggggttaggttgctgtttcaaataactcacaggcccaggtgacatggaatcttggagcagccttgtgcagtggcagccagtggcttcctgaacgtgcctctgcgaagtgtgagatgaggggtcacataaccacactgttgactacctcattcctggtttttggcctccacatcatcttttttcttaatatttcatgttttaatttcagggtgtttatactttttgaaactagaccagaagatagtagactttatagagaaagaccagttttacctagatactaaaggaagaattaaaccgctgttagtttgaaatgctttttttttttttttttaaatggagatagggtcttaactcttgtccaggctggaggagtgcagtcgtacagtcatggctcactgaagtcttgaccccgctgcctcagcctcccaaataactggggccacaggtgtgcaccacaactctcagctaatttttaaaattttttatagaggtggggttttactatgctgtccagactggtcttaaactcctgggctcaagtgatccccctgccttggcctcccaaactggtgagattacaggcatgagccaccacaactggcctgaaattcttaaaggatgggagtgtcgatgacagcaccttggcatcgttgtgcctaacctgggagacggaagaagcacgccatgggaagtgtttacacttgggggacaagtgctaagtattgtggagcccatagccccttgagatagatggctactttgcctttcttcttgaactgtcttgcagaatgtggatttggggtaagtggtcttgaaggattcatttagtcaccctcaaattaagatttttacttcatctttcttgggcctgcacctccaagataacaaagaagaagcaatggtcgtgccaaagaggtccacaaccaggtgtgcactgttcactgcagcccatttgctgtatgaactgtggttgttgtgtgcccaatgacaaggctactaagaaattcatcatttgaaacgtagaggccgcagcagtcagcgatgtttctgaaatgagcatccttgacgcctgtgtacttcccaggctggatgtgaagctacattaccatgtgagttgtgccattcacagcacagtggtgaggaattgagctcatgaagcaggcaaggaccgaacacctccaccccaacgtagacctgcaggtgctgccccatgacctccaccaaagcccatataaggagcggagttgttaaggactgaagaaaaacttctctggagaaaaataaaattgcaattctacttaaaaaaaattttttttttttttttacttcataggccaggcttgaagttctgaacactttgaagtctccaattatgagagatccagtctaagcctctggcctgctaattagcaataagtgctttatttggaaggagggagtcatccactcttgagccactgcagtgaagtcacttgatctcagtctgggggaaaacacttcaatagctaaacattctagctttgatttttctgaagggaatacacttgttttcaattttggggtttttctttggggcacttgcttgactctgtatgaacttgtgatccaaggaaaaaggagaaagaacagtgttggcttttaaaatcaggatggttttatgtttgctacgaaataaggcaagaataaaaaattcttatttttatttatttatttattttttgagatagagtctggctgtgttgcccaggatgcaatggcgcaatcttggctcactgcaacctctgccttctgggttcaagtgattctcctgcctcagcctcccaagtagctgggattacaggtacc

SEQ ID NO: 32085 - DNA, 3257 bp, Homo Sapiens
atttccttctccctttccccgccagcttcgcatccatctcccccaccccgtaaccccctcctgcctccatccaccggggctatggccgcagaagaggtattgcagacggtggaccattataagactgagatagagaggctaaccaaggagctcacggagaccacccacgagaagatccaggctgccgagtacgggctggtggtgctggaggagaagctgaccctcaaacagcagtatgatgaactggaggctgagtacgacagcctcaaacaggagctggagcagctcaaagaggcatttgggcagtccttctccatccaccggaaggttgctgaagatggagagactcgggaggaaacgcttctgcaggagtcagcatcgaaggaggcttactatctggggaagatcttggagatgcagaacgagctgaaacagagccgggctgtggtcactaatgtacaggcagaaaacgagaggctcaccgcagtcgtgcaggatctgaaggagaacaatgagatggtggagctacagagaatacggatgaaggatgaaatccgagaatataagttccgggaggcacggctccttcaggactatactgaattggaagaagaaaatatcacattgcagaaactagtgtccacgttgaagcagaaccaggttgaatacgaaggcttaaagcatgagattaagcgatttgaggaggagacggtactgctgaacagccagctggaagatgccatccgattgaaagagattgctgagcaccaactggaagaagccctcgagactttaaaaaatgaaagagagcaaaagaacaacctgcggaaggagctctcccagtatatcagcctcaatgataaccatatcagcatctcagtagatggactcaaatttgccgaggatgggagtgaaccaaacaatgatgacaaaatgaacggtcatatccatgggcctcttgtgaaactgaatggagactatcggactcccaccttaaggaaaggagagtctctgaaccctgtctctgacttattcagtgagctgaacatttcagaaatacagaagttgaagcagcagcttatgcaggtagagcgggaaaaggccattcttttggccaacctacaggagtcacagacacagctggaacacaccaagggggcactgacggagcagcatgagcgggtgcaccggctcacagagcacgtcaatgccatgaggggcctgcaaagcagcaaggagctcaaggctgagctggacggggagaagggccgggactcaggggaggaggcccatgactatgaggtggacatcaatggtttagagatccttgaatgcaaatacagggtggcagtaactgaggtgattgatctgaaagctgaaattaaggccttaaaggagaaatataataaatctgtagaaaactacactgatgagaaggccaagtatgagagtaaaatccagatgtatgatgagcaggtgacaagccttgagaagaccaccaaggagagtggtgagaagatggcccacatggagaaggagttgcaaaagatgaccagcatagccaacgaaaatcacagtacccttaatacggcccaggatgagttagtgacattcagtgaggagttagctcagctttaccaccatgtgtgtctatgtaataatgaaactcccaacagggtcatgctggattactataggcagagcagagtcacccgcagtggcagcctgaaagggcccgatgatcccagaggacttttgtccccacgattagccaggcggggtgtgtcatccccggtagaaacaaggacctcatctgaaccagttgcaaaagaaagcacagagcccagcaaagaaccaagtccaactaagacccccacaatctctcctgttattactgccccaccgtcatctccagtattggatacaagtgacatccgcaaagagccaatgaatatctacaaccttaatgccataatccgggaccaaatcaagcatctgcagaaagctgtggaccggtccttgcaactgtctcgtcaaagagcagcagctcgggagctagcccccatgattgataaagacaaggaagccttaatggaagagatcctcaagctaaagtccctgctgagcaccaaacgggagcagatcgccacattgagggcggtgttgaaagccaacaagcagacagctgaggtggcgctagctaatctcaagaacaaatatgaaaatgaaaaagcaatggtgactgaaaccatgacgaagcttagaaatgaactgaaggctttgaaagaagatgctgcaaccttctcatccctgagaacaatgtttgcaacaagatgtgatgaatatgtcacccagttggatgagatgcagagacagttagcagctgcagaggatgagaagaagactctgaacactttgttacgaatggctatccagcaaaaactcgccctgacccagaggctggaggacttagagtttgaccatgagcagtcccgacgcagcaaaggcaaacttggaaagagcaagatcggcagccctaaagtaagtggggaggcatcagtcaccgtgcccaccatagacacttacctcctgcatagtcagggcccacagacacccaacattcgggtcagcagtggcactcagaggaaaagacaattttcaccttccctttgtgatcagagccgtcccaggacttcaggggcttcctacctacagaatttattaagagttccccctgatcccacctccacagaatcatttcttctgaagggccccccttccatgagtgaattcatccaagggcaccggctcagcaaggaaaaaaggttaaccgtggctccaccagattgtcagcagcctgctgcctccgtaccgccacagtgctcacaactagccgggaggcaagactgcccaactgtcagtcctgacacagctctccctgaggagcagccacattccagctcccagtgcgcccctctccactgtctctccaagcctcctcacccctagtcttcatctcctgtggacgaacatctggggtggaagttttgtagccacacacaggatactgcccaagatccagcgggtgttttcttctcggttgttagatgtacaattggattaatgtccatcgttttggaagacgagaaagttgagaagaacacgaagcacagaccctgatgtgataaaacattttgtggtttctctgagtcacagataaacttctgccatcaaatggctacagttcatttaaattt

SEQ ID NO: 32086 - DNA, 4117 bp, Homo Sapiens
tccatgctgaattccttatgggtgtcaatgagagactgcagggcctctgtgtcatcaggaagtgctccccgaaagcgaagcgtttgccggaattccgggatcgtggatcctccttcaaaaatggaggatggaaagcccgtttgggcgccacaccctacagatggatttcagatgggcaatattgtggatattggccccgacagcttaacaattgaacccttgaatcagaaaggcaagacatttttggctctcataaaccaagtgtttcctgcagaagaggacagtaaaaaagatgtggaagataactgttcactaatgtatttaaatgaagccacactgctccataatatcaaagttcgatatagtaaagacagaatttatacatatgtcgccaacattctgattgcagtgaatccatactttgacatacctaaaatatattcttcagaagcaataaagtcatatcaaggaaaatctcttgggacaagaccacctcatgtctttgcaattgctgataaagcttttcgagacatgaaggtgctcaagatgagtcagtctatcattgtatctggagaatcaggagccggcaaaacagaaaatacaaaatttgttctaagatacctgactgaatcctatggaacaggtcaagatattgatgacagaattgttgaagctaacccactcctagaagcctttggaaatgcgaagactgttcgcaacaataatagcagtcgatttgggaaatttgtagaaatacattttaatgaaaagagctcagttgttggaggatttgtttcacattatctcctagagaaatctaggatctgtgttcaaggcaaagaggaaagaaattatcatatcttttataggttgtgtgctggtgcttctgaagatattagagaaaaacttcatttgagttcaccagataattttcggtatttaaaccgaggctgcactagatactttgctaacaaagaaactgacaaacagattttacagaaccgcaaaagtcctgagtaccttaaggcaggttctatgaaagatcctctgctagatgaccatggtgattttattagaatgtgcacggctatgaaaaaaattggtttggatgatgaagaaaagcttgatctcttccgggtagtagctggcgtcctgcaccttggaaatattgattttgaggaagctggcagcacttcaggtggttgtaatctgaagaataaatctgctcagtctttggaatattgtgctgaattactgggtttggaccaagatgatcttcgagtaagtttgaccacaagagtcatgctaacaacagcagggggcaccaaaggaacagttataaaggtacctctgaaagtggagcaagcaaacaatgctcgtgatgccctggcaaagacagtgtatagccatctttttgatcatgtggtaaacagagtaaatcagtgttttccttttgaaacatcatcctattttattggagtcctagatattgctggttttgagtactttgagcataacagttttgaacaattttgcatcaactattgcaatgaaaaacttcaacaattttttaatgaaaggattctgaaggaggaacaagaactctatcaaaaagaaggtttaggtgttaatgaagtgcattatgtggataatcaggactgtatagatttaattgaagccaaattagtgggaatactggatattttggatgaagaaaatcgccttccccagccaagtgatcaacactttacatctgcagttcaccaaaagcacaaggatcattttcgactcactattcccagaaaatctaagctggcagttcataggaatatcagagacgacgaaggcttcattatcaggcattttgcgggggcagtgtgctatgaaacaacccagtttgtggagaaaaataatgatgctttacatatgtctcttgaatccttaatatgtgaatccagagataagtttatacgggaattatttgaatcatccacaaataacaacaaagatactaaacaaaaagcaggaaaacttagcttcatcagcgtgggaaacaagtttaagacacagttaaatttgcttctggataaacttcgaagtactggagcaagctttattcgttgcatcaaacctaacttaaagatgacaagccaccactttgaaggtgctcaaattctgtctcagcttcagtgttcagggatggtgtctgttttggacttgatgcagggtggttacccatcacgagcttcatttcatgaactctacaacatgtacaaaaagtatatgccagataaacttgcaagattggatccaagactattttgtaaggctttgtttaaagctttgggcttaaatgaaaatgactacaagtttgggttaaccaaagtattttttagacctggcaagtttgcagaatttgatcagatcatgaagtctgaccctgaccacttagcagagttggttaaaagagtcaatcactggctcacatgcagtcgctggaagaaagttcagtggtgctcactctcagtcatcaaattgaaaaacaaaataaaatatcgagctgaagcctgcattaaaatgcaaaaaactattcgaatgtggctttgcaagaggagacacaaacctcgcattgatggtctggttaaggtgggcacactgaaaaaacgacttgataaatttaatgaggtagtcagtgtgttgaaagatggaaaacccgagatgaataaacagatcaagaatctggaaatttctattgatactttgatggccaaaattaagtccactatgatgacgcaggaacaaatccagaaagaatatgatgcactggttaaaagctcagaggaactcctcagtgcattacagaaaaaaaaacagcaggaagaggaagcagaaaggctgaggcgtattcaagaagaaatggaaaaggaaagaaaaagacgtgaagaagacgaaaaacgtcgaagaaaggaagaggaggaaaggcggatgaaacttgagatggaagcaaagagaaaacaagaagaagaagagagaaagaaaagggaagatgatgaaaaacgcattcaagctgaagtggaggcacagctggcccgacagaaggaggaggaatcccaacagcaagcagttctggagcaggagcgcagggaccgggagctggccctgaggattgcccagagtgaagccgagctcatcagtgatgaggcccaggccgacctggcgctgcggagaggtcctgctgtactagccaccaaagcagctgctggtactaagaaatatgatcttagtaaatggaaatatgcagaactacgtgataccatcaatacttcttgtgatattgagctcctggcagcttgcagagaagaatttcataggagactaaaagtgtatcatgcttggaaatctaagaacaagaagagaaatactgaaacagagcaacgtgctccaaagtctgttactgattatgattttgcaccatttttgaacaattcacctcagcaaaacccagcagctcagattcctgccaggcagcgggagattgaaatgaaccgacagcaacgcttcttccgcatcccattcatccgccctgccgaccagtacaaagaccctcagagtaagaaaaaaggctggtggtatgcccattttgatggaccatggattgcccggcaaatggaactccatcctgacaagccacccatcctacttgtggctggtaaggacgacatggagatgtgtgagctgaatcttgaggagactggcctgactcggaagcgtggtgctgagatcttgccaagacagtttgaagaaatctgggaacgctgtggaggcatccagtaccttcagaatgcgattgagagcagacaggctcggcccacctatgcaacagccatgctgcagagtctgttaaagtagatgttgcacactagccttacagctgggagcctttgccatggtacttaggtagggtgtgtgcccccagatttaaccattccataatcatgttagagttacttctataaagtgaacagattttattaatcacggcttttggtgaatttgtttaaggttaattatggtagcaaattttggacctaaacattatttttctgtatcccgcccg

SEQ ID NO: 32087 - DNA, 2904 bp, Homo Sapiens
cgacccacgcgtccgaacatggcgacctaggagaaagggaagaacaattttttctcctcttttgggaaggtttgcgtctagtagtgcctgtgcccctgggcagattggagagaagagggacgactggagaatcgtcgagaaccagcggagaaaagaaaaagcaacgtttaattctagaaggcctcctgtccctgcctgctctgggtgctcatggaatcagctgctgccctgcacttctcccggccagcctccctcctcctcctcctcctcagcctgtgtgcactggtctcagcccagtttattgtcgtggggcccactgatcccatcttggccacggttggagaaaacactacgttacgctgccatctgtcacccgagaaaaatgctgaggacatggaggtgcggtggttccggtctcagttctcccccgcagtgtttgtgtataaaggtggcagagagagaacagaggagcagatggaggagtaccgaggaagaaccacctttgtgagcaaagacatcagcaggggcagcgtggccctggtcatacacaacatcacagcccaggaaaacggcacctaccgctgttacttccaagaaggcaggtcctacgatgaggccatcctgcacctcgtagtggcaggactaggctctaagcccctcatttcaatgaggggccatgaagacgggggcatccggctggagtgcatatctagagggtggtacccaaagcccctcacagtgtggagggacccctacggtggggttgcgcctgccctgaaagaggtctccatgcctgatgcagacggcctcttcatggtcaccacggctgtgatcatcagagacaagtctgtgaggaacatgtcctgctctatcaacaacaccctgctcggccagaagaaagaaagtgtcatttttattccagaatcctttatgcccagtgtgtctccctgtgcagtggccctgcctatcattgtggttattctgatgatacccattgccgtatgcatctattggatcaacaaactccaaaaggaaaaaaagattctgtcaggggaaaaggagtttgaacgggaaacaagagaaattgctctaaaggaactggagaaagaacgtgtgcaaaaagaggaagaacttcaagtaaaagagaaacttcaagaagaattgcgatggagaagaacattcttacatgctgttgatgtggtcctggatccagacaccgctcatcccgatctcttcctgtcagaggaccggagaagtgtgagaaggtgccccttcaggcacctaggggagagcgtgcctgacaacccagagagattcgacagtcagccttgtgtcctaggccgggagagcttcgcttcagggaaacattactgggaggtggaggtggaaaacgtgattgagtggactgtgggggtctgtagagacagtgttgagaggaaaggggaggtcctgctgattcctcagaatggcttctggaccttggagatgcataaagggcaataccgggccgtgtcctcccctgataggattctccctttgaaggagtccctttgccgggtgggcgtcttcctggactatgaagctggagatgtctccttctacaacatgagggacagatcgcacatctacacatgtccccgttcagccttttccgtgcctgtgaggcccttcttcaggttggggtgtgaggacagccccatcttcatctgccctgcactcacaggagccaatggggtcacggtgcctgaagagggcctgacacttcacagagtggggacccaccagagcctatagaatcaattccttggtctcacagccatgtagacaagccctggtcatctcagcagccaccgcacaacacccctggtggaagacacgccctcctcccctctggtcacacaagagaacatcttccagctgcctctttcacacccactacagacctcagccccagttttctcctcctcactaggctgtgtttttagtagttcctttgcttgtaactatgggatgggatccaggcatagggaactagttgttacacagctcccagccaagaagaaagtgtgagaagttgatgggcagcaaacctgctgtttaacatcagggtgaccacattaagcccagtattccagttggcaccagaagatatggacttggaatgaggcctacagggttcaccaggatgtaagaggagagaggaatccacaggaccaccagagaggagagggaaccagatatgcagatcagagatagaggaagtggaaccagagagctgggagggaccaaggttgtaagggtggctaagtcccaccataacagctaaggggacctgggagatgatggctcatttccacccagccccaggatttccagagcgcacatccacaggcctggacctgggatgaagatgaatgaagaacatggatgcacgtggatgtagtttggctcaggtgtccctgcagttggcaaggagtcagtactcagtccctgagtgtggctgaaatttgaggtcctggctgagccaaggagtaatggaccagatctacctcagtattcaagttcagtggggacaccagtggcttcaaacttcctggtttcatgatatcttgagacgccttacaaatgatggaggattccaaagagtttttgtttatttgggttaatatttgttggtatttatggcatttgagattgaaactaagaaatgttttaatttattacctttacaacatttatttacattacatacatacatttacaacatttattaatttatattaaaatagcatgaataagccaattataggttaatataagtagaatgtttgtgaaaaataagtatggtatccaaagcaaaataaattttattgtgaagtgtgaaaaaaaaaaaaaaaaaaaaaa

SEQ ID NO: 32088 - DNA, 3578 bp, Homo Sapiens
agagaacaggtcccagataccgagtccgcaaccccaaacatcgcgattaataggaggcctctggtctctgcctgccctgggtgctcatggaaccagctgctgctctgcacttctccctgccagcctccctcctcctcctcctgctcctcctccttctcagcctgtgtgcactggtctcagcccagtttactgtcgtggggccagctaatcccatcctggccatggtgggagaaaacactacattacgctgccatctgtcacccgagaaaaatgctgaggacatggaggtgcggtggttccggtctcagttctcccccgcagtgtttgtgtataagggtgggagagagagaacagaggagcagatggaggagtaccggggaagaatcacctttgtgagcaaagacatcaacaggggcagcgtggccctggtcatacataacgtcacagcccaggagaatgggatctaccgctgttacttccaagaaggcaggtcctacgatgaggccatcctacgcctcgtggtggcaggccttgggtctaagcccctcattgaaatcaaggcccaagaggatgggagcatctggctggagtgcatatctggagggtggtacccagagcccctcacagtgtggagggacccctacggtgaggttgtgcccgccctgaaggaggtttccatcgctgatgctgacggcctcttcatggtcaccacagctgtgatcatcagagacaagtatgtgaggaatgtgtcctgctctgtcaacaacaccctgctcggccaggagaaggaaactgtcatttttattccagaatcctttatgcccagcgcatctccctggatggtggccctagctgtcatcctgaccgcatctccctggatggtgtccatgactgtcatcctggctgttttcatcatcttcatggctgtcagcatctgttgcatcaagaaacttcaaagggaaaaaaagattctgtcaggggaaaagaaagttgaacaagaggaaaaagaaattgcacagcaacttcaagaagaattgcgatggagaagaacattcttacatgctgctgatgtggtcctggatccagacaccgctcatcccgagctcttcctgtcagaggaccggagaagtgtgaggcggggcccctacaggcagagagtgcctgacaacccagagagattcgacagtcagccttgtgtcctgggatgggagagcttcgcctcagggaaacattactgggaggtggaggtggaaaacgtgatggtgtggactgtgggggtctgcagacacagtgttgagaggaaaggggaggtcctgctgattcctcagaatggcttctggaccctggagatgtttggaaaccaataccgggccctgtcctcccctgagaggattctccctttgaaggagtccctttgccgggtgggcgtcttcctggactatgaagctggagatgtctccttctacaacatgagggacagatcacacatctacacatgtccccgttcagcctttactgtgcctgtgaggcccttcttcaggttagggtctgatgacagccccatcttcatctgccctgcactcacaggagccagtggggtcatggtgcctgaagagggcctgaaacttcacagagtggggacccaccagagcctatagaatcaattccttggactcacagccatgcagataagccctggccatctcagcagccaccgcacaacccccctaatgaaagacacgccctcctcccctctggtcacgtaagagaacatcttccagctgcctttttcacacccactccagccctctgccccagttttctcctcctcactagtctgtggctttagtagttcctttgcttgtaattatgggatgggatccaggcatagggaactagttgtttcatagctcccagtcaaaaagaaagtgagagaagctgttgggcagtgaacctactgtttaaaatcaggataaccacattaagcccaatatgccagttggcaccagatgctgtggacttggaatgaggccaacagggttcaccaggatgagagaggagagaggaatccacaggaccaccagaagggagagggaaccagatatgcagatcagagatagaggaagtggaaccagagagctgggagggaccaaggttgtaaggatggctaagtcccaccataagagctaaagggtcctgggagatgatggctcatttccacccaaccccaggatttccacagcacacacccacaggcctggacctgggatgaagatgaatgaagaacatggactcatgtggatgtggtttggctcagatgtccctgcaataaacaaggggtcagtacttagtccctgagtgtggttgaggtttgaggtcctggtcgagcagggcagtactggaccaggtctacgtcagcattcaggttcaatggggacaccagtggcttcaaacttcctgatctaattatgtttttagacacttagaagttattgaggactttaaagagcttttgtttatttgggttaatatttatgacatttgacattgaaacaaaaatttaaaatgttatcttttaatttatgttaaaatagcattaataaatcagttataggttaatgtagataggatgttttgtgaaaaagcaatctattgtgtccaaataaaaaaaacaaaaagtgtgacactggttaactttttccagatctcatgtctggcttaataagagatatttgtattatcatatctgcctttgtattaaacctattggtatatcataggtcatgttagctcaaaaaaactttactgcacactactgagagaatgagatgaaaaacgattaatgtttcattattattattgtgaaaatattattaacactggggactccttaagagtacatcagagttctctctaggaatcccaaaaccacattttgaaactagaatagtggatcctggaagttaatccatgtgctggttaattttagatgtcaacctgactggattaaggaatacctagacagctggtacaacattatttctgggtgtgtctgtgagtgtgtttccagaagagattggcaagtgagtcagtgggaaattctctccttctgttggctgggtgcccaatacaacaaaaaggcagaggaaaggcaaattcttctctcctctggagctgagacactcttcttcttctgcccttggacatcagaactcctggctctccggcctttgaacttcaggacttgtaccaggaggccctgggttctcaggcctttggctttggactgagagttacacaatcagcttccctggttctgaggctttcagacttaaactgagccatgctaccagcatcccagggtctccagcctacagatgagctgttgtgcgatttcttagcctccataatcacatgagccaatctccttaataaatgcctgctcatagatctgtatctacatctatatctgtatgtgcatctatatctatgcctatatctatatctatatcatattgattttgtctctctggagaaccctgactaataaaatgaggcatctaaaaaaaaaaaaaaaa

SEQ ID NO: 32089 - DNA, 2354 bp, Homo Sapiens
atggcgctcctgctgtgcttcgtgctcctgtgcggagtagtggatttcgccagaagtttgagtatcactactcctgaagagatgattgaaaaagccaaaggggaaactgcctatctgccgtgcaaatttacgcttagtcccgaagaccagggaccgctggacatcgagtggctgatatcaccagctgataatcagaaggtggatcaagtgattattttatattctggagacaaaatttatgatgactactatccagatctgaaaggccgagtacattttacgagtaatgatctcaaatctggtgatgcatcaataaatgtaacgaatttacaactgtcagatattggcacatatcagtgcaaagtgaaaaaagctcctggtgttgcaaataagaagattcatctggtagttcttgttaagccttcaggtgcgagatgttacgttgatggatctgaagaaattggaagtgactttaagataaaatgtgaaccaaaagaaggttcacttccattacagtatgagtggcaaaaattgtctgactcacagaaaatgcccacttcatggttagcagaaatgacttcatctgttatatctgtaaaaaatgcctcttctgagtactctgggacatacagctgtacagtcagaaacagagtgggctctgatcagtgcctgttgcgtctaaacgttgtccctccttcaaataaagctggactaattgcaggagccattataggaactttgcttgctctagcgctcattggtcttatcatcttttgctgtcgtaaaaagcgcagagaagaaaaatatgaaaaggaagttcatcacgatatcagggaagatgtgccgcctccaaagagccgtacgtccactgccagaagctacatcggcagtaatcattcatccctggggtccatgtctccttccaacatggaaggatattccaagactcagtataaccaagtaccaagtgaagactttgaacgcactcctcagagtccgactctcccacctgctaaggtagctgcccctaatctaagtcgaatgggtgcgattcctgtgatgattccagcacagagcaaggatgggtctatagtatagagcctccatatgtctcatctgtgctctccgtgttcctttcctttttttgatatatgaaaacctattctgttctaaattgtgttactagcctcaaaatacatcaaaaaataagttaatcaggaactgtacggaatatatttttaaaaatttttgtttggttatatcgaaatagttacaggcactaaagttagtaaagaaaagtttaccatctgaaaaagctggattttctttaagaggttgattataaaggtttctaaatttatcagtacctaagtaagatgtagcgctttgaatatgaaatcataggtgaagacatgggtgaacttacttgcataccaagttgatacttgaataaccatctgaaagtggtacttgatcatttttaccattatttttaggatgtgtatttcatttatttatggcccaccagtctcccccaaattagtacagaaatatccatgacaaaattacttacgtatgtttgtacttggttttacagctcctttgaaaactctgtgtttggaatatctctaaaaacatagaaaacactacagtggtttagaaattactaattttacttctaagtcattcataaaccttgtctatgaaatgacttcttaaatatttagttgatagactgctacaggtaatagggacttagcaagcccttttatatgctaaaggagcatctatcagattaagttagaacatttgctgtcagccacatattgagatgacactaggtgcaatagcagggatagattttgttggtgagtagtctcatgccttgagatctgtggtggtcttcaaaatggtggccagccagatcaaggatgtagtatctcatagttccccaggtgatatttttcttattagaaaaatattataactcatttgttgtttgacacttatagattgaaatttcctaatttattctaaattttaagtggtttctttggttccagtgctttatgttgttgttgtttttggatggtgttacatattatatgttgtagaaacatgtaatcctaaatttaccctcttgaatataatccctggatgatattttttataataaatgcagaataatcaaatacattttaagcaagttaagtgtcctccatcaattctgtattccagacttgggaggatgtacagttgctgttgtgtgatcaaacatgtctctgtgtagttccagcaaatcaagctgagctttgaaaaagtttgtcttagttttgtgaaggtgatttattctt

SEQ ID NO: 32090 - DNA, 3431 bp, Homo Sapiens
caccctatcctacactactaggaacttgcacagtccgcctcgggcagcccaaagctcctctgcccaccctggctcccaaaaccctccaaaacaaaagaccagaaaagcactctccacccagcagccaaacgcctccttcttgacgccagcccccaccctctgtctgctcgagcccaggaaaggcctgaaggaacaggccggggaaggagccctccctctctcccttgtccctccatccacccagcgccggcatctggagaccctatggcccgggctcactggggctgctgcccctggctggtcctcctctgtgcttgtgcctggggccacacaaagccactggaccttggagggcaggatgtgagaaattgttccaccaaccccccttaccttccagttactgtggtcaataccacaatgtcactcacagccctccgccagcagatgcagacccagaatctctcagcctacatcatcccaggcacagatgctcacatgaacgagtacatcggccaacatgacgagaggcgtgcgtggattacaggctttacagggtctgcaggaactgcagtggtgactatgaagaaagcagctgtctggaccgacagtcgctactggactcaggctgagcggcaaatggactgtaattgggagctccataaggaagttggcaccactcctattgtcacctggctcctcaccgagattcccgctggagggcgtgtgggttttgaccccttcctcttgtccattgacacctgggagagttatgatctggccctccaaggctctaacagacagctggtgtccatcacaaccaatcttgtggacctggtatggggatcagagaggccaccggttccaaatcaacccatttatgccctgcaggaggcattcacagggagcacttggcaggagaaagtatctggcgtccgaagccagatgcagaagcatcaaaaggtcccgactgccgtccttctgtcggcgcttgaggagacggcctggctcttcaaccttcgagccagtgacatcccctataaccccttcttctattcctacacgctgctcacagactcttctattaggttgtttgcaaacaagagtcgctttagctccgaaaccttgagctatctgaactccagttgcacaggccccatgtgtgtgcaaatcgaggattacagccaagttcgtgacagcatccaggcctactcattgggagatgtgaggatctggattgggaccagctataccatgtatgggatctatgaaatgataccaagggagaaactcgtgacagacacctactccccagtgatgatgaccaaggcagtgaagaacagcaaggagcaggccctcctcaaggccagccacgtgcgggacgctgtggctgtgatccggtacttggtctggctggagaagaacgtgcccaaaggcacagtggatgagttttcgggggcagagatcgtggacaagttccgaggagaagaacagttctcctccggacccagttttgaaaccatctctgctagtggtttgaatgctgccctggcccactacagcccgaccaaggagctgaaccgcaagctgtcctcagatgagatgtacctgctggactctggggggcagtactgggacgggaccacagacatcaccagaacagtccactggggcaccccctctgcctttcagaaggaggcatatacccgtgtgctgataggaaatattgacctgtccaggctcatctttcccgctgctacatcagggcgaatggtggaggcctttgcccgcagagccttgtgggatgctggtctcaattatggtcatgggacaggccacggcattggcaacttcctgtgtgtgcatgagtggccagtgggattccagtccaacaacatcgctatggccaagggcatgttcacttccattgaacctggttactataaggatggagaatttgggatccgtctcgaagatgtggctctcgtggtagaagcaaagaccaagtacccagggagctacctgacctttgaagtggtatcatttgtgccctatgaccggaacctcatcgatgtcagcctgctgtctcccgagcatctccagtacctgaatcgctactaccagaccatccgggagaaggtgggtccagagctgcagaggcgccagctactagaggagttcgagtggcttcaacagcacacagagcccctggccgccagggccccagacaccgcctcctgggcctctgtgttagtggtctccacccttgccatccttggctggagtgtctagaggctccagactctcctgttaaccctccatctagatggggggctcccttgcttagctcccctcaccctgcactgaacataccccaagagcccctgctggcccattgcctagaaacctttgcattcatcctccttctccaagacctatggagaaggtcccaggccccaggaaacacagggcttcttggccccagatggcacctccctgcaccccggggttgtataccacaccctgggcccctaatcccaggccccgaaataggaaagccagctagtctcttctcttctgtgatctcagtaggcctaacctataacctaacacagactgctacagctgctcccctcccgccaaacaaagccccaagaaaacaatgcccctaccacccaagggtgccatggtcccgggaaaacccaacctgtcaccgcgtgttgggcgtaaccagaactgttcccccccaccagggcttaaaaatcgcccccactttttaaccatcgtccattaaccacctggtgggcatagccagagctgttcgaacccagccagggatgaaaaatcaacccccgacatggaacccatgattcctaaacccggggtaggttccatgccaagtaacagcagagggagttaagccataggaatttggctgtggagtaagagggaatgcggtgaggcagtgtggaatatgaccctaccagaggttggagaacaaacttgggcagccggaacccgtcactattttagattcctggcattcgaggagccctttgaactttccaaagtgcagccacagctacaatgctgttaaatcctcccacatttcttggatgccccttcaccttgtgtggacagtgtctggtttccccattttacagacaggaaaactgagcttcagacagggggtgggctttgcctaaggacacacaaatttggttgggagttgatggggccagatgagccagcattccagctgtttcacccttcagcaacatgcagagtccctgagcccacctcccagccctctcctcattctctgaacccactgtggtgagaagaatttgctccggccaaattggccgttagccacctgggtccacatcctgctaagacgtttaaaacagcctaacaaagacacttgcctgtgg

SEQ ID NO: 32091 - DNA, 5238 bp, Homo Sapiens
gctgtggctgcggctgcggctgcggctgagatttggccgggcgtccgcaggccgtgggggatgggggcagcgagctccagccctcggcggtggcggcggccgtaggtgtggggcgggcgtccgcgtccggcacgcgagatggagcgccgtggatttcagtttttctgactgttacatgaaaggatgattgctcacaaacagaaaaagacaaagaaaaaacgtgcttgggcatcaggtcaactctctactgatattacaacttctgaaatggggctcaagtccttaagttccaactctatttttgatccggattacatcaaggagttggtgaatgatatcaggaagttctcccacatcttactatatttgaaagaagccatattttcagactgttttaaagaagttattcatatacgtctagaggaactgctccgtgttttaaagtctataatgaataaacatcagaacctcaattctgttgatcttcaaaatgctgcagaaatgctcactgcaaaagtgaaagctgtgaacttcacagaagttaatgaagaaaacaaaaacgatctcttccaggaagtgttttcttctattgaaactttggcatttacctttggaaatatccttacaaacttccttatgggagatgtaggcaatgattcattcttgcgactgcctgtttctcgagaaactaagtcgtttgaaaatgtttctgtggaatcagtggactcatccagtgaaaaaggaaatttttcccctttagaactagacaacgtgctgttaaagaacactgactctatcgagctggctttgtcatatgctaaaacttggtcaaaatatactaagaacatagtttcatgggttgaaaaaaagcttaacttggaattggagtccactagaaatatggtcaagttggcagaggcaactagaactaacattggaattcaggagttcatgccactgcagtctctgtttactaatgctcttcttaatgatatagaaagcagtcaccttttacaacaaacaattgcagctctccaggctaacaaatttgtgcagcctctacttggaaggaaaaatgaaatggaaaaacaaaggaaagaaataaaagagctttggaaacaggagcaaaataaaatgcttgaagcagagaatgctctcaaaaaggcaaaattattatgcatgcaacgtcaagatgaatatgagaaagcaaagtcttccatgtttcgtgcagaagaggagcatctgtcttcaagtggcggattagcaaaaaatctcaacaagcaactagaaaaaaagcgaaggttggaagaggaggctctccaaaaagtagaagaagcagatgaactttacaaagtttgtgtgacaaatgttgaagaaagaagaaatgatgtagaaaataccaaaagagaaattttagcacaactccggacacttgttttccagtgtgatcttacccttaaagcggtaacagttaacctcttccacatgcagcatctgcaggctgcttcccttgcagacagattacagtctctctgtggtagtgccaaactctatgacccaggccaagagtacagtgaatttgtcaaggccacaaattcaactgaagaagaaaaagttgatggaaatgtaaataaacatttaaatagttcccaaccttcaggatttggacctgccaactctttagaggatgttgtacgccttcctgacagttctaataaaattgaagaggacagatgctctaacagtgcagatataacaggtccttcctttataagatcatggacatttgggatgtttagtgattctgagagcactggagggagcagcgaatctagatctctggattcagaatctataagtccaggagactttcatcgaaaacttccacgaacaccatccagtggaactatgtcctctgcagatgatctagatgaaagagagccaccttccccttcagaaactggacccaattcccttggaacatttaagaaaacattgatgtcaaaggcagctctcacacacaagtttcgcaaattgagatcccccacgaaatgtagggattgtgaaggcattgtagtgttccaaggtgttgaatgtgaagagtgtctccttgtttgtcatcgaaagtgtttggaaaatttagtcattatttgtggtcatcagaaacttccaggaaaaatacacttatttggagcagaattcacactagttgcaaaaaaggaaccagatggtatcccttttatactcaaaatatgtgcctcagagattgaaaatagagctttgtgtctacagggaatttatcgtgtgtgtggaaacaaaataaaaactgaaaaattgtgtctagctttggaaaatggtatgcacttggtagatatttcagaatttagttcacatgatatctgtgacgtcttgaaattataccttcggcagctcccagaaccatttattttatttcgattgtacaaggaatttatagaccttgcaaaagagatccaacatgtaaatgaagaacaagagacaaaaaagaatagtcttgaagacaaaaaatggccaaatatgtgtatagaaataaaccgaattcttctaaaaagcaaagaccttctaagacaattgccagcatcaaattttaacagtcttcatttccttatagtacatctaaagcgggtagtagatcatgcagaagaaaacaagatgaactccaaaaacttgggggtgatatttggaccaagtctcattaggccaaggccacaaactgctcctatcaccatctcctcccttgcagagtattcaaatcaagcacgcttggtagagtttctcattacttactcacagaagatcttcgatgggtccctacaaccacaagatgttatgtgtagcataggtgttgttgatcaaggctgttttccaaagcctctgttatcaccagaagaaagagacattgaacgttccatgaagtcactatttttttcttcaaaggaagatatccatacttcagagagtgaaagcaaaatttttgaacgagctacatcatttgaggaatcagaacgcaagcaaaatgcgttaggaaaatgtgatgcatgtctcagtgacaaagcacagttgcttctagaccaagaggctgaatcagcatcccaaaagatagaagatggtaaagcccctaagccactttctctgaaatctgataggtcaacaaacaatgtggagaggcatactccaaggaccaagattagacctgtaagtttgcctgtagatagactacttcttgcaagtcctcctaatgagagaaatggcagaaatatgggaaatgtaaatttagacaagttttgcaagaatcctgcctttgaaggagttaatagaaaagacgctgctactactgtttgttccaaatttaatggctttgaccagcaaactctacagaaaattcaggacaaacagtatgaacaaaacagcctaactgccaagactacaatgatcatgcccagtgcactccaggaaaaaggagtgacaacaagcctccagattagtggggaccattctatcaatgccactcaacccagtaagccatatgcagagccagtcaggtcagtgagagaggcatctgagagacggtcttcagattcctaccctctcgctcctgtcagagcacccagaacactgcagcctcaacattggacaacattttataaaccacatgctcccatcatcagtatcagggggaatgaggagaagccagcttcaccctcagcagcatgccctcctggcacagatcacgatccccacggtctcgtggtgaagtcaatgccagacccagacaaagcatcagcttgtcctgggcaagcaactggtcaacctaaagaagactctgaggagcttggcttgcctgatgtgaatccaatgtgtcagagaccaaggctaaaacgaatgcaacagtttgaagacctcgaagatgaaattccacaatttgtgtagggatgtcaaatttcagggtttttttgttgttgttgtgttattttgtggtattgtgcttgttttgtgaaagaatgttttgacagggccccttttgtataggactgccaaatcatgggttttgccttttgttgttgtatttatcctctgttggtaatactgaatggtagaatgttttgatagggtcacatttgtgcctcactggaattatctttaaattctgtatttttaaagttgtgaataagataggtggattcgtattttttaaagttcagttgactttccccaccaaatggtccatttgaatgcatccctaatatatgatatagtctcaactaataggtgcaatttgggaaaatcaggtttattttttggagtggaactgttataagtgcttatttataaaaggaatgtttctgaatgcaagtgcctaaaaagatctttgttggtatgcatatgttttgtcacacaatttatagtgcatctttcaccatttgtgcttttttaagatagtatgtaagctcttatttttcaattggcaattcagttaatttttaaatgtttacataatggccagaaggcttgcaaatctgtatttaattgcattttaattaattgccagtttttacatgtagtagtcagttgtacaaagaaaatgcacttaaacctgtttctaaattatatattcagttatattatatttggctttagatggttttaatacatttgatagtttttcaccccttggctttattttatataaacttttgtttttcagcagttctgaactttttagtattttataaatggtccaaaaaatgcctgtttcagaagtttttgaattcagtgcatttcctcttgatttgtctgggttaaaaccattccttttgtatgaaatgttttgacttaggaatcattttatgtacttgttctacctggattgtcaacaactgaaagtacatatttcatccaaatcaagctaaaatttatttaagttgattctgagagtacaggtcagtaagcctcattatttggaatttgagagaagtataggtgatcggatctgtttcatttataaaaggtccagtttttaggactagtacattcctgttattttctgggttttatcattttgcctaaaataggatataaaagggacaaaaaataagtagactgtttttatgtgtgaattatatttctactaaatgtttttgtatgactgtgttatacttgataatatatatatatatatataaaaaaaaaaaaaaaaaa

SEQ ID NO: 32092 - DNA, 246282 bp, Homo Sapiens
tggggagagagagatgaggctatctttaccaggaaggagcagagaatatttaagcagagaatatttaagtggtgtgacgatgtatgtttactggctctccagaaacaaaacaaaaaaaccctgatgtaacatatgctagttcccatgatgtaaatgctgctattatggccagtttcaaaccaccaatgttacgctgaccacagagtagaaaggaaggaaggctttaaaatgacgcatagatctttaattggaggtcagagaaaatgaataccaagggcagaaatatatctcaatgtacggatgtggaaaagccattgacttgtttttgtgaccattacctaaggccaaccaattcagaaccccagcctcttcatccttaatctgaagggactgtgctaaagaaaatgggagtttctttctgtcctctttcattctttccttccacagggcctgtctacctagggccttccacatttctctttgctctgccaagtttgctcaggtacccagtctagatgaattctccatgtcctcactgaaggtaggaagtcaagttgaaccaaaagcagggggcatccctgtttggaaagcttctgcttcttgaaaggtggctcagctgagttacaaacacgcatgccttccactggggctgctgcttctgaacctggagctgacttggtgggaggtgtgtgggtacactccaccaccattcaacattccatgtctaccatgctgactcttctaaaagcttcatgtagccatgggggcaaactgcaaccagactcagttagtacttaggtgtaagaaccccaattacttcaatttctgcaggtggaagccagcaaatctctgacagaaatcccaacatcctgtcctgctttcacttttccacatttgaaaatggacagaagacagtctttatataatcttgcacatatttgtcaggttttacaaggaatatagtgttttctcatctgccatctcatttgatagtttttcataactctgggaggtactattaccttattttacagaagagaaattctgagatggcaggtaactaatcccatcagacatttggtgagtggcagagctgaaaaaaaatcacaagtattttggcttcagattcctgtgtctttccagaacacctgagtgtctatgcaggtgtgtgtgtgtgtgtgtgtgtatagacacacaaaacccactttttatagatttattgtataggcatttttgttttttttgagacagggtctcgctctgttgcccagagctggagcgcattgctgtgatcatggctcactgcagccttgacctccagggatcaaacaatcctcccaccctagccctggagtagctgggaccagaagtgcaggcccaccaagcagttaaattttacatattttgtagagatggggtttctccatgttgtccaggctgatctcgaaatcctgggttcaagccatctgcccaacttggcttccccaaatgctaggattactggcctaagccacagtacctgggcaaagtacttcttaagaataaattgggtgttcccttcttccaactcagcctatgatattaaggtggctctcttgccagctcctgaaaattcggggccagaattgaaatttccatacagagtaggcctcatgaattcatcagccatttctcgggtgactactatttgccaggcagcgtcaggcaccatgctgggacctgggaatacagcagtggaccatacaggcccttagccaccaatacacacagatttgtaaaagtaacagtcagtcttaaaaccagaccttgactgcagatgaaaaagtaggcaaaagagggcaggcaggtcaggaggatgtgtttcctaatcattatgcaaggaagaaaggaaatggcaatttaaccagggaggtgtcctaggcagaaaattaatgacacatgctttcctctccctttgcattaccttttattacctcatgccaggctggaatttgggaaatctgtttctattacaatgtatacattatacattaaataagattatgcacattacaaataaaattatttcaaaattaagaaattacacatagttcaattaaaattaaatttgaaaataattttatttgtgctgttctttagagcaccaacaattcatacacatgatcttcattctcatagccacttaaggtaagtattacctccattttagaggtgaagaaattaaggttcaaaataactaatttggtgatggccacatagtttttaagaacgttgagtctagcccaagagtgactggaattttcagttcacttaccaccattccagcagaatagcagagcaatttcaattttgcagtaaatcagggttaatcatcccagaactgtttgatagcaaaagactaaaacaactcaagtgcctaccaacagtggacaggttacataaaatataatgcatttgcataatgcagtacatgcaactgtgtacaggaagctctgtatgttctcatagggaaagttctccaagatagattgttatgaaaagggcaagtgcagaaaagtctacacagtctgctacctgacaagaatgaaaaaagtgaagaaaacacgtatcattcattattgactgatatcagcaggaatgaatactgggcagatacacaagaaaaagaaaagtgaccacctgggtaagttgagggatggattctttatatataatctctttacttcaaatagtttgaaccctgtgaatgtaatacttatttaaaaaattaaacacattttgtattcagaagaacttcccctcaataatattctttctcttcattttatcctccttatctccccacacatgatgtagaatgtttttaataaaacaatttgcggatgcagaatcaatcagtaatgtaggaatcagtaatgccatccatccacttattccttagaattggtaagtttggcaggcacttaggatcctggcatctctctgaaatgagaagcttttgcaacctaagagagagagaagaaaaagtaaatatatctggaaaccaccttcttggccttccttacacatacagaaaaacttacagatccttttcttcataatgagttagttctttacaggtaccacagcccttctcaattcctcaaataactccctgtggtgtaaaaggacctatccagactagacactccagttttgctcttcagatagggttgctagatttggcacattaaaaataccaaatgtccagttaaatctgaatttcaaatatatatatatatatatatatatatatatatatatatatatatatatatatatgtatagaatgtctcatgtaatatttgggtgtgcagtgaggggcatacttaagcaattatttgttgcctgtttgaaattcaaatataattgggtatcctgtattttgtatggtaaatttatcctctgattccacttggaggaagctagttaagtgcacttgaacttatcagcccaagggcacaaaaagtacctatcccagtgcaatgcaatagaattttctgtgatgatagacatgttctatgtctgtgtatccaatacagtagacaccagcaacctgaaatgtggtgagactgaggaaactgaatttttgacttaattatttaaatttaaaatatcacatgtggctaatggctactgtatcagagagcaaagccctaaaaagagtcatgtatctcccttcaatttagcaactgggatttaagatccagtgatggttaaaatgatacataactcaggaatacactcctaagtctctgtggcttagatagtgactactccgtttctgcacaaacatgttttgctgtcaacataatcattctgggtttttttccctgtatttactgaagatatattatatggaaaggatgtgaagggccagggtacaggtagatgtgaaggtaaagggtacaaggtaaggtaaaattctccaacaaacttatcctagcaggtaagagtgttaactgaataatctcagcattagaatataaaagctggggtcgggcacagtggctgaggcctgttaatcccagcaatttgggaggccaaggcaggcggatcacttgaggcctggtgttggagaccagcctggccaacatctgaaactccatctttactaaaaatacaaaaactagccaggtgtggcagcatgcacctgtaatcctagatacttgggaggctgaggcaggagaatcgcttgaacccgggaggcagaggttgcagtgagctgagatcgcaccactgcattccagcctgggcaacagagctagactctgtgaagaaagaaaggaagggagggagggagggagggagggaggaaggaaggaaggaaggaaggaaggaaggaaggaaggaaggaaggaaaataaaagctgggaggttccattaccacaaagtaaacattaagtggatgaaacagcacaaatttgatcacacataccagctgtgtgaccattttctttccatgattttaagcaaacatctattaaccctagacccagagcatattaaagagaattattttatgcatgatgccagctagcagagaacaggcccttaaaagaattaacaatctagacaacttagaattatcagtacacatgatgtctggagaggtcagtgcagaaactgggaaaatggtaagagtgtggaaaacaaatggggtgtaattcaaaacttcatagtgttcctggtagctgggtaaggtgagtaggtaatgtattgacaatgatttatagatagacatttttatagaaattcagataattacactctgtgcagtgaaacagctttctgggctaaaaaaatatctattctctggtttatataccagatacttgcgttcccactaagtgtcaggccctctgctagatgctgggatataacagtgaatgaatacatcaggtccctactttgtggagctaggtttaatggaaagaggcaaacaacaaggaatctcataaataaaacttcaaactgcatttgaaagaatctaaacaggatgagtgacagaacataatttgaggtgggaaatggagaaagtttacttttttctctctttatactttaaaaaaaatatacttgctcattttaacagttcacacagagatgtttataaaggtttacctctcctcaccccattctattaggttggtacaaaagtaattgcagcttttgccagtgaaagtaatggtaagaaccacaattacttttgcaccaacttagtttcagctatctgagataattactgtggtatgttttcttccatacggttctctatttactctcatcagttgtgtgtgtgattttgtttcaccggattattgtttcaggtagctgcataacattccatagtataaatggatgtctcactatgtcaacagtattcttattttagttatttaaatgttttacatgtataattaggtttttttttttcttattacagttttgagtagtttttttgttttgttttgagatggagtctcactctgttgcccaggctggagtggtgcgatctcggctcactgtaacctctgcctcttgggttcaagctattctcctgcctcaggctaccgagtagctgggattacaggcatgtgccaccatgcatggctaatcgttgtatttttagtagagataggttttaaccatgttggccaggcgggtctcaaacccctgacctcaagtgatccacccgcctcagcctcccaaaatgctaggattacaggcatgagccaccgtacctgaattcttgtgacagttttgaaagagtccttacatatgtaaccttacctagtggggcctttattctagattgttgacactctccctttccaaatgtctattaatacaatttaatagacattgtcaggaaaagttatgaaaaactatatgacaatggcaattcttcctcatcctttgcagtcctgagtatactggctttagtggttgtctattcataggtaagaaatggtatcccaggctgggcacagtggctcatgcctgtaatcccagcactttgggagcctgaagtgggtggatcatctgaggtcaggaggagttcgacaccagcctggccaatatggtgaaaccccatctctactaataatacaaaaattaggccaggtgcagtggttcacgcctgtaatcacagcactttgggaggctgaggccgtcagatcacgaggtcaagagaccgagaccatcctggccaaccaacatggtaaaaccccatctctaataaaaatacaaaagttagctgagcgtggtagcaggcgcctgtagtcccagctactcgggaggctgaggcaggagaatcgcttgaacccagggggtggaagttgcagtgagttgagatcatgccactacactccagcctgggtacctgagcaagactctgtctcaaaaaaaaaaaaaaaaaagaagtggtatccctttgttgtattaatatgcataattttgaattactaggaaggttttttgtttcttgtttttcatatgtattggccatatgaatttaatacatgatataaaataccgtttaatcatcttttatattatgttgtttgccttttcactaacgttttgcagtttgtccctgtaaattgaggttactaaccccgtatatgttttggaaatcctttatcccaacttattgctctttctataactctctttacatatattctgtcttaaaccacttttggacctatctagtctgtgtcctttcctagatggcttttgtgtttcctcctcacttagcaatgacaccctccatcaccatttccaaacacacacacacacacacacacacacacacacacacaaatgaggtatataaagggtctcctaaaatgtcatctgatatttgttatttcatattctcagatttttaatccatttaggtaggtctattttagatagccttgtctgaaacagagctgggacctgatgagtgaaaatgagctcaccagaagaaaaatcaaacaggcatttcagagattgaggccaagaagttaaatgtcttaaatgggcagagcttagctgcttgatgtgaaaagagaccagcgtggctggaacagcaaaggagaacagcagaagaggtgaacagaggccagagatggtcactgagtgggcccttaagtcatggtaaggagtatggagaatgaattattgcatgtattgaatatgtaggtgacgtgactcacagatactttggatttgtagagatgaaggaaatgtagcaagtgacactcttagaatgttgatttgagtaaatggtagtgtcagttattgaactggggagaactggaagggataacaggcttaaggagcacgtttattcctgtgtcttggaagtgtttagggtgaaagacctattagagttctaaatggagatgtcaagtgaaaatgtggctacacacatttgcatttcagaaaaaaggtcaggctggagatgtaaaattggaagtttactgcatatagatagtctttggaaccgtagtattgatgaagccattaatgagacagaacaaagactagggaccagagccaagctccaagtttctaaaatttagaggatagtatagtctggtcattttgaggtgaatacttaataacagaacaatttgttgaagtgtaaatttagagccctacacttttagctctgactattaacgaatacaggaaagaatggatatggttatctgcctggtgtctgtgaaataatttaagccaggaagagatcctcaccagaaactgactatgctggcaacttggatcttagatttccagcctgcagaattgttagaaaataaatgtctatcgtttaagccaccagtctgtagtattttgttatggcagtccaagctgactaagttttggtacccaggcgtgggatgctgcaacaacaaatacctaaacatggggaagtggctttggaaattggtgatgggtaaaggctggaagagtttgaggttcatactagaaaaagccaattgtgaagggactattgaaagaaatatggacattaaaggcaattctggcaaaggctcagaaaggaagagagctggacagaaagcttccattttcatagaaacttagatttataacgatcatggatagaatattaaatatgctggttaaaatatggactttaggccaggcgtggtggctcacgcctgtaatctcagcactttgggaggctgagggcacagatcacgaggtcgggagtttgagaccagcctggccaatatggcgaaaccctgtctctactaaaaatacaaaaattagctgggcatggtgatgtgcttctgtggtcccagctactcgggaggctgaggctgaagaatcgcttaaacccggggggtggaggttgcagtgacccaagatcacaccactgcactccagcctgggatacagagcaggactccactccccccgccacacacacacaaaaaatatatatatatggacattaaagtcaactcttgtgaggtctcagatgaaaatgagggacaggttattggaaactgtagaaatcactgttcttgttacaatgtgtcaagaacttggctgaattacgctgtagtgtttactggaaagaacttataagcagtaaaactggatatttaccagaagagatgtctaagcaaagtattgaaggtgtgatttaggtcctccttactgcttaaagtgaaatgtgagaggaaagagccgaaataaagaaggaatttttaagcaaaacacaatcagaacttggagatttgggatagatttctcaatctatattgtaaaaattgagaaagtttttcttgaagaggtatggttgaacaatgttttctttttctttttttttcttggttttatttttatttttatgttttttgagacagggtctggctatgtcatccaggctggagtgcagtggcacaatctcagttcagtgcaacctttgccttcaggctcaagcaatcctcccacctcagcctcctaagtagctgggactacatgtatgcaccaccacaccctggctaattttttgttgttgtttatagagatggggttttgacatgttgcctaggctggtctctaactcctgagctcaagtgatctgccctcctcagtctcccaaagtgttgggattacaggcgtgaaacactgagcctagcctgaacaaccatttgataaagagataatgggtgtgacccaaggatttaatcagccatctcagcagaagccaggaagagagatgggattattccagcagagacactgccaatttaaactaacgtaggcagagaaaacagaaaggaacaaaggaaggttgtcgactttttgaattctatagaacaggatcatagagctacctggctgtcaatgtgtactattctttaagaaaaggaaagactgacccaccaaaggcaacttacaagatcactagggctgactcttttgttttttcttgaggcagtctcactgtcacccaggctgtagggcaatggtgtgatctcagctcactgcaatctccacctcccaggttcaagggattctcttgccttagactcccaagtagctgggattacaggctctaaatctgtaccctcccgagtagcgctcctgccaccacttgcccagctaatttttgtatttttagtagagatggggtttcactatgttggccaggctagtttggaactcctgacctccagtgatccattctcattggcctcccaaagtgctgggattacaggcaggagccgccagggctgccactttgatgtcagactcagagagtacagatgggatagggtgggggtgggaacatgtagtcaaggctgactctacctgtttcaaagatgccctgcagaactgtgtgggagtctctcacagatggctgcctgggtgggaccccaccaaactgaaagaccgagacttcaggcagggcagatggagtaggccaactacagagccagaggtgacactgagacaccactgggcctggaaatcagggcatcaagccaaagagggtttttcttaagacctaacagaatttgccttgccaggttttggacttgattaggacacattacaccttccttctttcctatttctccattttctaatgggaatgtctattatgcctgtttcaccattgtaccttagaagcatgtaacatttctggtttcacacgttcaaagctggaaaggaattttgtctctggatgaatcacacattgagcctcacccgtaacctgatttagatgattttttagatgacactttgaactttagaattgatgctagaatgagttaagactttcagggggctgttgggatggaataattttttttttttttttgagacggagtctagctctgtcgcccaggctggagtgcagtggcaccatcttggctcactgcaagctctgcctcccgggtttatgccattctcatgtctcagcctccagagtagctgggactacaggcgcccgccaccacgcctggctaattttttttttattttagtagagatggggtttcaccgtgttagccagaatggtctcgatctcttgaccttctgatccgcctgccttggcttcccaaagtgctgggattacacgtgtgagccaccatgcccggctgggatggaataaatttatcttgtatgggagaaggacatacattttggcaggtcaaggacagaatgttatggactaaactgtgtcccccaaaattcatttattaaaaccctaaaccccagtgtgactgcatttggacatagagcctttagggggtacataaaactaaagatcacaggatagggccctaatcccattggggctggtgtccttacagaagatgagacacttagagctctctctccacgcaggcaccaaggaaacaccatacaaacacacagtgagatggcagccatctgttagccaggaacagattctcaccataaactatgttggcaccttgatcttaaacttccaggctccaaaactgtgagaaaatgaatttctgttccaagcctcttagatatggaaaaaaagattctgttgtttaagccatccagtctctggtattttgttatggcagcctgagtaggctaagacaatgaaggatgtggtaaaactttacgtcccaaccacataccaaagaggctggaatttagcatgctttcttctttcaactgtaggcaatgtgcacaagttctaaatcctaagacatgttggctcctttactctgcccaaactacaactcaaacaaacaactgtaatataataacatccaatgaagttctgacatttcttcaacatgagtacagtaattcaatgccagagaattcattttattttgaaatctacatgccatattccaatttctgttgaagatgcaatggttatatttattctttttaatatagatttatcagactgggcgcggtggctcatacctgtaatcctagcatttgagaggctgaggtgggcatatcacctgaggtcaggagtttgagaccaggctggccaacatggtgaaaccctgtctctactataaatataaaaattagctgggtgtggtggtgcatgcctgtagtcccagttactagggaggctgaggtagaattgcttgaacctgggagcaggaggttgcaatgagtggaaatcgcaccagtacactccagcctggatgacagagcaaaataataaataaatacataaaatagatttatcagtttatcaataatatagttttcttttctaggtgtaaatataggtaatgactgtcctttagtacattttctcatgatgctcctcttacttggtttggtacaatattaagtattgaaataaaatagagaatcctgtcgctacacatgagcacttattccatttgctcatctccaatatgcacgggaaattctcaaattgctaataatcttgtaacacacatgcattatattcaacaggaatatataaatttataattataatttaggatcaacagatgacaaacctttagaaggtttgtatttaaccttaaaatataattttttaaaaattggttataaaatttctaatactttcttttttgtgacctcaaggggaaaatataattcttataaaagttcaaatgatttacagaatacaaaaagtgaatagagatgatgaatgaattaaaggaaaggatattgctacatagatttggaaatttaaaaagggaaattacgattgttgattttgtgttaaactgatctgctttgttcaagataccttatgtaccaaaaaatgattttatctcagcctcatatctcagtaaattcctgagacaaactttagtccctggtgcccaggtgcctttggtaattgggagacctctaggtttagcatcctcatccactcgccccaatttaaatagtcctccccagggccattcaggcaagggagatgaaaacttgctcaagagttggaatccaactgaagctaccgaaattcattgctcaatagataattttccctggaagtaactagggcttttgaatataatagtgggcatttcaaagtagaaggtaaagtattttggagatgaggagacaggacagagctacgaggaatgtcctttgcttagggactaggctcttagcagtacctcttaggtaagaactggttaactggcaccttctgtgtttctctgaagctccctttgcttagggactaggctcttagcagtacctcttaggtaagaactggttaactgacaccttctatgtgtctgaagctcccagaacaaactgccagtgaaatttggatttttggaatatagtttcttttttcttgttactttttgttttgttgtttttttttgagagtctcactctcactgcaacctccccctcctatattcaagtgattctcttgcctcagcctcccgagtagctgggactacaggcgtgcactagcatgcccagctaatttttgtattttttagtagagatggggttggtttttttttgagacggagtttcactttgtcgcccaggctggagtgcagtggcacgatcttggctcactacaacctccacctcccggggttcaagtgattcttctgcctcagtctcctgagtagctgggactacaggcgcctacaggtgaacaccgccacacctgactaatttgtgtagttttattagagatggggtttcgccatgttggccaggctggtctcaaactcctgacctcaggtgatctacccacctcagcctccccaagtgctgggattacagatgtgagacaccagatcagcctcagaagacattttctattggaaagagaaaacactattagcaacctattagtctaatatttaatacttaatgtcttccttagtaataaaccaactctctacaacaaagtgcttcctggctgcctaagtcattgattcattcagttcaacattttctcaatgcccaacagccaagtgtctcttgtatgccaagttctatgctgattatcagtatttgaataagagggggtctacatcttaagtactgcttaagatgaaagcctctaggttaacaaacttaacacaatgtatcattcactactaaatagaccgaatacaaaatcttgttattggagcccagagagaagaattgaaattcaagttttctctctctccttttctcactcaccacaataagtcagttgcaccaagtcttgtagctctttactgagccatgttttcacgtgtccctttgttttatttgccacaccctaaataaaaattgtactggctttttttccctgggtttacagtattaatacattgtcaagatttacctcttcgtgtagattccctggggaaaattacctttcctccttcccttaaattcttcagaggttagaaagccattagtaacattctggtatgtggacaaagtttacccattatgtatggatgttttactctttctatttttctgacaataatctcttaaggaggtgtggttatagaatagtcagctgttataagtactgttttcctggccttacaacttaagttctttaagctgtttcttagtttgctcatctcaaaattcggaataaggataaaacctatctcttagattgttggattaaatgaattaacatactggaagctcatgaaatgtgcctggcacacagtagtgcctaataaaccatctctcttattcagcctgttttctgatttcagaatctacacttgctgagccaggttcttttcatttcaaggtgagcaaaagcatacaaggaagagatggaggtaggaagagattaagccctaggccaaggtcacacaccgattgggagctggaatcaaaggcaatttggtcagtgaataaaaaggattccaaggcccataaggcaattctaaccttaggatcgaaattctcggacatacaggaaatgctggggggggaaaatccggtcttctcagcccaagagccatgtgaaaccagaccttcaaatctgatgattctcagcccagctgcccattagaatcgttgtaatttaaaaataccctcggaaaattctaatatgtggctatcaaaggtgatcatttgcttttatgccactttgttttcacccaaatgggacatccaacccttttcctttgagagtagttgtagggaaaggagggggtggagggagggaagagcggaaaaggctggatccgccctgagccggtgtcagtatctgggaagtgggaggcgcgtcagcagtaaacagcttctgctaggattattatctcctgccacacactcggatttgaaggctccaaacgaaacaatgcaaaacgcttcagtggagttccagaagcgttagactaaacgactgggtctgtttggccagtctgagcagctgggcgcagatgcataggcaagacttagcccgcctagacttttctgcccacttaattccgatcaaagcagaaaccggccgggcgcggtggctcacgcctgtaatcccagcactttggtaggcagaggctggcggatcacctgaggtcaggagttcgagaccagcccggctaacctggtgaaactccgtttctactggtggcgggcgcttgtaatcccatctactagggaggctgaggccggagagtcgtctgaacccgggaggcggagtttgtatgcagtgagccgagatcgcgccactgcattccagcttgggcaacaggagcaaaactccgtttcaaaaaagcaagcaaacaaacaaaaaaatgcagaaaccgagatccggaagaaaacctcggcgagattcacagaatccaggaaaataggtctctagaaatttgtccatggtcccagatctccatttcttgtgggtggggcagctgttaccagatccctagaagcaaaggtttttttgggggaccgtgtctcactgttgcccaggctggagggcagtggcacgatctcggcttactacaacctccgcctcccaggctcaagcgactctcctgcgtcagcttcaagagtagctgggattacaaggtatgtgccaccacgcccaacttatttttttatttattatttttatttagtagagaggtgtttcaccatgttggccaggttagtgtcgaagtcgtgacctcaggtgatcagccccctcggcctcccaaagtggtaggattagaggggtgagcagaaagcaaaggtttttgagtggccacaggccccactctatttccttttctgcctgtaatggcaacctagacgcttgagcttcttaaaatacaagagtaagttgcatgtcaggcaccgttctacattagggacattagtctgttttacagacacctttcaactccctggttaacttttaggtaatatactctgcactttagcaggaatgggacctataactctcacagaattaggaaagtgaggctgcctacagcctaaattgagaaaaaaatagacgggggactagtcggaggaccaaacaaggttaccaacacgttagagttttgccttcaatttacatttttaaagtaatcacaacgaagtgtttagatcacgaggcatccctgcatgtaaactgttaggcactaactatggtcgatcttacaaagcattaactagaatatttctttagagtatgatagtacgtaactgacctactattacatacaaacagaccaacctttagtaacagcgctccccaaaaaccgaaaagcagtaatacgctttgctcaaggttggcataaaattaacttaccttagtgccttttttccttctacctacaagcagtgaggttagctcttcctttgaaacggtaggggggctctgaaaagagcctttgggtttgatagcgtttccgggagctcagatacctgtcaaatcacttgcccttggccttgtggtgactctcggtcttcttaggcagaagcacggcctggatgttaggaaggacgccgccctgagcaatggtcacccggcctagcagtttgttgagctcctcgtcgttgcggatggccagctgcaagtggcgcgggatgatgcgagtcttcttgttgtcgcgagccgcgttgccggccagctccaggatctcggcggtcaggtactctaacaccgccgccaggtacaccggcgcgcctgccccaacccgctctgcgtagttgcctttacggagcaggcggtgcactcggcccaccgggaactggagaccagcgcgagaagagcgggatttcgctttggcgcgagctttgcctccttgcttaccacgtccagacattgcaatcagacaaaaatcaccaaaaccagcggcctaagctcacgagaaaacaaacaaaatcaagaaatatgtaaaacatggccgcttttataggtagttcctggggagtaaatccgactttttgattggtcggtagcaaatgctagtcagatagccaatagaaaagctgtactttcatacctcatttgcatagctctgcccacggatgacaactgtgcagtttgtcttccaattaactaagaggtactctccatccctcattagcataaaagccctataagtagcagaaatccgctctttactttcgacacatttctggtgttttaagatgcctgagccagccaagtctgctcccgccccgaagaagggctccaagaaggcagtgaccaaagcgcagaagaaagatggcaagaagcgcaagcgcagccgcaaggagagttactctgtgtacgtgtacaaggtgctgaaacaggtccatcccgacactggcatctcttccaaggccatgggcatcatgaattctttcgttaacgacatatttgagcgcatcgcgggcgaggcttcccgcctggcgcattacaacaagcgctcgaccatcacctccagggagatccagacggccgtgcgcctgctgcttcccggagagctggccaagcacgccgtgtcggagggcaccaaggccgtcaccaagtacaccagctccaagtaaacattccaagtaagcgtcttaacacctaaccccaaaggctcttttaagagccacccagatacccactaaaagagctgtggccagacgccaaattttatttggcggcggaggggtattagaatataggaactggagaggggtggggacaagtgttgcagcttagagagggacaaagggtcctgaacccgaaagaagccagccattaaaaatggctttggggtcaattcgttgtgcttaaatttaaaatggagacaagcggccattttgctaactcggcgttcccggaagaaaccgcaggctcgcttaggtttcagacccagctgtctgtccctgtctacgtcgccaggatcaacggttgccgtaatgtcataatttcgccaccagcttctagccaataggctgtcctgtcattttaaatattaaccaatcgagggaaagctgttttgagactctgatttacatagcggaccggagtgggaacctgggcagtaactgcctaaggaaggactccccctctgttttcgtggcgcacaccttcgtagtatactgaagggtgtgtctcctgggtttccaactgccccggtaatagtcttttaacctaatatgcgtcagttttgataacaacactaaggcagtacagaactaaagatgtaagcactgcgccagatgttgcttcatacatcttattctattcaactggtttattcaagattcaaatcaaatcaaattttgcttgaatcccagtgctcagtcagccataaatggtgtgttgcctgattgaaacttaaaatctccgtagggggcttgtaacatgcagacaagtttgaaagttgctttaggagaagccaactcttaactgctgggtaaattgacaagccttcgaacactgaactgaaggccagtaaggactaggcgctgggtgggggagaatgaagaggagacgtcattaaacttagcacatacactgtatctcctagaggactctcccttcctagacaactgcaggccgctttgtggcctgggaaattccacattcccttaagtattttactcatggtcttttccaggtaaagattttaagatgaagggttagacgtagtctacctatctttttattcaagtctagaacacgtttttagcacctagaagtttgctttctccattaaaaaccgggaatatacaataaataaaattagtgttaaagcagatttttacaaacttaaataccatgtaatttaggttacagttatttaacataaggactgtgtgatcttaaatctgcaatttctttcacacctgggaaataaactaaggcctgtctttggtgccagacaaggccttatacttgaacactgctgtgcaatcacaggctgccttgcctagataacttatctgagaaattctgatgagaaatgaaatttccagagtccctcacaagtaaatttttttttcttttttttttttttttttgagacgaagtttctctcttgtttcccaggctggagtgcaatggcgcgatcttggctcacagcaacctccgcctcccgggttcaagccattctcctgcctcagcctccggagtagctgggattacaggcatgcgccacgacaccctggctaattttgtatttttagtagagacgaggtttctccatgtcggtcaggctggtctcgaactccggacatcaggtgatctgcccgccttggcctcccaaagtcctggattacaggcttgagccaccgcgccgggcctaaatggttttttttttttctatgcctctaatggacctggtcacttattcccattcagactgaccgctctcctacctgccaactaactaatcagtgtaaccaaaatctgcaaacaaaattcagtattctttccccgccttttcccctttctcttacatagattatgtttttgcctgtgttagatgaaataattctattgcttgttctctcttctgtacaagtacccagtaagcaaattattaacttcttggtcatttatttctgaattttccaccaagacagtgtttatgtgagtcatacaataagaaccaacagaaatgtgtgtcttggaaacaggttgtctatccctggaccctttgagttttctgttcactttcctttggcttttgcatgctaaaagtttatcgtccgcgtttgtttgttttggttattctaattggacttggctgattggttgcatattggtggcagtagtagaatttgaattctggttttctggtcacatcattaagtgattagtcagtggagaggacaggaaatctggtttatttattaacctttttttggggtgtttttgtttgaagatgttgatattctctgtgaggacacagggttagagttggtgtttttctttctgactttacatgggatttgatgttttgtgcttgtatgcctctttccaccttccaaaacttgtcttttttgagtccaaatagttgtcgatatctgcaaaaccagtattcctgtgttaagatgatatgaatataaaatggctgccctgttataacttttgactttaagaaagtgttaggactaacaggagacaaaaaggaaatcaaggaaaccgaatgtctggtctcaataactgctatggcagaggctctacagcttattattaattttagtaatttcacattattgccccttcacgttctttaagtaaggttagaggacagaagaaacataatgttgttacaaattggactattgagtcagggaaaaaaaagagtgctttcaatatctgaataaaacaaagatttaatattttctaaaccttaacgagtttattgtaagggatgtgatgctggaaactaggaaactagaattttcttctaaactgagaatcagaattattcatattctcagcagtggtgccacctgagggacttctgatcttaattacatacttttatttctttaactgatcaacatgctaaatagataacctatggctctgtttttacccactttaaattctgttctattagcacggttagctttcctaattggcaataagattgagactatcttttttttttttttgagacagaattttgctctgtggcccaggctggggtgcagtggcacaatctcggctcactgcaacctctgcctccagggttctagcaattttcctgcctcagcctccccagtagctgggattacaggtgcaccaccacgcctggctaatttgtgcatttttagtagagatggggtttcgccatgttggccaaactggtctcgaactcaggtgatccacctcggcctcccaaagtgatgagattacaggcgtgagccaccgtgcccagaaaagactatcttattttatgaatttaaataattgtgaaattatccacttaagggaattaataaattataatgtaatcttaaattttagttggcttacataaagacttaaaatacatcaatttaaataaaaactcatttgtctaaaaaaaaatcaaaaattttccttgtgctttaaatgtgctacctctttaagttctaattaagagaaaaaaagtttaactgtgagtttcattagtggtcttagttaacagcttaaagtattttgtaaaaaaaatacttcacaatttttaaataacttaaaaatattaatacctcttttattaggtttttttaataaggaaaatatataatacatctaatcaagattttttttggacaaattggcttaataatttcattttaaaaatggcttctttattcttatactgtaaaaataatattagcagaatattatagtatacacaagtttagggttcatattctaaaaaacaaaaacaaaagctaatttaacttgcatttactaaatttcttccactagttgtactggttacatgagttaacatcactttatttattattctaaaattgtaaattattcattgaaccaaattaaatgataatagataatgtcatttttaaaaatggaattaaattttatgttactaattataaggattcaatgtgtgagcttaagtactgagttcacagtgtatgataactttaagaatttaggtgaatattattaaattgagtaaattaattctcaatctttggatacctggacaatttctaaattggagggtacaaaatacaaatcacaagaaacagtgtagttttatgcaaataacatttttacacagtttagaataaccattgataaacagataagagaacatatgattgccttagaatagatactgttgctttcgccactttagatttgtaaatcacgtactgtatacgtgtgggcgtagaggaccatgcaggttttggatgactgcctctgttttcgtcatgcctatgcgggaacacaattgcctgctttgtttaagggctatggttaatccaaacagctctgactctatcaagtactatagctacagagaaacacaagtaagcattcgagataatgactaccttgagcctttacttatttaaaaagttgttactgtttgttaatgtggtacattcaatttactatggattgtcactctaaaataagacttcaatctttttcttatttttatatagccatgatttatattcatatcttaatgtaataaccaatcttctctgacaacattataacaatgctggaacctccattttcagtacttcaaacaacaaatactgcttttatacttcagagcagatggatatgtgcttcccagtgtaaacacatttggaatctcactgagaaatacactatcactaaaaatacagttctgagattcattaaaagacctccagaattctggaagtaggaagtttcctcttcaaagtctacagaggaagatgaggtctgaaatagacagcttcttccttcttttacctgtggtattattctgttttgtccttttctccattatctgtctttccagtgatgaaattttgatctggccctcccaagtattaaaaaacaagcaaataaacaaatctcagttatattttactaagatattggcatgctaactttttgcaggtttgtaacaaggacctttataacttgactaaaagttcctaaataagaatatttactagaaaatttatttctgcctgtggcccacatttgagtcaaaataatcaattaggaaaaatgaacttgtttaactaaagttgaccaaactgatctttgaccaaactgatctttgagacctattcatctaagacaagccaattaaattcttggagacaatttgtactttaaggaattcttataatatttgtaattaccctcataacttttttttttgccctacttctgtgcttctctaatatgcagattattaaatgttgttacaaagccattgtcaaaaaaacaaaaaacaaaaaactaaacaaactcacatggttagacttgctcctttatgagatatttttaccaaaaatggaggagttgaaaaactctggtgccagaaatcgtgaagacatggcctacctaacatggaaatgttggttgtcagtggaaaatactacacagagatagccatagtgctgcacagccaatcttaagtgtttctagagaatcactaattgtttctagagaatcactaattgttttcttttaacattcttggtttatacaagaagagagtatccatactaaactcttttctactgaaaataatgtgcaaacataacatcctattcctagacagtttgtagtttttttctcccatttctattttataaatcatctttttaaaatactttgttgagtgaaatcagtccattgcttgatataccttgagcacaagtaaatagtatgccaaaaattaaatgtctttcagtcacagtttgacaaactcaactaccctgagcctatagagtggtaataattgccctactcataaagatggggtgaagattaaatgaaatagcacctatagaacactagttccagacgtggtatcatgctagtaaaatggctgcacagcactgctcaatgatgacaaaaagtgaagcttctggagacagactccaagtttgactcccagatcaccacatataagatgtgggactctgaggcaggtcatttaatctctctgtgcattagtatccttctctatacctttacagtgatggtaatagcacctaccttctagaagtatgtgaagattaaagatccttaatgcatataaaccactgtgtttactgctgtttgacaaattttatttataaccatctttacgctcctaaaaggacttgaagcagcttatgactgaagactttggtaggagttggccttctataaattataagaatttcataaattatttgatatgaaaatgccagttgatcatagtatgtttaccggggtccaacaggttgagaaaaaatacactttttttccctgaacatatgaaattagctctctaggcatattcctaaggacttaaagaatgataactatcatttctcttaaatcttccagatttggaaggatatatatattcagcacattgacagacaatcccagtagtcctaaattaaaagacattaaaaattagtgaaacttttcctacctttagcctgtgtaatcctggatgaccaagcataaaattaaattgagtagagtataccactgtaacatttcctgaaaggtattctaggctctgagtaatttctttggggtctgaagatcagtttgacatatcctcaagtatcatgagttcattataattaagaaaaagagagtaaatctggagaatgagccactttcttactactccttgacctcagttctttttttcagagacagggtctcactttgttgcccaggctgccaggctggagtgtagtggcgcaatcgcatctcattgtaacctccaccttctgggctgaagccatcctcctgcctcagcatcctgagtatctggaaccacagcaggtgcacaccaccatgccaagctaattttttaaaaagttttttgtagagatggggtcttactatgttgcccaggctggtctcaaactcctgggcttaagtgatcctcctgcctcagcctcccaaattgttgggattactagtgtgagtcactgtaccccgccccacttcagttctgaggaggaaaaaatatgtaataataatgggactttggtttgctgatttaaagattcatgtaaccttatcatccaatgcgcaatttgtagaataattaatagagacatctggtctcatgtttctacagttgctcatgccttgatagtagatctccttgctgctggctcagaagggtaaaagagcagaaatgatggggcttctctcattctatgaggaaatagacctatgtagaggaggctacctgtggtaaaaccttatcctcatcacttaaaattctaggcttattctctgaccatatcaagttttcaaatggtaaaagaattggattcaagagaaatatgaataaacttttgttttcacttttctccctcctctccccccattctcccttcctttattttcttgtccttagttttcttttcacttttttgtctactattatttgcccaaactcaactgtaggctagaacaaaaaaaaattgaaaattaaaatgtgccccttttgttgttagacttgcttaaacaattggggtaatgaaccttggacactagattttaaaacacacacatttgagcttcagtgcactgaaataaatatatttttaacaattaaaaaataaaattgcatgtttaaaaaatctgcagagaacaatacacgttgtgagatcttgaatggaaggaaaactgctagcctcaagagtggatcaaagatgctcagcaggcaacagagtaagagcatgttggagggtttagagagtgtgctcagggttctaggctctaaaaatcagacagtccccacggcctggccttcgtcgctgtatcttctttatgaaaaacactaagtctttttcctcactggataaatttttatccttcaagtttagatcaaatggaactttaggacactgactaggttacattcatcttttaagagcgtacagacattcaagggctagaggatgtgggtttactgcacaggctcattatccaacagctgtgctacctgggaaacttaacctctctgtgccttaatttcctcatctataacgcagggagaatgacagtaggtatctcataaggttgttggaacaactaaatgcattggtatctattgtgtaaagtgcttaaaacactgcctggcacagagcaaacatccagtgaactttagccatcatcattatcattgttctcagagtcaaatacaatatctcatatctgataaattacagaagtgaatcaatcactctctctcttttctccagggggagacaacagcttttagacatatcttttccaacagtcgtcactgctggacactgtttcatcttgcaaataaaccaatgaaaatgagtgatcctagaagaagataaatggaggtattttgaacaatcaaagaaggacaaatgaacacctggctgagaaaaattagctcttttttctatgcataaaactattaaaatattcttcatagaaatttatgacacaggaaacataaagacaaaattaaaataactcctagtatctcctattctttttatatgtatattatatatactcatattcatatatacatatatctcacatcatgtatcatatataaaataaatttaggtgtcatgatatatatttagataaatatacttagaaacttttttatggatgtataatttatggatatattgataattatgtatttgttattgactacttcaattgattcccatttttatgcattatattatagattatatagctcacacatctttgtacataaatctttgttcaaatattatttcctaaggatagacttcatgaagtggaaatactaaatcaaaagtgaaaaacattttctaaggttcttaacatatacattgccaaattgctattcaggatcataccaatttataatcccaaaataatatggaaattcctgttttatagcactcatatttacaataaattttaaaaatcactgttaacctaatagtccttcaaaagaaaaaaaaattgaaattacattattttaatgactctattagtgagggtcattcttcccatgtttcttgttagccatgaccctataagaaataaactgcactgcaaaatgataaacatgacatcaatcattacatgggaaggcactatataaagaataataccttaggttaaggccacataaatatttatcaggtgccttttctgcggaggactctgaagggatactaaactgcatttagctgcatgcaactgaaactacttttacctacattgtctcttataaacattataactactctttgagaaagtgtttactatggactgaattgtctccccatccccccaaattcatatattgaagccataaaccccaatatgactctattcctagacaggacttataagaggtaattaaggttaaatgaggtcattaggatgggttcctaactggataggattggtggccttataagaagaggaagattctgcacttggtcttccaaattaaataatttatttaaaagaaaaaaaaaaaagaggaagagagggagctctgcacatatactgaggaaaggctatgtgagctctcacagtgagaaggtagcactctacaagccagcaagagagccctcaacagaatccagccatgctataccctgctctgagacttccagcctccagaactgtgataaaattttgttgtttaaaccacacaatctatggtatttttttatggcagcccaagccaacaaagacagcatcattgctgtcacttacagacaagaaaactaagactaggagagagaaaagttaaacttgtccaaggtcacaaaagccagaaacaagtgaggtgagaagttgaccttgttctcctcaatccaaggccaggactcctccactccacatgtagatagccacctcacagtcaacagccaaatgtccacaccccagagtcagcattagaccaagatgtcttaccaggagacaaatgcctcatcttgaataaatatgatctaacaacttacccatgtaaaacattgaatctcatgagaaacaaaaatgcaaagtatgtagaaaactatgtttaccacttaactgacagtgataaaaagcttaatgatatccttatagtcttggaggggtttgtatatgtggtgaaacaggtgctcacgcactgctgatagactgtaaattggtcctagagagaaaaataaataaactggaaggagatatgctgtatgtttactttttttatggaaacatatgatatacctggaaattcgattgaccatgcatctatttcttcaatgggtatgcacagttgagctgttcccatgcaccaggcactgtaatgggacaactgcacatgacagtcaaaaatctcagtctcatgaagtcgacatgctcatggagaggtgctacccactaaactaatatttgtatatcaattatggatacattgggccacatttacagaaattcacttacagtgggttaccagaagggattttttttcttgattggcaagaaggctaggctgttttgttgggggctggcaggagctgtctaggctgcccaagtatgcaggtctcttctatcatcctgtgttaaccatcttccatgtatctttcaacctcatggtcatctgcagcatgtctaggggtcatatctatgttccatgcaggaaaaaagggtaaagggaaagggaagtaggcatgtaccattttaatgcacaccttggttttcagaaaatttaagaagaaagactttctgcttttctctgactattctgtattctggattacaacgcaacagaaacgtcaccttaaattctaatgtttttctctccttgctttcaaaaactgactcattaacctccacgtggcttggaaaaattatttcagtcatccagtaatgagctgttcatagaaatgttttggacatcaagtctgtgttgttagcattatacatgttaagcattgaataaaaaacaacatgatgtgggtaaatttctttacttacatataagtacttatatacttatagctgaaaagagaggttgaaatgtcaggtggaacagaaataagattacctagatgtttctcctatgggtgattttcagctatgctgatctttcttctgggtcaggtactcccagaacttcctaattaaatggtggccctgatcttagttcctctctcctcttagacattttccaggactacagaagatgtgcagtttataaatgagtagcagaaacctactgaacaaattattcaggctcatctgaacagagaggacaccttctctgctatactctctcagtgatttccctgccttggggtcaattattgtcttggacattgatttaagcacataataattgttgtcattgcttatgtttggatttcatctcccaaaatagatggtaaattctttagtttagagaccaagtaatacttaaaaaaaaattttgtgtgtgtgtgtgtgttttttctgtgtctctcagccctgtaatagcatcgtacttacacttgttagatttttagagacaacttttacaaaacatggaattatctacataccctttctacaaaacagacaaattaaatactcagtagttgaaccaaaaaaagcagttcaaataaaatacttgaaaatgaagaaatcatttgaacagagttaaagttaatcgtaaaataatgtctgtaaaaattattgccaatcaaatataaagttcaaaaatagtgcttgaaaaaggaagaatcatatgaaaagggactactcattttaaaaatgttagatatcaggaaaagccaagaagtgagtatggtaagagtgctgtcaagtgaaaccctgctaatctcactgaacatgtaaaaatctgtagatgcctttattttattcactcacacacatatgtagaaagagaaatatatggtaaacattaaaaaaaccaaattagaatgtaaaattaatactttaaaaaatgggctgtatacttttcttatcaccggagataagaatttattatttttaaaataaagttattttctctgtgactgtttccatgactttgctacttagaagttagagatgccaaagtttatctaagaaaatgtttatggaaatattatttcaataatgaatgtttagaagactgaatttcctgactgggcgcagtggctcatgcctgtaatcccagcactttgagaggctgaagaaggaggatcgcttgagtccgggagttcaagagcatcctgggcaacacagcgagaccctgcagcaaagtaaaaagaaaaaagaattgaaaaaggaagactgaatttcctttgggcaagtcatgtgacattcctgtgcctcagtttcttcatctataaagttaattcctacatttttggggaagggagagaaaaacttaggatagtgactggcacagaagaagcactatatactatatatatgtggatatcatttgtttttatggtaccattttagctatctaatgcaaaatatgaatcttttttttctgggtcttaaattatggaatgtaagaattttctaaattctctaattctgtgttagttttaaagcaatggagtaacgtatctgtcaacttgtaaatataaggatcaacctgatccacaatttgacccctagccactaatatttaatagtacaacactcagaaattatcaaaggtcagagaagccaaacaaatgtaaaaacatacaggtgctcagaaagatgcacctgtaatctctctaaggagaaatattttccaaactgagtgacacggtgctttagtgagttgtggaatcaatctcatgatttccaacctagtgttcttttaaaaatgaactagtccacagtagaatatactaaagtgctggtgcttaagatagtattgttttctggaaaaaaaaaaaaaattttttttttttgagacagggtctcgctcttgcccaggctgaagtgcagtggcacaatcatgctcactgcagccttgacctcctgggcccaagtgattctcccacctcagccttttgagtaactgggaccacaggtacgtgccaccacacccgggtaattttttaattgtagagacagggtcttgctatgtgcttaggctggccttgtgaactcctgggctctagtgatccactagcctcagcctcccaaatttatgggattataggcatgagccaccctacctggcctgttccctgaatttttttttctttcaggtgtttgtgcatatgtgtgtgtgtatgggtataacagagagacagagagaaagaaacttttctatctcactttgcaatcagaagtttgaagtcttatcttttggcttttgtttcagaaatatttcaaatgtagactctctcctttaccacactgtccccttaggcaaggtctttgccattcttctgagactattgcaacagactcccaacttctgactgtgggcccttctcaaaaatgattgtttatgcaataaatctaaacccaagacaactacaacaatacaacaaattctctgcttaaaaacttccaatgtctgccgggcgcggcggctcacgcatgtattcccagcactttggaggcagaggcgggcagatcacttgaggtggggagttcgagactagcctggccaacatgatgaaaccccatctctactaaaaatacaaaaaattagccaggcatggtggtgggcgcctataatcccagctaattgggaggctgaggcaggagaattgcctgaacctgggaggtggaggttgcactgagccaagatcacaccattgcactccagcctgggcaacaagagcaaaactctgtctcaaaccaaaccaaaacaaaacttctaatatctaccaaatgtttcacacaagtatttggggatcttcacaaatggcccttatggagttttcctttgctgagaccctatgctctggccacactaaactcattcagcatcccagaaaggcctcagcctttgtgagcaagctcttatctccaggcctctcacaaagacctgttccagtagaagctcaggggagcacactggacattattccaacaaccctttccccacagctatgcagccaaatctgccagctcagttaattaattaagcaattcagagatgagggtctgcccaggctggagtgcagtagctgcgacctcaagctcctgggctctaagtgatcctcttcagtctacccagaagctgggactgcaggcatgtgccaccacacccagctaatttttttttttttcagtagggaccaggccaacctagtcttgaactcctggcctccagccttccgaagtgctgtaattacaggcatgaatcactgcgcccagccaacccgcccagtcttgttagacatggggtctgtagtttctagtaggttcttgagtctagggttcctacctcatgttttatagttaatttaggggagggactgtgtctgtttatctggggatgtaggggtgggcagggggatagaggggacttcaattaatgaaaccagaagcaaaactcagttgaggacaccggtcatgagagtggcctgattatggccaatcttacataatgtgtgagatcttgatattaccccatccttgagagtcctctataaagctacagggacttgggagcacctttaattacagacaacccatgttcctgtggattatgatttattagattgcacatgcctaaataaagacatcctctgcagtcttttgacaattctataagcatcttctgactccgcaattagacagctaagagatctgtgttacttccctcacatatataaataattttaaataaaaatcatggcgtgaataatttctttcctctaccgatttgaagctatccatttggaagaccactctgaagagatgaaataagtcttctgccaaagattacttattaatttacaaggaaaaggggaagttttgttcctctccgtgaatttgattgaaaatcgagggctttctcgaatagttttggcatccagggtcatttttcattaaaaagagaaaagtcatgtcaaatatgaatttccgcagattattcagcactagaccctgggagattctgtaaagaggggttttgttatactcaacttttccgggtaaaacaaacacaaatactcctcctccaaggggcgggggcggtgcctaggtgatgcaccaatcacagcgcgccctaccctatataaggccccgaggccgcccgggtgtttcatgcttttcgctggttattacatcttgcgtttctctgttgttatgtctgaaaccgtgcctgcagcttctgccagtgctggtgtagccgctatggagaaacttccaaccaagaagcgagggaggaagccggctggcttgataagtgcaagtcgcaaagtgccgaacctctctgtgtccaagttgatcaccgaggccctttcagtgtcacaggaacgagtaggtatgtctttggttgcgctcaagaaggcattggccgctgctggctacgacgtagagaagaataacagccgcatcaaactgtccctcaagagcttagtgaacaagggaatcctggtgcaaaccaggggtactggtgcttccggttcctttaagcttagtaagaaggtgattcctaaatctaccagaagcaaggctaaaaagtcagtttctgccaagaccaagaagctggttttatccagggactccaagtcaccaaagactgctaaaaccaataagagagccaagaagccgagagcgacaactcctaaaactgttaggagcgggagaaaggctaaaggagccaagggtaagcaacagcagaagagcccagtgaaggcaagggcttcgaagtcaaaattgacccaacatcatgaagttaatgttagaaaggccacatctaagaagtaaagagctttccgggaggccaatttggaaagaacccaaaggctcttttaagagccacccacattattttaagatggcgtaacactggaaacaagtttctgtgacagttatctataggtttaagttgtgatgcagctgagttgaaaaggcttgagattggagaattaattcaggccaggcttcaagaccatcctgggcaacatagccagactaccatctataccaggggtcctcatttccccggccaccgaccggtaaccggtccctgtccatggcacgttatgaattgagccgcacagctgaggggtgagcgaacattaaccaactgagctccaccgcctgtcaggttagctgcagcattagatagattctcataagctcaaactgtattgtgaatggcacatgcaagggatctaggtttcaggctccttgtgacaatctaatgcctgatgatctgaggttggagcagttttagtccggaaatcattgctcccagcccctgcaccccctggtccgtggtataattgtcttacacaaaacggtctcttgtgtcaaaaaggttggagactactggttttacaaaaaagtaaattagtcaagcatggttggcacgctcccttagtccctgcacccaggcgtttaaggatacagtgagctatgatggtgctacctcactccagcctgggtgacagcgagtcagacgttgtctcaaaacttaaaaaaaaaaaaagttaaaacagaaaaagggcttcttgtcagagactgccgtatatctagaggtccaggaactaaaaagtctgatgtccaatcctgaaaagctcgatggtgcactagaggaggcttttacatgtaagagcatctaagttctggaaatgccagtgtcagggaagggaagtggagagcaatttggcatccaaacataacttgctgatactttttttttttttaacacaagtactacattctagtctttctgtggtgtcattgtaactattgtttcttaatatgctatccactgacttcaagggatcaataaataggaatcaaggtgtcccagaatatggattaggggagtttttttgttgttgttgttgttgttgtttttcatctattcattatcctgtagctgaaatttagaattttcttccattgtgtgtgactgatagaaataacaaatttgtaggttatagttgttgcaagaatctggaaatcgtgcttgcttatttccgaagtactattaggtatatcaacaaaaacacacatattacggtcaagtggtttgataattattttaatattattggtctaatacaattgtaaccctatgaattactttaagtatcttatttatgaaaagaatctgtaagtttcatcagactaccagagcataccgaagactgaaaaattttaagaatccaaaccttaatggaaatgttggaggctgcccaattaggttctgaattccaccttcctgaatcacaaacttgttttaactctcagtctgaggtaaactacgtttctctttaaacagacatagtttaattttcctttgatttttgatttagtattcttactgatcatcataaataaccaatgctaatgttagtctactttggaccatggtatttcgagaaactttgaacaaagtcccctgcaaaactatgcattgcattatttcacatacatttatgttttccagacggttcaatagtacctcacttttctgaacttatttgtatagtttggcatctttttaaaaattgtgtcctataatgaaaggttgtaaacattatgttttaaatttgtatagataaaatcaaccacagacctttccttgcttggatgtaattgccattgtttcccaatgagttcggaattactaggattgtgcaaaaatatgcctcacttgcctgacatagcagagagccattttgcctaaatgctgtgcccagcaatggactgtcaccagattctcatcacatacagtgaggatgaacaactagcctctcccagcagctggccggtctctcaataatatgggactccctcaagatggcttcctgcacctttgctcctctagccttgtatgtatacaaggctagcatgcctggcatacataaggttaaaaacaaaatcaataagttatggttcttcctccagttctggggattattagaccacttttttgttttgttttgttttggatggagcctcgctctgtcacccaggctagagtgcagtggcacaatctcggttcactgcaacctctgcctcctgggttcaagcagttctctggctcagcctcccacgtagctgggattacaggtgcccgccaccacgcccggctaatttttgtatttttagtagacggggtttcaccatcttggccaggctggtcttgaacgccagacctcgtgatccacccaccttggcctaccaaactgctgggaatacaggcgtgagccaccgcgcccggacttagaccactttgttttggccaataggacaacagccatagaaccctccgcaaatgagagcttgtccctaaagatgctttatttacatagctgtgtgccgcatgagccaaaaggtgataacctttgttcaacacgcgcctccagcccttcggttaagtccaaagtaccattcttagaatgctctaaaatacataatttttttttttttttttttttttttttttgaggagtctctctctgtctcccaggctggaggggagtggcgcgatctcggctcactgcaatctctgcttccgggctagctgggcctacaggtgcagaccaccacgcccggctaagttttgtattttttttggtagagggggtttcaccattttggccaggctggtctcggattcttgatctcaagtgatacactagctttggcctcccaaagtgctgggattacagtcgtgagccactgcgcccagcaaaatgctttttgtggagccaatcactttattagcgcttacctctctatgcctactttatgctttgaaattttgtcacagtgtggccggtcatggcaaacacaattcattcttatgcaggatgtcacggttatttctgtcatccaaactcattctcgcaacgcatttcagctctttaaacgactttgtgagcggccctgaaaagggcctttgggtttttttgtttttgttttttgaagttctcaggagaccgcgtattcttagattcagccgccgaagccatacagagtgcgcccctgacgttttagggcatatactacatccatggctgtgacagttttgcgcttggcgtgctccgtataggtgacggcgtctcgaataacgttctctaagaaaaccttaagcacacctcgagtctcctcatagataagaccggaaatgcgcttgacgccaccgcgccgagccaaacggcgaatagccggttttgtaatgccctggatgttatcccggagcaccttacgatggcgcttagcaccacccttccccaagccttttccgcctttgccgcgaccagacatgattcctatcgcagtggaaggtatgaactgaaacagttccttaaatacaaacttggcggacctgattgaaaacaacatgagttggcgcggttttttttttttttcaaatttggtcaccaagtgggtggagcaagaaaaactgtttcattatggttcattgttttgattggccagtgacagcttgctctttgtgggagtggaagggtgtttgcaagttgaatgcgctgtattcctgtcagcttaatgacgctaagcatagccccattccacatttctttttatttccacttgctaactaataaattacggaatagtttattggggaacatacaaataatgtttaaaggaggtcagatttataggtcaagggatttaccctcccaatcattttaatatttttatttaaaccaggcattttgatggccttctctgtgctggacaaggtataagtttggctatgaagtttcactcctaaagaccctatgttttgggaaggcaaaaaggtagccaaataattgcaaattaaaacctcataagtgcaaacttcttcctcgtcactttccctatctcgattcaaatatttgttgaatgactcatttttctgcaaaagtctgagagagacagggaatataaacttaagtctggataatatgttttcccgggacgctcttcctggtctgctgtgcctgtttgctgtgcctgaaattccaaacactcttcccttccctccgtttttaatcccctttcaacttgctacagctttagagaaaagaacattcgttttgtacagttggggattaattgaagtgtagggctaatacttgattaaggtcattacaaaatctacagggtcttcctctgggaggtttttgtgataagattattggtgttaaaataaggctaatccccttgaaaaataaatagaatagcagaattgggtctgaatgtggtttgaagaaagggacttctcaattcaaaattttattcttagcttcctgcgggagctttccagaatgcccataagatccacttttgtttaaaaaacaaaaacaaccccacccaccactctctggttaataaatgaatttctattgggaatatttagaatggggctgtggcctgtgagagacattatatagtaacctcagacttgctcacatgaagagaagaaatccaggaatggagaaaaaagacccaggaaaggccagaatgctctacatgtcatattgtttgtatcacttctgaaataattgattacattcttctgccccaaattgagttcttaggttcttccactcactgtccacatgccacaacacagaccttataactagagacttagctaggaagaaatgtcaaacattacagagaaaaaatgcagagtctgagatcataagtaaaactctgaaatctcaacatgccttttaattcatgaaaataaaaaatatagcagcatatgcaatatgacaattctctgaaaacatacatcatgtgaactaccctggaacacatctcgccaagtgccatcttcattttaaccagaggtctaggatgcctttcctttattttgcctattatatcatttataaaaccccatttttattttgatattttatttactttctatttcctgctcctaatatctcctttctaaacttttctcaatgacagtgactcaaaaacaatgaatgtcagaacaaatatttaaaggatctgtacatgtagatatatatatttaaaatggattcttccactctgcgaagaattcaggcatactcaatcttatggttagggagagattaggctcactcgcctaatctgtatggcttctcgttcgctttccatttcaccttcctctcacccatcagatcaaactcattcattgaacaagagacctaagcccttcagattaaaactctgcaaacaagttgtggttgagaggatacatgaagcattcaaacaaataaatctatgatattaatcagaggttaatctatgatattaatcagaggttaatgcagtggctcacggctgtaatcccagcacttcaggaggctgagttgggagaatcgcttgagctcaggagttcaagaccattttgggcaacatagcaagtcttcatctctacttaaaaaaaaataaccagaggtgttatgaaaatataaattgtccagaactaccctccacaaactaactctctcagaatattcgatatgaggaatgaaatatggtgtgtgtgtgtgtgtgtgtgtgtgtatgtgtgtgtgtgtgtgtgtgtatgcacctatatatggcacctatatattcaacaaacaattctgataattggccagggttgagaatgactagcagcccagcatacactatcagttttaagtatataattgcgctttagtaaaatgtaaagaaatcccagagtagaaatacttttaagctatattacaggtgagaaaatgcataagtatagtctcacccaacttagactatgggggctttataatgtcacaacagttgtttccaggcatttggggacatcaccactggtcttgggcaagaaactcctctagccaatggctgatttatctcactcccatctaaggcttcactgcatttctctttttcagcaacctaacttatttaaaaatatccattttctgattcatttttttctgaattaaactgtcagtaccattggcacacctttggttccgtagcatacctgtgtctctgctgtgttttttttttacctccactccttacttttctagaaaaaaatctctgctttttcttttcagtttaaattatttcacaaaaagttttcttgacttgcacttcctaggcttgctgtccttgtgtgggcacgctcccataaacactattaatacacttcgatttgttaaaaataaagatatctggacagaaaatttcttttctttttttaagattttaaaatttttaatgtttatttttttcctagactggagtacagtggcaccatgatggctcatggtagcctacacttccccgggctcaagtgatcctcccacctcagcctcccaagtagctgggactacaggtgtgcacaaccacacctgactaattttgtttatttgtttgttttgttttttgagatggagtttcgctcttgttgcccaggctggagtgcaatggcgggatctcggctcaccgcaacctctacctcccaggttcaagcaattctcctgcctcagcctcccgagtagctgggattacaggcatgcatcaccacgcccagctaattttgtatttttagtagagacggggtttctccatgttgaggctggtctggaactcctgacctcaggtgatctgcccgcctcggcctcccaaagtgctgggattacaggcgtgagccaccacgctcggccactaattttgtatattttgtagagatgggctttccctgtgttgtccaggctggtcttgaattcctgggcttaagtgatctgcccaccttgtcctcccaaaatgctaggattactggcgtgagccaccaggtctggctggaaagataatttctaacattatcctctcttaaacatttgtttcaaaaattttacaaacatgagagtaattaaatttgattttcaaaattcccttgaatactttcttaatagcacacagaaagcacaaagtattttacatttgttttaatgatgaaattgtgaacccaaacttacacaaagaaaaacccgtaacattatacccatacttaaaacagatgccctcatatacatagtaaaactcttgggggcagtagtgaagttggttatttactgttttatgaaagtgccattcagccgggtgcagtggctcatgactgtaatcccagcactttgggaggtcgaggcaggctgatcacgaggtcaggagttcaagaccagcctgaccaaaatgatgaaaccctgtctctactaaaaatacaaacattagctgggcgtggtggtgtgtgcctgtagtcccagctactcaggaggctggggcaggagaatcgcttgaacctgggaggcggagattgcagtgagccgagatcgcaccaccgcactccagcctgggagacagggcgagctccgtctcgaaaaaaaaaaacaaaaaagtgccgtcatagtgactcagttttaaggaataaatcaaggatatttaactcaatagactacagttagctaacgtgacttgcactgaaagttatacgaatattggtacttattcccctgcccctgaagtatgaattaaagactccaaaattctttttagaatcttcagagtaaaagctagaatttgatttttttaaataataaaaaaatactttgtatctaaatctggtgtataaaataacttggtggatgatgcttcaaggctatccatccccaaatttctccctgaatgataaagagaataaatgaatatgtcaattcaaaagttagaaatttggccgggcacggtggctcactcctgataatcctttcggacgctgaggtgggtggatcgcatgagctccggagttcaagaccaacctgggcaacatagccagaacccgtttcaataaataatagaaaaaaatgagccaggcgtggtggtcccagctactcagtaggctgaggtgggaggatcacttgagctcaggaggtcgagactgcagtgagccgtgatcgcagtactgcacaccagccttggtgtcagactgagaccctgtctcaacaacaacaaaacaagttagaaatttggctgggcgcggtagctcacgcctgtaatcccagcactttgggaggccaaaaagggcggatcatttgaggtcaggagttcgagaccagcctggccaacatggtgaaactccatctctactaaaaatacaaaaaaaattagccgtgcatggtggcatgcgcctgtagtctcagccacttgggaggctgaggcaggaaaattgcttgaacccaggaggcagaggttgcagtgagccgagatcatgccactgcattccagcctgggtgatagagtgagactccatctcgagaaaaaaaaaaaaattctgtatgaactgaacaaaatatccttaaattttaaaatacatctgaaagatatttcaaaatatttaggaaaaaaattatagggatcaggcaaattctgagattcctttttccctgcagcaaacattaggagtgctgctgttcctaaaaacatggtaactgttgccacaccgtatgtttccttggctcagacataaggttgtgtagttgttattccagaatagctagaataaaaatccagcacatcattttcttcagcaagttaactaacctctctgtgccttggtttcataacagcaacataagcataacagaatagcagcaatagctcctacctacctcataagattctttggaggaattaaattaagattcagaacacagcctaatatctagtaagtaataataattggctaaaaaaattttcttaagattatatatattcatggggtacaagtacaattttgctacattaatatattgcattgtggtgaaatcagggccttcaatccatcccggaaaaaaaaagtttttgaaaagatttctgccatggaaaacttttaatgtacaaattcatccatccaagaaatagaaaatatataagtatcaactccaaatccaccatatctatctcttctacaccttaaacaattactcagaaatagaatgcttgagataccagaatgcatgcatatcaagtaataaatgcatgcaggatgtcaacgcatcctaggctttcaaataaaattgtcatacaaaatactttaatattgtagtaacattctacatgttagagtgtagaagttaatcgctgatgcaaaaaaggaaaagaacacattatacccaaagcctacagagagaatcacaattacaaatatcagcctgcatgtgaaaatctttaatttgaaagtcagaaatatttaaatgatagtcattgttaaatcagattgtggtttgaaaaaaagttagtttaaaactgagtttatgaaaaatttggggattttagagacagtgttttgtttttaaatgtgtgtgagtttgtgaagaatgttttataaaatactgacagtattataagatgacattattataatacaacataagaattttggcctgtacctctcagcagtcctcaatcacctgctgtacttgactcaatgattatcagagtggtttgttttccttctgttgtgttcccagttcaggcagctcagcaatggcctgtgattccagcaattcaaatagctggtaagtagtttcttgtttgttttctcaaattttcaggggcttttctctacaagtgatttccagtgcacgcccctccacccattctttattcctttaccttcaggaaaaccctcagcgctgcatctctggtcaccggaccaccgtggtacatttacctatggccaccaggtgtcacccttctctttactaccatggtttgtgaatggttttgccagaggtgaataagaatttaaaatgcaggtctttgatttttcaaatgtagttgaccttaagaatttatgaataaagccagaaaaattaagcttaaaaaacaccgaaagaaaatgaggacttaaaatttctattaaaaaaattaacaggccacagttgctgatgtttagtaaatgtgttagtgaaatgtgttactgtgaagactggggtgtttcttgaaatctcagcccaggtgaaataaaaccaatataaaacaaatgcttacctaataaattaattgtaacatattccttatgaggtagaagagtaagtgaagccttatagcagtctgctttcagtatagtaagatattaagagagaaataatttgtcatatgctttcagaatggtttgctggtaaaataaccaatgtcttacaacttagacgacaatgtccctagagtgaagaaacacgattaattcggctaccacagttgaatgaaaatattccgtaagacaaaatgtaaagaaattagaagcaaaataaatgtctccaaaatgacaaagcgattaagtatatacacaagatgaacaagaacttcaataaaatcatgcagtatacaatacaatatacatttattaaagtatatgcatttttaatgcaacaataatactaacaggtaatagacaagttgttaatagtttttcactggctaattaaataacagctttaattgtattcattttatagcttttctacaatgagcgtaaatcacatttacttttttctacataacttttctaaccacaaaaaaagaaaatggtttaaaagaagagatgagatatctttgctaaaatttaatgcctaaagaagaaacttctgagctgtatatggtatcctgaagcacctgcccttcaagacagaatgcttgtaccacatttatgcagccaagtgcatgtagtaacataaagtaaacacatgccatctggatatatatattaagactcttttgacggctgggcagggtggctcacacctgtaatctcagcactttgggaggccgaggcaggcggatcacgaggtcaggagagttcgagaccagcctggccaacatggtgaaaccctgtctctactaaaaatacaaaaattagccgggcatggtggtgcacgcctgtaatcccagctacttgggaggctgagacaggagaatcgcttgaacctgggaggcagaggttacagtgagccgagatcatgccattgcactccagcctgggcaatagagtctcaaaaaaaaaaaaaagactcttttgaacatggtgaactgatttcccagaatctagcaattcctgaatgtcctggttagattttttttttaatgtgcaccggaaccccagtggctccatggaaggacctgggcatcctctaagccacttggtggcttccattataccatctcaaaatgagagagcttactccacttcattgagggaaataccaccagagttctgactccagaggcactggcctagggaggacaccgtgtgtgaagcccagcagggccactagctgtccccaccaattacagtccttgcgtagggtccaaagaaatgaatgccaaagagagcaacagaggagcaagggagtcacattccaggaccttccttcagggacttttaaaggaaacatgacagctgaggatcagttggttgttttctgctgttccccttcatgtgattcaagctcactcagaagaaacacaatgagacaagagaagagccatctccttccttctctatttattctaggcatctaaactactgaatgtagtggtgtctgagatgtatcaaacggtcagattgactgagtttgaaacctgtttctatcactgacaaactatgagatactctatacttcactttcttttttttttcatttttttatttttatttttatttttttgagatggagtctcactctgtcacctaggctggagtgcagtggcgcaaactcggctcactgcaagctctgcctcctgggttcatgccattctcctgcctcagccttccgagtagctgggactacaggcgtctgccaccacgcccagctaattttttgtatttttattagagatggggtttcaccatgttagccaggatggtctcgatctcctgacctcgtgatccacccgctttggcctcccaaagtgctgggattacaggcgtgagccaccgtgcccggcctacttcactttcttcatttaaaaaagaaatggggataatagtacctatctcatagaattattgtaagaagtgcatgcagtaatgcatgtaagtaggtgctcagaagagtcggacacgaagtaagtgcttttatcatccttatcataattttcattatcagaacaaggagagaccaggtagaaaattattgtgattcttcaggtctggaatactagagtagcatcccaaatgaaggcaccattaaactttgcaaatctgtatgacaccttcatgccaattagaaaaaacacctcttcacaacccctttcaagatatttgcctcctacctgctaaaaacacccatcatactacccacagatagccatgatgctttttctgggacaggtgcctcttccattcgtgcagtgtacagccttcatagctgtgcaactcacatcacaatcagatggaagaatccccaaggcttggtgacagatgagttactgggtaacacagagagaggattcaaaggaaaagttgaacgggtccagaaaatgcatagatacatgtgtaaaaatctggtaaggttatgactagccacgtcccagggttcaaagcttttctcagatgttaaaatgaatcatgtaagtcccccaaatttaaggagtcctcttccaaaaataggaaatgaaatgacataggtgtatgtctctgaggtgacggaggaaatgaaggaagcctctagatgcagcttgaggttcatgagagacagttccaggggagaggtcacagctagggatcaccggcatgcaggaactcagaaacctaaatggggaaatctttttgaggaaatgaacagagaaggctaaaatcaaggagttcgtcaggcaatttctatgtttaggttcaactctctcctgaaacatgaagagctcataaatgcactccctctttgagtctctagttttgtctccttcccacagtgagtctgcaggctgcgtgtcactcacgttcagctaagacgtagtgccccatggctcctcctgtggagacaagagacccaggaaagaggcatcacaaacctaggcaccatcttgcctcttctctcttccttattttcctcattcacccatctcaatttagacctgggcactattggatttcaagaaccattatctctcatctggaaatgcttattggctttctaactggtctcctcacctctcatctaacttcttaacaacacattcaccatataagggagatcgtggtcctcctttcttaggatccttcaatgacaccccagtgatcataacccaatatcccaaaagacccttggactctgtatgagctggcttctttctgattctcttttccctacaccacagatgttcagggggtagaaatgcataattggtgagtgatagctacgcaaactcagggttaaggtacagtaattatttctaatctcccagtatgccttatactctcctacttggcatggttgctccgtctgtgtagacctcccatcatcttcaacctcacctaatggaatccagcttctccttcaagatccagaaggctatcttgatccccagctgaatgtgatcattctttcctttgacaccctaagcatttgcttcctgcctgctttaggacctcatggggtcttctttaactacatttacttgctatcaatttcattccctaccagatttgggttctgagaatagccacagtgacttctcaacctcaaagcccctgtactaccttaaacagctcttgcaaaatagtaggtgctctgaagatgtttgttgaattagagactttcattctggggagaaccattattttctgtctcccagggagctgctggtgtccccaaagaatataaatgagaaaaatgcttcccatggatgccagatcccctctgcccctcttcccactgtgccctggggcagaggtactaagagacttcccccttgttcctactcacttgaaccctgcctcttccttaatattatgaacaaaattccaatgaacaagatgacgacaaaaacagcaattccactgatgactccaatgactagggtgccagacggtgagggctctaaaacagaaaaagcaagttaaagcctttgattgccaccctcagcccaccccctaacaaagagcagatcctcatctcactgccataattacctcctcaggcactcctctcaacccccaatagattttctcagctcctggctctcatcagtcacataccccagatcacaatgaggggctgatccaggcctgggtgctccacctggcacgtatatctctgctcttccccagggggtacagccaaggttatccagccctggtaggtcccatccccattgggcaatacgtctttaggttcgaactccttggcatccattggctgcttatccttcagccacttcatggtgatgttctgggggtagtagttcaaggcccgacaccgtagagtggtcactgaagaggtcacatgatgtgtcaccttcaccaaaggaggcacttgacaggaaagaggaaggatgaggagaggggatctgtttacccttgccaggaagactggaactttcacttccttctataggttggaggaaggaaatacccttttcagaaaaaaacaagctacaggagagacaccattttgtgtcctaagattggactctaacacagtgtcacttggagagcagtcagatcagcttgttctcctcacatgtaaatatacatatctgttacccatgttctttgttctgatagataaaattgccctttatgtgcattgaaaatgattgaatacagatggtcagtttcacctgggtcaacctaggaggcattgttataagaagcggacttgtaagataggtagcttcagtgattattgctatgttctatgaaagaaacttttaacctaaaggattcttctactctgataagtggcctcacttgatattttgtcctggtattcatatgatagctgagatctctgaattctctttttttttttttttttttttttaagatggagtctcactctgctgcctaggctggagtgcagtggcgcgatcttggctcagtgcaacttccgcttcccaggttcaagcgatgctcctgcctcagccttccaattagctgggactacaggtgcgcatgactgtgaccagctaatttttgtatttttttagagacgggtttcaccatgttggtcaggctggtctcaaactcctgaccttgtgaccacccgcctcggcctcccaaagtgctgggattacaggggtgagccaccgtgcccggccttgacatttctgaatttttaacaggtataaatatacaaaagattattggttaaataaaaagcaagggccatagacacttccctttgagccatatgcatggagaaaagaaattaaacccatgacttgtggctgtctcatacatctcaattataaggtagagactctaggattgagaaagtcccttcccagaatttggagaggcacacagcctcagccacctctgaaactccaaccagggattccgtgccctgcaacctcctccactctgccactagagtataggggcagaagtgtgtttccaccataccttgttggtccaaaacacctctccccagctccagcaactgctgcagctgtgcagggcagtccctctccaggtaggccctgttctgcctggcccgaatcttgtgcctttcccactccagcttggtgggccaggccctgggttctgctgctctccaatccagtgtgtcagggcagaattcaaggtggtcctgcccatcatacccgtacttccagtagccctcggtactgttgtcttcttgcatttcacagcccaggatgacctgcagggtgtgggactctggaaaaatccccagccttgttaactgcaaccaaaggaataggtccctatttccaccatccccaaggaccaaatgatctcaggaagcaaattccttccctcttccctgctcccacaagacctcagacttccagctgtttccttcaagatgcatgaaaagatgaaaagctctgacaacctcaggaaggtgaggccccctctccacatacccttgctgtggttgtgattttccataatagtccagaagtcaacagtgaacatgtgatcccaccctttcagactctgactcagctgcagccacatctggcttgaaattctactggaaacccatggagttcggggctccacacggcgactctcatgatcatagaacacgaacagctggtcatccacgtagcccaaagcttcaaacaaggaaagaccaaggtcctgctctgaggcacccatgaagaggtagtgcagagagtgtgaacctggagacagagcaacaggccttaaccatgtgtagtaggaggggagcaggatgttgaggctccacacacctgcatcaactcataccatcagctgtgtctggtcctcattttgtgaagggtgagttgcagtcctgtctttcttccatatgacagtcctgggtgctctttccttgtgtgcttttctctgccacacgtggctgccaccccctcactgcccccagatcctattccaatactcatgattagacagactccactaaagctggtggattctagaaaatgttaaggtgtgtctagccatggtagttgaactcaggagttggtgctcagggcaaattagacccaaatcctgaggaataattccttcagtttttttttttttttttttttttttttttgagacagagtctcactctatcacccaggctggagtgcagtggcacaatctcagctcactgcaacctgcacctcctgggttcaagggattctcctacctaagcctcctgaaaacctgggactataggcgtgcgccaccacaccaggctaatttttgtatttttagtagacatggggtttcaccatgttggccaagcttgtctcaaactcctgacctcaaatgatctacctgcctcagccaccaaagtgctgggattacagaagtgagccaccgtgcccagccttggtcctgaattcttacactgaactgcctatgtggcctcaccacttggaagcctgactggaatctcaaacttaacatgtccaaatgcagatccttgatttaccccaaactgctctttcctctgccttcaccatctcagaaatggcattgccaattaccccactgctcaggccaataaaattaaaataaagaacaaagtcaactttaactcttctctttttcagggggtcaggggagacagggtcttgctctgtcacctaggctgaagtacagtggcacagtcatggctcactgcagcctcaacttcctgggctcaagcaataccctccacctcagcctcccgagtagctaggatcacaggtgcatgccaccacacccagctaatttttgtattttttgtagagaaggggttttgctgtgttgcccaggctggtcttgaactcctgagctcaggaatctgctctccttggcctcctccttggcatgagctactacacccagccaattcttctctttctctcacacaacatagaatccttcagcaacttccttcagaatatattcaggagacaatggtttgtcactcccttttctgttcccacccagcccactccactacctcttgcctggactgtgtaacagcttcctggctgggctccctgcttttactgttgctcccttcattctgctttccacatagcagccagagcaatcttttaaaagcctgtgacagatcactgttactccttggctagaattcacaccacagcctacaggcgcctgcacaaccttgtttgtggctcctcttctgagcccattacctacttcttggcctctactccccagcactacttgtttatttttttcaacccgagcttcttaaccaggagtttgtctactaggtgacatgtggcaaagtttagagacatttttggttgtcaagactgggggagtgctcctagcacctagtgagtagggaggacaggatactgctagacatcctacatgcagatggtagtcccccttcccacccccacgccgccccccccccccacacacacacacatgagtagtgctgagaaaacccgctttttaatccaacttgccaggcccactcagtttgcctgggaaatactgctcccagtcaatatcattcttatttccttcatgtctctgctcaagtgtcagccccagagtgacttgccctgacttctctgcttctcacaacacccatgatttcctgatgttgtatatctttctgctcatttgcttattgtcatctctcccactagaatgcaaaatatcaaagggtaaagacttgtttccctgctctctcccttggggcttgaacagtgcaacacatggctgggactcatttacacttgtaaacaatgaatatttctgctcaacatgaaattttattattcaacctctaatgcagtgtgatgtttaagaatcatagctatgaagtggagacatgagctctgccaccaaagcccagtgtaccattgaataaatttgccaggaagcaggccgtgccatgcctcattcttgtcatgtgtaaaatgtggatacacgtagtaccaaaactcaaagtgctgtgctgaggccggcgtgtgacccacagaacactgtgctacactacagggcaaaatcactgtcaactaagattagaagcagctgtagtacttgaaataacatcagaaaaccagattatttatgttctttgtaacctgaaaagagttatataatctgaattccagttaacttctagtaaaataaacgtattattagctcctacctccctatgcctagtgaaaatcaaataagatcagatatgaatgtaacttagaagtgagtgcattgcttacatgttcattatcagtactttgtagagaggcctcttaattacacagcacattgcaaatcaataaagcctagccgaaaagagaattgttcagttcaaacgttcaaaactaacatatacttaattttccaggcaaaagaacaattgccaagagtggggaaaggcccgaggtaggcctctctcaggagcctcccaccctagagacctccaccccaggtctcaccaaaagtgggtggaatggtgaagaattcagatccccaacgccactctttcgcgcccccaccgcccaacgcattcgttctgaggtggaaaccccgtgcggatcctgctgtgggtttgctcagccttctcggcaagcactcagggaagaacttcctgtttggagatgactggggaaaaaactgcacagctgacattggaaataaacccgagttccaggttcaaggagccccaggcttagctcagctcaagtgaggaactacgagatttatttaaaagcattctagttgggggaagggagtgggcggttccaaaagtcactccgcagagccgggacagccgggggagggggcaggtcctggggcgagggacccctatctgcagttcagtggtaggcactccctcacggggtctggacgcagaaagtagggagaggggcttgcggatagggttgagcaggtcctccaaagttagcaaactcccaagcgcaaagaaaaagctagtttcgatttttccacccccgccgcgcccctagttcgcccgcagccctcggactcacgcagcaagcgcccctgcaggaccgcggtctgcaaaagcatcaggaggagaagcgccggcctggctcgcgggcccatttccccagctctggccgcacgtccccgttaaatctccgcttcttttggggggcggggaaacggggatggctccagaagtcaccctacagctattgcctaggctcaggagatgcccagtaaaacttcctggtgaaaagcaacaggtctttcagaactttagttctctctctcctacagcagaaggtacctgcttgtgaaacactaggtgatccagtgtcccccttggtttttaaatcctgaaggggtgttgttgattggggaaagtagcttcgcaatgttctgatctgaactttagatatttaaatatttatgattttcaaaattcaatcatacatttaaaaattttatctcaaccttagaccaacttatgtcttatttgacttagaaatataaagctttttcattttgttttttgattcaaattaattaagtcataacattaaccaattagatcctactgaaacaccttccacagccttcataattgaattatctgacaagtgtttcacaaactttacagtattgggattatctggagaatgattaaacatattgaggcctgctcctaaccccagacacactgatttaatgggtaattgttaggtagttagacattagcagttgggaggggatgacagaagagagcggaaaggctgtcactaagacagccactggcccacctaaattcaggcccaagactaccctaatgccaccctaagggatggagtttatgataaagtctgtggccaaaatatcctggagaaagagaaaggagggtacaggtggaaattccctaaggtggcacatgcccaacaacacaaaagcctgtcttcaagttcaccccaagttcatcatgccatcattataatagaatttacatacagttttgcccccccatccctgggaggcttttcttaacaaattataggtaagaccatgcacagtttaattttagattgtatagctatacacttcaatcaaataacatcatcctgtcactcagatacagcccaaacctcaactcctccccacaaaccccataaaagcaccttgagctctgtaaagaagtgctgagttcacttcgcagaaataagcccgctgtccctcagagtgtattattgtgcttcaataaactttgctttaagcttgcattttggtgttagtttgtagttctttgctcactatcacaagaactgagattgctggttcagagctccggctataataatctcctcggttaaaggatccatcccaatgcataattcccagtaacagtatgggatgccacctgggcaatgggattttaaaagctttccttctccctcaacgaagtttgggaattattgccttagacatttcaaacaatattaataaatttaatacacctgatttgctccaaacctttacatatctagcaaattcaacaggcattatttttgtaagcatgtatgcaaattttggcaattcaagaaaatcaaacaggatatcagggcctcgactgtaggcaaacagatacaataacattggaaacatgtagaatattgatgatgggcacattggggctgatagtactattcctttttttcaatttttggtaagatataattagcataccatataattcatctatgtaaaatgcaaaaattggcccggctcagtggctcacgcttgtaatcccagcactttgggcggccgaggaaggcagatcacctgagatcaggggttcgagaccagcctggccaacatggtgaaaccccgtctttactaaaaatacaaaaattagccgggcgtgatagcaggcaactgtaatcccagctacattagaggctgaggcaggagaatcgcttgaacccgggaggcgtaggttgcagtgagctaagatcgtgccatcacactccagcatgggagacaagagcaagacttcatctcaaaaaaaaaaaattagctgggtgtggtggcatgcacctgtaattccagctactcgggaagctgagacaggagaatcgcttgaacctgggaggcggaggttgtggtgagccgagatcatgccattgcactccagcctgggcaacaagagcgaaactccgtctcaaaaataaaataaataaaataaaatgcaaaaattaatggattttagtatatttacagagatgtgcaaccattaccaaaattttacatttctatctccccaaaaagaaaccatgttcccctaattcagtacccttaattcatcgcctcccagattcctccattctcctcctcctcccctcccagccctagacaatctttaatctactttctttctatttggaacatttagtatacatagaggcatataatatattgctttgccgtgactggcttctttcatttagcataatgtttttatgtatgtttttcatggaccaataatatctattataaggacataccacaacatattttatttattcattcatcagccgatggacattggtttgtttctactttatggctattgggaatagtgctgttataaacatttatgtacaagtttttttgtagacttatgttttgatttcttttggttatatatctagaagtgggtttgctgggtcatatggtaacactgtttaaccttttgaggaattgccacattcttttccaaagtaagcattttatcctcctatcagcagtgtatgagagttctgatttctctccatctttgcctgggtttttgaatcagggccccagatagaacaaaaatgtggttattcagttgttccaccatcacttgttgagaagactcttttttcattgaagtgttttggcacccttatcaaaaatcaatctaccataaatgtgagagtttatttctggagtctcaattttatcccattatgctataatctataatcctatctttttttttttttgacagagcctcactctattgcccaggttggagtgcagtggcccaatcccggccactggctcctcctcccaggttcaagcaattctcctgcctcagcctcccaagcagctgggattacaggtacctgccaccatgcctggttaatttttgtatttttagtagagacggggtttcaccatgttggtcaggctggtctggaactcctgacctcaggtgatctgcccacctcagcctcccaaagtgctgggattacaggcatgagccaccacacccagactataatcctatctttatgtcaggactacactgtcttgattactatagctttttagtaaattgaattcaagaagtttctcaacttcaaatttgatctttttttggaagactatattagctattctcagtctgctgaatttccctaggaattttaggatctattatcaatgtctattctatttttgtatatgttttaatattttcataagaaacttttttcatttaaacttttttttttaagaaaaatagtgaaaatcagaacactgggggtcaggcgcatttaacaggcagaagaagaataaaaacttgtcatataaacaaaaaagaaatgaccaatcacattgtggaagccatggagtggttataggtgccaaaggctgcagagaaatggtgtcagatatacctgaaaattgtccattgtatttggccattaagagacttagaagacttaagccatagattgctcagtgagaccccgagggcaaatggtctgaaggtgaatagatcatttcacctttaagagagcaggtaggaagctataaatccaagattaaaaagttgactgaactgttaaggaagaaactctaatcttgagccaccctatcctggctccaccttctgctgcaagcaaacagaaatgctgaaattcaacactcacaaaggctggtaagctggaaatgacaaaaattactcctgggaaagtcagatttagaattaggccatatttgttggggttcagattttcatgtacacttgggaaagggtttagcttataggcacatgcatgaagggaactggtatagggctgtgttcataaggtcaagagttgaaggccaggcatggaggctcttgcctgtaatcccagcactttgggaggccgaggcaggaggatggcttgagcccaggaattcaagaccagcctgggaaacatagggagatgctgtcttcacaaaacaattaaaaaataaaattagtcaggtgtggtggcacacacttgtggtcccagccactcaggaggttgggaagatcacttaagcctgggacattgaggctgtagtcagccatgatagtgctactgcacaccagtctaggtgacagaatgagaccctgtctccaaaaaaagagctgtatccacatcccaggaaagtggttgaagatctacttttctctgtaaacctaataaagaatagagtgacaaatgtgtgttgtggaaagaaatggggtgagagctacgtagatgcaaaacaatacatccccacataccacttgttaatcatccttttccacccacttatgggatgaattgcatctccccaaaagatactctgtcctaaccctcagtagctgtgaacctgaccttatctggaatacggtgagttcactggttaagaagagattatagtggaatagggtgagtcctccaaccaatgactggggtcctcacagacacagagggatgatggccaggtagagatggaggcagagattggagttatgctgccacaaaccaaacacaggaagctgctagaagtggaaacaggcaagaaagaatccttccccagaggctacagagggatcttggccctgataataccttgatctcaactggcctacgtaactgtgagagaataaatttcttttgttctaagccacccagttgatagtactttgttacggcagccctaaggaacttgatatacatttcttttactgtcatagaagttttgaatcttttaagtaggtctgtacccttcctcccagtgtcaacacatggaattcctctccttgtgccttgaaaagtgaaaggtgtttgaactggtaatgaaagaaatctcagcatgaggccagatgctgtacctcacacctgtaatctcagcacttcgggaggatgaggcgggcagatcacttgaggtcaggagttctagactactctggccaacatggtgaaaccccatctctactaaaaacaaaaaatgttatcctagccgggcatggtgcctgtagtcccagctactcaggaggctgaggcaggagaattgcttgaacccgggaggtggaggttgcagtgaactgagatcacgccactgcactctagccttggtgagagagcaagacttggtcttaaaaaagagaaaagaaaaatgaaatttcagcattatagaataaaaatgtttccccttccccccaaactttaaaaaagcagaagtctgcatcataaaatggtctttgccaatgttatttttattataacaaaggaatcttgcaaggctaccagatctcagcaattgtcactatgttctgtaaaaatcacttcctaaaatgtctgaattgactgcttgtctcatttatttgtttctcgtgtcatactgcaatggatatctgtcttgttagtataaatatttgtgcattttgttgttgttaaaacagcttttttggcctgtcttcttccacctatgaggtaatataaaactcatgtttaacacttatttttgtagcaggacaagctacagacaaaacccctcagacactgagttaaagaaggaagggctttattcagctgggagctttggcaagactcacatctccaaaaaccgagctccctgagtgagcaattcctgtcccttttaagggcttgcaactctaagggggtctgtgtgagagggtcatgatcgactgagcaagtgggggtatgtgactggcagctgcatgcaccagtaatcagaacagaacagggattttcacagtgtttttccacacaatgtctggaatctatagataacataaccggttaggtcgggggtcaatctttaaccagacccagggtgcaacaccaggctgtctgcctgtggatttcatttctgccttttagcttttactttttctttctttggaggcagaaattgggcataagacaatatgaggggtggtcgcctcacttattcaccccctttgagaatctcactcattagtgggagttctcacttttattctcactacctatgtcttcttgaaagacagattgataatgattcatatagtacacttgtgctgaagcattttggtgagctaaggtagtgatgaagctttttatcatttggagaagtacaggtagcaaacaaggaagcagtaagcaggtttctattaatattataactcctattataagagttttaaatcttcttagcactcggaaccatttttcaaacatggccccagaaacaaatccataccacacctacatgggcacatgtgccacttttgtcatatttctaactatgtcttcaactacttgcccttaatcatctatgtgtagacagcaattagtaaggttaaatttcctacagacccctccttcagttgctagcaagtagtcgagagccaatccattttgatagatagcattttgcatctgagtttcttgccaggccacagtagtcagggctctgctggtcttattagtaattatttctaagacagcttgtaaccgtatgattcagttgagcatgtaaatgggggtcccatatccccacaagccgtcttgtgcccaagtagcaggcccataatattgtatgattctctcagggggccattcattatttttccaattttctatagctatgctttttttttttttttttttttttttttttttttttttgcgggaagcatatacagggaagcccaggagtttgcctgtctttatgggcagtaggaagaaagatggtttagtagtgtcaataacacaactacctgcccactggtcaggtaatttggcataagctgtatgcccacatatccagtataatccagtgggggctgtccagtcccggtgggactctgggtgggtccacacagtttgcaactttgggaatttactaaatagatttttcttagtgtggtttgaactccactaggtggctgtttttatagtactattatacagtttttgcccaaggcagctgagtcttcccacaggaagggtgaagtccttccccacttttgctatacagtattgtctaatgattgaggcttttaggacccagaagttatcagggtgagtcttttgagctgggaatttatcaggaactgggtctgtaggtactaattctcgtgcttcccatggccattgatctcccattacagttcctccacatacatacataacatgaagtgacattgagagactgggctacatgctcagctaattgcaaaaacaaatttcttgtttttcctggaatttctagtactggcacattcagttcatcataagaaggtttgaaatactggctcaggggagcatttataaacttctcctcaaaccaccatatttactcaaggatccagtccagccccaactatttctaaggttacacgatccccttttttccagtgagaatcaagggggttggttattactagttctaaggggttacactgaccactggtacaggaagggccacttttccctttctgaaggtggacaggattctttttattttttaaccaagttgcctaaatgacacaagaccagtatctacatttatttccacgcagtcttaattcatgacaagcgtacttattttctgccatatagcctctttcctaatgaacagaaccacatcctatttctaacttattactattaatgacagcacaggcatcaaatttcaaggtgacttgtttgggcattcctttttcttctgttttggctaacactttactcgtatcgtttatgaacccccaccagtcctcagtcctcaatcttatttcaaaaactgtggtcgtgggaggctcagatgggtcataacacacatcaggttggtcatttcttgggctacctaccttgtatagaatagcattatacaaacaagttatttttagagtctttgtacacttataataaccataaaataataagactgtagcaactttttgtcctacctcagtgacttgatgtatacactgggaacagccctcagtctgaggaaggttagttgaagtctttactgtgcaagtccaaattttaaggaaaatgagtcccttgatgagttttctcatgtttcggccatgcatggaccagtcagcttccgggtgtgactggagcagggcttgttgtcttcttcagtcactttgcaggcgttggcgaagctgccacgtacagctcacagtctactgatgttcaaggatggtcttggaagttgggcccactagaattaactgagtccaatacctctactcagtcactttcaactgggctttctgataccaggagcaaggtggcaggttttagggtgttgcaaatttcaatggttatgcagggattttcacatagcaaactttggtacttggttaatctagcatttgttagccaatgatgtatttattaaagtcaccacagcatggagggcctttaagtttaggttttgtccaagagttagcttatctgcctcttgtgctagcagggctgttgctgccaaggctcttaagcatggaggccaacccttagaaactccatctagttgtttggaggcccagcctcggccagggccccacagtctgggtcaaaactccaaccgccattttttctctttctgacacatagagtgtaaagggttttgtcaggtcaggtagccccagggctggggccgacatgagtttttcttttaactcatgaaaaactcattgctgttggttgtaatagatgtagtttatccaatctacatttttattaactgtcacccaccaaaatattgactcaaatcctgcagctatttgattttgggatttaaattgatctgctattccctgtgggactccaattgcatctaaatagatgtgagagttgaaagacacataagggtcttctcttgctttacgatgtcttatttttcctccctctggttgatgaaatgctagggtgaaagggatagccaattggactaaagtacaagtgccgctccagttatttggcagagtgcccagtaaaggtccaccacaataccaccacacatccgcttggggatgaacaaaggctgactgattgagaagctcctgaaaattcttaagctcactgcatcccttcaggtctccaaggaatgctaagtttcctccctgtcatgagagacaagaagtgaacttagttttgggagatggaagctggatggccctcaggggttgacctgcagggtgctggactttgggatatagcagagagagcttggcacgacttattactccaggctgtagaatcctggaaaacagttaccatgcagcccatgcctggtcaacaggaggaccaccttagtggaaaggggataatctggccctctggcctgccatgtgcacaagcataacaattggttttgtttaatgtgtggacagaatatttgatccattccaactgggcatttgcatcttggtatcctgcttaattatcaaagtttgttttaagtctttaacttctatgaccctctagtaaaatgaatgtatgattttaggaaattacaaaaaccggttggggcagtccatccttgctctttagtggtccacacaacattcgaccaactatggcataaaagctctacatcggggggcaagactcctcgttgacactggggtctttattgaaatctctctggaataaatggtctcagtttactaaggctcagtctgaggagagtcaggagggacagaggtacttttctgaagtacagagatgtcttcgacttggcaagtccccacagggtataacaaggcaagcattaaattcaatagtttgaggcaaaattgacttggttatgttaataactagatggtcagaaatagagtgagggaagaagaaagagtaatagaatagatgaaggagttaaatttttcttagctttagtttggtagggttttcccctgggactatggcccatgactctggagggggtggcactttcttgactcgggtgtgatgagtccatccctttttcaccgtatgaacaacagtctcggtggttagcagcacaaggtagggtccttcctaggctggctcaagttttccttctttccaccctttgatgagaacatgatcttcaggctggtgctggtttacagaaaattctaggggtggtacatgtgctaaaagacttttagttttgagggaaaggaaagtggaagataaaccaagtatataacttttaagaagttgaccttttgttttaaatgtggggacatcagcagtggactttatagtccttggtgccttcttactgagaaatttcctttagcacctatttttattagtttttagaccaaagaaagtcaaatgccattttatatttgacaacgcttcttgtatgtttataccagataagctagatttcacctttatattggtgtgttattaatgttaaacttagttttaataaaactctgtagacatatttatttgatttttaatgtctgaccataaggtaagatttttatagacttttctttaaccttttataatttttgttaaagaacaggttagtgctttaagaaaaacccgttgtgtttttattttaatgttcagttcacagaaaaactgtatgataccccttaactttagccaatatgtttagacacagaattttctttacaattaaggtttcaaaacttgcttaaaccttcaaaacaatttttgtaaccttttaatgtaggtaaaaatccacattcttatgcatcctcataatccttttaccaaaggtatattttactttccttacataccttgcacataaactgtttattcaatagttttacatttagaaggaggcctaattacttttaaattatacaacatttcttacataaatttatttttctaacacacatttttttcatgactttcacagacaattcttcgacatgcctcaactttctgacttattgcaaacatccctttctttaaacaactagttaatttatctcaggacaaggattttccatacaacattcttttttatataaattctgcctcctctttatttccttttttttttttccgaggatgataaccattcttttccaaagcgaacttcttttatgtctgtggactagactgtctaaggccacaagattagaagttactataatacatgttacactgttaacttttagcaaactttacttttgttgaaaaccttgtaagtttgggatttcaattatcctttgctattaataagaccttatttagtccaaattaacttagaattggtatagatggcttttttttttttttaattacctgggaggaaccatctatcctcctgtcctgaagggagttcctcctaggtctggtcagagctttgtatggtaattaagatttagatcccctgttaggaaacctgccgggttaagagaattttcagtggttaatgttaaatcatcttcttttttcttttttccttaggatacttctgaaccggtgaggtgtgctcacaatgaggtttcctgtaaaagttatttttttactttcttctgttagcaaagcagttgccgctacagattgaatgcatttgggccatccgcgggttactgggttaaggatttttgataggaaggccttaatgcttttggaatatgccctgacaacaaagtgccagttccttcccggtgttcagccactgcgttgatcctccacgagggcctgccacgtgctgctctggtgaggcgttccaccggggcaattgcctacctgggagcgctctccagatctgtgtcgctcaaactggctggagttccccgtagggatgctccacagggcaggcctaagtcgcctaaggggctgccttgaccgtccgttaatcacctctgtctccaaaaaccagctccctgagtgagcaattcctgtcccttttaagggcttacaactctaagggggtctgcatgagagggtcgtgattgattgagcaagcagcgggtacgtgactggggctgcatgcatcagtaatcagaacagaacagaacagcacagggattttcacaatgcttttccatacaatgtctggaatctatagataacataacctgttaggtcaaaggtcgatctttaaccagacccagggtgcggtgccgggctgtttgcctgtggatttcatttctcccttttaatttttactttttctttctttggaggcagaaattgggcataagacaatatgaggggtggtctcctcccttaatttaaacaaaattttcaaagtcctaccccaagtaaattggcaaatattaataaagttatggcatagaaaataaaaatgattgtaaaaggcgtaaagatatttctgtggggaaaacatttgttcattagttatcagttaaaattctgtgaaaaataaccactagagaccctaaagtacccaggggctaataataagaagggaggaacaccctctcactccccaccgttacctgcccagaagggaagaggaagagggtgactccaggagagctgtggtctcccctccccatatgtccacatatacctgacctcccctccccaaaatatatacccaatatctctcccatatatacatatttatctgacctctccacatatgtatacctaaactttctctatatatccacatatacctaaccctctcacacacatatagctgacctccagtggaggaaaatggggaagagagaagaagttatcaaaggataaatctaggtcatactcagaaatgtgaaaaacaaaaaccacacacagaaaaaaaaaacacacacaaaaaagaaattgataaatttgtttgtgtcaaaattaagaattccggttcaatgaaggatcccatggataaagttaagacactgctgtaaggatggtagagaattaaatgtctgaatcagacgaaaggatgagtaattagaatgcacaaggccaagaagaacaaaacagaaactccacataaaaaatgtatgaggccgggcgcggtggctcatgccagtaatcccagcgctttgggaggccagggcgggccgatcaggagtttgagaccaggctggccaacattgtgaaaccccatctctacaaaaaatacaaaaaattagccgggcgtggtggtgggtgcctataatcccagctacttgggaggctgaggcaggagaatcacttaaactcaggaggcagaggttgcagtgagctgagatcacaccattgcactccagcctgggtgacagtgtgagactctgtctcaaaaaaaaaaaaaattatatatatatatatatatatatatatatatatatatatatatgaaataaatgaacaagaaatttagatacaggaaaatccaaagcacttggtaatgaaagaaaggtaaagtgatgtgtccttttgcatttaaaagagagcattaacaaattagagagctgaataatgctcagtattggtgtggatatggagactcaggaatcctcatacactgctgatgggagtgcccactccctgggaatattttccaaatatcatctcaaacatatcccataaaggtgacaggaaagtgtgggctgactgatatccttcactgagagaggtggaggtaaaatgaagtcactgcacaatatagagttggaagcaatggattagatgtccacatagttacgtggaagaatccgtaagatacacacacacacacacacacacacacacctttgtgtatattgttcctggcaggtaggcatggaggtttagaggctttctacatcacacctactgcacacagtaaatggccaggctgagcactgacttccatgaagggagattgaaggtaagagattgaagattgttccctggtctgggaccctgcaactgaatatgcagaaaaaagtacaccccgccaccccgcttcccatctttcctacctgattagaatagctttttcagaaaacgttggccaggggttgtggctcacacctgtaatcccagcactttgggaggctgaggcgggcagatcatctgaggtcagaagttccagaccagcctggccaacatggcgaaaccccatctctactaaaaatataaaaaattagcagggcatggtggcacacacctgtcatcccagctactcgggagcctgaggcaggagactcacttgaagcacagtgatggaggttgaagttagctgagatcttgccactgcactccagcctgggcaacagagtgacactttgtctcaacaacaacaacaaaacccaccaaaactttaaatctacctatggccaaatgcctgctaaaatgagcacccaagaagcagtgttcaggaaagtcagatgaataccctaaaattagatgcaatgttggctggtcacagtggctcaggccctgtaatcccaatccttcttgggaggccgaggcgacagatcgcttaagctcaggagatcgagaccagtctggacaacatggtgagaccgtgtctctacaaaaacgtacaaaaatgagctgggagtggtggcgcgcacctgtagtcccagctactcaggaagctgaggtgggaggatctcttgaacccagaaggcggagactgcagtgagcagagatcatgccactacaccccagcctggatgatagagccagacccccatctccagaaaaaaaaaataaagagagagagagatgcaatatttagggttcaacaagactgaatttctgactcctttccctacctctccagcatgttagattctgggtccttcatcctaaccccctgttcatgccatagccaccctgtggtaccaactttggaagcctggatcttcatcccctcatgataatgagtgtcccatcaggtctccatgctcagcttggcaagagtatctgtcttctcctcatgggacggtcacattcacccagcactgacaggttccattcccactagggtggcaccctatatggtctgagtccaggccttcctggtccctcagtaatctcagcatggtagcacaatcgaaaagggctaggcacggcagcaccatttcccaccaagaggtctgatggctcatcacatagactgaaggagattctgaagagcagaggtggaatgaagaatgaatcgtgggctctgctcttcctaggcctgtcttcctctctcccgagatgttagctaactcatgagagccagaaaccaactgcaggctggcctcaggcacttaggtagtgcttcagcctcagcagtccacattctaggaaccctcataatatgggttgaagtatgcattcccacaaaaataaagttgttgaagtcctaaccaccagtactgaaatgggaaaagttcccttgtcccgctcgcatggcatgtgataggagtgtggctaatttcttcagtgcctggctgctcaaacctctaggggaacattaagacgggcaggttgtgggtctccaaccccatgaccccaccacagtgtctagggttgaatgtttacagctcctgaagccacagtgggtgtgtgttacagggtgctcttttagttttgccatttataggcagctggtgttaaccaactcaattagaccgtctaccttgtcccaaggacagaagaaggctttctgtatcccaggttcttgccttggtgtaccggaataaatcagaccacacctgggcttagagaaagagtgcaaggttttattaagtggaggtagctctcagcagttgggcaaagccaaaagtggatggagtgggaaagttttcccttggagtcagccactcagtggcccaggctctcctccaaccaccccagtcaaattccgcctcattttgccaggcaaacgtttgttgtgtgctcttctgccagtgtgctcccctggacgtccagctattcgtgtcttgtggcaggccaggggaggtcttgggaaatgcaacatttgggcaggaaaacaaaaatgcctgtcctcaccgtggtccctgggcacaggcctgggggtggagccctagccggggaccacgcccttcccttccccacttccatatcatttaaagggaccatgcccttcccttcccagcactttccccctcctgtatcaggacctgtgaatgtggccttatttggaaatagggtctttgcacttcatcagttaagataagagtgggctctaacccaacataaagggtgtccttataaaaaggagaaatgtcatacacagagactgacacctatagagagaaaatgtggtgagtagacacagggagaatcaccattcaagtcaagcaatgagtctggggataccagaagctgggagagaaacctggaacagattatccctcattgccttcagaaggaatcaaacctgatgatactttgatttcagacttccagcttccaggactgtgtgacgataaatatctgttgttaagccaacgagtttgaggtactttgttactgcagccccagaaaactaatacagtaggtactatggactgaattgactccccgtcgcaaaattcatatgttgaaaccctaacccccagtgtgatggtacttggagctggggcgtttgggaagtcattatatttagacaaactcatcaggatgtgtctctcatgatgaaattcatgcccttattaaaagagacaacaggccaggtgcagtggctcatgcctgtaatcccagcactttgggaggctgaggtggatggatcacctgaggttgggagtttgagaccagcctggccaacatggtaaaaccccatgtctactaaaaatacaaaaattggccaggtgtggtggtgcacgcttgtactcccagctacctgggaggctgaggcaggagaatcccttgaaaccaggaggtggaagttgcagtgagatcacaccactgtactctagcctgggtgatagagactccatctcaaaaaaaaaaaaaaaaaagacaatagagccaggtgctgcagctgatgcctgtaattccaacactatgagaggctgaagcaggaggctcgctttagcccaggagttcaagaccagcttggacaaaatagtgagacccccaacttctaaaaatttaaaaaatgaactgggtgtggtggtacacatctgaggctccagctactctggaggctgaggtgggaggattgcttgagcccaggaggaggctgcagtgagccattgctgtccagcctgggctacacgagaacctgtctcgggaaaaggagaaaacagtgagacctctttttctctcctccttctctccactgcctaagccctacaagcacaaaaaggacaccacatgagcacatagtgagaatgctgctgccaccaacaagtcaggaagagagcgttcacctagaaactgaattggccagcacctggatcttggacttctgagcttccagaactgtgagaaagttattttttttttagcgactaagtctatagtattttattacagcagctcaaggtaactaacatagtagaagggatgaattatggagatcacaagtccacgcctccagaaaaagacttccctaaaaattagtctgagcaaaattcgaatgatgaattatttttaagaacttttaagggatctgacaagtttgcaagagctagagaatgctttacaacgtgataatagaatgctctgtgatgacagaaatctttccacactgttcaaaactagctactggccacttgtgactattgtgcacttgaaatgtgactggtgtctgaggagcagaatgtttaattttacttaattttaattcattacaatagctacatgtagctaggggctactggattgaacagcacagctcgagtcttttagagggagacaggactcaccaagatggatgctggtggccaagcagcaatggcaggtagtacacacacaagaggcagatgatacaacacatccttcccaaacctggagataagctcaccccacaatcccgccgctgaaatagagttgatgttaccaatgtgcatttttatgtccttttccatacagaaagatcattcagcaagtactatggtacttaaaaaacaacattcaattcattattatgacaaaattaaattaatagctcttccttaaacttttaaattcaatttacaatgcttactattggcatttattaatctaccaattttttcccatagaacccatagaacaaataatctaccaaatttttaacattcatttttggcaaggcttttgcaatttgacgaactttaagaagaaaacttataaattgcaatttttaaatctgacatactggacttttaaagtatccaattgactaatgaacaaaactgctccaaatttttcaattcttaaaaatcttaagacaatacttaatatggcaaatcttaacttcttaaactttgtaagaatgctaatcaacttagattggtataaagttgagttaaaaatcacaggatacatcatctcagctataagttttcatgagttgagtttttacaatcacttgaaatgcttagaataggaaatacgtataaattatttaacataaaatattgttacaaaacctctggagtgtcagtttctctggccagactttatgctgcagcacctttgcctgagttcttgtcctgcatccaggaagaattaggtacagaggcaagagtcaagaagattagttttccaatagttcagctcacctagttaactcctgttcacaatcttcaaagttatcagaaacctgcaattgagggttataatccattctttgcagagtttcaaaacaagacaacatttgtctatgaatgttaaaatgtcctagggtagtcacagtcaaaaacacaattgacaaagaaatttagtcacctctgtgatttacaatagcctaacacaataactctaattataactgatgacacaaactcagatatcagaactctagaaatcccctataattttggaacacacattcacagttttcactgaaatatgacctgaagatcaaatatcaccttatttcaacaatcctatataactaaacgtgtcaaatgatcctgtttacctctcctttggatactccaggggccctctgtagcatccaaaagttaggggttagcaaagacaattttgaagctgtaaaggctcaaaacacttaatgaacctctagtcatatctgttctctactcactaaatgctagtagcacctctcagttgtggctaagctgggaggatctcttgagcctagaagtttggggacgcagtgagctatgattatgccactgcactccagcctgggcaacaatgcaaaatcctgtctcaaaaacaaaaacaaaaaacaaattgcctatgctgtggttatctcacaattaataaaaaggaaaaaaaaagtatgcagtctttgtaggtccttggggtttgttggaactcagaaaacaataccccaaaataaagaccgcagaagccaaagtttttctctgatcttctcctgccctcctgtctctgagtcccattctccccggagtctagccatagaaatgagaattcctcttcctcaagttaggtcatagaaatcaaaacaccttttccccagagcccagccataaaacctaaaaatattactctaactttccctctgtttttctgtgtaaaaactggccataaagaaattatctgaactaccttatttgatcatagatcaccagaccgcattccagagaggatccagaaggaaggaatgctgcacagagaggcgaagaagaatctagacagacaggccttgctgggtttccctactctgtttattagcaatcctatttctacacggcggcccatactttgttgaatctaaaaaataaaaatggacaatttcccctgtacatgttaatacacattaataaattggatataaattggataatttattaatatacacattaataaattggatgcagccgggtgcaatggctcacgcctgtaatcccagcactttgggagctgaggcgggcagaccacgaggtcaagaccaccctagccgaaatggtgaaaccccgtctctattaaaaatacaaaagttagctgggcgtggtggcacatgcctgtagtcccagctactggggaggctgaggcaggagaattgcttgaactcgggaggcggaggttgcagtgagccgagattgcgccactgcactccagcctggtgacagagtgagactccgtctaaaaataataataataataataataataataataataataataaattggatgcattttatcctattaatcttcctcttgtcggtggttttcagcgactcttcagaggccaaagagtaagttttcccttagcccctacaggttcttatgtttaatttgttactctcatttaagacataattaaagtggcttctccatgaagattatttctgcatccattatttggtaagattggccgttttctcctttgatctctacttcacactgacccacataaaacatcactgcctgtttttttgttgttgttgtttggagacggagtcttgctctgttgcccaggctggagtgcagtggtgtgatctccgctcactgcaagctccgcctcccggattcacgccattctcctgcctcagcctcctgagcagctgggactacaggcacccaccaccaagcccggctaatttttgtatttttagtagatacggggtttcactttgttaaccaggatggtctcgatctcctgacctcgtgatcggcccgcctcagcctcccaaagtgctgggattacaggagtgagccactgcgcccggccccgtttttttttttggtttttgcatgtcttctcccttttactgtaaactatttccactaccagcgtagttatcatttctactgcttaataattgttttggggaagtgaatgcatcaacccacatgaatttcttgtctatttgacaatttattctctttaggaatagtattaactcctaaggtcctgggagccagtctctgtacttggctgctccagggtcctacttcagtttcccagcttctcagtactgtcactgtcaattgtgggtaataattatttttgtccaccaaaagactctgtatgtgaatgagttttgaaatctgctgagtaatacagtgtcaacccagttaatgatttgccgggcggcttgatcaggggctgtccaactaccggcattttgatttggagcgtcatctagtgtctgaaagcacaaacaacatcctacattgtaaatgcctttggctacagagattgaaaccaaagcaaacctatgttttgaattgttattcttcagcagttctgctagctttgaaaaatctaaaagttaaaaaaaagctttatatttcattttctgcctaaactctttaaaattgctagttgacaattagatattttcaatttaatgaaatttttttttagttcacagattaatacacaatgggggagggttcttattctgttggacttttacataacctccactttagtgcagtctgctttatggggtcttgtttgaggtgtgtgtgtgtttaagggaatgtggtttacaatcaaaatattgggttgctcttaggcacattgtaaagtcacacacctgtattcttattgatacataatgattaataacattattattacagcctgatcaccatcattattgatatatctaaataatgaattttataattttgcttcctgtcaggcaagagccaatttcagtgctaccatgtttgtatagcagtatttatgtctgtcatcctcagtcattttacttcacttgttcttagccaaacggccgagaagcgatggtcattttacttcaaaaatgaaaagaattaatatttttacgtttcccttaaagaccctatgtttaacctccactcctgggtaaaatggtctagtccctccttttcatatcatctctgatatcttttgcacagccactattacctaccgttttctagatccctattcttcaaacaccaccatgaaggtagagcctgtctgaattattttcttgtcccctgaactcagtacattgttaggcttcttgaagatgttgatcagttgtttgtggagtgaatgaatcagctagcatgatttttctagaccactgagacaagtgtctaagacacttgttccttcccatgttcttgcctgcctgtgcaatccatgcagtctcatggcttcccagtgcctcagaattatcccctgtcaaacaggcattataatttctgtccactgaaaaggacaaaaaactaagtgtatagctagaagttaaaaattaccggccaggtactgtggctcactcctgttattccaacattttgggaggctgaggcgggcagatcacctgaggtcaggaattcgataccaggctggctaacatggcgaccccgtctctatcaaaaatgtaaaagttagccaggtgtggtggctcgcacctgtggccccagctactcaggaggctgaggcaggaggatcgtttgagccctggaggttgaggctgcagaaaaataggaatatactctctttcaagagttcgtggttttgactgccacctagcgtacatcagaaaaaccgcatgacataggaaatgcctgtgacagaggggtaaggtgagagaggttgatgaagaatgtattgaaggagtgaaaacgcttccatccctctacttactaaatatattagttaagtagttggggcatattttaattcatgcattttgtagatagaaaaacaaaagttttattctgtttgatttagttgatactttaatatgtgtgtgtttaggatgcatgatttataatcagtctgcagcacttcttggagaagtctgaattctcattctccatttccttattggcaacgtgagaatgattacaatggtggttgtctcatagaatgcagggagtcagaatgaaaatagtccatataatgcctggtgcagaggaagggttcagttaactgtctgtattaatattactgataacagtcatgacaaacaaaagcttaacaacaacaccaccaacaacagttgcagaattgagccaccaatttgcacacaagattgtaggtaggatgttttagaaaagttattatttaatatatgtatatatttttgtacttaaaatatgtcagaggttgttctaagaactatttaaatgttaactccttaatcctcataatgacccatgaaacaggtaggcttattattgtctctttacatgtgagaacactgagacacgaaaaggtttattaactcacccaaagtcacacagctggtaaaacggcaaaattgaatttgaactcagacattccaggttccaagacagtctaattattcttttgactaatatactaagctgcctctgtatttttccttgattactttgtaaaagtatgaggaaaatataagtgcttcaagtaaccatgaaaaatataaacaatctatgtatcaactgaagcataattacaaatcctttgataagcaaacataataaaaatttgatatcaatcaaaactttcatgtaatgtaagcaggttgagatgaattctatagtaaaaaagtgcagagtgctggaataccatgctcctaatatattggctaggcacacctgcctgctatcaaaggtatgcacacaccttggatacagaaagttgggactgggtagttatgtgagtgtcatcagaattctttcccacttgggaaagaattgtccatcataagcttggatgatggacaaggagtgagctcccagaacagtgatgtggggatacatcctcacatcacagtgagaatgagtgttctagactgtttacacacctaccactcctaaatgcacacatataattgcttgcacacacacacatacacactcatctcttctctggtggtccagctctatctcttatcattaggcttcttggggctagtacctagggcctgtatcctttcagaggcagctaagggaagcacacataattagaaagaatgaaccagcttgttggatttggtctcttcgcatccagccctccaagttaaggagagtaccatctttcttagggtcaccaaaggaaaaaaaaaaaaaagaaagaaacagaaggatatcatacagcaaggatctaatgcaaatatgcctcaaatgagaggctactgtgtgctgatcccaatcccaggaactgtatgcacattatctaatttaatcctcactgtatttctgggagtattattcccattttacagagaaggaacttggcagggtaaccaagctcatgaatggagaaactgggattaaatataaagcttccttgctccagaactgctgtctttctgctcttccacactaccagctcagctgtgctctctacatgcaggcagttttacaagtttcagattagcctgggacttccagggttttgaatgggttagggaatggggaacttttgggtttactttccattttttcttcatacatatgtaatatataacataaatctatggtatatatgataaatatatggctacatatgaactatataatcacatatatgcattataaataaatattaattttataatattttaaaggttatcaaataaatattaatataaataattaaataattaatactcagctttgttttccaaagtgataaatgcctatatttagcaaaatattttttggaggcctgatagtttttaggagtgtaaagaagtcctgatatctaaatgtttaagaaccactattttaggctgttgtcttctgtcttattttcccagctagactggtaaatacttgaaggcaaacgtttagccagcacattaacattttatgtttttattcttttgtgctctcagtggctgtgtcttttctatcgatttctcacactgtatgatggttatatttgtctgtatctgtcccaccaggtataagttcttgagaggacacactgctaggctgatcttagtttttattatttctcctggtgtcctgtgcttaacaagtgctcattaagtgtgtaaaaacacagcacagtaaaaaactagacattaaaaaataatgtcaaccaatctattgaaatttgcatttccatgtttcttccaatatagtcattgtgtcaggttatgtacttattctgatgaagactattgcctaatatacgtttgcatcttgtgctttataactgccttcatatagacacagattgagaaggtgtaaaaatgtgcatatcctcacaattgacaaattcttatcctttgagggtaggtttgactttctgaaatgctttgacatcatttgaaagaagcttgaagaataagatagctgttaatgacccagtttcctatgtcacttatacaattataatggcaatttcaaaatgttaggtaaatatattttgcaatatattgttccttttgtaatactctctatgtatttatttatatttttaaattttatatttatgtatttatttttctggacagagtcttgctctgttgcccaggttagagtgaagtgttgtgatcatagctctctgcaacttcaaactgcttggcaaaagtgatcctcctgcctcagcctcatgagtagagtagcgggaactacaggcgcatgccactgcacccagctaatcactatttattatgctcctactgtgtgctttagtatattttctgttgttttctgcaacccattttgagggcgtgttagggaatacagatgcagtaactttcgtctcagcccttgaggtgaggaaatatttagcctcaggtttaatctaattgttggccatttgccttcaaagattgaaatatgagcaaaactgtggctctgggttatatgttaaaaaaaagtttatggggctgaagccaggcaacagacaagagcccctacaatcttatttaggctgaaaatatcctggagtccctgtattgttggtctcaagcagatagcaacactaacacttactctttgaggcaggcactgccagtggggtggctgttattattagcttcattaattggtgagtcaggaaaaaacagctttaaatcattcaaagttctggcctatacaggatttagtaatattaggttagctacatccaaaagatgacagaaccctactctaaggctgggcttggtggttcacacctataatctcaaaactttgggaggctgaggcaggaggatcacttggtgccaagagtttgagaccagcctgagcaacatagtgagacccctgtctctatcaaaaacaaagaactctaattggcatagtagaaggaaaaagtgaaagaaaaaccagctgtcaccctcattccttacacctgtcctaacaactcctctcactatcctttgaatatatcttggctgtttgagtctctctctagccccattactgctgtttggacttgacattttgctctgcatttttaacttttctaccagggtttccagaccctgaagagtgtggcatgaaacaaaactagtcaacctataatatttatgatgtgtgtgtaaataaaagaatacacaatatattgcattacaatattttaactgtgtcctcaatttgtttgtggctttcttgaggacatcagttttgggtgggacgaccacatccttaatctgaactttcccttggaggtcattcttttttttttgaaatagagtctcgctctgtcacccaggctggagtgcagtggcgcaatctcagctcactgcaacgtccgcctcctgggttcaagtgattctcctgcctcagccttccaagtagctgggattacagatgcacgccaccatgccgagctaatttttgtatttttagaagagacggaatttcaccatgttggtcaggctggtcttaaactcctgacctcatgatctgcccacctcagcctcctaaagtgctgggattacaggcgtgagccaccccgcccggccagaggtcattctaatagactttttttttgttgttgctcacaggcttgttcaatcttatttcaaaatttgagaaatacagtttccatggaacaccaaccagatatcaggttgctatggagttgatagtcaaaagctttgtatcttccagtttttcagaatggcttctaaaggttctgattcagagctcttaggcgaaattgaacaaccaagtgtcaaagtacaacattcaggaagttaaaaacatgactgacatatatgtactatatatagtgagcttgtgtatgtgtcaatgaatgatttaattcattaatgaaggaggaagcagaatcacaattaggtcaaaggaagatacgggagaataaaatatgtatttggtcagggaaaggatgtatactggaagaggaagggaaaatcagatataaagttgtttaatgacttattaggcaatacaataataacttttagggtcattttttctatattaagaattcatttccatctctatgacaaaatccttattaatttattaaacttctacaagtgaatgtttacttttagatagtctggacccaataaaatgtaaacattaagtcagagttactttcacgtaggacagtgttgtccaataaggtaccactagctacacgtgatcattgaccatttggactatagctagactgatttaaaatgttctaaaagtgtaaaatacacaccaggttctgaagatttatcatttaaaaaagaatgtcaactgtctttttttttagcttatttattatatgttgaagtgataatagtttagatatattaagttaaataaaatatcttaaaattaattttacttgtttcttttcattctttcaatgtgaccactagaaatctggaaagtatttatgtgattcacattctattttactgtctagtattgccttacatcatcaggtaccccataagtaggctttttagataattctctaatatagcttggaaggatatggagaaatatttttgcgttgcttttaagttttgcataactttttcaacacactttataaaggatctagaaaagggttggttacatgtttctctgtcttctggcctccaccatgttgccaggaggttggggacaagattctgggtggctggatgtcctaatggcttgaggtctggacttgagatttgcatataaagagatgtgattagattgagtcgactagaaaaatcatattagagaactgaatcacagcgattaaatttacatgtcgatttataaaccaggacaccaatttatagtgaaagaaggtccagttacctggtaatcaagacgtttcatagctattttcatgatggatatacttagctgagttttaaatgagaagggggttcattgcacatagaataagatctaagtgaaatgtttattttatttttttttttttgacatggagtcttgctctgttgcccaggctggagtgcaatgaggcaatctcggcttctggagtgcaatgaggcaatctcggcttctggagtgcaacgaggcaatctcggctcactgcaacctccacctcccgggttcaaatgattctcctgcctcagtttcctgagtagctgggattagagttgcctgccaccacgccaggctaatttttgtattttttttagtagagatggggtttcaccatgctggccaggctggtctcgaactcctgacctcaggcgatctgcccgcctcagcctcccaaagtgctaggattacaggcgtgagccaccaagcctggcctaagtgacatgttcttatattgttcctttctttctttttttttcgactgagtctcaccctgttgcacaggctggagtgcagtggcgtcatttcggctcattgcaacctctgcttcccgggttcaagcgattcccttgcctcagcctcctgagtgccaccacccccagctaatttttgtacttttagtagagatggtgtttcaccatgtcggctaggctgatctcaaactcctggcctcaggtgatccgcccccgagtctcccaaagtgctaggattacaggcgtgggccacggggcccagccttatattatttcttttactacaatatattagtatgatgcaggtgcttcaattgtttatacactttccataattttgtataattcttataccctgtcactctgaggaatagccggtctaagtgtttttccaccactgctaattcatccatcactaatctcattagactgttaattcccagaggacataagcacacaagcagacaatgtttacaaatgttggacaaatgttatttaataaaacaatggggtcacccttagtctaaaagatgtttcacttttcatttgtcattgaactcttatttgtaggttcccttttgactttcccacaatctaaggctgttctctttaacacatattttcatgaaaacatatatttgagcagaaattgttggggagttgtaatattacctttgtccctaaatatgaatctataattatatcaaatatatgggcagacaatttactttgcctttaatctcaagaaaaaaatagcaattacttggggtcggagagtaaaataagaagtagtgaaccttaaagtagcaaactttagaacagaatagtttcagaggggatgagaagaggtgatttttcagctcatcaacaacagatcttataataaattacatgttctggtacttttcttgtctttctgtgttaaattttgctatttaaaaaaataaatttcaaatacattgttcatcttaaaagtcaagagtgtgttttattaaagtcagttgctttatttgcaactcaaaagatatatttgagttcccaactggagattgtcctatatggtaacttgcgtaaggtatggttactgaaagtaacctacaattttcatgggctgaaattcatttctatattgcagcgtacaaaaataaataaataaaaaatgcttgttttctttgaaaacatattatctcagtgcctctaactgccaaatctattggcttttttgcaggcttaagggctctcccttgttcctttatgatctctatcttgagggccagacctcctgccttacacaactcagagggggacctcagagctctttaaaaagagcccaatttctcgcctgtagagaagtgaaaaggatgccccacccccatctatgaaaagagggatttgatagtttcaatgtcttcaaatcaaagatttaagtctgtagccccccaccaccccggaccctagcaaggctcatgaaccccctcccatcccgccctaattgctttggactggccgtggaatccttgtcccagtccacagttcctgtgcgactgcacgaagaattcacagaggacctgtgttacttcccttgtgaagaaacagaattatcatgaaaatttaggtggaaaccatttcgcttttttcttcaaaaataagggaagcatgtgcccaaccacccctgggaaaaagaaccttcaggggcaaaggagcgaacaggtaatttataagaaaaacagaaagtggtctctgactgccccagacttccttcggagttgggggaattggggacgcctggacgcgttgtttttgtgtttgtggaaaaaataaatgaagagcatgaagcccgaggcttctgagatcctttcctgaccaaacccaagtgatttggtgcggggaattttaatatttttccccttttgtgaggtggaacaaacacaacttgggagcagcgcagcggctcagagcctgccagccaggcgggcgaccagagcaccaatcagagcgcgcctgcgctctatatatacagcggccctgcccaggcgctgcttcatcggcgctttgccacttgtacccgagtttttgattctcaacatgtccgagactgctcctgccgctcccgctgccgcgcctcctgcggagaaggcccctgtaaagaagaaggcggccaaaaaggctgggggtacgcctcgtaaggcgtctggtcccccggtgtcagagctcatcaccaaggctgtggccgcctctaaagagcgtagcggagtttctctggctgctctgaaaaaagcgttggctgccgccggctatgatgtggagaaaaacaacagccgtatcaaacttggtctcaagagcctggtgagcaagggcactctggtgcaaacgaaaggcaccggtgcttctggctcctttaaactcaacaagaaggcagcctccggggaagccaagcccaaggttaaaaaggcgggcggaaccaaacctaagaagccagttggggcagccaagaagcccaagaaggcggctggcggcgcaactccgaagaagagcgctaagaaaacaccgaagaaagcgaagaagccggccgcggccactgtaaccaagaaagtggctaagagcccaaagaaggccaaggttgcgaagcccaagaaagctgccaaaagtgctgctaaggctgtgaagcccaaggccgctaagcccaaggttgtcaagcctaagaaggcggcgcccaagaagaaataggcgaacgcctacttctaaaacccaaaaggctcttttcagagccaccactgatctcaataaaagagctggataatttctttactatctgccttttcttgttctgccctgttacttaaggttagtcgtatgggagttactgaggtatcagacgaattgggtgacggggttggagagtggccgtggtgaggttacagcatttaaacctttattgcggcttctaggtccctgaccggaggcttttctcgctggcggatggttttgggatggcagtcccgccccaggcctgtgaacggcagaaaagaccgcaaaacaagagccagtttcttagtctaaagggatgtccggattggactaaaaaattttcaaaagtcccgccctgctcccgggttggtccgttcttctagtacatgactttcattctgtatttaattggatggtggaagacgttgcttattctgtgttttttgctttactgtgacttaaaagttttgcctcttttctctttatattaatgtctgggatttcggacgctttccatgttgttggtagtcaagttgatgtctcctggaggtagtggcaacatccagccctgggaggagagtgcgtgcaggtacctttgtcctacattcctctgctgttaatttctcattcctgtggcaacgaaggaatgcatttaaaaaacagccacaacagcggcaatagcccttcctccacccaaggcaatcgtggacctagggagttttttgtgccacataacatgtagccttccgctaaactgacaggtttgagcgtatcgattttgagcgtatcgaaagcacaacttttagccagccattttgtcctcgcatgactacggttgcttatcctgtttagacagacagcaacatttaaaaatcgaagttcctttaaacgtattttgtttggcagtccaaatgtttctatgcagaaaacagtatttgtactattaactatgaagagtgtatggataaatgggagacatttctaataaaggccttcgttaatggttccctctgtttgacatccatggtgcttctgaatacagaaagcctagcgtcttatattcgcttcttttaaaatctggtgggcacattttggtgagacctaaattatggggactggggcttctggagataagctgctcaattattctaccatctccacaatgattaatatagtgagttgatttgttagtgatagtgaccacggattcatcccaagaaagagaaaggggagggaggcaagcagagagacaggaagacagaggcagggaagaaggagaaaacattctcccatggtttaagtaattttgtgttgttaattttacattacaacacggtttaacatggtgaaccctctattttggtgtaaggtttaacatatggacatatttttcccaagaccatttatgaactttcatttctgcttcccccttcttcctcccgtgccaccctccacgctcctatcaattttggctgttttgtcataggctaatacgctataatttcatggacagttggactgtcttaggtttctcaggtttctattttgttcctttagtcattcccacaattcttaaggtagaattgtattgttttaaacattgtgttgtgtgctatcctcaatgctgagatgattatgtgacaaatggcaagtgttcaactaatacctaaatctgtagtatcttatcaagcctaatgctacttcacaatgcctactccattcacctcactttatctcattactggcattctgtcatctcacatcatcacaagtaaaacggtaagctattttgagagagatcacagtcatataatttatatttatatttatttatttatttatgagacggagtttccctctgtcacccaggctggagtgctgtggcacgttctcggctcactgcaacctccgcctcacgggttcaagcgattctcctgcctccgcctcccgagtagctgagattacaggggcctgccaccatgcccggctaatttttgtatttttagtagagacggggtttcactaagttggccaggctggtctcgaactcctgacctcaggttatccgcccacctcatcctgccaaagtgcttagattacaggcgtgaaccaccgttcacagactcaaatcatttttattacagtatattgttataattgttgttttattatcagttattgctaatctcttacagtgcctgatttataaattaaattcatcattgccatgtgtatatagaaaaaaacagtgtatatacggttcagtactatctgtggtttcaggcatccactgggggtgcagtttattaaacatgcatttacattagtctcccctttgggagactaattaactgagatgttgtaacgtgactttaatagcagatagagctaattttctctcattactcttctttttcagaattttcctggttattccattttttatttttccatatgtatattaagatctcttccacctcctcctgtttctccatctcaacatcaaacaattaaaaaaaaaaaaaaggctgggcgcggtggctcacgcctataatcccagctctttgggaggcctaggcgggtggatcacgaggtcaggagttcaagaccagcctcgccaagatggtgaaatcccgtctctactaaaagtataaaaattagccaaccatggtggcaggcgcctgtaatcccggctactcgggaggctgaggcagagaattgcttgaacctgggaggcggaggttgcagtgaggcgagaccttgcactccagcctgggtgacacagcgagactccgtcataaaaaaaaaaagccggaagcagtggctcacgcctgtaattccagcactttgggaggctgagtcaggcagattacctgaggtcaggagttcaggaccagcctggccatgaaaatacagcctggccatgaaaacacacaataaattagctgggcgtggtgtcacacacctgtaatcctagctactcgggaggctgagacaggagaatcacttgaacccaggaggcagaggttgcagtgagttaagatgacgccactgcactccatctgggcgacagagccagactctctctcaaaaaactaaataaataaaaataaagttatggtacattgaacttctgtgttcctttctcccttagatactttcatggctacccatttaattgatgttcttatcatctccaagagttagtcaggagaggaatcaacccaagcaaaaatagctgattttctaattttccttcaatgccctttggggtcttaatccatttgatttatgtactttcaattaatcctaacctcgaatgtcttctgcaaacatgtttccacagatgaaactcgtcaaatgaaacacattcctttaatttatagagttaaaaattagaaaaattttcaattctatttggcctttagattcagtcttgcatatgttttctcaattttgttcatgctctttagttttgttttattccatcacaattgttcacatagcttactggcttaggtctaatgaaccattcatttggaaattaaaattggccattttaagatgaaaaagattcttgcctcaattttacttagtttttgaaactgtcaatgaggacacatgtttttctgtactcttagattcactaagtagtgtcttgcaaatttaactgacaaaggacagattaacatgcgaaaaaaagagcatgcaattttattagtatattacatgcacagagttcccaaagaaaaaaaaattgaaaccttaaaaacgcggttagactcacagacttatacaccattccaacaaaggaaagggagtttgcacttcatgggatgacgaatttgggaatgtgacaaggaaataaatacatgggcaataaaaaccatggaagataaaatgaaagatagaaataattgtagtaaggtttgtttttgcagagtcatctcagtgccaaccttccatatctagtgataagaattgctctctttttcctggtatagcagttggggacacttttacaagggaaatttctgtcaccttcacaaagggaaatttgggtaaagagaagacagagacctcttcctacacctgttgattttcaattgccttcagctgaaaataacttttatgccaaagtagaataatttgggggtgacatcctgatattcttcaaaacttatatttaatttcacattagtaattatatcatttttgatttttaaattagttttataaaataattttgaaaaacggtaataatattcaaataattccagaaacactgctgataagccaaaaacatcaatgaatattgcataaacaactgataattcaaccatgaaaatttatgacattgttcttgtgtgataaaactatgagtaacataaaaactagaggctacttgtaatgcattattccaaactttctgttttttatttatttatttatttattttgagacatagtctctctctgtcacccaggttggagtgcaatggcgtgatcttggttcactgcagcctccacttccccggttcaagcaattctcctgcctcagcctcctgagtaactgggattacaggcacctgacaccaaacccggctaatttttttgtatttttagtagagacggggtttcgccatgtttgccaggctagtctcgaactcctgacctcagtgatccacctacctcggcctcccaaagtgctaggattacaggcgtgagccaccatgcccggcgcattattccaaactttcatacacagtgctatcatggctacaaattgaagtatcatattatacactcctaggcaaagctctggatattttggctatataagcctgagggaaatgtagtaaggacattgtggttgaaattcataccagagatgaacaggcccagtgcaagacagaattacatcactaaaggatatcagaagagaatagggatttagggtacagtggcaacaacagttttgggaactagcattttttgagcacttatttacaatatgccaagcactgttgctgattactctatatttattttcaaacacattcttgtcacagcactttgaagtaagtgccattgtcattcccacttcagggtgaaggactaaagcttggtgtcattaaggatgtagctagttagctgtgtgtgtgtgtgtgtgtgtgtgtgcatttttttttaaatttaaagtcaataaatttttatttgaagaatttcacatcaaggtaaactttgttcctctaaagagctggagtcaaaatgtatcttcaaaagattcatcttcaagttagcccttcttaatagaactgatgcttaatccacagttgtcagcccacagttcttttattttgacttttttttttttttttttttgagacggagtctctcactgtcacccaggctgctgggcagtggcgtgatctcggctcgctgcaacctctgcctcccgggttcaagtgattctcctgcctcagcctccttagtagctgggaccacaggcgcatgccatcgtgctcggctaatttttgtatttttattagagacagggtttcactatgttggccaggctgatctcaaactcctgacctcatgatccgcctgccttggcctctcaaagtgctgggattacaggtgtgagccactgcacccggccttattttgccttctttaatctccatttgaacatacacatactgatgaaaactacaacattcttcaccaaaaatctttgggatttaatttcttcaaccactttactttggggtcattttaagattaggtgtatctgcctggttctcaatttgacaccctttctctctaaacatgaatgagttccaatcatatttattcctaagctatcacactcaaatatactacagatctgtggaatatgccaaaagttaaggtgaaaaattaaattattaggtatttcatagttttgctagtttttgatctgtgagtgaatataactatcctctatgtcctggcactgttcctcagaaacatagggtccacatatgtaattttaaattttttaataggcacattttaaaaagtgaaaaaagaaatctattttaatgatttgaatccagtgtaaccaaaaattgtttcaacaaggtatctaatattaaaatattgagtttttactttgttattttactagttctttgaaatctggtgtgtattttacacttaaagcacatcacagtttggagtagccacatttccaatgcttaatactcacatatggttagtggcaactatcttggacaggacagcttttatactctgggaagacacaagcaaatacttgctctgcagcagaatccagatgttttccaagaaaacactttttctgacctgttcctgaaacccaggtagtgtctctaatactttatattttattggtttgtcctattgtaaccacccaacgggctctccttgtccacttcctagacagagctgatttatcaagacaggggaattgcaataaggagccagcgctacaggagactagagttttattattactcaaatcagtctccttgagaatttggggaccaaagtttttaaggataatttgattgtaggggaccagtgagtcgggagtgctgcttggttgggtcagagatgaaattatagggagcctaagctgtcctcttgtgctaaatcagttcctgggagtggtggggtgggggactcaagaccagataatccagtttatctatatgggtggtgccagctaatccattgtgttcagggtctgcaaaatagctcaagcattgatcttaggttttaaaatagtgattttatccccaggagcaatttgaggtttagaatcttgtagcttccagctgcatgactcctaaaccataatttataatcttgtggctaatttgttagtcctgcaaaagcagtctggtccccaggcaggaaaggggtttgtttctgaaagggctgttattgtttttgtttaaaagcaaaagtataaactaagctcctcccaaagttagttaatcccaaactcaggaatgaaaaggacagcttggagtttagacgttagatggagtcggttaggtaagatctctttcactgtaataattttctcagttatgatttttgcaaaggcagtttcactgtccacttcacctcacatcaggcctctgactagaggattccaacaatacttaggccaggacaccaccatgtctccttatccaccctgagggagtccaatttctgaaacaaaggaaactatatatgatagtatgaaactatatatgagaaggaaattatatatgataatcaattttagggttatcttattgattagaagatattaaagtgtgacactgcctggcaatgatatctgctggtagtaagaatttggcgaatttagtgaaattcctgaggctgaacctccacttctgtaaaatggagacagtgagataatttgccttacaatgctgaagtaagaattttacacaataattcagaccaaccacttcatgtggtacttggcccgtggaagactatcaatgacagttagtttatagtttatactattaatgaatcctttgtttcattgttatttccttctacacgttggcctctctaaaagaaggtaatattcaatacaaataaagttaaaacagcttgcagagttgtcccagggaactcacttaaccactgaagtgttcaaattgcttaaggttgactttatattctcctgactaacctttctccttctggtatttcttctgagaacagcaccaccatccaaagcatcatgcaaacagtggtcatcccagaccagtaattctcaactcacagggtgctcctgcagagatgtatttgaatagagtggtaggatgctgaagaaggccacgtaaaatttggccagtgatctggggcagatttatcctgaagctaatgaaacacaagtgtaagggcctgtacttccaaggtgcagagaggggccctacaaatgtgttagtttgtctctctctctctctctgattttaaaatttgcagtattaaggtactttaatcacggatggttcaggctgctattttcactcaatcctcctttttattaaaatcaccattgtctgattatgttagaatcctgatgaaaatatttggaatttgagtaagagaaagtttagttgaagatgtatctagtatggggataataagttacgtgatttgcatatgtgatcatgtgtacttcattcgttgccagccaatctgacgtaagaatggcttcaaggaggccgggcgcggtggctcacgcctgtaatcctagcactttgggaggccgagacgggcggatcacgaggtcaggagatcgagaccatcttggctaacacggtgaaaccccgtttctactaaaaatacaaaaaattagccgggcgtgttggcgggcgcctgtagtcccagctacttgggaggctgaggcaggagaatggcatgaacctgggaggcggagcttgcagtgagccgagattgcgccactgcactccaacctgggagacacagcgagactccgtctcaaaaaaaaaaaaaaaagaatggcttcaaggaatgttcctactgctcactggaataactcacctaaattcctggcaagatgcaggtctagataaaatgttatgacatctaagtattcaaaacacattcccagcactgagagtgagtgtctagtggagagtagaaacgtatagagccagaagctagtctggaaagaattcttacaaagtttacaacttacatgtgaaaggagcttaacagaggattttccaaatttgaaaacaatcctaaaaacttacttgacattaccaataatgtgttttgaaactgaaatacttctaagttatgaagaaaacatattatcatcagccaccctggaggaaagattgaattctatttccattacctatagacaacattacaaaataatttcgatctgaagatggaatcagagtattcagtcaaaactacaggaaaatatacttggtagtgtcatattcagaagttaataaaatatgctattttctgaattttgtgatggctgttgttttgtcagcttttataaaattggaatttgattttattttcccattataaatttatatttacagtctgcagtacttttgcatttttaattttacattatagtttttaatagttaacaagttgtaaaaggtttgatccccagaaaaccttgatctaccccatcagttaagtatactaatatatttagaaaatggatgaaatcagcatttgaatatttttaaatatttattaaaagaggacatgggtaaaagagctttgcagttgccacccttcattctcaaattccctggataaggatgaccgcataatctttggatggtcatacgcaagtcttgtgtacttgttacataaatctatttagtggacttttggcagtgtgtactgaggccagtttcttccacctgagctctgactccacctccagcagcccaaaaccaatactgaattttggggtcagctattgtttttgtggacttaggtaactacacacacattgtctttatgatagctttaataatactgccatcagaactaaaattgtcacgtggattaaaaggagtgacggtggtgtccccaggagcctttcaatatgtaagtatttacacatatacatgctaaaaagacccctaggaattttttaacaagggcaaaacagtaactcagcttgttttctcgcagtaaaaccggttgaaaaggcctgatagacttgtctgcagttacaaaacttgtgtgtagttatcacctttatatctcctggaaactaacatagacaaccgaatgggttacaactgtttttaagtgaaattgtgagtggctctgaaaagagccttttcaatgaggaagaaacgggcagacttatgccctttccccacggatgcgacgtgccagctggatatctttgggcatgatggtgacgcgtttagcgtgaatagcgcacagattggtgtcttcgaagagtcccaccaggtaggcctcacaagcctcctgcagcgccatcaccgcagagctctggaaacgcaggtcggttttgaagtcctgggcgatttctcgcaccaggcgctggaacggcagcttccggatcagcagctcggtggacttctggtagcgacggatttcgcgcaaggccacggtgcccgggcggtagcgatgaggtttcttcacgccaccggtggccggagcgctcttacgggctgctttagtagcaagctgcttgcgcggagctttgccgccggtagacttgcgagctgtttgcttcgtacgagccatttgcaatgagagcacacacaaaagtgtagtgaactgagagcaagtggcctttaaatatagtgagaaacattctgattggtcctgtaatatttcaaaagtcccgcgcgataaaatcattggctgaagagtgaccagactgattggttcattactagacaatcttattggatgagttgccccaccgcccatcctgtccttttcgtttcagttatctgcagcgacaaattgtctaaaattctagttcatccagtcccaaagaacagagtgtataacaaggtatctaaggatttttaaaatgtaaattccgattcagtaagtttgagtgggacttgaaattctgcattcctgacagtctcgcaagttatcaatgctggtgaacactcactaaaccaccagaaacgttcagactcatgtcgggaaataacgcttatattcagagaatgagattccatgctattttgttactggcgaacagcaagtttccttgccctttgttttctaagtccaagtcacattcccaccctgcctgttctcaaaatgtcttattttggttggccttaagtttcactttgtatactctaaaatgtactttctaaaggaaggtgttattttctcgaaacttaactttttaacaccattaggctaggggggcggtggctcacgcctgtaatcccagcattttgggagggcgagatgggacgatcactagaggccaggagttcaagacaaccctggctaaaatggtgaaaccccgtctcgcataaaaatacaaaaactagctgggcgcggtagcagacgcctgtaatcccaagtacacaggaggctgaggcatgagaaccgcgtgaagcggcggggtggaggttgcagtaagccgatatcgcgccgctgcactccagcctgggtgacagaactagactgtctcaaaacaaaccaatccaaacgaaaagcaaaaaataccctaacagaagcaagttatcatcctttcttgtgtaactatggacggctctgaaaaatgccgtttcaagtgtaagctacgttttctgatttgagtgtttacttgaccttggccttatcgtggctctgttattttggcaacaggacggcctgaatattggacaggacgcctccctgagcaatagtgacgttgcccagctgcttgttgacctcctcgtcgtttcggatggccagctgcaggtggcgggggatgatgctgcgggtcttgtcacgtatggcgctgcccaccagttctaagatctcggcggccaggtattgtaagtacactggcgcaccggctccgaccggctcaaaataattgccctttcgaaaaagatgacggactctgccctattgggaactgcaagcccggtagcgacgaacaagtttttgctttagctccattttccacgtccgcaaatagcgacctatgaaagcagcggaaaactgtgaaagacaagcaagctggaatggcgcctgaacaaatccttttatacaaactgcaaggctgcaataggaagctatcctattggtcaattatgtttggtgctttatccaatagaaaaagataacataaattccatatttgcataaaccccacccctcagtgaaaccgtgtttcttttgtccaatcagaagtgaggaatcttaaaccgtcatttgaatctcaggactataaatacatgggctctgaactgttctctgtactactctgtagtggagagtgttagtagcttttctattctgtttaggaatagcaatgcctgaaccctctaagtctgctccagcccctaaaaagggttctaagaaggctatcactaaggcgcagaagaaggatggtaagaagcgtaagcgcagccgcaaggagagctattctatctatgtgtacaaggttctgaagcaggtccaccccgacaccggcatctcatccaaggccatggggatcatgaattccttcgtcaacgacatcttcgagcgcatcgcgggcgaggcttctcgcctggctcactacaataagcgctcgaccatcacctccagggagattcagacggctgtgcgcctgctgctgcctggggagctggctaagcatgctgtgtccgagggcactaaggcagttaccaagtacactagctctaaataagtgcttatgtaagcacttccaaacccaaaggctcttttcagagccacctactttgtcacaaggagagctataaccacaatttcttaaggtggtgctgctgctattctgtttcagttctagaggatcaactggaatgttagcgaagacaagttttagagccaaggttaacttggacggggccgtgcgcggtgcctcttgcctttaatcccggcaatttgggaggccgaggcgggcggatcacgaggtcaggagatggagaccatcctgcttaacacgatgaaaccccgtctctactaaaaatacaaaataattagctgggcgtgatggtgggcgcctgtagtcccagctactcgggaggctgaggcaggagaatggcgtgaacgcgggaggcggagcttgcagtgagccgagatcgcgccatggcactccagcctgggtgacagagcgagactccgtctcaaaaaaaaaaaaaaaaaaaaattaaaaaaatatgaagttttgaagcagaaattattttgtcgtatgttctttcataaattttttgcctgcctgccttcttcctttgttacagaactccaacacttacccaaaggtagctgttgggtcagggtttctgtactatagtcccttctgtggtggccagaaatatgttacaggaaagaggtccccatccagaccccaagagagggttcttggatcccgcgcaagaaagagttcagggtgagtccgcagtgcaaagtaaatgcaagtttactaagaaagtaaagtggtgaaacgacaactactccatagacggagcaggacattcccgaaagtaagaggaggaaggcatccaccctaggtacaatacttgtatatatggggagatgtgctctgctacaagtttgtgataaaggattaattttcttagttactatattttgcaagaatcaacattattatctttaaacaaaattaagaatgcctttgttctccagatatagggatatctggacactcctaagtctgagtctgtttagtaaacattatttatttgttcccttaaccgtaaacatctagaagctaggaatgactgactttctgggaatgcagcccagaaagtctcagcctcattttcctagccctcactcaaaatggagttactctggttcaagtaactctgacacttttcttctctttttttcttcttttttccttcctttattttttattttttatttttgaaataagaaatcaagaatacttgatgtttcatctaaaacaatacccataattgataagccaaaacaaaaacctaggtcttctaactcaaaactaggatgttttgctgtctctgctgatactcggctgatcgttaataggtaattaacaaacaagccttgctatgtccccctcagtttattaccattagatcatatgcctactgtcaatcatattaatccacaactatgcatttcacaaaacttgccataaaaattcacaggtttcccgcttccctcgagttttcatttccgaagggtcccatgtaatataaaacttatattaaatacatttgtatgcttttctcttgctaatctttttttttgttttttgagactgagccttgctctgtcacccaggctggagtgcaatggcgcgatctcggctcactgcaacctccgcttcccaggttcaagcgattctactgcctcgccctcccgagtagctgggaccacagatacgtgccaccatgccccgctaatttttgtatttttagtagagacagggtttcaccgtgttggccaggatgttctcaatctccttacctcgtgatccgcccgcctcgtcctgccaaagtgctcggattacagacgtgagccactgcacccgaccaatctgtctttttgtagaggggcctcaagcatgaacttactgatgggtgagaaaaacagaattttcttttcccctacaatataaacattaattgtaatgttatcattcaggacattttggtgaccaatcttacagaaattttatcttgtgcaagtctatgcaaaccaatatgtaaatcttctataagtgagattgtatttcacttttctagtatccttttaaattaataaaagagattctaatgattattttcattactgcatttcattgtagggaagtagataattgccctttattcactgaccttcgctttttaaaaatttaaaccatgttaccatgaaaatgcttttcagtatttctctacacacaagattgctgtaagggcaaaaatagagataggaatcatgcatccattgatatacatattttgatttttaatacatgttaccaagttgcctcctgaaggtctgtttacactctcaccaacagggtgttttttcctgacttccacaaatgctcttgaacagtgggtgtgttagtctgttcaaattgccgacatgaacaattaaatctcattgttgtttttatttttaagacaattattgtttgagactgcacattttgataataacatttcttctattatggtttgattactcatgattcttgcccattttcttttgggatgttgccttatgtacattattttaaatagatagctccatgtattaaaagattattaagtttgagggcttatgatatgtcagttacatttctaagattttttttttttttttttttgagacggagtttcacacttgttgcccaggctggagtgcaatggtgcgatctcggctcaccgcaacctccgcctccagggttcaagcaattctcctgcctcagcctccccagtaattgggactactggcaagcgccaccacgcctggctaattttgtatttttattagagatgaggtttctccatgttggtcagactggtctcgaactgccgacctcaggtgatccacccgcctcggcctcccaaagtgctgggattacaggtatgagccactgggcccggccacatttctaaattctttataagtataaattcattcaatcttcaccaaaactcaatgaagtgtgagtactattattatcattgttttacagatcaaaacaagtaatacagtcacttactgagttctatacacctggtaatttttttgtttcgttgttctatcaattattggggaaggggtgttgaaatctctacctttaaatcatgtatgtgtctatttctcctttcggttctatcaggttttgctacacatattttgcagttctgttatttggtgcatatacatttagaattgcttgtttttcgtattggattgaccctgttatcattatgtaatatccctgtctgttcctagtaattttctttgctctgaaatatacttatctgatatatcatccaaaagaccaccaggatggctaaagagtagaaaggagagatttactggcaatactaatttgcaagccaggaagagatggtcccagaacctgccaaaattactctctctttggggagaaggagcaggttggttatttttatgcctcataggctatatattacacaatagagtcatacatatttagcacgtttggggggacagctatatatattatgaggggtgccaagtgcattcacaatggataaacacgtgtaatatacctcccatgttcacttcgaggttaaattttggttaaaatgaggtagaatttaggtctttacatcacaaggtgaactataggaacaaagtttacgtgctgcctctagcagctggctgaaaatggcttaaggtctacaattacgtgtaagaatagaatgtgtgtcaaggcggtcctctgtccaatcagagttgtagtggactggactgtaaatcagagttaggagggcttctgatagctcctatagttaaggaatttagcaagtgtgagttttttggtagtctttggaatttaggaatttgccatgccagccaagccatgaatgctctaccagtaggtaactttgtttgcttaatcttagagtctgtcttagttggtataggggcatctattttggtctttcagatcccagatattattaatacagatactcttgcagttttgggctgatgtttatatggcttatcttttttgcagcctttaatttcaacctgcgttatgtttatatttgaagtgagattcttgcagacagtgtacagttgttgtttttttttttttgagatggaatttcactcttgttgtccaggctggggtgcagtggcacagtctcagctcactgcaacctccgcctcctgggttcaagggattctcctgcctcagcctcttgagcagctgggattgcagccatgcgccaccacacccggctaatttttgtatttttagtagagacaggattcaccatgttgcccaggctggtctcgaactcctgacctcaagtgatccgccagcctcggcctaccaaagtgctgggattacaggtgtgagacctcgcgcccagccaaactgtttttttatgggtgtatttataccacacacatttaatgcaattattgatatcttagggcttaagttcatgaagggtagtgtgggaaccatagtctcttggcccactaaatgtttgccagaaatcactgacaaggcagattgattaataggtgaaaaggcattttacctattgtttaacgtgtctatgtgggagcattcagaattaattacctaacttcccaatgagttatagatgcttatataccatttttagatcacagaaagaattggggcttagattctggtaaaacaggttatgggaggcaaaagaggtttggcttgcaaaggtggccttgttaggtaggtgaagcctccctcagaaagaacagatggtaaatgtttcttttatgatttttaagtgtcagactctcagtctctcctggatctggggaaaggtatagaaaggtgaggaggcatggctgcattaatggagattctctacagatgtaaaatttttcccatttaaggcagctttgcaagcccatttctgcctgctggccaagcagcagccatttcaaaatatgtcaaagaaatatattttggggtaaaatattttgatttcctttagactggtggccttataagaaaaggaagagacacctgagctgacacacatacccttgctctctcaacatgttatgatgcagtaagaaggccctcaccagatactaattccatgcccttagcttcccaggttctagaacagtaggaaataaatttcttttctttaaaagttagccagtctgtggtattctgttatagtatcacaaaatggactaagtaactatattatgatcatcttacatgactgatccctcctacatcatacacatacacaggccacatttggaacattgttagaggttcctctgcccagtacaaatgtactacaaattatatatgtatttttaaatttttgagtatcttcaatagtatattttcgttaacttttgtagtcaaaatgtcattataacatgtattcaatatgcataattattagtcagatgttttacattctttcttcatactaagtgatatggtttggatatttgtcccctctaaatctcatgttgaaatgtaatctccaatgttggaagtgaagcctggtgaaaggtttttggatcgtgagggtgaacccctcatgaagcgcactcttcagggtaatcaatgggttctcactttgagttcacaagagatctggttctttaaaagagtgtgacacctcccccatctctctcgctcagctctcaccatatgatatgcctactccctcttcaccttccaccatgattggaagtttcctgaggacttgccagtagcagatgcctgcaccacacctcctgtacagcctgcacaaccgtgagccaaaaaaaattacttttctttataaattagtcagtttcagggattcccttatagtaatgcaagaacgaactaacacactaagtctatttcatatttacagaatagctcaatctgaagtaccctttttcaacttcacagtagctacttgtagctagtgggcactgatttggagcgtgttcaagggtgaattgtattatgcaattaacagattttttttattgttttcgcaaaccacgaggcatagattgtcttactttctctgctcctggtgttggagttgttattgggaaacaacttattttcctcttatatttatatggaataaataacccccaatatttccctccccaatatctgccttttgtatgttttttgaaggcaagtgcctagaatttactgtttttgaagcacttactgaaaggattgccatcaagttgttttgctaatagtacatgccaggcgcttgttggtttgcttaattcaaggtaacttggatgagaagaagagtttttctcatccatggctcagtggagtatagattactgatattgtgactggatgtactcctgctttctagtctgagtttttgaagctacccttaatcttggtttcaattttatctagccctgtacatatccaaggctctttccaaaatggtctacgatttgtttaggaagttagaatagctgtactttctgaaccacggttcctgacattttctggacttcaaacacatccagcattttatcgaagtatttatccttcctacttggctggcttcttccttgccttcaggtctgaattcaaatgacattctcctgatgaaactttccatccttatttctattcttttttcttatcccctttctttatttttctccacagcactcatcacttatctctacattttcattatgtatttaccttattgtgcacctcccactacaagacaagtagcaccgtaaggaaacaggttgtctgctttttcactgctatgctccctgcacctagaacactctctggcacttagcaggttttcagtaaatatatgctgaactaataatgctggatatacatctccctcatgaactctctaaatccttctaatttacattgatcaatcttcttttccatgtgcttttgtatgatttattgctcaaaatctttattttatatgcagaacgtgcactgctatttaatcttcatgtacgtaagtcctcccttctctgagtataatctcttcagggcactatctgagataactttttaacatctccatcatgaatcttgtaccttttcaaagaaaatgagccagtgattactgatgtttacggctattgttgagggtgaagatcattataattttgaaaagggaagttgaatattgtgaagggaaagataacactagagtcagaagacttgggagaaggcaaaaaacaaactaaaaatgagcacttttagtctcctgacagtttctctgaatcaaatccatagttctgtgacagcgttggcttagaagcagattttttttttttttttttttgaaatggagtttcgctcttgcccaggctggagtgcagtggcacgatctcggctcactgcaacctctgtctccagggttcaagcgattctcctgcttcagcctatggagtagctgggattacaggctcccacaaccacgcccagctaattttttgtatttttagtgaagactggggtttcaccatgttggccaggctggttacgaactcctgttctcaagtgatctgcccgccttggcctcccaaagtgttgggattacaggcatcagccaccgtgcccagccaggagcagatttttttacactcatgtttctttttccttctgtcatcctgtttcagtataagcagaccacagatagaagtagtagatacctcagaaattcctggaataattaatccacgttcatctgtactccatctgctcctatctcatggaatataaaaggaaaaacaccaagatttccctaggcaatctgtcttgattttaggttcctcaacaggagagccagacaatggctgtaataatattgtcccggccaaggaaaaacttcccctttgccctcccaaggtttatggaaaattactggcaaaacacagattaactggagaaaaggcatatatatttatttcatcacaattttacaggagattttagaattaagactgaaagatacaggggaaattgcccatttttatgcttaggttcaacaagataaacagctgtatagggtacgatctaatgctaacagactgagtggggaagccccgcaaggcttgtctgtcaagattcttcttgacctctcagtgcagcatttcttccttctggttataggacaagactctcttttagaatggggggtcttatgacctacaggcaaacaaggtaggttagagtaatacttttaggttttatggctggttctagggaaaaggagttctggtttgtatggcctaccttgaggaggaattctggtttctatggctagactttggggagaatgggacttacagacaggaaggcagaaggtggtcagtgaaacacttttataatcataatcccattttgagtatttctgtgttatggaatgtttgttctctcatttcctgaaagattccagagactcctcattcagtgttgtgaaaaagttcaggaaatgcaactcaaaaatgtgccactttgttacgctgatttctttgaactgagggcacctaggaaacagtaaattcaaggaagggctttcgctgaactctaatcaaaaatttgaaaattaaaaaaaaattcaaaaaggaatttagttgttaagattcacttccctggggaatctcatcaaccagagaagattaactgtatcacaggagaggagactggtggttaacaccatctaaacagactttgtcacagctgtcacctattctttgaaacacccatttatttttctccaaaatcatatactctcccctaagttgcctacatcccccttctttctcccttatgaatcaagagagcttataagcttctacagttcactgggatttggggtattcgcttttcttccctcccactccccctcccctttttttgtctttgagacacagtcttctggctctgtcgcccacgctggagtgtggtggctctatgtgaactcactgcaacctcctcctctcgggttcaagcgatcctcccacctcagcttctcgagtaactggaactacaggcgtgcactaccaagcccggcttttttttttctttttctcccccgtttcttttttggttattttactggagacagggtttctccatgttgtccacgctggtctcgaacgcctgacccgccgtcctcggcctcccaaagtgctggtattacgggcatgagccactgcgcccgatttgaaggacctcttaaatatctatttagaaattggtcggagtccactcctttccaaaaacatgagtcacaatccgggaaaagcacgagcggctgaaagtcaaaataaccagaacaaaacctccactcatgcttaaaaaaggtattttgacaaaatcctaattcggccaattattattagtattcaagtcgaaggctcgtcaagccagactggggattgggtcaaacataaaccttacaccagacggaaggattacatgcaaatgaaggatgcagattctgatttcccattgggtatttgacattagccaatgggagaattcctcacagcctacctccagtcagtataaatacttctctgccttgcgttctaatgtagtttcattacattttcttgtggcgattttcccttatcagaagtagttatgtctggtcgcggcaaacaaggcggtaaagctcgcgccaaggctaagactcggtcttctcgtgcaggtttgcagtttcctgtgggccgagtgcaccgcctgctccgcaaaggcaactactccgagcgcgtcggggctggcgcgccggtgtatctcgcggcggtgcttgagtacctgaccgccgagatcctggagctggcgggcaatgcggcccgcgacaacaagaagacccgcatcatcccgcgccacctgcaattggccatccgcaatgacgaggagcttaataaactcttggggcgtgtgaccatcgcgcagggtggcgttttgcctaatattcaggcggtgctgctgcctaagaaaactgagagccatcataaggccaagggaaagtgaagagttaacgcttcatgcactgctgtttttctgtcagcagacaaaatcagcctaacagcaaaggctcttttcagagccacctacgacttccattaaatgagctgttgtgctttggattatgccgcccataaagatgtttttgaggtgtttttaatggctttgagtgtggcacttttagtaatttgtcctgcagaaattagatccatagaaacctcaggaattctaggtatgtgggagaagtgccatgcagcacaaaacatgtttacaggggtgattcgcgttaagtttcacacacagcagttactacattttagaggaaggaaattatacccatgagtgcattcctaactatcttgaatggaagtgttaaaacccgcatgccccacacaagtttgaatatgtcataccatttgctgtagcaattaatggcatacacaattgagagcacacacattaccactgaacatttgagtatgtatttcccaaaatgagcttttttccagtttggggatgttttgctttgttttggggtggagtctccctctcgcccaagctgcagtgcagcggcgtgataacagctcactgtaacctcgaactcgggctcaagcgatcctcttgacagccttctgagtagctgggattacaggcgagagccgccacgcccggctaagagcatttttctaattgcccacacttcttatgcgacacccagaaaaatacaattttaaataaagcgcatatgcaaatttccctaatcgtctccaatattctctgatttcttttttatattttaactagaaacaattggaggtttccgcgttgctttgtgtggttgtaaattttaagacttcaggaaacttttccagtacaagacttgtccacagtggatatagcagctaaggggttaacaaaatgacgtcagagtagctacggtaatgggcaggagcctctcttaatctgcaaccaggcacagagatggaccaatccaagaagggcgcggggatttttgaattttcttgggtccaatagttggtggtctgactctataaaagaagagtagctctttcctttcctccacagacgtctctgcaggcaagcttttctgtggttttgccatggctcgtactaaacagacagctcggaaatccaccggcggtaaagcgccacgcaagcagctggctaccaaggctgctcgcaagagcgcgccggctaccggcggcgtgaaaaagcctcaccgttaccgcccgggcactgtggctctgcgcgagatccgccgctaccaaaagtcgaccgagttgctgattcggaagctgccgttccagcgcctggtgcgagaaatcgcccaagacttcaagaccgatcttcgcttccagagctctgcggtgatggcgctgcaggaggcttgtgaggcctacttggtagggctctttgaggacacaaacctttgcgccatccatgctaagcgagtgactattatgcccaaagacatccagctcgctcgccgcattcgcggagaaagagcgtaaatgtaaagtcactttttcatcagtcttaaaacccaaaggctcttttcagagccacccacttattccaacgaaagtagctgtgataattttttgttgtcttaacagaacaaatttctaaggacccccccggaaagcattagactatggtcttaaagttgattaacagaaataacggtttggtcagtcttgcagtgtaggttatttctgaccttattaaggtgctatttggagagaagctgtgtaagtccactatcattcaggcctctagcttgctatgattagcatttgtttaaacaactttgtaagagtaagggaaaaatctggtaagtagttaactggcgcttactaggcatttttgcaaagctttgaaaagattagaaaattgtgtcttgcgagttccagtgtcttcctcaaaatgcttaggaagattttctcagctcaatacatagtcccctaggttttctcatatattatatatatatatatatatatatatactgttaaattcatttggctgttaacattaacctgaaatttattctggtgcaaaatgtgaggcagggatctaactggctctcattttatccatagctagctacccactttaaatctgtcagtctgtcgaccaagcataatttaatcccttatatatgaatttttatatgtgtggctttgcttgtaaatagtctatctggttgcattgctttgtctcctctaggactatgcaccatgacatgccacattctttttttcagtacttcttgcctgtagttattaaaatctagaatttacaagttttaaccattttctttctgttgatcttgcttttcggttttggaggttggggattgagtactggaagaaaatttagagggatgggaatactgtacgcaaacaaaagtaatatttactttaaaatttttatattttgtatttttttatcatatagcttttacatcacattttacagactaactttagaacaaccacagaatgtccaacattaaaactactaattccaaagaccttgcctcacattcttttttacaataaatattttttacacctaacattctttcttggcctacatctagaatgtaaactgatgtaccatactaaaatcgcctgaccaactgtcaacaacaacaaatcacacacacaaaagattaaatttgaattgcatcgtttacttaaattcatttgtgttccagcttttaataaggcagtttttggtttataaagtaatatttgcattttaaaaattatgaaaatgaatatgtcagtttgttttatgattcgtttttcttgactcttatacaagcgactctaactggcatagacatttgttatccacagacagtatagatatgttagagatgccaatggacttggtctatgccaaggtgactactcacaagctctgggcccagctgaaggtcaagtattttttttccagttatagatgtgctggatctgatgtatagcgcttgactttttatattttctttatctgtaggaaacaaatgtgttggaggtactgggtctgacgaatagcataaaagaataaagttacattactgtctgaggatcagatggacagggggtggtagctcagtccagctattttccactccctcacttacattctttgccccctcctcaacagaacaaggattctgctgtaactcttcattgacagttgatatttaaaaattaacgaatggatgaaattctcatttgtgaaagaaaatttattgagcattttgtatttgtgagtagtgcaaacattttaatattatattaagaatctattgttttgtattagaggagtaattaaggagagattggagacaaaaagggggtgttgtttgcagaatataccatccaaaaatagaccactgtgggatcaggattcttttgagctaaaggcacttcaaaaacagcattcaagaagggaattcttctaaacttttctttctgaaaacaggagataaaagttccaatgtgaaaaatgctctgcttgtaccaggtgaaaagacatattcttcagcccagaggcatagatgagataattctgcacaaacacagcagggagtcatagccgagagacttctatacacaaacaaaccttgttaaaataatcatatattcctttaatctcctcatatggtttactttcccacaattgcctctctttaacttaatgtgaaagcatttagcttttgccatttctttggggcttcacttttttatgagggttctcctgtcccataaaatttacattaaatacatttgtatgctttcattctgctaatctgttttatggcaaatgaattatcaggtccagctggagaccctaacagagtagaggtaaaattttgcctccctacaagatagagattgtgtgcattaaatgttgtttgttcccagttgttcagtttgtcaggcctctgagccgaagctaagccatcatatcccctgtgaactgcacgtatgcctctagatggcctgaagtaactgaagaaacacaaaagaagtgaaaatgccctgttcctgccttaactgatgacattaccttgtgaaattccttctcctggctcatcctgactcaaaagctcccccactgagcaccttgtgacccccacccctgccagccagagaacaaccccctttgactgtaattttccactatctacccaaatcttataaaacggacccaccccatctcccttcgctgactcttttcggactcagcccgcctgcacccaggtagaataaacagccttgttgctcacacaaaccctgtttgatggtctcttcacacggacgcgcctgaaacagtttaacagggtttttcctgcccagtcacaacaaagtgatgttatgctgcaggctgaagtttacagctaatgctgttgaagtctaaaatcagttttggtttgttagatttgggtgagatggctaagattctcagagaaagaagtcaagtttggggtgcatttttcagacttaaaaatttagcagtagcccttgcagtttttccaatagaagtgatttaagaatgttttcaggaaatttaaaacaacagtgagaagcgtgtatggagagttgaactacactccagacttggctataggaaagcacgaatgctgctattgtattgcaccttggaaaagagaacaaaggaatattttcggacaattttaacatgtcacatatgaaaagctaaacggaatctgtcaacaccttgtacgttattacaggctgtgattttaaaaaaacaatccttactaatacatacatagttgctgctagcaatatagtgttgggagtaaaaacacgaaaatgagagttcaggacaatatcccaactctgagcagatttttttaagtagtaacatctaaaattaaaccatattatgtaatatttatttcttttccacagtctcttctcatgcctcgttcacattagctaattaaaagtcccctgagtatcatcataacccgatttacagatgaaggcacggttgcaatgagctatcaccctcttctgaatgagacagtacagtgtgaaggatagcaaaactccactcccatcctcttagggctctggctggaccagcaaattaaattaatgtaaaatggattaacaggagaaaggtatatgcatttatttaacacaggttttacgtgacacaggtgctctcataaggtaatgaaagcccaaaaaaagcagttagctacttatataatgaattggacaattagtaaaatgtaaaaatgcgctaaagcaaagggatttaggctagaatatataactgtgtagagaagcgcccagcaagggctagtgcaaggtttgtacagaattctcttggcctcagcctcctatccttgagaagaatgttgctttttttaaactacagtgagaacatctttcatatgagaatttcacctactgcttctaagaaacaggtcagctttcaagaaaacataaggccagagtgatcttttcacgcctgctcttttaagtacctttgaatagtcaatatgtcttcaagcacttgaaagacttaaaaagtttaccactccggcatattagtgaaagcccttaatataagcccttattaaaattctcagtcgagggtataaattcagattcaaatagtagtgtcgtaaacgggagggaaaaactaaagggattaaaaagtgaaactattgtgttctccctcgcagtccttaggtcactgcccctcgaggggcggagcaaaaagtgaggcagcaacgcctccttatcctcgctcccgctttcagttctcaataaggtccgatgttcgtgtataaatgctcgtggcttgctttcttttcgcgtacctggtttttgttgtcagctggttagacatgtctggtcgcggcaaaggcggtaaaggtttgggtaagggaggtgccaagcgtcaccgaaaagtgctgcgggataacatccaaggcatcaccaaaccggccattcggcgccttgctaggcgtggtggggttaagcgaatttccggtttgatttatgaggagactcgtggcgttctcaaggtgtttctggagaacgtgatccgggacgccgtgacctacacggagcacgccaagcgcaagactgtcactgccatggatgtggtttacgcgctcaagcgtcaaggacgcactctgtacggcttcggcggttaatcttttcgtcagttttcttccaatggcccttttcagggccgcccactccctctcagaaagagctgtgattgtattctttcggatggtaacatctcaatggctttactcggctattctgcctagtatgtagaactattataaaccagttgggagagaccaggttgtttggtctgagtggctgctaaagcagaaatcagctaagtaaacgaggtctccgagataagtgagctataaacttcaatgctatagttttgacatgtcaagcaacttaacgtgcagcgcgagtccgataaatgagtagctcagctttttagttttaaaaacgagttgtgcgttatttgtacgagagcctaagatgctagctgcctggaactgagtaggtggattaaaatgggtgtcaggtctgttttcccaggcgtatctgacttaacgtcagcaaaagctgtacttttagcttccctggtaacacctgccgtccttaaccgccccctgccggtagcgccagaagcctttacttccatttctagttgagcttggcgtcctgctgagtgacgtcacctcccccttctctggagtaggactggcggttaaagctgctttgctattttcagtcctcaggctggaggctcccctaagcaggctgcctacgcagttcgtaaattcccacttagtagactaagggagtctgttttataaataaggactcaaatttcttctgactccgaggtccgtggcagcagctataagatggaagccccctctgatgtaagattctcagatgacttgcatcttcactgtacctgtcaacccaatagtcttctattcctgccttaaattgtaaattccaaaactgatttaattgtgaaagtttcaaactgtacgacctaggaagtgtcaaagttaggtgaccagatttttagaagtcagccaaatattcagcatctttgatttagtaacaaatatattgatggctacttcagcaaaaaaaatcaactttgttttctggttactttgctaacaagcttctcctgacaggaggatatagtgaataggcagttgaataagtgagttcgggtgagaggtctgagctggagataaaaatgtgtgagtcatcagcagataaataaatgctgagaccagatgagatggctaaaaactgaaacataatgtagtgcagcattgtttgtaatagtaaatgagtggcaactgtaaagttttcatcagaaaggactagagtgatctatacatccataaaatagagtatttctctacacagccctactaaagaatgagaaagctgtactccactacatactctggtgtactctggctcagttcttggactcctcttttcttggctaactcaactggcctcaccacttacatgctctgtgctctgtcaaatagtttgttcaacagaacaccacggcctagctgtaagtgccacgttaacttctagcaatgccaaagcctgtgatagtggcagcttcgggctgtttctcattcccgggatgcctaaccacctctccaaattctatcagtttgcttccacccacttcaagcttcagaacgaaacatagagcttaagaaatataggcccggcaaggtggctcacgcctgtaatcccggcactttggaaagctgagcctggtggatcacctggggtcaggggttcgagaccagcctggccaatattgtgaaaccccgtctctactaaaaaaaaaaaaaaaattagctgggcatggttgcgggcgactgtaatccaagctactcgggagggtgagacaggagaatagcttgaactcgggaggcagaagttgcagtgagttgagatcgcgctattacacttaggcctgggagacaagagtgaaactgtgtctctaaataagtgtttgcaattataaaccatctccctgaccttaaatctctagactcatatacaactgcatatttgatgtatctaattgaataatgggcatctcgaacttgtccaaaatatgtttatacgtaaacaccaagtctgttcttcctctgatatttgtcatgtcaatcaatagaactccattcttcaagcagcttgggccaggaattgtgcaatattgtttgtcctgagcttcttacaactttcacccaatgcagtcagctctgttgaaaatcaatcagaatacctttcattgttttctttgctgcttctctaggagcaagctgccatggcggtttgtctgaatgaccacagtgaccccaaactggtctttgttttcacttttaatccccctgtcatacagttttttctctatccagcatcaacagtgatcctttttgaaggtattatgtccactgtctgctgaaaagattccactggctttccatcaccttcataataaaaaccagcatccttatcatagcctacaagtaagatgaccaaccattacagtttgcctgactctcaggggtttctcagggtgtaagacttacagtgctgaaacttagaaagttccaagcaaactaggatgagctgctcaacctactagatctgtactctggctaccctctgacctcattctcttcgcagttctttctcttcactgaccttgctgtttctggaatggaccaagcatttccagcatcagcacctttatatctattctttctccctagaagggtcttgtcctggatatctgaatggctctagatctcatttcattcaagcctctcctcaaataccaaccttacgaaagagacctcccataatcatcccttgtaaaataagcttttctgctcatttagcatatatatatatagttgactatcctcaatagcatatatatataacatttccccacctagaattatatatgtaataatatatttaacaaaaaatacatataactagatatattttattttgtgtttgttctctctcccccaactggaatatattttttgaaggtagggactttgttttgtcccagaagtatccctagcaccttgaacagggctgacgtttaacaggtagtttatggaggtttgttgaatgaaaggatgtgtgaattttctatgtaagtctccaggctctccactaagcccaccagaatgctaacacaatcaattccccatctcattccttgacctgccactgcctgaagcaatcagcgtgcagtttctctttagaaaatctgggggatagtctaggggttgcaaattaagcaacattatctttgttctgaacaaggactgcatgagtgttaggactgaagaaggcccaaggtggtggtgggtatgcctaagatgagtatgacatatcagcaatgctatgaacatagcaatgctatgaaaggccaggcaaaacgtaacaggagctagtcgtggcttattgttacaacgactatacctcccatatgggtaatcgatatccacacacccctctacattgactctggaattcaggaaagggaattaaaattttctaacttatgtaccccaatgatttcaacaatatctggcatatgagatcaataaatatctttaaaataccaactaagaaagacataaaatgacccaccctccataccaggctcatttttgctcctctgattcctgaaactatccagaatgcagctatgaattctctccattgtcagttttaaattaagccaagctgggtacttgtgtaattcctcaagaaatcctggatgaaaactgtcaggtggaaaacaggacctcaaaataaagagacatccatcactgaagctaacatcgtgaggctgaaatcagtcctataacaatggtaccaaaaagagcacaatgagaggcatttgtgaatatttactcagatgagagtaagatatttccctatcagctaacctgaagttcacatcccttttccagctgagttctgaagctagatgtacttaactggaacacataactgcatcaggaacatcctttaaaactatggctaccatggcttgactggacaaaccccaggcttccaggtttagcacaggtggcccttcacagaccaacattgcctatgctaccaacctcatgtcctaccaccctgcttgcatcatttctctctctgcatatataaaaatatatgtgtatgtatataatcagctttattgatatttaatgtaccacaaaatttgcccactttaggtacagttcaatgaattttaccgtgttttcttagttgtacaaccatcatcacaatttaatttcggaatatttctatcacccaaatttccatttctgcgtaaagggggaaaaaaaaaggttaactgctgaaggccgcggtaacactgaaaaaggtgccttttctctctaaaacagattttaatctcccctgaatttagtgtcctgggtattccaggagtctgaatagggtttcaattttcagggtctttttaatagagtaaaactgtattggtggcgataaatttagtattgctctcagtacatgattgagggatacttaaatgtctctgtgattttatttcataatcgctaaaagatggtttttttttttcctaaaacagggtttttgttttttctcaataagcttcttagcttcccctccggctccctggcttgcctcaggaaatattagctcatcagttctgattggttgacagctacgaatggccctcattgattgggcagcgcttctttgtcccttggaaactaatacaaatttttaacactactttttttccactctttcttcagagttggaatatcgttgctcccctacccatatgtagtgagtggagggcaaacttggagttcccctaatctttcctttttaggatgtcagctcagtatcattcatcttaattacacattgagcttcttgacttaatggatacagctcttcttttgtttagttgggcggccctgaaaagggcctttggttcagaaatgcaagctgtggagaaatcagcaaccttaaccgccaaagccataaagggtgcgtccctggcgcttaagcgcgtagaccacgtccatggcagtgactgtcttgcgcttggcgtgctccgtataggtgacagcgtcacggatcacgttctccaaaaacaccttgagcaccccgcgagtctcctcgtagatcagaccagagatccgcttcacaccgccacgccgggccagacgccggatggccggcttggtgatgccctggatgttgtcacgcaacaccttgcggtggcgcttggcaccccccttacccaaacccttcccgcccttaccacgtccagacatgacttcccaagaagtgaaccaagagcaagtgagagaataggaaaccgatctttatatatctacgttacccctgcccccacctccagcggacactgagactgaaaagcgcgcaggcgggaaatgtgacgcctacagtccgctcctttaacccctcctccaagccccaggaaatggcgggagcagcgattgggggagggtggggagatgagggtgggaccaagcaggcttgaccaatggcctttattttcttaacagagctacaggctttgaggaactgggttaagaattaaatgtaaacccattctgactccagaattattttaagtcgaactttttttttaaccgaatctctctgtcgcccagactggagtacattagagccatctcgattcactgaaacctctgcctctcaggttcaagtgtttctcctgcctcagccttcagagtgtagctgggattacaagcgctcgccgtcgcgcccggcgtgtttttgtatttttcgtagagacgggattcggccatgttggccaggctgatcccgaactcctgatttctggtaatccgcccgcctcagcctctcaaagtgcttgaattacaggcgtgagtcaccgcgaccggccgaaatcgattggttttgaagccttcagtagcattaaaacgaaaagtgctcccaatgcattcccttttgtcttaaattggtttcttacagctactttacttgaaaaggtggtggctctgaaaagagcctttgcttggaccgtcagagagaccacagtaatcacgccctctctccgcggatgcggcgggcgagctggatgtccttgggcatgatagtgacgcgcttggcgtggatggcgcacaggttagtgtcctcaaatagccctaccaagtaggcctcgcacgcctcctgcagagccatcacagcggagctctggaaacgcaggtctgttttaaagtcctgcgcaatctcgcgcaccaggcgctggaaaggtagtttacgaataagcagttcagtggacttctgataacggcggatctcgcgcagagccacggtgcccggccggtagcggtggggctttttcacgccgccggtggccggagcgcttttgcgggctgccttagtggccaactgtttgcgtggcgccttgccaccagtagacttccgagcagtttgcttagtgcgagccatgacggaaaaacagcacagcggaacacccaacactagcgcaaatacgcccatgagctgctctatttatagtgtgtaaagtgcagtgattggatgatagaagacgctaaatatgacgttacacactctgattggtctatctttaagccagcaacaatcgtgcagtttcaccggctactatattctattccaactctacagatgattatttaagtggtattttattactactattattttattttacttttgctttgttccccaagctggtcttaaacttgggctcaaaggatcttcccgcctcagcatccagagtagctgggattacaggggagccccactgcgccggcttggactttaattttttaaacttgtcctcttctacatctggttttcataacctgaaggctgtgtttattttccataaaacaaggcattgattccaaaggtattataattccccaattccgtataaccttcagctctttaggaaaaaaaaaaaaaaaaaaaaaaagagggaatactgctcacctcctctccggaaatgtaccctttacgggaatttctgaaacctttcacaagaattggattcctttgtaatgctttaattgacttaggagtgttattgaaatctacaaagcatctcaaacatagtaggattacactattactcagaaacattttctatgagacgtctttctcttgattatgctctttgaatcctaaacttgcagcgttctgcagcttttgttttctaaagcctaggtgtactctgccagtcacaaaatggcgtttctccagcactgccgccaggtaccaccagctgggagttgttcctcttgcggagcaggaggtggacttggcccaagagaaactggatagtggttcgcaaggaacataatttagcattgccaagagctaatgcaatcattttgaaaatctcaaaacactgaaaagtggattgtgacctttttaaattcacaagagacaggccacattctatcttttgattggtttaggctattttcttgaacagccatttagaaagcagatctatcatccttcatttgcatggagcgttcccattttatttgaaaccagtttaacccaatagaaaaaagggaggcagaacccattatttaaagtggaaactcctgaatcagataattaggagtatttccttttcaaaagttgcgttttttcagatacctcgcttattacactaagaaaggtttatatctttcacaaagggtttacttacaaaaatcttccaattttgtatacctgtgtttcataactgactagccgtcaaaccaagatgtagagtttccaaccgttattttccaaatttttagaaattacgtgaaatatttgaatgcatgccttctcaataaaatgggacgtaggaagcactggtgcagaagatgggtacaatacttatctgggaccactccattatttggttggcacgttgtttgaacaaaaaggggaaaagctcaggttacttagcatggttcggacttatttgaaaactaccacagcaggagcggaaataagaccgcattacctcactctctgctgtgctgtgctagggggttatccagaataggattgtagaagtggatgtcgatttaatagttttttattctcccattagctgagtctctgattggcaatgtgagatcgttttagcttattgatactttgaaatgcacttaacagccacaaacaagttaaagggttgttaccataaaatcttatccccagggtgtgcttgcatttatcacccgtgtttgctttcacactaagtggacttaactccccagcagaatgcctgtcagggaaccggtttcgtggacccagcatttaacgcctttcgcaggcttgtgaggcccataaatatttgttgaataaaagaatgagttgaccatgtcatggtgcgctgattgcgtgtgctgacatggaacacaggttgtaaaccttaataccaatttggggcatgttgtatggatgaaaagggcattggaaattcctgaagtgcatcccacattggactgtggaaataagttgcaagtgcagaaacgtttccacacttgcagtttgagtattaattgcagcgtttgtgaattctggtgttgtctacgattcattcttgtttgacgtgaaaggtattcgcgagacacatcgctctaaaacattgccagaaaatgtaatagagttgatgacaactggccctaacacggcctaaaactcgcacttttctctccctccgcaactattcaaaacactgtattttacatttcttgcaaattaaaaactaacatctctggcaacggacctctaaaaatttctaataaaactcctcggatgcttgtggcactgcatttgtaaaccgccccctctcaacctactccctaaaaaagagctgctttttgagagagaagcggtaccctctgatgttactgggcggcagtctgcctacaatttccttcacaatgaggcaaccagagcggctttttctgtgtgtttgcttgcgttgaggggagcaggaccataggccctagaggcccccagctgccttctgagactgggcgaaaccctcggcagcgcgcagggggcgctagggcgcgaggggcgggcactgacgggcaccaatcacggcgcagtcccaccctataaataggctgcgttggggcctttttttcgcatcctgcttcgtcaggtttataccactttatttggtgtgctgtgttagtcaccatgtctgaaacagtgcctcccgcccccgccgcttctgctgctcctgagaaacctttagctggcaagaaggcaaagaaacctgctaaggctgcagcagcctccaagaaaaaacccgctggcccttccgtgtcagagctgatcgtgcaggctgcttcctcctctaaggagcgtggtggtgtgtcgttggcagctcttaaaaaggcgctggcggccgcaggctacgacgtggagaagaacaacagccgcattaagctgggcattaagagcctggtaagcaagggaacgttggtgcagacaaagggtaccggagcctcgggttccttcaagctcaacaagaaggcgtcctccgtggaaaccaagcccggcgcctcaaaggtggctacaaaaactaaggcaacgggtgcatctaaaaagctcaaaaaggccacgggggctagcaaaaagagcgtcaagactccgaaaaaggctaaaaagcctgcggcaacaaggaaatcctccaagaatccaaaaaaacccaaaactgtaaagcccaagaaagtagctaaaagccctgctaaagctaaggctgtaaaacccaaggcggccaaggctagggtgacgaagccaaagactgccaaacccaagaaagcggcacccaagaaaaagtaaattcagttagaagtttcttctagtaacccaacggctcttttaagagccacctacgcatttcaggaaaagagctgtagtacacagatgaaatcccccaagcaaatgcaacacgccctcaattatattagaatcacttggagagtcgatagaactttaacatagcctcatctagtaagaatttactactcaatctatcaaagatagcaaggtgaattcaaatgcaccgagttaaaatcgagttttaaagtcacctgggtttcggtagccggaagtcccgcgtctcacgactccaagctaattagtcataaccgtattgaaccaaggttgaagcccagtcccaggcttgaggctttttattatacaaggttaaagtggggatattgcgttttggggtcaatattgctaaagtagcattttccgaaattgggtggtcctaagaaatgcttctgggatagttggcaaaatatatggcttaaccacgccctctccacaggagtggctagcgagctgtctgtccttgggaaggacggtgaccctgctggcgtggctggcgcccacgttggcgtcctctgaaagccccgccaggtaggcctagctcgcttgctttctgcagcgccatcatgacaaagctttgaaacgcaaaatgctttctttgtgcagcgccttaccatgggtgcacttacgggctgtcgacttggtttaggcccttgtcaggacaaaggagcttagtttgttggagttttagagctgcaacccaaaatcccttgctcggtttctctgtttttagaaacggaagcgccctgattggatatttgaaaattactgtgcttaactggatcgtgtttcatcagtcgtgcaggattttcaaccctggtggagcccacacattcaaaactgaagatccttttctcagaactgcccctttaagcttttgcaattttaattctgggggtcagattttaataattggacttttttgtttacatctgacaagagtatatgatgagccaagtttactcacttttacttagtgcagttcaattctaaaagtttatttttgcgtgtgtgcatatgagttaataatcagttgtatttttcaaacggtcttttttcaattgttttgcttagctccttccatcgtctaaagtcagggatacaggcacatcacatccctgttcccccttcctcaaactaatatgtagctacctaggtttatcctttaaaacaaaaattctcacctatttttgtgagaaatatacatgtttttctttgaactaagtattttacatacacctatctatatacatgcatacttgtggttttgtttttttaaaaaaaaaaaaaaaaaaacacgttatcttttgagactgggtctcagtctgttgcccagactggactgcagtggcataatcacagcacactgtaacctccaactcctgggctcaggctatcctgcagcctcagcatccggagtagctgggattgcatgcacgcaccaccaagccgggctttttgtttttattttttgtggagacagtcacaccatgttgtccaagctggtctagaaatggcctcaagtgatcatcgacctcccaaagtgttgggattacggtcactgtgcctggccttgtatgcataattgttttgtcttttgattagggttattaatttaaaaaacaaagcctggacgcagtggctcacatctgtaatcccagcactttaggaagccagatgggcagattacttgagctcaggagttcaagaccagcctgggcaacatggtgaaatcccatcttgacaaaaaatacaaaaaattagcaaggcccagtggcacgcacttatagtcccagctacttgggaggctggggtgggaagatgactggaacctgggaggtagaggctgcagtgagcagagatcgtgccactgcactcaagcctaggtgacagaatgagacccagtctcaaaacaaaaataataaaaattttttacaacgatgttatatacacttctgcatgttgcttttctcttaaccaaacttttctaaaaccctgtcatgaaaaaagaaatccttcacatggaatagcataagttattcatccatttcttattgataagcattgatgtttccagttaccactgctgaacatggtgcaattgaatagaattccagggctgagattgctaggttttaggttgtattttattattttatttatttatttatttatttagacagagtcttactctgtcacccatggtggagtacagtgccatgacctcagttgcaacctttgcctcctgagttcaagcgattctcatgcctctggtctcccgagtagctgggattacaggcacctgccaccaggcctggctaatttttgtatttttaggagagatggggtttcaccatgttggccagactggtctcaaactcctggcctcaagtgatctggccacctcggcctcccgaagtgctgggattacaggtgtgagccatggcgccagacctggactttgtcttctgtttcatcagtccttctgttggttcaagcacagtatcacactgaagactgatgattctatataaatatggtaaagactgtacaccctaactgttcttattttttaattttaaggcaattttagattccagctttccaaagaattgtggaatgcttagagctagagaagccttggaagtcatttagtttttgttttgtcagagaaaattctgtagagactctgtcctgctctcactgaataccatcccatagtaccccccaacagctttaaagggcaataataccttatggacagtatgcttttcctcaaatatattctaagccatggtcaatgcaaaagagtgagaaggaaagtagaataagttatctaagaatcagtgggtgctctctttaaactgatttatcactcccccttccaaactctcttgaaggtcactctgcctccctttctacataagaactcctaactccaagggaggaaggtaagttattcttattccttgcttagaaaaagagaaaataggtttggtaagcatccgctttctgctaccattctctgtgtttctgtgttttttataggatcattcaattattggttggctcttgagagggaatgcaaggttcaaggacacaagcctagatcttgcctgtatagaacctcatgatgttatgcttctctaaaatgaggcctggaggagacatgttgaaagtgacccataaatctgcagtatctcatgtctctcaatggggacaaggagtaccatgggaaatagcattaggtcaatgacagtaacaactcccaggtgagttgatttattcttttatttataaagttgttaatatgctacatagtccctaattttgccacaaatagtcattattttaatttcatatttcactattgataaatgaaggaaaaaatgagtagcagttaagcagtccataaacctacatataaagcaaattggagattttaaaattgattctggatgcttaaaatccttctcattgaaaaaaaatttcgtattagaagatttcaacattctttaaactgagaagcataacatataaacagaaaaccacagcaaaacaaaaatgcaaagctcaataaatgaacacaaagtgaacaccataataattgccacacaagtaaaaaaacagaaaatcagccaaccctcccagagccgcctgatgcttgcttccagtcacattatcactccatctgccctaaacataacccctattttgatttccaatgctgtaatttagtatgcctgtttttgaaacatataaaatggaaataaaacaaatgtaatcctatgtacctgacatatttcactccagaacattaggtttgaatagattcatctgtgttgctgtgtataactttaattcatttttattgttatgtaatattccatgttatgagtgcaacaatttaggtgtctactgttgatgcatatttgcttccctttttcagctaatataaacaataccgtgaatattcctgtgtatgtgtcttggtatatataggaatacatattttgtttgtatacctaggagaggaattgttgggtcaaatgctaaactctttttgaaagtggtgatattaggtttacatgcgatgaaatgaaaattaaaaccacagttataaacagcatggatgaacctcacaaacctaatgttgatggaatctagctgggaattcctgttcttccatatacttcccaatatttttttccaattaaaattgttaatcttttgaagatgttatccattgtggcagatgtgcagtattatctcattatggttttattttacatcttttgcccattttttcttaattggattgtatatcagtcgacttgggctgccataacaaaaatactagactaggtagcttgaacaaaaggagtttattacctcacagttctaaaggccaggccagaaatcctaaattgaggtgccaagagattcagtttctagtgagggctctcttattgacctgaagatagttgctgtcttagattgtttggtgctgaacagaataccagagaccaaataatttataaagaatacagatttatttcttacaattctggtggctataaagcctatggtcgaggggcccacctctggcaagggccttcttactgttatggcagatgtgagatgtcatctcatattcaaaccacagcagtcgccttttgtgtcctcatgtggcctcttcatatgcccataaaatgacctcatgtctcttccttttcttataaggacaccagatctatcagactactggcctactcttatgacctcatttaaccttaaatatctccataaagtcccaaaatccctatctccaaatataggcacattgggtgttagagtttcaacatcaattttgggggaacacaatttaggccaaaaagattgtgttttttcttgttggtttaagatagctgtctttttgtcctttttgtcctttctttttttttgaggtggactcttgctgtgtcacccgggttggagtgcagtggcgctgtctcagctcactgcaacctccacctcctgggttcaagaaattctcctcctcccaagtagctgggactacaggtgcataccaccgcgccctgctaatttttgtatttttgatagagacggggtttcaccatgttggccaggctggtctcaaactcctgacctcaggtgatccacctgcctcggcctcccaaaatgctgagattacaggtgtgagccaccaaacctggcctgtcttttctgttttaagtttttaaattttgctcacgaaccctttatccattttatgtgttgcaggtatttcctctgtaacttgtcttcactctgtcagaggctggagtgcagtggcacaatcacagctcactgcagcctccacctcccaggatcaagcgatcctcccatcttatcctccttagtaggtgggactacatgtgcaggccaccatgcccagctaatctttgtatttttttgtagagatggtgctgttgcccaagttggtctcaaactcctgagctcaagcaatccatcaaccttggcctcccaaagtgttgggactagaggtgtgagccaccactgcacccagccaatgatatctcatgatgcattaaagtcattaatttagtgtactcaaattaagcacactgcccttttatgcacaaccttttttgtatcttatttaaaaaatcattttctatttcaaggtcatgaagatcttattttataataccttcttgtgaaattagttctcaagactaccctcacttctaacaccaattataagttgggaggtctgtggttcccaatcaaccttaggttagtaatttgctaaaaggactcacagaacttgctgaagctgttagcctcatggttacaatttattataggatatatagcttattatgtcattccaatgcaatgtaaaattatacaactacttttaaaaagattttagcatttgacccaacaatttcactctgaggtatacaaacagcagatatgtgtgcacatatataccaagacacatacacagcaaaattcattgtttgtaatagttgaaaaggggaaacaactcaaggaataaagattaaaatcagctgagaaaagaaacacacaaggcagtattatggatcgaattgtatgcagatctcccttgcccccagaagatatgtttaaagtcccaactcccagtacctcagaattgtggccttatttggaaataggatagttgcagatataattagttaagatgaggttatagtacagtatgatgggctggtgacttagaagaagtagtatatatatattttttaatagaactagtattcttctaaggtggtcacgtgaagacagacacacacaggcagagactgaggttatgcagctgcaggtcaaggaatgtcaaaggttgccagcaagtacgagaagctaggaagagtcaaggaaggattttcctacaggcttcagtggaagcatagatctaatgataccttcatgtcagatttctagcttccagaactacaagagaatatatttgttgttttaagccaccctagcttctagctctttgttacagcagccctaggaaactaatataggcacaatccaggcaagttccaaatatgagcttccagttgtcctctcccagtaatatgaacagtattactttcccagcattaatgtgtgacaatacacatgacgtacagagcagtccccacttatgcacaaaacatatgttccaggacctccagtggatgtctgaaaccatggatagtactgaactctatatagctgttttttcctatacagacacagctatgataaggcttaatttataaattaggcacagtaagagattaataacaataaattagaataattgttaagaatatactgtataaaagttaggtgaatgtttatttctgaaatttaccgtttattatttttggactgcagtagaccacaggaactaaaaccatgtagaaaccgtatacaagagaactgtatttcacccgagcctcagtgtgcagttttaatggcctgccatggttgactgctcacatggccgatcttttagtctacctccacaggtagagctgatactgtgtggctcaaagttcctattataaatcacattgttgactgtgtggtggtcaaaacctccaggtaaacaaagacacacttatcagtgagaacatttcaagggtctaaaattcatctcccagtagctgagggcaaaggctagacctctttttgggtaagataaattttttaccatatactttattttgcttttcatgtttaactttattttgcttttcatgttagttcccctggaattgttttttgtgtatagtgtgaagtagggggtcaagtttctttttttttcctttttgttctttttctgtttaaaaggctatacaattgtcccatgccatttatttacaagagtcctttcaccattgttgtatggtgccactttagatgtaaatcaatgtccatatttgtttgagcctgttccattcgtttgtctatttttggacaacactgccctgattattgtcattttatcagttttgatatttaataaagcaacagatttgtttattttgggcccttggatttgtgtattaaatttgaaccctgtttgtcaatttctataataaagcttattgggaatctgattaggattacaatggttttgtagatcagtttggggacaattaatacctttaaaatattgaccgcttcaactgtaaatatactcctccattatttagttttcctgtttaatttatctgagtaatacattatagttttcttcgtagaagtcagatacgtagaaaattcaaagcccaagtgcaatagctcatgtctgtaataccagcactttgggaggccgatgtgggtggatcacctgaggtcaggagtttgagaccagactggccaacatggtgaaacctcatctctagtaaaaatacaaaaattagctgggtgtggtggcgggcacctgtaatcccagctaatcaggagactgaggcaggagaatcgcttgaacccaggaggcagaggttgcagtgagccaagttcctgtcactgcaccccaccctgggcgacagagcgagacttcgtctcaaaaaaacaaaaaaaagaacattcaaataatcaatgtagataattcaaataactaaaaaatgaacagttattaaaatatcaggatataaaagcaaaaaaatcaataacctccatatatacaaaatggccagttagagaaaaaaaaaagaataggcgagacttaaaaaggctgggaatctccctgaaaatctttgagagccttggccctgccctcagggatttctctggcttcatgcccagatacgggtacagttccttgtttaaaaaaattttgctccatcaatcaacaaggggctccttcctcagagcacaaggacctccataacaccggacactagatgtctaagggacacctcttaaggaagttagacttccaaagaatggtgtttcctctgtccccaaactctggaactcacagcacaactgctccttggagttcggtttcaaatctacaaggctgtcatggaggttgcagaccaagtccgtggcctcagtgtccggatgtacggtggccttggcacctgaatgtgagaacatgacctccctgaaaccaccacaagtattgtttcatgttatgtatgttttttcttatctgaaattccttttctttaaaaattcaaattacatattttgcaagcccctgaacaagcttcatgagcatttattgaacccacagcttttaaaacctactgaacactttgctctatgttgtcattcactatccaccaattatttaattattgatcaatattgtttccttagtgttgggatcatttatgcatgtatttcttttatattgcatattttatatttctgcattacagttattacatattacttttgctacagtaatagttcaaaagtgtacatccaaaatttagctgtgaagtggatggactgaggcagaactggaggcaagaaaatgtcacagtaattctaaaaaagatgatgtacaattagagcaagagagtagcactgaaattgaagaaaaatagatgcgtttgagagaaaattaggaggtagaatcaacagattagatgtagggatgagaagggtcaaagatgacactagggtttttaactggagcaagtaggtagacagaacatttcttcctgaaagggcaggtcagatcatgtgttgtctcaaagggcatgaagagtagaaagcctgggacagatcctgagatgaccaatacccatggtgcagggagagggagggagatctgctaaaaagactgcaaatgtcaggatagtagaaaatcatgagtgtgtgatgtcctggaagttgagacagtatcacatttgagaacatttaaattggtaactctgacaaaaagctggaggccaactgtgaatgcccatgagagtgagaagctcccacacttttgtgggcatcagaaagcccaccaggttcctgcagtgaagatctgagaaggatcctcttgtggctttggcagggagagaagaattattatgaaatacaccccagaaccttcttcaaaacaaaggcctactctcaaggggaaaacattttgccagagtcttatcccagctgggagaaggtaattcttcccactgcagcctcatctaggctttctgtctcacttaagggaagaaaattagtcaacagggatcagagcttcatgaaaataaattggaaatggtgcagccaggaaaggagcaaaggtctgaggaggaggagaaggaggaagaggagttgtatcattataaatacttgaggaagaggaggagaaggaggaggaggaggagttgtatcattataaacacttgaggaagaggaggaggagaaggaggaggaggagttgtatcattataaacacttgaggaagaggaggaggagaaggaggaggaggaggagttgtatcattataaacacttgtgacggtcccagccccaagatataggcatgctaataaactgaggcttaacactttgactacagaatgctgcttctccctaacaccatcaaggctccaactgaataacaatgaattatgaatgaaagagctgtaaggagagacaaaagttagaatgagacaagtattgttatctagagatgccaagaaggcaaggaagataactaaaaaggcactctggatttagaaataggaagtcattagtgaccttgtaaataatggagccagaggaataccaagggcagaagcctcactatagtgtgttgcacctgtcagaggtcaggaggtgtaactgactctcccacagtgtggctttggaagagagaagtcagcagctgcatggagatttgggagagggaaagctttttttttttttttttaattggaaaagactgagctatgtgtaaatagaataagacaggaagagtgtagacacaggaaagagggcagacaaaaacaagtgcacagttatctaagggaaacaatgggatcaagctgcaagtatataaacttgtcttgatagaagaatccttgatctggtttattcagtgtttggtccaaacccacatccctgttctgcctgtctctgacttgctctgtgccccagaagcccagcttctacagatagcattagctgggcagccctgccctcttgcaacagctggatttggccagtgatcagcccagcaggaatgtagatggcaaaggagagagaggttagtgtacttattccctgcatcacccccctgcttggtgggcagctcttcctccacagtcccagctctggcctagctctggttacaggttccctcccattgcctcttcagatttaaaggtgtgtctgtcagggtataactgggagctagaaattgcactgaaattgaacaaagaattttatgggaatggttgttaactagttataagaggactgaaaatggaaaagtggacaaacgtatcagagatagtaatgacagaaagcaactaccacctccaggtttaggagaacaaggaaaagattctttgaagagatccccagaactgggacctctgaggagtgtatgctggaccactgatgatgatatgtctgtagatagaggcatgatgaggctgattttaggagcatggaagatctccaaactgaagccaactgctgttactggattcaactgccactgccaggttgaagaacccattctgtgaggatgtcaacaaacaaagtgggaaatcttttcacatccttccagccctctagtcttcctccagtgctttctattggtagggtttggggaggtggctagcaaagcggtattggaaaagatagaagagactaaatcttcataaccagcacagggtgacactggatcactactgttgctgatcttgggctgcctcatatcccctgttcttcccattagccctgtcacaactttgtagatatcccttcattatatgcccttcatatattcttttggtttaactttttctgttggaatcctaatatggcactcctccatttttcaggaccaaaagagtataaaagattatcttttaccaaaaaaaagacaaaaaactgatctaattcctgatttgatcattacacaatctatacatgtatcaaaatatcacatagtaccccataaatatatacaactgtgtccattaaaaataaaaattaaagaaaagatggtaaatatagctctgtcaggcagtggaggttttaccacgatggctgttatttcccccatgaaggggggagtgagggagcagctgaaagtaggtgcttataggggtatagaggggctcaaagctttgagagaggagaatgtctgaaagagctgccaaatagcatgcaggtcccatgggggcagagcctctgctcattcaccagtgcctcttcaatatctacacttaagcctaacacaaagtgtgtgcttaataagtatttgctgagtatgtaaagtggaaacagaaccaatctggcaaactttgtaggactggtgggcaatgaagatcagtcaggtaaaatctgtggatataaatttatattgatcaaaaaattcaaggttaggtgtttttcttcagtcatgctcaacgatgcttcagccatgctcaactcttctgtagccacagaaaaaagtttacccataatcgagctgtgtctgtgtctgaataatgaaaagaccatgatgcaagggagttggagacacagaaacagtgtttgaagtaatgggtaatggaagcatgctaccagggaaaggaaagaagtggcaataggaaggaacagagatctgtggtcctatgtcccctgagcatattcacatgttaaagctaattcagttttcaatcatcattaaaattttgttcctaaatatatggccattattttccacaaccacactaaaactttattacctctggcaagtgactatgcaagtaactaagagcaaaaatatccacaactaccatttgagctatcaatttagggaaagtcatctggctataatctaagtgaccctccactgaatgtcagtatctttgcatatgtgatttaaatctgggccttcgcaacaccatgaactgttcttgtcttgaatatccagattgaaggaaataatctgagtagttacgagtcctgaagctagaaagatggaaaccccatttgctcatcagaaagccttagagcttgggcgctggcgggtcctgtctcaccgggacagaggggctctttcctccccatctgatagtctgataactagagaagccggccaacttattctccaagaaggagccatcttagttcctcctgaaatgttcatatttagaaattattgtttgtcagtaatttaaccccttaatgggcttgccttgtggtccataccactgagtgcagagcttgcctggaagaattgtgagggccattccatcttccaggcagtagagttcagtacttctttaaaattgctgctgaactctgtatttgaaaagaaagaatcatttgggtgtggtagctcacacctgtaatcctagcgctttgggaggctgaggtgggaggatcatttgatgccaggaggaccacttgagaccaccctgggtaacatagcaagaccctgtctttagaaaaaaaaaatacaataaaataaatacaataaaaataaaagcaaaaagaaagagtccatcttagggacagactgtaactactcactggagcttacctttacatagttcaggatcaattataataaaacacttttgtgcagattcaataggattattttaatccccatcatctctctgagtttccagtcagtttctctgcatgtagacacccttctccagcccaccattgtctctcctcctatagctccaccaacaaatcagaactttttctaactgcacctagtgcacctagagtctactccagaatgctcatggagaaagtttctgaaaggtaaaactctgaatgatatttgtagctaaagggagacttgctagagacaataagctaatagttgtagacttcagtagaagaggaatgacactgcaatgtcagggtgcaggacttcaagagggcagagtatggaaacccaatgggaaaaatgctcaccaggaacatgaagagaaggaattacgtgtaaggatttctcaatgtgttcccaaatttgcccagcagagggaggcctcgggttgatggcaggctgaccacacaattaaagaaggctgaacctgggggcttttaacaaccatcgtgggctctactgtaagcatttagaaaaagaaagttatccattcaaaaatatatatatttttaaacttcagaacaaaattatgaagagctatatttacttttctacattctaatttttataaatctgagtatattttgcatatattgttatagtacatattcaattttgtattttgctgttttcacttaaccatttttactagattactctgtgttcataataatcacttttttaaaacttttatttttatttatttattttttttttgagtcagagtcacactctgtcgcccaggctggagtgcagtggcgtgatcttggcttactgcaacttccacctcctggattcaagcagttctcctgccttagcctcctgagcagctgggattacaggtgtgcaccaccaagcccggctaatttttgtatttttagtaaagacggggtttcaccatgttggtcaggctggtctccaactcctgacctcatgatctgcccaccttggcctcccaaagtgctgggataatcactttttatgctgcataattcttcagatttgtcagtacgactgtatttacactcatttgttttattagaaagaattccagaatattttggctgccctaattaattttacaattaatatgattttgaaattgggtattggctccttctgaattggtttattaaaatatattctaatgtaatttatgacattttcatcatattagcatatttattctgttagaatttcataatttataaagctacaaactgtatgtgatatagcttgtaactttatctcataactttatgcagttacaagtagaaataaaatgttcccctcaagattgcttaaaattttattataaacaagtgtaaaaaacaaaatcactaaaacactccctcttttttcccccaaaatgcatgtttccattttaacagaacccgtatttaatcagcagatttctatggtggctagatttgtagactaaatattaaaagtcccaaagcaaatgcatttttctcttaaattttactgactttttttttttttctttttctgagacggagtcttgctctgtcgcccaggctggaatgcagtggcacaatctcggctcactgcaacctccgcctcccggattcacgccattctcctgcctcaacctcccgagtagctgggaccacaggcgcccgccaccacgcccagctaattttttgtatttttagtagagacagggtttcaccgtgttagccgggatggtctcgatctcctgacctcatgatctgcccacctcagcctcccaaagtgctaggatcacaggcatgagccaccgcgccccgcctactgacttttatccaaagaaaatataagagctcttcatcataacgtatgtttcttgctcttgttattaaatatgacacatttagacttaaactgatttgaaggtttatgacattgtttaagttattacataattaattcataaagataatgactagtttgaactactgacagctcacacatcatcagttgaacagcagaaagcttactaagctactttcttatgtttctgtctcccagctactaaaagaaacgaaacccttccaggtgttaaggcaaaactttcctccccctttcttctataaatctgattccatgttagtgaaatttctactgatggctttggtttcctctatagtagaatagagatcctatggcaaaagtcatgtctgacatggtagcaaatagaaatggggaaaaggaaggtctgcaagagccaatgtgggaaatggggagaggactgactacaaaaacccagcaggaattccagaagaaaactcctcaggacgggcacattggctcatgcctgtaatcccagtactttgggaggccgaggtgggcagatcacttgagtccaggagtttgagaccagcctggtcaacatggcgaaacctcatctctacaaaaaataaaaaaatttgtcaggcgtggtggcatgcacctgtagtcccagctactcaagagacttaagtgggagaatcactcgagccttggaggtggaggttggtgagccgagatcacgccactgcattccagcctgggcgacaaagtgagacgccatctcaatcaatcagtctcctcgaaaagcaacattatggagagacaggattccgtcaaggcctggggcacacaggaaaatattaaggcagaagagagtttcctccccacaccacaccgtatcccacaggcactgcggatgtgcatatgcaagaggggttgatcctaagaatttagagtcacagaggaggaggcaccaagcagactgtggagaaagtcatgaccagaaagggacagaatgtaaagcttcagctgattatctggcctcagggattccagaggaactggtcccaatggtctcctggtgatgtaggttcttaggtttcttttacaggggttttctgggagatcgttgacccagttagcattcaagcaacttccaccctgcacttttattctttccccttcacctgcttaggttttatctgtccaggaaataataataaaattattgagccctggacatgtacctgtaaagctccttaaagatgatgccttctaactcctcattcaacagatacaaaaacattacaataaaatgactcatgcaagacacccaggtagtttatagcagctaataaaaacagaataactataaaatatggtaagtttataaaagttacattgagtatactttataagaactgcttattgagtttgcctaataaccacacagcacaataataatatgtatatatttttaaatatgtgtaaatatgtgtaacacaaacttgtagaaggtatatctgagtacaaccctattctgtttggttaccttttctagttcattatgtaagtggcatagctacctaaggacttatgcttataaatgttactcaaaaaaatacagaggacatatgtggatagataatggaagagataagataggtaggttgaagggttgggctgcccctccacacctgtggttgtttctcgttaggtggaatgagagacttggaaaagaaagagacacagagacaaagtatagagaaagaaaaaaaggggtccaggggaccggtgttcagcatacggaggatcccaccggcctctgagttcccttagtatttattgatcattattgggtgtttctcggagagggggatgtggcagggtcaaaggataatagtggagagaaggtcagcaggtaaacacgtgaacaaaggtctctgcatcataaacaaggtaaagaattaagtgctgtgctttagatatgcatacacataaacatctcaatgacttgaagagcagtattgctgccagcatgtcccacctccagccctaaggcagttttcccctatctcagtagatggaatatacaatcgggttttacactgagacattccattgcccagggacgagcaggagacagatgccttcctcttgtctcaactgcaaagaggcgttccttcctcttttactaatcctcctcagcacagaccctttacgggtgtcgggctgggggacggtcaggtctttcccttcccacgaggccacatttcagactatcacatggggagaaaccttggacaatacctggctttcctaggcagaggtccctgtggccttcctcagtgttttgtgtccctgagtacttgagattagggagtggagatgactcttaacgagcatgctgccttcaagcatttctttaacaaagcacatcttgcacagcccttaatccatttaaccctgagttgacacagcatatgtctcagggagcacagggttggggctagggttagattaacagcatctcaaggcagaagaatttttcttagtacagaacaaaatggagtctcctatgtctacttctttctacacagacacagtaacaatgtgatctctctctcttttccccacaggaggtgatggccggaagaacatggcagagggcaaaacaaaacagcattgggaacaagctctgtttaaaaggagacttgtgaacagcaaagagtagaaagggttctcttacaactgaagcccatggaagacaaatgtgtactgcgtgagttttaaggcaataggagtagtgggacctagggcacaccagagagcatattaactctcaaacttttaaaaacattatatctgctggacacagtggctcacaccttaatcctacaactttgggaggccgaggcgggcgggtgtagcttgagcccaggagttcgagaccaacctgggcaacatggcaaaatcccgtccctacaaaacaaacaaacaaaaaacaaaattagccaggcacggtgatgcgtacctgtggtcccagctactcagaggctgaggtgggaggatcgcttgagccccgggaggttaaggctgcagtgagccatgataatgccactgcatctcagcctgggcaacagagggagaacctgtctcaaaacaaaaacaaaaacacaccatacccaaccacaatgcatctgtcttaagtaccagtaccacacccctctactcactactaaataggtgagttcccaatccctggtagcaggtttaagcatgttatattaaaggtcttaggctagtgactcattcactcattaaacaaatacttattgtgcatctactataaactaagtactgtgctaggtacaaaagcaaataatctaagctctataaactttactttcttcatcaacaaaatggagatgttttaggcatctactcatcattctgagctccatcttttgtgactgtagttggcagagctttttatcagtttctctaaatagctctaccagtccctggtggatgctggcatgcccaaaggatccatcctgatggccctgtctgcttaccttacctgcctgcctttgcagcaccgctctgctcttctgcaggacttcccttatcctttggggtcttgctgctcttaggctgctctgcttgttttgatctgctttgcatcacatgtatgtaaaggtcctttccttatttacccatgaccaaggtattatgagattctggaatttccccaaaccacattgattgctgggagaatagaagaagtggattacaagtggaacttagaaggggagtattcgagaagacgtctctgcaaatccatttagagagacctttctccagtggtgactcaaagatgcagctcctttcatcctgtggcttggccatcttcagcacatggctcccaaggatgtcctcaggatggtctctaatccaaggagcctgaagagaaaaaaaggcatggagtattgtgagtggtaggtggttatggaccagttatggaagaatacacatcacttttgcccaccttctactaaccagaactcacacagccatagacactgacaagtaggacttaacaagaatctaattttgagtctaggaatacgactgtagcaaatatttaacagcttcaaacacaggtgcattgctatcactatgcttggcccaggcctgtctccctttcctgccatgtcacaggggccagcatttatgtctagattgggttggttgggatattaagacaataatgaaccaatacaacatcttgagcataaaaccaactgatacaatgatgtacaagtcagatgattctgatgattatgaattatgtcaataaaagaaatgtgataactaaggtaatttttgttttggcaaatttttgtttgttcatgacaggatgaaatcctgtcatttgtagcaacatggatggaattgcaggatactacattaagtgaaataagccagaaacagaaagttaaacaccacatgttctcacttatatgcagaagctagctaactaagtaaataagtttatctcattgaagtaaaaagtacaacagagattactagaggctgggaatggtaggggaaagagatgataaagagagattcgttaaaataagttacagctagataagagcaatcagttctagtgttctatttgtactacagaatggcaatagttaacagtaataaataatttcaaagagctagaaaagaggacattgaatgtttccaacacaaagaaatgagaaatgcttgaaataatggatattctaattaattaccctgatctgatcactatacacagtatgtataaaaataacactatgggctgggcgcagtggctcacacctgtaatcccagcactttgggaggccaaggtaagcagatcacttgaggtcaggagttagagaccagtctggccaacatagtgaaactccatccctactaaaaatacaaaaatcagccaggcgtggtggcatgtgcctgtaatcccagctactcaggaggctgaggcaagagaattgcttgaacccaggaggcggaggttgcagtgagccgaaatcgcgccactgcactccagcctgggtaacagagcaaggctctgtttcaaaaataaataaatacataaataaatattttttaaaaaaagaacatcactatgcaccccatatatacatataattattatgtcaatttgaaacataattttgaaaaatgaaaaaatgaaacacaaatatgaatcaatcctctccaagttgatatacttaaaaggaaaaaagtccgagggcttaaactattcaatcaaaattttattaaaatgctatagtaatctggaaagtatttcagaatgaattggtataaggttagacacaaagatcagtgaaacaaaacagagaacccagaaatagattcacacatctatggacaactggttttgacaaaggtgtcaaggctatttaataagtaaaaaaatcgtcttttcagtaaatgtttcttgaacaagtagacatccggtgtgggggagaggagcaggagccttacctcaaactttatgcaaaaattaactcaaaatagaccatagacttaaatgtaaaagctaaaattataaaacttctttaaaaaataggagaaaatcatcaacaccctaggattagcaaagatttctttaaaacaaaacaacaggtttatagtttataaaacataaataacaaaatgataaatttcatcaaaagtgaaaatttgcttttcaaaaaacattataaaatgaaaagcaggaggctgaggcatgagaatcactggaacccgggagctacaggttgcagtgagccaagatggtgccactgcactccagcctgggtgacaaagtgagactcttcctaaaaaataaataaataaataaataaatagaaaagaaaaagaaaaatcacaggctgagagaaaatatttataatacatgtatctgacaaaggactcgcacctggaaaatataaggaaccttataacttagtaagatgacaagccaaaacaaagagtaaaagttttcaacagacatttcacaaaagaaaacatacaaatggccagtatgcacatgaaaagattttaaacatcattagttactagggaaatgcaagtcaaaaccacaatgagatacttcacattcaacagaatagctaatgttaaaaggactgacaatccccagggtgagcaagggtgtggaggaaactactctcatatattgtgaatgtaagaggacaatgttacaactactttgaaaaaagtttggctgtttctaacataaaattaaacacttatacagcccagcaatatttctgggtcatttctcccagataaatgaacacatgtccatactatgacatgtacaaatgttcatactggctttgtttcacaatgctataaactggaaacaacccacgtgtccatcaacaggtgaatgggtaaataaattgtaatatatcggccagacgcagtggttcatgcctgtaatcccagaactttgggaggccaagatgtacggatcacctgagatcaggagtttgagaccagcccatccaacatggtgaaaccccatctctactaaaaaattagctgggcatggtcacgggcgcctgtaatcccagctactcggaaggctgaggcaagagaatcacttgaaccgaagaggcggaggttgcagtgagccaagaccatgccattgcacttcagcctgggcaacaagatggaaactccatctcaaaaaaaaaaaaaattgcaatatatctatatcttggaatattataaagcaataaaagggaataaactactgatatatacacaaaatggatgaatctcaaaaatgtgaaggaaaataaaaaatacatatgatataaattccattcatatgaaattttaggaatgggaaaactaagctgtaattatggaaagtacatcagtggctgcctggggccaagaggatggaagaggcggcacaggtgatactacaaatggaaactatctaggttgacggaagtgttctgtaacttgattacagtagtaactgtttgggtatataaaacgcatcaaattgtataattaatacaggtgtattttactgtgtataaattattcctcaataaagttgatttttcattaaatatattatttgctaaaatgaggagagacaactattatcttaaaatagttaagcacaataaaaatactacaatcaactcattatatatggaaattaaaggagaaaaatagtggtatgattaattaaaataaaaagaaaaccttctaaattttatcttagctcatagttgtaaaagctgccatccctaaccaaggccacccttgaccctttctcatgttccatctttctgtttgtttcatagtttatgtctcaccaaaatctatcagataaacgtattcatatgaagatttaaatatattacatgttaagccttagcgaatacttcaatatctaaagaaggtacaaacaaaacaaaaatcaacacttagttataagagattacatactctccagggaagacctgaagactagcccctttctggatcccactagcccctcatcccactccaagccctcccctccaatcccatatgcactgggcattcatacaaataagaccatcagctctggatatctgtactgattgatgctcctgctaactacctgaatgattgcgatgtaaggacagcactgcctgaatcctatttatctctcgctatgccatagcggccttccatgctgatggcgtgtttgaggatccagaggggtctttggttggcaggattgttttatttccccaagaggagagccttgatgcaaaaataggtgaagaaatcagtacaacaaaacagaaagcctagaaactactatgaacacaatagagcagaagtagccttaagagttggtggagaaaggatggtctattcaattacctgggctgagaaactggctttcatatggaataaaaataaaattatagctataccccatatcatacacaaaagtttctacatctaacaaagacacagatagaaaatgttttaaaattttagaagaaaatagtgcagaattttagtgcagaatttcttagactagatgcaaaaacaaaaatgattaaagtggccaggcacggtggcttatgcctgtaatctcagcactctgggaggccgaggtaggtggattagtggaggtcatgatttcgagaccagcctggacaacatagtgaaaccccatctctactaaaatacaaaaattggtagggtgtggtggctcacgcttttaatcccagctacttgggagtctgaggcaggagaatcacttgaacctgggaggcagaggttgcagtgaggggagatggcgccactgcactccagcctgagcaacacagcgagactctgtctcaaaaaaatctaaaaataaaaagattatttttaaaagactattttaaacaaaaaaaatcgtttaaatgatatgacacactacatctaatatttggaaaagtacttcttaatacttttaataaaaagaggcgctgagagcatacaacctatcctcagaagagtgtttgacctctaggagggacgcaagcgcgttcttccttcattttaactggtcattttcatttatttcaggaacatctgaagtaaacacagtcacacgttaacctttaaaaatctaggaggtgcgtacgcatagttccattacttcaatttttgtacttttgcattttaaaatatcacagggaagctcggtacagcttcaaggctaggaggggtggctctctcttaagccctgtccccgccagccccagacctctcgtcccgcccccattgcccagtccccaccctcacttccccatttccccactcccgcggtctcttaacgcacctcgtttttcgtccagtggactcagacctgtagtcttccaccaggatcggctcctttcccggagctctcgctcttagaggaaattgagagaagcatcagcggagacccatctgtggctctccagagggcgcggcattcagaccccagatccagctgtgagaacggaccccaggctcacaccaggcctgcgggaggcggcccaccagaggcgctagaaaacaagcctcgcggggaggcgcgcagggcgactgcaagctgtagggggcgctggcgccctcacaggccaggggcagggccggcgctgcgggcggggctcctgcggcgtgaggggcggccccaggccagcagctgcgccctggctgggagccggggagcatttgctgctctgctggaccctgagtctggcggcgggcggcctcctctccgctccccgcccgccatcccccaactcccgatctctctgctgcgtctggcctcaggctgagaccccaacgaatcattccccgcatgggaacattttatgatataactgaattcagttttatgtataactgaattacggatatgagaatctcaaatgaggacgaatggtttttacgcacaaaacatgagacacaaatctgtaagaaatataaagtcgtgaccacgtcctttcagaactttaacctgtttgctgaagtacgtcagtaacaatggcagggaaagggtatcttaaatttcaccacagcctcaaagaggccatttcgtggatccgctgaggcttggagtcggccttctgaccacgagtcctgcggctatgaaagaggaagccgcggttcagggcgtcctcgcgagtcgtgcagcccgccctgctccagctggggacaccggtggtcacggcgctttccagctgcagatccaggcggcagcccaagatttggtccagccgccaaggggtggctcgagtgactgacgggccttgaacgctcccaggacccacatctggagagggaggtgggggtggggtgctgaagtcattcttggggcccctgggggcgggcatggacctgggtaaggccagagaaattgacacctcgtgacatccctggaagagaagtacgttcagtgtcactccagagctgaaaccgccttctggctggtccctcctcacctacatacttttctaatttgtctggagcaggccgggcatctgtattatctggttatttaaatatctggttatttaaaagctctccattaaattcacatacacgaaaataaaaattaaaaaaaattttaaaaaaaagaaacaaaagctctctaatgaccaagtcctacacgatagtgaataaatttttttgtgtggtccctaaaattgagttcatgccttttctgaagtaatagacgcccagagaagggatcgacttacccatcatgccacagagattaattggccccagaattctttagcagaccgtgtatatgaacgtcctttgcaatcatataaattaactgggaaaacctcatttagtatgttacatgcctagcgttttgtgcctgaacaccttacaagaaccagggactattgccccaatattatatttcaggaaaggaaggcccagacaaatggtgtcactggtccactttcacccagttggtaaatgaaaccagaaattatagctgtaccacagaaaggtgaaaacgtttcttttataatttcacatacaatctttaatggacccagtgtccaacacattaaagcaagtgctcaggagtgacatcaagatgtaaaaaatagtcctgtcctcagggagtttaggtcttggagaaaagagacccaaggagacacaagacaaaggggaaagagaaggagcgctgaagactgaggaccctgcctgtggactgaagtgaggatggggacacccgatgcccggaatatgacagtttggaggggcctgaaggactcttctattctctatcagaaaaacagaattactctcctaaccagaaaaggtatttcaatttatattttccatcacagcacttttctggtgataatttaatgtgttttaaaaaatgtatcacagtgatggcctggtgtgaaataaataataaaattttaagaattaaaaaatataaaaatcttttatatagacattaggagttacaaggataactgtgaattataattagtaattaaattgaaatactgattattttcatttttatttaattatttaataaaacctatttaacatttaatatttatcagtaattaaatctaattgttaatatttattattataaattattttagaattaaaaataagtgtagaagcgaggcatggtggctcaagcctgtaatcccaacactttgggaggctaaggtgggaggattgcttgagcccagtagttcaagaccagcctgggcaacatggagaaaccctgtctcaatacaaaaaaatgagccatgtgtggtggtgcgtgcctgtagtcccagccattctggaggctgaggtgggaggatgacttgagcctaggcagtcaaggctgcagtgagccctgatcttgccactgcactccagtctgggcaacagagcaagaccctgtgtcaatatacatatggacaaacttaaaatttaaaatgaaagcatactactgatacagaattgagtagagatgcaaagctagtcctataaccagaacaataaagataaaaaggagagtggaagaaggtatgtcatgaatttcatgataaatggcaattgcaaatatcctgtagcagaacaaaacaacaaaactgtagataaaacatatccaaccctttggaaggccaaggagggaggattgtttgagcccagaagttggagaccagcctgggcaacatagtgagaccctgtatctaaaaaggaagaaagaaaaaaaaaaaaaggatgataaagtagacaatattgaaagccattttctgcaaatacatagtgaatttgatcagtaattttcttccaacagtgcaaaaatgaatagatattagttgcctgaaataaaaatcaaatatccaacaaaaaatattgactatctaatagtatctaagctagtaaatttggccagttataaaatgtcttaaatttttatttaaaaaaagaaaaccatatttataagaagaggtgataaagagaaattatttcagttatgaagattttgttagaaaactatgagaaaaaaactattttttgttttcaaaaagtgaaagattaagttaccaaacagttgctaaagaataccagatggctgagcgtggtgacttatgcctgtaatcccagtactttggaaggccaaggcaggaggatcattttaggcctggagttcgagaccagcctgggcactgtagcaagacccgtctctattaaaaaaaaaaaaaaaaaaaaaaaagaatacaagaccttgctaacaatagcaaagatcaattaattcaaaatttgaaaaactgtaatttatttagctttagagtactctcgtgatatgagattgccaaattaatactttgggtgcatttcttttctcaaaggacttgcaaatttacaaagaagtgttgaagaaaagccacacattggcaggtaatgtttgcaaaagacagatctgatgaagaacaatatttttagaatatacaaagaatacttaaaactcaacagtaagaaaataacctgatttaaagcaggccaatgacctgaacatctgttcaccaaagaagatacacagatgcaagtatgcatatgaaaagatgcttgacatcatgtcattagggaactgcaaattaaaacaagtagataccactgcatacctagtagaatgaccaaaatttagaacactgtcagcaccaaaggttgcaaagatatgtagcaatagtaacttgttcattactggtgagaatgcaaaatgtgcaatcactttggaagacagtttggtggtttcttacaaaagtaaccatacttttaccataagattcaccaatcacactccttagtatttatccaaaggaattgaaaacttatctccacacaaaaacctgcacatagatgtttatagcagctttattcataatttatccaaaacttggaaacaagatgtctttcagtaggtaagtggataactgtggtacttctgaataatggaatgttatttagagttaaaaagaaatgcattcactttgggaggccgaagtgggtggattgcttgaggccaggagtttgagaccagcctggtcaacatgggaaaaccccaattagccgggcatagtggcgtgagcctgtaatcccagctactcgggaggctgagatatgagaatcgtttgaacctgggagatggaggttgcagtgagccagtgccactgcacttcagcctgggcaacagagcaagactcctctgtctcaaaaaaaaaaaaaaaaagaaagaaaagaaaaaagaaaaagaaaaagaaaagaaacgatcaagccatgaaaacacatgaaggaaacttaaatgtatgttactaaaaagccaacctgaaaagactgcatactatatgactccaactgatgcagggcaagcaagccaaaaattagggcttagcccgggaagaattcaagggtgaagtggtggtgttagcaacttttactgaagcagcagtgtacaacagcagaacaggtactgctccttgctgagcagggctaacccataagtaatgtgcccagagtagcagctcaggggcagttctgcagtaatatacctgcttttagttaagtgcatgttaagggggattatgcagaaatttctagaaaaagagtggtaacttcggagtaggtacagaggaaagaagtcgataatgtcctgttgttgccatggcaacgaaaaactgacatggcgctggtgggcgtgtcttatggagaggtgctttaacctcgtccctgtttcggctagtcttcaatctggtccggagtaaagtccctgcctccggagttcactcctgcttcctgcttcacaactgtatgacactctagaaaagacagtaactatggacacagtcaaaagattagttgatagaaattgggtgacaggaagtgttgaaaaggcagaacacaggatttttagggcagtgaaacttctgtgatactataatggtgaatacatgacattatacatttgtcaaaacccatagaaagcacaacaccaagaataaaccctaatgtaaattacagactttcgttgataatgacgtgtcaatgtaagttcaattgtaataaatgtactactgtggtgctggatgtctatggtggggggacatttttgcttcaatagttacagttgaagtaaatgtttgtgtttcccacaatgcatatgtagaaactctcacattcaatgtgatggtctttggaggtgggctctttgggtgatagttaggtttagttgagatcctagcagatcgagtcttcatgatgggcatgatgggactggtcccttataagaaaagaccagaaagctagctctctctttgccatgtgaagacatagcaggaaggtagccatctgcaagctaggaaagggccttcacaaagaatcaactcagacctcagaacagtgagagataaattgtcgttgtttaagtcactcaggctgtggtattttgtttcagcagcccaacctaagactgttaattggattagaaatttccttttggggatggtgtgtggcgggcggggggcggggagtacctttgttaagcttttatatcaatgagtttgtaggcttttcttttttggtcattgactaggacagtttaaatagtatgagtgtgaaggagattgttggtcatctattcgatgtcccttctctgttttttaatatgagaactcctgattttcagccaactaccctggaaaaaaagctaatctttctgacttcttaagtgtggccatgtactaaattctggctaatgcaaggcaagccaaaggttttatgataggttttaggacactagagtaaaagagagctgttgcacacatgctcttcaccctacttttgtgtccttttttccatcctacaacttgggttgtgagtatgatggctggaactttagtggctctcttggatcccaggggtaattgaggggtggctggaaggaatctgtgattttctggagtttccatacacaaacaagacctggattttctgggcttcccagacttccacatctagacttgctttaaatgggagataaataaacttgtttcagccactgtcattttgggctattttatagaacttaatctaatcttcaagggtacatgaattgcttttccttaaaaaaaaaatcagccataaaatcatcttcttttttcttttgttccccacattatttagttggagctctgtaactttttttttttttttttttgagacaaggtcttgctctgtcacttaggctggaattcagtggcatgaccatggctcactgcagccttgccctcctaggctcaagcaatcctcgtctcagcctcctgagtagctgaaactaaggcacatgccaccatgcccagctaatttcttttcttttagagatgggagccttgcccaggctagtctcaaactcctagcctcaagtgatcctcccatctcagcctcccaaagtgacaggattacaggtgtgagccaccatgcctggctgctctgtaagtgtctgaatttcattttgtatttatcagtctgtttagattttctttcccttcttgggtcagttaggccattggtttctttttaaaggttttcaaatttatttgcatctaattcttcaaattactctcaaaattattccagtatatattcttttgttcctattttcttctgtattctttattaaaatagctaatgatttatctagcaggacttatattctttccataactttcctgcaccccaattaatctccaattttatatttcttctggccttccttatagtttccacaggtttattttattcattttttaaaacttttatttaattgtttattttattatcattctttcttattcagcaatctaagtgcttagggatatagaatttcctctaagcagcatatgctaggctttaacaatgttagggaggcctcccctttctggggaagaccacacttacattaacacaggactgtgggatgccaagaggtagagaagagcttatgaatatccagattacatcttcactgatcctgcacaaaggtggggttcctcggttacccactgggtcctattacccaagtctgggtcagcataccgagactacgggtatatagaacaagtgcaactggcgataatccttctgttggggagaaaaatcttttttttctattcatcttaggttctccatctgtggccctatcaagtagactaacaaaagacagattgacaagacagaaacaaagcatgtgcattgtacaaacacaggggagtactgagatgaatactcaaaagaggatttagaacttgggcttatatagcattttaagaaaagaatacattttttaagtgacaaggaagacgaaaaggactttgagtttctagtgcagtaaattgtgggaaggcaactttttctttccctttttttttttttttttttaaaaaaaaagacttctctggtgctatgtccaggctgataagagtctaaagtctctggtgactaacttttgttcttccccgagtaagaagacaccttcacaatttcatatcctgcttttaggcaaatagggagagggcagaggtgtttgtttgtttttaatctattttttttctcaattgtcttcaactcaaaatacttcttatgccaaagatggcatattctgctacccttcacttactacttacaacccagcctctatcatcataattagaacttctgaccctggggaacatgggcaatagtttgaactcttttatatctcccttaggcagagatggaggcccagccatgcctctgacatctagacacaactgttgcttcatttctcctattctcagaggtgatgttgtaggacttcaacaaatatcagtaaacattaattttttttttccttgaggcacagcatgatcttggcttactgcagctgctgcaggctcaagcaattctcctgccttggcctcacgagtagctgggttacaggcccctaccaccatgcccggctaatttttgtatttttagtagagacagggtttcaccatgttggccaggctggtgttgaactcctgacctcaagtgatccacctgcctcagcctcacatagttctgggattacaggcgtgagccaccatgcctggccatcaatttttatgtcaactctaaattataacatttagcaattttgtgactttttatggtcatcattaatgttgtttatgttttagttgtagtcctgtcattactcactcgggtatggtaatttggtctttttcaaaatgaagttaaggtctatttgctcttctctgaatcataataagaactgccaacagccatttcagcaataactatttactgagattttaaaatatttcaaggtaattggtcctagcagactggaaaataccaaattcttttccagaactgaatcccccatcaaagttcaattttactcataattcccttttcatttgaagcatctcattgtaagccagtcttaacccttctctcacactttgcttggctgtttctcaggtagaactcagtaagtctggtagcctccaggactgccgcttagattattaaacaacatgtcagtggttggaagagtcaatgttattttgatttttctgttttgttttgttttaaatgcagttggcggataattgcagctttctttcattccctacatgagttcaaatggcagcaaacaaactaggagaacgcagaccttctgacttgtgggtacccctactcatcacctgaagacccttggaaatcaaagccctgacccattaaagacggatggagacagcaacatacgatcatcactattatcttgctttgccccagtccaggttaaccatctgtggtatttttagttgctaagtccatatattcaacataaatcaattatatatccactaaaatctcagcactagtctaactactaaggaaatgacagcgaagaaaacagaccaaacgtctgcccttatgggatttatattattttctctgtgctggttaaaccaaggagcttctgctcttttccttagtcacctgggggaggcagaaacaaaggagaatattgataaacctggaaatagggccggagagtatcagagaaggaagccttcgggaaagtaaagatgtggcagccagtattcccgttataaaaggatacaactccggcctcatagtccagaaaaattcccacaagcaggggctgctcatgcagatgaagggaagttgggggagaagtaagtgctacatagcctttctttttgcacagcctgagggtccagaatccagactgaggctcttgcttcatgccagtgcccctctgcacattttccatacaaactcctaaatcccatccggttccttcgccaacatccacttcaaagtaacgtcttcctgaggtgaagccttcacaacccaagacacaggggaaggcagtaaatctcctggaagatgtgtcctgattctcctgggtgtatccacgagtcacttgtctccgatcctcagagagaattagttcgtgatgagctgtatctggatccagagtcacactaactgcaaaacaaaacaaaacaaacaaaaataattttgttgctgtgaagaacacaggttattttattttattttattttgagatggagtgttgctgtcacccaggctggagtgcactggcactatctcaactcactgcaacctccacctcctggattcaggcaattctcctgcctcagcctccggagtaactgcgactacaggtgcgcaccaccacaagtggctaatttttttaaattttctgtagagatggggtttcgccatgttggccaggctggtctcaaactcctgacctgaagtgttccacccacctcggcctcccaaagtgctggattacacaggtgtgagccaccatgcccagccacaagttattttcaataaaaccagcctgtgttcaaacccaactattgtttcttataaactgggtgagcttaggcaaatcatttaactttctgagcctcagtttgttaactataaagtggaaattaccgtatttgttgcagagaatggtgggtaggattgaataagcttatgtttgcttaatgcttggtaaaattcctggtacatggtaaccacctaataagtggtagttgttggggtgatcaggcccaacaccaggccgtgggggctacaaagtccggcggggtcaaaggaatgagaaaagacaagttaagagtgcataaagtgggtccagggtgccagcactagattggaggctgcaaaggccctaagctctgggagcccacactatttattggtgatcaaacaaagaagcaggtggtgaggacgtgagggtaaacaggtgagggcatgaggacatgggggtagaaaggtagtggtgcattaagcgtagctgtgacagtttagcattttctttgacacatgtagaatatactctgctgcttgagatagtagaggacacgtttatgagtgaaaagcaaggaaccaacaagtctgtgcactttccagaggctatgaggggttttatgccctgagccctgggttccatccaagccacaaggggttttatgccctaggcttagatttgtggtgcggcagggcagccttccaccatttggcacagagcttggtgttccaaaggccacgaggggttttggaccctggaccccggacatcttccaagactcttttacattatgacagacaagccagtcctgcttcagctcttctaacaacatgtagtaataatgatatcatcaacatcatcttcgtcttaattattcaaggatgccaaggtacagaactaacctgttaatatggttaccatcctgtccaaagttcttctcccatgcaggacttccaggaatcatgagacagttgagcagaaagataccttttcccttctctactgaataaccaccaacattgagaatcagagagggaaaatgactcagctaatgtcttagcttgttattggaagacccaggtctcatgacacatgcctagtcccatgacttttaattgtaagctcttctctttcccctcagataatgttccataagcattagtatgagataataatacactgaggaccaatatacatgaaaaatatcagactagaatcaaacaagacagaaaaaagatctgataacctaaagtgagatactgaacagtatgcagttttaaaaataaaaaatggtaataggatgttctaacaagagagttaagaaaccactgtgctactgagttaaatgttgatcagttggtctgtgacaattaaggaattcaagtattcagaaacacttcctgtgctggatgctctctgtttgttcttccaaataatccctcacttttccctgtcttgctctgtgcccaggaaggctgacatggacagattaaccaggctttccgccctctggcttggttcagccaatgggaagcaccagaggagaccatagggcacaaagaagcagccttgggagtattcagtaccccagtcccacgctatgatttggagggtctgcattcctctgcctctgggcacactctagtatagttacagctccctacacctgccacttgaggcccagaggaggtgatggctctctaactgttcctagttctgggtgcttcctgttccttgtggatttcccaactcctcacctttgtaaataccctcctttttcaaactctattcagttagcttttatcagcctgactcacagaagtttggggtttcaattcatattacctgaatgacccaggaaaacccatgttgagaaattaaaatgtttacggggtggtaataccacttaagagaaaaaatatcaattggatttttaaaattccacctatctattggtgtgacacatcaacaaaaacatatagaaagattggaagctaaaagatagataatatagtcatatactgttatagtattatatcaaaagatattaagtcagagcattattaagaatggaagaagggccaggtgtggtggctcatgcctgtaatcccagcactttgggaggccaaggcaggcggatcacttgaagccaggagttcaagaccagcctgcccaacatggcaaaaccctggctctaccaaaaatacaacaattagctgggcattgtggcacatgcctgtaatcccagctacttgggaggctgaagcacaagaatcacttgaaccggggaggcagaggttgcagtgagctgagatttcgccactacactacagcctgggtgacagagagagattctgtctcaaaaaaaaaaaaaaagaaagaatgaaaggagtcacctaaaaaagataacacaattttaaacataaatgtactacattattagtgaattcatgtttagaattgtgttaatatacaaagcaaaaattgtagaattataggagaaatggacaaatctacaatcatcatgggatgttttaacattcttctttccataattgatagatcaggcagaccaaaagaaagaaataagggaagatacggaaggtctgaacaatctaagaagcgcaatctcatagtcaatacataaagctcagcaattgtttaataatagtaagcagagaatatgcagttttctcaggtatagatggaacatgcactaactgagtaaatactaggcagaaaacagtctgaacaagtttcaataaatctgtattacacagatcattttctctagcctcaatataagattataaaccaataataaaaagatgactaaaaagattctaaatattaggaaatgtaaactactaataagtcattagaagatgtatagaatggaacaataataaaaagttatttataaaaatatacaatgaagctaaagcagaattttaaggaaaatttgtaggctttaaatgcttatcttagaaaaattaaaaagctgaacattaatgagccaagcatctaatttaaattttaaaaagaacatagaaagccaaatataattttttaaaaagaaaaaatagatattaaacaatataacagtgaagttaaagaaaacaagaatgcaataaagaggaaaaacaaacaaaaaaaaaggtagcttcttttaaaagaaatttaataaaatagacatacctccaatgagatttatcaaagtaagacagaaggcacaaatggaatgaatacagaaactttttaaatattacagaactttataataaatcttatgctactaataaaattgaaagtactgataaaattattacttcctagaaaaaatatttctgagtaaaactcactcaaaaaacaaataaagcatgggcagacctaacattaaagaaatgaaatcactactttaaattttaccgacagataataaaacgtgcatctttatcaagcaaaaatggaacttgtcagttttataggaaatttagaagtcaaggcatgagtaatgccaatctcataccaaatcctacaaagaatagaaaattatggctcccgcttatagacatagatatagaactcctgcacaaaataatataaataacaaaccaaattttatatttgcaactatacatattatatgtgtatgtattatatatgttaacatatacatatataatatgtatagcatatgttctacatattatatatgtatagtgtatgtattttacaatatataaatgaaaacccaatctttaatatattcatctagattgtcatatatgacatatataatacattacatcaaaaatgtgtacaataatcaggccaggcacagtgactcatgcctgtaatcccagcacgttgggaggctgaggcgggtcaatcacttgagtccaagagtttgagaccagcctggtcaatatggccaaattccatctctacaaaaaatatgaaaaattatccaggcattgtggtgcacaccaatagtcccagctactcgggaagctgaggtgagaggatcacttgagcctgggaggtggagattgcagtgagtcgagattgcgccagtgcactccagcctgggtggcaaagggagaccctgtctcaaaaaaaaattaaaaaattagccaggtatggtggcctgttcctgtagtcccagcaactggggaggctgaggtgagaagatcactttagctcaggtggtggagccatgatcgcaccactgtaccactcggcttgggcaacagagtgagagcctgtctcgaaaaaacaaatatatacacacagtaatcaatatatatattatatgtaccaatcaatgcttcacttttatatataatatagattacatcttattagatatatagtattccttctccatagatagatagatacagatatagacatagtatcctctatccatattagagagaggatactatatatatctatagcatatagagatgctgtctcaaaaaaatttaaacatcagccagatgtggtggcccatgcctgtagtcccagctactggggaggctgaaatgagaggattgccattgatcctctcattggttgagccataatcgcactactgcaccactcagcctgggagacagagggagacctgaggtggaaggatatagatatagatatataaataaatatgtatagagagaatataatatatgtgtgtatgtgtatatatatatattatgaagacactgggagagaatactatatatatatgtgtgtgtgtatatatatattatgaagacactggtgggatggtttcattaccaattggaccaagagtccaggtatggagccaacatgcaatgttgttgttgactgagctggcagagcactggtcatagttacgggaaaagaaggtctccaatgagacatacttaacaaaatatatgaacttgccatatacgtggagagttctggtgtgtatatagccttctctcaccaacctagcaattgtcttcatcatcattataatgctatcagagcaaagatgacagctaaatttttttgtccctttcttcttctttctcttccttcccctcccccacctctttctcttcctcctcctccttcatctctcttctttttttttttgagatggagtcttactctgtcgctcaagctggagtgcagtggcacaatctcagctcactgcaacctctgccttctgggttcaagcaattctgcctaagcctccagagtagctaggactgcaagtgcacaccaccacacctggctaatttttgtatttttagtagagatagggtttcacaatgctggccaggctggtctcaaactcctgccctcaagtgatcctcctgcctcggcctcccaatgtgctgggattacaggcgtaagccactgtacccggcctcctcctttaatagacagggtctagctctgttgcccaggctgggtacagtggcgtgatcatagcttactgcagcctcgaactcctgggctcaggagatcctcctgccctagtctccccagtagctggaactacaggcatagcacacggggctaataaaattaattaggtgataaaattcactgcccactgatgactaagctctttggacataaaagacacagaccttgaaggaaaatgtgtctacttaattttgaaaccctatttatcaaaaaacaggatgaaaatgcaaaatgccatccacatgccagaagatatcagctataataagttcccataaatcaataaggaaaagaacccaataaaaattattaaaccacagtaaatcatgggtaaatcacagaggcctgaagggctaatggacatacaaaaagaatctcaatctcactagtgaaatcagaaaagcacaaattaagtacacaattaggtaccattttaaatctgtaagactgtcaaaatcataaattatataagtaaagactcagggagttttggaggagtgagagctcttatattgcttgtggggtagaattggaacaatttcaagatctgtagtatctggtaaaattatgatatgcatccctcacaccagcatgtcactccaaggtatctccctggagggaacatttacgggacacaaggaagcatggataagaatgttcacagtagtattgtctgcaacagcaacaacaacaaaaaaacccaactacacacaacttcaatgcccagtccacaaggcaatggattaaataaacttcaggccggagatggtggttcatgcctgtaatcccaacactttagaaggccgaggcgagaggactgcttgagcccaggagttcaagaccagcctgaacaaaataaagagatagtgtttctacaaaaaatttttaaaaaattagccagacgtggcagtgcttgcctgtggtcccagctactggggaagctgacgtgggaggattgcttaagcccaggaatttaaggctgcagggagccatgatggggccattgcactccagcctgggtgacagagtgagaccctgtctaaaagagataagtaaataacaactttgcattttctgccacattgcaaaatggtgagagagtggtttctagactctagactctttctatgactaccttctagttatgagatcctacaacactcacctaacctctctgtgtcatatttcctcctctataaagcaaaaatgccccatatagagaggactgtgatataaaacaagaaccaagaaaagtaaagcttttctaatctgtcacagactaaagagtgctcagtatatgtgagtcattattcctggtgctggtaggagtgtatgttacaactttgagtcaagtaatatggtaccatatattaagattaacaacaacctcggcaatcccagtttggggtatgttcccaaaagaaatgaaagcaccaggatataaggatgcatggactagaaagttattgtagcaacattgtaataactaagttctaaaaacagcctgaagctccatcagtagggatatggttacatatatttattatattcttatggaatattagacataaaaagtaacgagtaacatagaagagacagtgtatatatgttacgtttgtacaaacttagggaaagatatagatcaccctacctagagaagtcagattggagacgggtgggaaaaaccttgaactttctccttatatcctttatattgtttgactgattaaaatgtatttgttgcatctgcttgaaggcaatgtaaaataaaataaacatacatttaaaaataaaaataaaatttattcctatcacttttgtaataaagctgggcacagtgactaacacttgtaatcctagcactttgggaggcagagacaggcagatcacctgaggtcaggggtttgagaccagcctggccaacattgtgaaaccccatctctactaaaaatacaaaaatcagccaggcatagtggtgcgtacctgtaatcccacgctacccgggaggctgaggcgctggaacccaggaggcagaggctgcagtgagctgagattgcggcactgcaagccagcctgggtaacagcgagactccatctcaaaaaaaaatttgaaaaaagaaaaattttaataaacagtgtttaagaggggagaaatatttagttaaaagataagcccatttaagaaatagtttcacttgacccggaaggcggagcttgcagtgagccgagatcgcaccactgcactccagcctgggcgacagagcgagactctgtctcaaaaaaaaaaaaaaagaaagaaagaaagaaagaaatagtttcacttgaaccatattatgattccttctgtaaaagatgagagtaggcaaattgactcagtgaaatcccagcaaaacttacacaaagtcttgttcttccttcctgtcatctgtataggatgaaatacagagtgcttttgggttttgttgttgtttgttgttgtgtatttgaggggaacacaggtctataattccttttctgaaatccctggaacaaaatgggctttgccattcaaattagtttagaagttataaaggcaaaaaaatgcatatactctaaagttcaaccccatcatggcctaaggcagagccctgtaatcaaattcatcaatatatctgcagcaaaacatttattcaaattaagtgggataaataaagacttttaaatagtctcatctcagtgccgttcagggttggccactgtggaagacagactcaagggtggccttctatgattcctgcctcttggtgttcacaccctcgtaaaattccttgtctttgagtgtgagcagggcttatgaattgcttctgaccaataggatatggcaaagatgatgggatataatttctatgattacgtttcattatgtaagactccatcttgctggcagattttctctaaagagtctgtctcctgagctctctctgaagaaataactggccatgttagaagcccatgtgcaaagagctgaggggtggcctgtagaagctgtgggcaacctccagccaacagccagaaataaccagggccaaagtcctgcaaccatcaggaaagaaattctgcctgctacctcagtgagcttggaagtggattcttccttagcctagcctccagataagaacacagcctgaccaacaccttaactgcagccttatcagaccctaagcagcaggcccaactaagctgtgcccagattcctgaaccacaaaaattgagataacatatcagtgttgtattaaggttctaaattatggtaatttgtttgtactaatagataactaatataaccaccaaatcatttcaggttaggccagatttttgtagccaaatgaatcatgataaaactttccattttcaggggtttttttgattttgtacttacggatacaaatttgtgaaagtatagtcagcactgatttaaaaaatcaagggagcaggaaactcagtaaatggttctaacattttggaatctgtaaattggttgtaacatttgtcatctgtgttatctaagtcaagttcctaaaatatgtgaatgataggttatcatactcacctacttttcttgcattgctctaagagttggctgagctattgataataaacactatgatcagatctaataccatgatgtgctattatgatcatgtgtcagtcacagggctaagcactttgtacatgttgatgcatttaattttgatgataactcaatgaagtaggagctgttaatattttcatttttcagagggggaaaccaagtcacttggagtaacatggctaataagtgaaagaataagaatttgaaaggtttgcacagataaccagaatgcaatgctcatcacattcactgagcagtgaatcatactaactagagaaagtatgaaagctctactgaaattaactaaacaacctctctggctgtgagcctgccaagggacaggtggtaaacttggttactgcataaggccccttctatccacagtattcaggaattctttagtgaacataccttgatgactccttaacattttcttcacatcgaagtaaagcttggaaacattgcacatagtatgaagttccaaggagacagcctctgatgtttccagcttcacagcccaactcctagaataagcagaggcgagagatttcttcagaggtgcattccattcatttctatatacgcacacccctcccctcctgcattcaaacaggacttacctgctcaaagtgtcattcacattctataaagaaacaaaaagaaaaggtgagcatgggaacatcggtatttcatggggcttgtcatgcagggctattcttctttgctttacccgaagaagtaaagagagttaccctagtcttagtcttagatattgatggatactcaaacaaagtaattcccaccagtcttaggtattgatggatacccagatggaataattcctaccagcttctgggagattcagcatggcaggatgtttatcaacatttgcatctattctcatccttgctgaagtctgagggccaggagctttgtccatgctccctctgtaaggactagcttttggtgatcggatttccttcacagtgagcccagattagagaacacttatcataaaggtccttagtggtgaatctgtgcacagccctgagactgggccactgccactaagatggtggtagcaggtatcacacagtggtaaagcaatcatgctatacactcagccttacagtatagtcaccaatcctgttagttagaaccagaattaatggctccagatgtttatcttcctacagataaagctgtagattgtaccataacagctctggagcaagggttctacaagcaaatcagggaaaaggttatcactcattttggctgccccacttcatcacccatcagtcacctagtggagtatttcaggagagagtcaacaaccagggttctctgcacatgggccaaggaggcaaacagtggtaaatgttatcccgtggtttcatttggccaagctgtgttccctcagaagtttatttttctaattgacataaaggtaccctataaattagtgaaggccagcctgatggcactgatgtacatctaaaagaaacattactttatcttcccatgcttccttaccattctcctttaatagcactataacataccttttttccctactccaagtacacagcctcacctgcagcaatttctgggctgagccctgacatttttcctccagttccaggatgtggctcttgagttcattgctcttcagccccagaccagcctcatagtccctcagtctactcagagtctgttgttcttctttctccagcctccagagataagacttctcttcctcatgtaggaaacactggagattcttaaagtcagaccggattttttgtctctgaatctgtaccttctcctggagtcaagaaagtatggtcaaaaggtggaagtaaaccaaatgtccatctatggatgaatggataaacaagaatgaaagtctgacacacgctactacatgacaagccttgaagacattcaagcaaaataagccagaaacaaaagggcaaatattgtaagactttgcttatacaaggcatctggagtagttaagttcatagagacagaaagtaaaatagtggttacaaggtgttggcaagaccagaaaatggacagttattgtttaatgggtagtgagtttcagtttagaagatgaaagatgaaactgagttgcagtttggagatgggaatggtgatggttgcacaacaatgtaacaatgtaaaagcacttaattctactgaactatatacttaaaagtggttaaatgcttaagtgttatatatattttcacacaaacacacacacacacacaatcagccactgggacattattttctcatgagtcactgaagctggaagaatgtccccagtttcctgctgcagagtcatgtgtgggaggcaggcactcagatgtggaagaggttgcctcagattccttatagtcacccaattaattttcttgttcttcagccaagacacaggagaaagctgggttaggagtgctagataatttaattgtgaaactagggccaagttcaaacactttatcagttacaaggataaaaagaggtttttacttatgatttaagaagttagatttctgagttggagcgattttcttgaagtaaaagcttataatgaacatcacccagactggattttaagacaaccaggctggtaagagggtccataattcttggcagggggagctttgagtgtgacaggcatttattatggttaactgagaaatactgttctactaccctagggtcatcttaagcattcctatgtgtaagactgacagaaatcaagtgaaactctcatctgaggagatgtaaagttgcaatttccattagtgctgtctaaattaatgcagtgggagtgtgtattcagggcaatttgaatctatgttcttggattgcagtcttcaaacttggcccaaataaactctctacttatcttaaaaaaataaaaattaaaaaataaaaataaattcatacagtgttttgatgactatgatatagaagaagggtctttgacttaggatgaggtggaatttttgtgtaggagacaggtgcagctttaactcttgtatagacgggttttcatatatgttagttacaatcaaggtcttccccattgcccaagatcctagaaatgggggaagtaagagtgtactcaggagctcaagagcaacatccacaaacaaagatcagggtagaggttagagaggactcctgaaagagagaaaattggtaatcagcttgtgggattttactgcaagctagtgaattatataaatataaagattggtgcaaaagtaattgtggtttttgcctttactttaatggcaaagaccgcaattacttttgcacaaacctaaatatttccataaaagaatgtggctctgataatgtggaggttagtcagccacggaaataatctgaaagtttgtagttgcaagtgtgtaggttgttgcattacttgtgatgtacttataaatcaagtataggccgggtgcagtggctcacgcctgtaatcccagcactttgggaggctgaggtgggtgaatcacgaggtcaggagatcaagaccatcctggccaacatggtgaaaccccgtctctactaaaatacaaaaaattagccaggcatggtagcacatgcctgtaatcccagctactcaagaggctgaggcaggggaattgcttgaacccgggaggtggacattgcagtgagctgagatcgcaccactacactccagcaagactccatctcaaaaaatagtaataatttaaaaataaataaataaataaagtatatttctttcatcagcttcatgagctagagtagtatgaatttcaatctggagtgatcctgttttctaagtgttcacaaagcttggtttctgtacctgtaaagttgagagccagatgctccactgtggtaaaagtgccagggtaatgagttgaggcctgcaaaccaggtttattttgacgtatttaaagtttgagacccactcgatgctttttctaggtaaatagtcatactaattctgcttcttctgactgaagtatcaggaatcccagccaactacagtttaaagatggaaagattggtgctaaatactcatggatgtaaacctggaaccaggggcataagtacaaataatggtttcttccttgggtttcattttttcaatctggtttagtgagaataaatcctcattgtgcttttcctcaatcatcccctatgcctaagctctagaatggaaaatagcttgagatcaatgaagtcagattcttactttccatttagttattcgcattgctgtggacagcttctgctccgtacatctgtcttcaagttgcttcagttttgtcacagctttctggagcttttcctgaaggaaaaatttgataagtgaagcctattcaatttgactcttcattagggacctagggggaatcccaatcttctaagatatatttgaataatagtgaatatttatagagtcctcattgttttttgctagagagcatgctaaaggctatatgtgcaggaacatactgatccccttggcaaccctgaatagttggtaggattttaaacttcatttctgtgctgtagaaaatgagactaagaaaggggtaaaataacttgcccaaagggctatgactgccaggtggtggagcaacaattgcaatctcatctgctgacccagagcctgagctatgtccaccactagagtcctgccaggaaaaagttggatatagaacaaggtaatcatcatctaaaagattttgtaaaacaacatgctgaaccaagcaaaaccaataccagtgtttggcacacatgaaattttgtgtcttatgagtcaggaaaaatcaggatgccagctggttattagaaacagttcatggaagaggggaattctggtatcttttgaacaatggtatcatgaatccaatttaaaatgatttagtattcatgtcaagcttttagcttattcttcaaaacagtttctcatatttctattgaaagtgatttgaagctgacccaaattgctaattgtagtcaatgctgaaagaattgtctcctgtcctctgtaaacccaacaagtatactcattcattctcgagtgttctcaggaaaaggttctatgtaactgttttagcaaaagatgacattgtccttactatatgccaagtgctattctatgcattctatattttaatgtcctcaaagcttataaccacctcctgtgtatgtgttttagggagggaggacactgctattatccccatttacagatggagaaaccaaggtgtgaagacattaagtaacgtgcccaaaattgcccatctagtaagtgacaaaactcaatttcaacataagctggttccttttcttactacttggtggaaaagtaattcaaatgggaatatgatcatcgcagttattagctgctccatggagtttaaggaagagctgccatgagctgagtggtggtcatgattgacatgtccttagaaggacttagagccttcatacaagaccacctctgcctcatggaggacagaataaggagcctgacactggagacaacattttcctcaaatttaggcaggacagagaaggaaaaaggacatcaggactatgcccattcctccatgctgccaacagcaaagtcccaccttccttaatatgctttctggcaagaaatctggatggtacacaaaacctctccctctgcttcaccttccacaaccaagcatttccaaatctttgactcttcttcctgaatcgtgcttaaaatctgccctctcctccctttcttatacggatagtttgaattttactccttgatattccttttatcatagacatgccacagtagctgggcacagtggttcatgcctctaatcccagcattttgggaggctgagatgggagggagaccaggggtttgaggccagtataagcaagaaaggcagaccatgtctctacaaaaaataaaaaaattatccaggtatggtggggcatccctgtagtcctagctacttgggaggctgaggtgggaggattgcttgagccccagaaggttgaggctgcagtgagccgagattgcaccattgtactccaacctgggatacagagcaagaccctacctcaggaaaaaaaaaaaaaaaaaaaaaaaaaagtagaggtaccagagtgatattttcaatgtcactgacccttcattccccaaatgaaaatcccccaataggtgttcaatttttacgtgtccttcaggagttacttctaagatgaaccactctctaccctaaatgtccctccccaccaccaaaaccagggacctccaggcagacatttttgatggtttgttttctttactagactgtagatacctaaaaggtgatgggtctttcttccctgttttcaggccctactgcatggctttacatattgtggtttttcaaatgatattcatggtgtgaaacaagaaaaaatgcgggtgtttggtttgagaacaacctgttctaaagcaaaaagaaattcatcataacacaaatggatagagataagagtccaaccatcccattgaaggtcaggatggacagtctagataattgagcaagaaatcatcataaactatttttcagaagaatgacatgatgaaagctgtatttccaagtcataatgttaggtttcaagttaaatcatctcagctcctggggagcaggataagacttggtacttaccaaagctcccgggcccacacactcaccttgtagccctggcatacgtcttcaacaagagctgtggtgtgccctttgtgctgtggtgcccgctcacagcgccagcagatgagctgcccctcgtcttcgcagaacaggtggaactgctctccgtgttcctcacatgacatttcttgatccgtctctttgagggcttcaatgaggcttcccagctgcttgttgggtcggaggctatccatatgaaatggagcccgacactggggacagcagaatgtctcctgcctcagttgcttttggcttgggtttttaaagaagtctgttatacacaagtggcagtagctgtgtccacagttgatgcttactgggttcgtcatcaggctcaggcagatggagcaggtggcttcctccatcatcttcttggtgctggtggttgaggccatagcttttattgaaaagctccaatattggctctagagatggagatgaagcagccagaattttccaccgtgatgaaaatacacctcacctgcacctctatgtgatgagctggctgcaactgacttccataggtcttgaaggttttccttccaacccctattatctcattttgtattgaagaaaagaggacctaaaaggaagaagttgaggctgaggttgtttgggccacgtttgagaactgcaacccaagtgcagagtttcaagttgccctcattagcaagcagttacaagtggttgtttagaggaaaaaaagcagttttaaagcagttttaaagttgtttgccaagaatttacattaaaatagcataagcttttgactggctatacattgttctttgtattacaaatctcgggaatatgtaggtaatagatgaggcagccagtcaggaacaaaatgcttttaaacatggggtcttaactgaagacctatactcctgcctcacttgtcctgataaattttgcatacctcacatagctcagactgctctaaattatttcattatttttcttttctcagtcttctaacttttttttttttttttaatgagacggagtctcactctgtcacccaggctggagtgcagtgacgctatctcggctcactgcacctccgcctcccgggttcaagcgattctcctgcctcagcctcccgagtagtagctgggtctacaggtgtgcaccactacgcccagctaatttttgtatttttagtagagatggggtttcaccatgttggttggctcgatctcttgaccttgtgatccacccgcctcagcctcccaaagtgccaggattacaggcatgagccaccgtgcccagcctctttttcttttcttataagacaagttctcgctctcttgcccaggctgtagtggagggcagtggcatgaccacagctcactgcagcctcgacctcctgggtttaagcaatcctcctgcctcaccctggcagagtggctgggactacaggtatgtgccaccatgtccagctaaagtcttctctccagaaagaagaaatgcattggaatttagaggatacacaaacatctagctgtatagctaatacagtagccactatcatgagtaggaatttaaatttaacttaataaaaattaaaatgaaaaaattcagtttttctgttccagttgccacattttgattgcttaatagttgcatgtgactagtggctacataacagcctcaatatacaacattctgttatcacagaaagttaccttggaccaagtgctgggagaagcaatgcaggcttcctcacaaaagctgtaaaagagagaactcagggagtgtgaaactctttcctattctagttaacttcaagaataattgttaccaggccagcacggtggctcacgcctgtaatcctagcactttgggaagccgaggcgggcagatcacctgaggtcaggagtttgagaccagcctgaccaacatggcaaaacctcatctctactaaaaatacaaaaagttagctagatgtggtggtgcacacctgtaatcccagctgctcaggaggctgaggaaggagaatgacttgagctccggagggggaggttgcagtgagcccagattacaccactgcactccagcctgggtgaaagagcgagaatctgtcttaaaaaaaaaaaaaagaataattggtaccagaattactctttgtaattagtagtaacacttatgcaattgggtgatctgtgacagattccattgaaggagtatggggagcttcaccccaatatatgactccctggtataatgagtattttgaattaaaggcccttagagatcagcagatgctggaagagacttttcccctatctacataaagaccagtcacactagacaagaagaacaattgtttttccttccaacccctattatctcattttgtactgaagaaaagaggactaagaatgtaaccagacctaatcagacactttcacaaaataatgtctgtctctcaggctcattcattttccaaagagaaccatttacaagttaaactctgttcctccattcattcatcctcccaaatattcatttattctccctagtaatcatttactgcccctcaaagaattacctatattctcctgatatcacccttcccctctgaaataaatatgtatacatgtataaacgttatacatacatatttatacagtatacatacatatttatacatacatacatatgcatacatatttatatttatgtatttatacataagtatttataaataaggctatataagtatctacccccattggcagagggggtaatcactctgtgattctagcccatgtacttgttaataaatttgtatgccttttctccaattagcctgccttttgtgagtcgatttttcagtgaacttcagaaggcaaaggggaagtgttcccttggctcctacaccatcatgacaataaaatttgactccacctcgaccccccccatcccccacaaagaacaacaaccaacactggttaataaggtcggttgttttttgtttgtgtttttgttgttgttgtttttgctttcaggagcagaggtataataggcaaaagaaagagaaaggagaatagtgaatacctcttctgcagagaggggtgcctaagtgggacttccctggctaataacgtcttgctagagacccaaccaggaggataatggaagcaatcaaggcaaccagaacaaccagaagaaccggtttatcctttttgtgccctctccctaaactgagggaataagaattggaaagaaggctgcagagcagagggtttgctcctgaggagcagttatttctatgggatcagagctcctgcagaactggggagtttacttttactatctcttctccaggacaggacctatctcaagagacatgttcagagtgattgcaacataaagagtttgcagacccaaggaggtagggaaggcagaaagaagatgggggaggccagggataggcaacagaggagtgaccaggagcgaaaaagcctgcctcttctgagaacctagctgggctctccctgtacccccgatccctcccccccgcccgcccccacacccctactcctgggagctcctctaggacaggggcagagtcaggaggaagtttgaagagtgcctagaataaaaaacagtaatttaactacaattaccgggtaggctgttttcctctcacaatttgatcagtctcttgaagccacacagaatttcttctgaagacgtgtattccttggcaggctatttcctccagtgatacaccaggcccctctctgctggggtcactgctcttctggggagatggggctcccctccttccaaggctccagggttcctgtcctgggccccactcatctaagttctgaatcttctgagatttggtgtaaagtctggtgaaagaaagagcaggaaagaggtgagagctgtaaaacaaagaaagtcctgaccattttcagagttggaggggccctgctgtcacgaaatatattccccaccccacttgccatcagtacacactcacatatccactgagaaaaccttagcctggaccttttccgtaaccttcactgctcagacacttacatattcgctgctagtcccctctgttgctgccacttcctgggtcaggaagttaactcagaccggattaaactgagaagtgaaactactgtgggaggcggggctcataagatttaggagaaaactagtgacgttgttcatatcatttgcactccgcctctccggtaaaggagggggaaacgtaggaagaaaatatccttcttttacagcaataaaaagaaggaaccaattaataaccctgtaaactatcatgtgaccccaacacagagtatctaaaaacaggaagcctgcagaggttcagttcacagactctgatttgagatctttctacttttgccaccaactcccttgggagtccttaagccttcctagctgatgttacttcttttgctatttatgggttgcttgtggttctataactgctctgaagggtgtggtggaaaaaggggtggtaacagcagtaggactcattggcatcacaaaattcatctgagtcagctttctattcttctctgtcccgttctgtgtcttgtttttctccttgctgtccttctgcaggactcagatcttcttcaatagcgagggtcagccaggatagaaaatgggagtcactagtggcccagcagtgagtgcccccagcttagagctgtgtgggatccctgggaccatcactctgctttgtgctttgtggagaaaaggctgtggggtccagggtcaagtccttaatgacttagctccagcttctccacttcaaaatgaaaggaaaagtactatcaccacccgttagaattattatttcatggggaaaaaagatggattactatctcacaataagagcttgtcacatttataagtctcaggtgtaagaggcatttatgataacaacataataaatgctggcttaagtagatgcagtggtccaagggaaccagtaaggggagctcaggacacaggtgggaggagaaattaaacttgaattctgggagccactggcctgtctgggcccctggcctgcctgctgaccctgatagccaatggaacatggagtttggcccagctgcaatccctctggtccaactactcaaaataaaggcaagattgggaaacacgttcctttcttcctataccaagcagaagactcttcagcactgcaccctcctgggtgctcacagagccttctgttgttttgccacctacgattcatcatgccctggcatgatggttgcagaccccatgcatagcatgggacattctactcctgaggcaaccagcacacagagagaggagaaagaatgagcccctgaatccttggtcccacgatgagtccttgcagatatctacaactttcattgttgtggatgtgactctgtacccaggcatggctcattccagatctgtcctattgtcagaggtgttcaaaccagaatgactccattttgaatgggggctaggtaaaataaggctgagacctactgggctgcattcccaggaagttaggcattgtaagtcacaggatgaaataggcagttggcacaagacacaggtcataaagatcttgctgataaaacaggttgcagtaaagaagctgaccaaaacccaccaaaatcaagatggcaacaagagtggcctctagtcattctcattgctcattatacacgaattataatgtgttagcaagttagaaggcattcccaccagctccatagtggtttataaataccatggcgatgtcaggaagctaccctatatagtctaaaaaggggaggaacgcttggttctgggaattgcccacatctttcccagaaaacatatgaataatccactccttgtttagtacataatcaagaaataactgtaagtatctgtattagtccattttcacactgctgatccagacatacctgagactgagtaatttataccaggaaaaaatgtttcatgctcttacagtcccacgtgtctggggagacctcacaaccacagcagaaggcaaggaggagcaagtcaggtcttacatggatggcagcaggcaaagagcttgtgcagggaaattcctttctataaaaccatcaggtctcatgaaacttattgactatcatgagaacagcagtataaattactcagggaaagacctgcccccatgattcaattacctcccaccaggtccctcccacaatatgtgggaatttaagatgagagttaggtggggacacagccaaaccatatcagtatccttagtccagaagctgatgctctgcctgtagagtagccgttcttttattcctttactttcttgctttcactttactgtgtagacttgccccaaattctttctcacacgagatctaagaaccttctcttagggtctgggttgggaccccctttctggtaacactatcaaaggatcaggaaaaggaagctagtgaatgctaaaaaggaaacaaactaccattaccaataataacagcaagacaaaagcaaaacggattgtgacagctgtcccatctcacacctgtttcccattgcaggaaggaggggctggttcatgcacagagtggccaatattagaagcagagatggggtgcagatgagacttcaggaatatgttgacaaaggcaggcctagggagaaatcaacctgaactatccccaaggaggaatgcattatctctaatatgtaaagttaggcttgatcctgtgattatgggatataggagtccaaagactcacaatgggaagtaggtcactagagtctccttcagaagctctgtactgtgtgttcccactgtgggcaagagtcagcactcagctattcctagaatgcctttcctcaactccttcagattttgcctctcaactaaccctatcctgaccacttgttagcaagtgtacccctctctccctcccaaacattttcaaatctattttgttcccatggcacttatcactgaatattttactaatttattttgtttagtgtttgcttccctcatgagaatgcaaagggatggatttttttcaatattgttcactgatgaatcccagtaactagaatatttctaagcatagtgatgtgcattaaatcaaagagtaactttctgaattgcactaaacacacatcacaagaggtgtgtgcacatatgtgcatgatgcacgtagtgtggtgtgggtgttgtgtggggtatgtggtactgtgtgtgctgtgtgtggtatgtgatacatagtttgtgttagtgtgatgcatgtgatgtggtatgtgtgtgcgtgtccatacatattaggggtggcggggatgttaatatgtcaaatggtactagaaagtatcagaactcatggtgcttactggtttcccagagagctgcttctctcccacctgtaggatatactgatggtttggacagagaagaaataaaaagaaggctgtgacctactgggctgaggaaataaaaacgaaagtaaaagaagagctgggaaaagagagtggaggggccaagggaaatttcccctttggcttctggggaaactttgctgaaaaatcaactcacaaatttattaacatgtacacagggagaaccatagaatgattatccacttcccaagagggcttaaaagcttatatattatcctggcaaaacagattatgggaggggaagaagagaaactctgttgatgggattactgttgcggatttttgctccttcgctcagctaggtccgggtttttgtctcacagccaggaagaattaggcatgcagccatcaaagaatgagtggagtagaatttattaagtgaaaggaaagctctcagcaaagacaagggtcctgaaagcagatttctggtttgctcttcacagttgaatactagggcttaagactcaaattcctgacaactccaccctgtcctaccagtgcatgcaggcctttagactgagctactccatattgattaatttcctgaactgtgcatgtgttaaggaaaggaatcatccactgcaggcatgtttaggcaagccccctgtgcaagttcccttatctgcacaaaacatccggtgtaagcacttgtggggcaggtcagaggttctctgggtaccattcccttactgtctgcctaaagcaagctggccaactcctttcattactagggagagtaagtagatcagggaacagagattaacttgaacattatcttgtgaaagtccgttcgggcatggttacattcttggtcttacaggaagggtaaataaaaataattgctctttttggtgggtctggatcttaggtagataaagaaactttaattccacgatgtgttttggtagggatagttggtggcagggatgtcagagagactttgaggcttcttcagttcaatatgaccaagggccatatattagggtatcaatttctgagccccaacaagagcttaggagagatgtgatagcatcacagtgtgaaagcaattttttgtttgtttttagagacaggctcttgcactgtcaccctggctgaagtacaatggtacgatcacagctcactgtaatcttgaactgggttcaaatgatcctcccatctaagcatttcaaagtgttgggattacaggcatgagccacggtacccagcctgaaactgcacccactttctgataaacttttcaaatgactaaaggggagagagtaagcactactcagaggtaggaagaaaggacacaggattataggattaaaacaacaaccaccaaaaaaaaccagaccggtgtggtggctcacacctgtaatcacagcacttggggaggctgaggtggggggagtcactggaggccaggagttcgagacgagcctggccaacatagcaagatgctgtctctattaaaaaaaaaaaatacctgccttgagctaatcagaatcatggaccctgacaaaggatgtcccaaagtaagtcttagcattttttttttttttttgagacagtctcgctgtgttgcccaggctgaagttcagtggcgtgatctcggctcactgcaacagctgcctcccaggctcaagcaattctccctgccttcagcctcccaagtagctgggattacagatgcccaccaccacgcctggctaatttttgttttttttaatagagatggggttttgccatgttaaccaggcaggtcttgaactcctgacctcaagtgatctgcccaccttggcccctccatagtgctgggattacaggcgtgagtcactgcacccggcaaagtcttagcattctttacaaacagtttgtacccgtatctctaaaagggagtagtgaatttcaccccaaaatgtggcttcctgatataatgagtattttgaatgaaaaactcttagagatcaacagacactaaagagacttttccctaggtacataaaaataggatggccccaccagcgagaacaattgttcttttctccctctctgttatctcattgtgcattataggaaagaccaagaatgtaaccacacctgaacagacccttttataagataatcagtctctaagcatcatttaaattccaaggagaactatttacaaatttatctgttctttgatccaattagtctctcctggtagttacatattgcccctcaacagaattcctcttcttctgtttcccataacctattttgcaaggatcaagcccctgttatttcttcaacttcaaggtggcatataagcttctaaattccactgggatattggtactatgtgcatgaggagaaccacagagtaattaaattgtaaagccttttatcttatgaatctgcctttttttgtgttcatttttcagcaaaacttccaagggcaaaggtataaaacaaaaataaaattctaaagccccccaaccatctgaatagactttctcttcagtcaggcttcttaaaatgtaacctgaaagactggctcaggccattaagggaagtgggggttgaacatgcctcattattcctctctggcattaacatcaacacagcttttaagtctgataagaaacattttacaacctattctctctgaagcctgctagctaaaaacttcatcccatagtacaactttggtcttcacaacctgttatcacaacctagtgctcctttctattaatcccaaatctttatacaaactcaaccaattgtcatcacctccaccccactcctccgctgcttccagttgtcccgcctctctggaccaaaccagtgtacatttcttaaacgtatttgattgatgtcccatgcctccctaaaatgtataaagccaaggtgcatcccaaccaccttgagcgcttgttctcaggacctcctgagggctgtgtcatgggccatggtcactcaaatttggctcagaataaatctcttcaaatgttttacagagtttggctcttgtcatgacacagatgactgcttcactgaagcctgctctggaagtgagtgggggttttgcaaggataattttccccggatagccccagaagcagctagtaataatacacttaaaggtagctaaaatgcattgaacacttgttttgtgccagacctatgtcaacatttgctttgtgccaggcttatgccagtactcctgatttgttaatacattctaaataaaaattctggagtttcaaatataataactgaaaaacagaaaataaataaaaatatataataactgaaataaaaatttactaaggctggggatggtggctcactcacacctgtaatcctgttaccggaaaggggtccgtccagatccagaccccaagagagggttcttggatctcacacaagaaagaattcgggcgagtctgtaaagtgaaagcaagtttattaagaaagtagaggaataaaagaacggctactccataggcagagcagctctgagggctgctggtcgctcatttttatggttatttcttgattatgtgctaaacaaggggtggataattcatgcctccattttttagaccatataaagtaacttcctgacgttgccatggcattcgtaaactgtcgtggcgctggtatgagcatagcagtgaggacgaccagaggtcactctcatcgccatcttggatttggtggggagcagtgaggatgaccagaggtcactctcatcgccatcttggatttggtggggtttagccagcttctttacttttttcttttttttttttgcccaggctggagtgcagtggcacgatctcagctcactgaaacctccaatttctgagttcaagcgattctcgtgcctcagcctcccaagtagctgggattacaggcatgtgccaccacacccagctaattttttatatttttaatagagaccgggtttcgccatgttgcctacgctgatctccaactcctgcgctcaagccatccagccaccttagcctcccaaagtgctgggcttataggtgtgagccaccccacctggcctagccggcttctttactgcaacctgttttatcagcaaggtctttatgacctgtattttgtgcccactgcctgcctcatcctgtggcttacaatgcctaacttacagggaatgcagcccagcaggactcagccttatttcacccagctcctattcaagatggagtctttcttgttcaaatacctctgacaagcccaacactttgggaggatgacacaggaggattgctttagcctaggagctcaagaccagcctgggcaacacagtgagaccccatctctaaaaaaaaaaatacaaaaaaattagccaggcatgatggtgtgtgcctgtagtccctgctactcaggaggctgaagtgggaagatggcttcagcccaggaattcaaggctgcattgtcagaggcatttgaaccagaatgactctatcttgaataggcgctggataaaataaggctgacacctgctaggctgcatttccagtatgttaggcattcttagtcacaggatgagataggaagtcagcacaaggtacacatcacaaagaccttgctgataaaataggttgtggtaaagaagttggccaaaacccatcaaaaccaacatggccaccaaagggacctctggttgtcttcactgctcattatatgttaattataatgtattaacatgctaaaagacactcctaccagcatcatgacagcttacaaatactgcggcaatatctggactttaccttatatggtctaaaaggtggaggaaccctcaattttgggaattgtccaccccttttttggaatgctcatgaataatccaccccttgtttagcacataatccagaaataactataagtatgcttatttgagcagaccacgctgctgttctgcctacagagtagccattcttttatttccttactttcttaataaacctgctttcactttactgtatggacttgccctaaattctttcttgtgtgagatccaagaaccctctcttggggtctggatcaagacccctttctggtaacatctttctggtgaccacgaagggacaatactgaggagactctgaagccaaaggaaacagactacagcaccaactggctgactttgggtaagtggtggagtccccgggtaaaggataggattgggttagaggtgcaacttaggggagatagggtctctcctaagacagagagggtttcagtccgctcttaataaagggcaagaatgcttgaccgaacttgggtttgagacccaacttaggaaggctacagtccttaagatttaaggggttagaggcccctctcagtaaagtctctcttggttaaaaacggatttagcattaggggatgttaactgctattctgtttgtattaatcttccctgtgctctttgctgacagctatgggtgacaggattaggcatgtacaggatcacgggacattgggaacttttcttctctccaaaaggggaagcttgacagctgataggactgttggaaaagatccctttgctatgacaagcagccgcctgaacttttgattcagtgttgctgcaatgggtgggtctttctctggcctctgtgaactcctcaccttccccatctcaccacaggcaatgcttttctccctttctctcttttctcttttctgtcttttctgttacttgagacaaccatcttgcccagagaccatatgttgaaactcctggtcagaagtttgattaaagatgaaagggcctatctgggggcaagtttgagccttcccagttagatattgggtgctaagtggagtggccaatgtctatgttttgtcacatgtatattgctctggctgaaatggaaaacgttaatttggttactttatgtggccattgggcagcatcttacaaaagtgagagacatttatttgcctgtggttccatgaaacagaaaaaagttggttttcttttgtgtcgtagcttggacccaagggctttgcagtgagcaaggttgctagtgctgctcagtgaaagagaacccagaaacctggcatgccagcaaaagggtaaagatttcttaccagtcaggcttctggcctctctctcttagtgaaaactgaatgaatggtaaaaatcactgtttatcacctctgtaaagttttgattaatgggaacaaggatttgtggggctagtcttaagctgtaatgaatctggtatactttgtgatatcaatttgtctttctgtattactctgtcataaagaggaatatggtaggatagaacatgggctcaggactccataagcctgctgttcaagccagcccagtaaactggtccgttgcaaagtttattacaggtccctggaaaaaaaaaaaaataaaaactggatgaagtttccttctcatcttgttttatgtcctttggagcttcaccttgtaaccacgtggcggtactttctcttggtctctgccatccagggaacaggaattttggggtttatgtaatagttaactctaaaaattatctcaagccattgcaagctcaaaattggctgctctggaccccttctgggaagggcaatggaaactaaccagtgttgtagctcagcagctaaggatttgtcattttataatggcggccaaggttcaatcctggcttagggaatgagtactttctgattgatatctgtgtgacctttaccatttgttgattctgttctcttcccctccacacactgtcttgagttttcctctctctgagaacctgggagattatctttggtaaagttcaaaagccagaaataatggccgtgtgggatggctaaagttgagtaataagaaacttaaaaggactccttttttttttgctttagagtgctatggtttatggttaaaagcttaattaaaagtggatattcaatctctaaaagcctgggactccttgggaaaagcagaggaggcaccacagaccccattttgggaaaacctctgttttcctcatgaaaccccaggaactggaagtggatagatccttcgcaaaatctaaggctctgtttggctttgcattatgttatctgatgtttttgacttttgggggtatcagaaattactttgcattatgagggagatctggtgtgtaataaccaggtaggaaatatacttctggggatagctaaaggcaaatataggtgaatacttggctatttgcacttttggatcacaagaagcattctcttgactacctagaaggtatggaaatgtctccatccccaccgagagataagattcccaggggagatggctgatcccccaaaagagggctgattccctcttttgggatccaggatctggtataaaaatgggaccctggccaggcacagtggctcacgcctgtaatctcaacactttgggaagcctcagagttatgaatgtctcaccatactgacactttgtgactgagctcctctctaccctggacacaagagaccctaataattagacaggaatatcattgcccctatttagtctgaagaagttatagaagacggatctttatcccactgcaatccttaggattaagggttccctggtaaaagggagtgggaaaatatgtcagaggcatttgaatcagagtgactccatcttgaataggggctgggtaaaataaggctgaggcctgctgggttaggttaggcattctaaccaggagtttagtcacaggatgagatagaaggttgcacaaggtacccgtcacaaagaccttgctgataaaataggtaacggtaaagaagccagctaaagcccaccaaaaccaacatggccacaaaagtgacctcttgtcatcctcactgctcatatacactaattatactgcattagcatgctacaagacactcccaccagtgccacgacagtttacaaataccatgacaacatctggacgttaccttatatggtctaaaacggggaagaacccttagttctgggaattgtccacctctttcctgaaaaattcttgaataatccattagtttagcacataatccagaaataactatacgtctgcttatttgagcagtccatactgctgctctgcctatggagtagccattcttttcttttatttttattttttagataaagactcgctctgtcactcaggctggagtctggagtgcagtgacgtgttttggctcactgcaaccttcacctcccgggttcaagcaattctcctgcctcagcctcccaactagctgggaccacaggtgggtgccaccatgcctggctaatttttgtattattagtagagatggggtttcgccatgttggccaggctggtctcgaactcctggcctcaagcgatccacttgccttggcctcccaaagtgctaggattacaggcattacccactatgcatgacccattcttttatttcttaacttttttttgtttttttgagacagagtctcactctgtcacccaggctagaggctggagtgcagtggtgcgatcttggttcactgcaacctctgcctcctgggttcaagcgattcttctgcctcagtctcctgaggagctgggactacagacatgtgccactacacccagctaattttgtatttttagtagagacagtgtcttgccatgtttgtcaggcttgtctcgaactcctaacctcaagtggtctgcctgcctcagcctcccaaagtgctgtgattacaggcataaatcactgcgctcggcccttctttactttcttaataaacttgttttcactttactgtatggactagccccaaattccttcttgtgtgagatccaataacccttttgtgtgtgaaagaatgtattgctgctgttcaggctggagcaagctggagctcatgctgctgctcagactggagcatgcgtgatctgtgatcccagtaagaggatcatggtcactccagcctgaacgacagcatgatatctcatctgtaagaaaaaaaaattactagagggctttaacagcaaatttgagcagcaaaaagaagtaatcagtgaactcaaagataggtcaattgaaatgatctactctgaaaaacagaaagaagacagaatgaagaaaaagaaatagagccttagagacaggggataccatcaagcatactaatatatgcataatgggactcctagaaggagaaaagtgagaggacagggagagagaatgtttggagaaataatttctcaaagcttcccatgtttggcaaaaaagcattaacttgcatacatattttaggagctcaatgaattccaagtaggatacactcaaagagatccatacctagacacatcataatcagattatcaaaagatgaagaagatgaatcttgagagcagaaagaaaggaacaattcatcacatacaaatagtactcaaaagatgtctggagtaggtatactaatatcagacaaaataaactttaagataagcattgttataataaataaagaaaggtattttgtaatgataaaagtgtcaattcatcaagaaaacataacattataaacatacatgcacctaacaacagagccctaatattcatgaaacaaaactgacagaattgaagggagaaatagaaaattcgacaataatagttggagacatcaatacctcactagttagacaagatcaacaaaaaaatagaagacttaacacttgaaaacacctaacctgaccctaacataaatctataggtcactacaccccaaaacagcagaataaacatccttctgaagctcacatgaaacatttttcaggatagactgtatattacttcatgaaataagtctcaataaatgtaaaaggactataataatagagtatatattctctgaccaaagtggaatgaagatagaaatcaataactaggctgggcgtgatggctcacgcctgtaatcccagcactttgggaggccaaggcggacagatcacgaggtcaggagtttgagaccagcctgaccaacatggtgaaaccctgtctctactaacaaaatacaaaaattagccaggcctggtggcatctgcctgtagtcccagctactcgggacactgaggcaggagaatcacttgaacccaggaggcagagattgcagtgagctgagatcgcgccactgcattccagcctgggagacagagcgagactccgtctcaaaattaaaaaaaaaaaagaaactagaaaaataagaacaaatcaaacccaaagcaagcaagaggaaaatgaaaaatttcaaagcagccaagaacaaaaggcacattatgtacagaagaacaagtgtatagatcacatatttctcatagacacaatataagcaaaaagacagtggagcaaaattttttagattaatgaaagacctacaattctgtaccaagcaaaaaaactccccccaaatgagggtgaaataagacaatttaatacagagaaaagaggaaggaatttatctagtcatatgtgagagttttatgatacattttgtactgtatatgtggatgttttctatttcatttaaaaaatcaaccgtgcaattaaatggtagattgtcttgcttctttttgattgacacagtcattaactaaaatattgtagtatttttttatctccctgcctaaaggcaataaacatctaatcagcagactagaacaataaaaaatattttttaaaagtcctttaggcagaatgataaaagtcccttaggcatattgaaattcctatttatacaaaggaataaacagtactagaaattgtaactatgtgagtaaacagataatattttttctccataaaatgtggttgactattttcacaaaaatagttaacaatgtaatgtgtgatttatagcatttaaaagtaaaacaggccgggcacaaaggttcgtgcctgtaatcccagcacttttggaggccgaggcgtgcagatcacttgaggacaggagttcaagaccagcctggctaacatggcaaaaccccatctctactaaaaatacaaaaattaaccaggcgtggtggtgcacgcctgtaatcccagctactctggaggctgaggcacaagaatcacttgaatccaggaggtggaagttgcagtgaggcaaaattataccactgtgctccagcctaggcaacagagctagactctgtcacacacacacacacacacaaaagaaaagtgtatgacaacaacagtgcaaaagaagtggaaatgaaaataatgttattttatataagtggtatacttttagatgaactacgataaattaatgatgtatactataaactctaaggcaaccactgaaataatgaaacgaagaattatggctaacaagccacaaaaagaaataaaatagaatgagaaaaaatatttaagttgttcaacagatgggaaaaaaaagaggaaaaagagaacaaagaacagatgggacaaatgggaaagtaatagcaagatgatagacttaactctacccatatagattatcacacttaaggtaaatgatctaaatactctaatacaaaagcagaggttgtcagattgaattaaaaaaacagacaacaacaaaaaaaagcaaaaaaagagccacaacatgctgcctacaaaaaattcactttaatataaagacacaaatagtctagaacaccatcacttttaaccttatttactcaaacctcctgatccctatttatttatttatttatttatttatttatttatttatttatttatttttgagacagagtctgactctgttgcccaggctggagtgcagtggcaccatctaggctcactgcagcctctacctctcgggttcaagcgattctcctgcctcaggcctcccaagtagctgggactataggcacatgccaccatgcccagctaattattatatttttagtagagacggggttttgccatgttggccaggttggtctcaaacgcctgacctcagcctcccaaagtgctgggattacaggcgtgagccacagcacccagctcctcttcatttattcttgctacgcttcctccaatccattttgtgcatttgatgattttgccagtaacttctttatttttctggtaaaattacttatgggtcactgaggactgggatgttctttcttctagagggggtttgtgtctgcttttgccaggaagctggggtaccaccagtcaagtattactttaaactcaattcatgaattgagacttttttttttttttttttttttacgcagagtcctactctgtcacccaggctggagtgcagcggtgtgaacatggctcactgcagcctcaacctactgagctcaagcaatccttctgcctcaccattctgtatagctaggactacaggtgtgtgccaccatgcctgactaattttttaaatattttttttagagatggggctcactttgttgcccaggccagtctcgagctcctgggctcaagtgatcctcccaccttggtctcccaaagtgctggggttacaggcatgagcctctgtggctagccaagactttttattttttagcctaaatgtgtataaaagttggcttgtggttacaacttatcaggattgatgatctctctctctctctctctctctctctgtctctccccacctctctcacatcccttgctctgctgagaagcagagcaaacattctagcagtttccagagagtaggatgggattacttctagtttacttttatcatcctttgggatcgcagtattactgggagaacacaagtatctcttattagacataccacctttgtagaatctggactttcattttagactttatttgttttctactataagcaatttaagttacagatctctctacacactgtttaagttgcatcccatgaattttgatgtgctttattgtcattattatatagtacaatgtattttgtaattttttgtgatttgtttggagagattgattaattagaatgatgtttaatttccaaatatgtgtgtttttttctacatttcttatttttattgatttcaaatttatttctactgtagtcagatttaataattcatttatttttattattttcatttttttagagacagggcctttctgtgttgcccaggtttgtcccaaactcctagtcccaagcagttctcctgcctcagccacccaaagtgctgggattataggcacgagccacccgtgcacaaccaacaattcatttaaaaagtgggcaagtgaactgaacagacatttctcaaaagaaggcatacaattggccaacaaatatatgaaagaatgctcaacatcactgtattagtctgttttcatgctgctaataaagacttaacctgagactggggaatttacaagagaaagaggtttaatggacttacagttccacatggctggagagatctcacaatcatggtggaaggcaaggaggagcaagtcacatcttacatggatggcagcaggcaaagagagagcttgtgcagggaaactcccgtttttaaaaccatcagatctcgtgagactcattcactatcataagaacagcataggaaagacccggcccataattcagtcacctcccactgggttcctcccaggacacatgggaattgtgggagttacaattcaagatgagatttgggtagggacacagccaaaccatataaataactaatcatcagggaaatgcaaatcaaaaccacaataaggtatcatctcaccccagttagaatggctattgtcaaaaaaacaaaaaataacaaatgctggtgaggatgtacagaagaggggactcttatgtcccactggtggaaatgtcaattagcatagccattatgcaaaatagtatggaagtgaggtaggttacatagggtggtcacagcctcccttgaaaggaaacaagaaacttgtcaaattgatggagagaacaaatctcttgacattacacaaactgcatctggggctagtggttagaatatcctcagtcaaggaggtagaagagcaggagggaaaatccctaagttcgtgcaagtgcagaaacccacaagctgtgttctcaggttgacatatactcattttaatagtaagaaacacacccttgggtagagaattaaaatgctaataatacatgtgatgtatgtactagcgtgtatggcaatattgcatgcacattcaagagaccacccaaaacatatttaacaacaatgcccattcccaccccctcatggataatcacgtaggactcccataacgggagtttcttcagtgtcaattggtgctgaagtagccgaccctgactctgctatcagcgtgtactttcaccttgcaataaactcctttgcctacttttactttggactggctttcaaattcttttgtgcagggaattcaagaatctgaaccagcctactgacaacagaggtttctcagaaacctaaaaatagatctaccagatgaggctgaaaatctgctactggctatttatccaaagggaaggaaatcagtatacaaagagacacctacatccccatgtttattgcgtcactcttcacaagagctgatatatagagtcaaccctaaatgttcattaacagacaaatggatagaaaatgtggcatatatacacaatgaaatactatttggccatgagaagaatgcaatcttgtcatttgtggcaacgtagatgaaactggagaacattatgttaagtaagataagctaggattggaaagataaatactacatgttatcactcatatgtgaaagtagagaaaaatttttagctcatggatttagagaacagaactgtgggtaccggaagctgggaagggtagcaaggaggggaggatagggagaggttggttaatggtgacaaaattacagctagattgtagaaatgagttccggtgttctgcaccattgtagggtgcatatggttaactctcatttattgtatattttcaaaaagctagaaaagaattttgaatactcacaacaaaataaatgataaatgtttaaggtgatggatatactaattactctgatttgattattacacattgtgtacacatataaaaatatcactctttatcccgtatatatgtacagttattatatgtcaactaaaaataaaagaaaaaaagaatatgatctatcatgatgtatatatcatgtgtacttgagcaaaatgtgcatgcagatattgtgtataatgttctataaatcaattagctcaagataatagataggattgttcagatcttctgtgtctttactgatattttgtctagttattgcatcattaccaaaaaaagggtgttaaactctccaaatgtgattgtagaattgtctattttgtcttttcttttccatttttactttatgtattttgaaactctgttatgacattttgctatgtattttaaaacttcgttatgtattttgaaactctgttgttagaatcatacatttatgattattatgttttcttgatgaaatgacacttttctattgtcattgtttttgttttttctgaaatggagtctcactctgttgcccaggctggagtacagtggcacaatcttggttcactgcaacctccacctcctgggttcaagcgagtctcctgactcagcctccaagtagctgggattacaggcatgtgccagcatgccaaactaattttgtatttttattagagacagagtttcaccacgttggccaggctggtctcgaacctctgacctcaggtgatccgcccacctcggcatttttattttattttatttttttgagacagagtctcactctgtcacccagggtagaatgcggtggtgtgatcttggctcactgcaacctccgcctcctgggttcaagcaattcccatgcctcagcctcccgagtagctgggattacaggcacataccaccatgactggctaatttttgtatttttagtagagatggggtttttctatgttggccaggctggcaactgactcctttaacaatacaaaatatcactctgtctctggtaacactctctgtcttaaactctattttagctgttattattatagccattttagtctttttatgctttctgtttgcatagtgtatatattttaatatgtttattctcaagttatctgtgtttttatatttaagatgtttctcttctagccaacgtgtttggttcttgcatttttaagtcgattctaacaatctttgcctttcaattgaaatatttacaccattaacatctaacattaacatttatttttctttccacagtacactggctagcatctcccatataatattgaacataaagtgtgataactgacatccttatttcattcctactctgagtggaaagggcaggggtggagaaagcattcaacaatttgccataattataatgctttttgttacactgttttcttctgcattaaaaaatatcattacattttgcatgaattattaggagaaaatattttccaattttcctggaaaatgccataaccacgtctctcaattttgtttccatctttcttccacattttacataacctacataagagacacattatcaagtatattttacatggcttctcagtgtcttctctgtctgctaacaggtttaccaagagatggcactcttgtatttctggtggctatgtccatatcgttttgcctttaagacagcgtaactacttctttcaccagtattaaagacatgtacatttgatctggttcttgtggatgattttaaatgactcaagctaataatcctaattttacctaaacactccattattttaaaatgtattcctttatgcccacaataaacatttattgacattaggctggacattaggcttctctatggcagacattaggctggaccctagccatatatctattgagggaaaaaaaattattttctatataagtttccagaaagccaagatgtgttttaaaaacaaaacaaaacattacattctaaatgctgtaacaagataagaaaaagtgttgaggctgagagaagaacaaagcagcaagcaactcctggaaggaccactgctgcagaggtaataactggtgaaccatgttttggagaaggaaaaggtcaccaagagaaggagggggtccagggtgttcagaaagattgcatgcataaagatcaagggtaataaaaaaaattccgtattatgtaaatgtgaagttccaggaccatgagcttggagagcatgaagtacaggaggagggttggtttcaaataaatctgggaatgaaacagtgaagcctctggcagaactcacatctctttcctcccctcttccttgcacattccctttatggagtaattgcagggatgggaaaagttcaaaaccaccactgagcctaggaagtgctagggtaaagtggagaatgaacctgcgtgatttgctcatcctaaactaggttcttctaggagagcccttccccataaaatctgccctcctcgaaggggcccagacagcctaagctcacctcccaaagaccccttacttgctgactgaatctgattccacccagacatggcctaaaacccttccataactctatagccaaattcaattttagacaggcctcataccaacctttcttcctctaagtctgccaccctaggcaattctcaacattctctacacactttggggccatagacgtgctaccaagtctccagacctagacctgatggagcagtgctgtaatgagacgaccactggcctttgaaccagacccttctctgtggctcctatgcatctccaacctgttttgagcactgctgccaagacatctttggcactttgttgtgaagttttaaaactgaactaatctacaaaacacctaacctttaaaaattcattgtcatttcatatcatgaaagataaagaaaggccaggaaactgttccaggttaatagagactaaagagatagcaaccaaatgcaatttgtgatcctggattgaggggaaaaagtgttgtcagagacatgattgggacagctggtaaaatttgaatttgaatttaaagataaagtattgagtaatataggaagatgattatctgcaactttcaaatgtttcagtaagtatatatatatataaagagatataaagacatataaataaatggataggtagagaaaaagcaaatgtataatattaacaatctaggtaaaaagtatatgagtgttctttgtactgtttttctgatttttctatatgtttgaaatcattttaaaataagaaggtttttgggttttttttgtttgttttttgtttttagagacagcatcttattctgtcaccaggctgtagctcagtggcccaatcattgctcactgcagcctcaacttcctgggctccagtaattccccctacctcaggctcatgagtagctggtacttcaggtgtgcaccactgcactcagctaatttttattttttaaatttttgtagagatggcatgttgctatgtcacccaggctagtctcaaactcctgcccccaagtgatcctcccactttggcctcccaaagtgctagaattataggcatgagccactgcacccagccccaaataaaaaagtattttattttaattaactaattaactttgagtcagagtttcacccttgtcacccaggctggagtgcaatggcatgatgttggctcactgcaaactctgcctcctgtgtttaagcgattctcttgcctcagactcctgagtagctgagattacaggtgcctgccaccatgcccagctaatttttatatttttagtagagacggggtttcagcatgttggtcaagcttgtctcaaactcctgacctcaggtgatccacccacctccgcctccgaaagtgttgatgagccaccacacccggtctaaaaagtattttaaaaccacagtcccactctaccttgtcctacactaccaggggctaggatcaccccatgtcttctaggctatgagatagaggaatccaaggaagaagataagctacttggttcctctatagggtcttgtgtgtgctctcatgtgctctctctctctctctctctctcacacacacacacacacacacacacacacacatgaataccagagctatcactttcccagtctagtactcatctcatcccaagggttttgtgttgtagtggtttgctcatttctttgttttgtttgtttgcttggattattctttttctctttttgcagctgaagggagaatttccaggccagccctttggccattagagttacagtgcctctattcaggcttcatagagagacctgggattcagtagtggggggcttttatccagttcaaaataatgcattctcaccaagatgtactttgaaataaaacaatactaaaacacaaaattttatttatgctgaacattgaatcacttttttctgtattttgtgtagaaagttatacacacacaaacacatttgctcctgctttgtttattggcccaggggtatgtttggtaatacttcatcaggcatgagtagtacgtcttggaaggtgtggtctaaagcctagactcctatctgcttccttcagcattctccagtgtatctgtcatctgtctaccttaggataggggtctccagaacttccattcacatttagaagagggcagcggctttctatggaaaatatgaactctcattcatctctattccttcttctagctatggtccagctcagctgtttggaataaagtatctatatgaagtctgcgaatggttctcagactggttgaacattagaatcacctgagtaccttctaaaattcttattacccagggcatatctcagaatgagtaccgcagggtagggataggattagggatcatgatctctggagtctggtttaggcactagtgctgtttaaaactacgttcatgaggtggaggttgcagtgagccgagatggcgccactgcactccaacctgggcgacagagtgagagtctgtctcaacaaaacaaaacaaaaaaaaccaactacccttgtgatttgaatgtccatccaaaattgagaaccattaggtaaggccaagctgtataattaaagagcagttttcatttgtctggtgtggtggcagctttttgataagggaagtattgttgccatccacatacctgagcctcactcctgagaacactggtgtgtatgttgctaaaattccccaggtgattctgaggttccttcctggataaaaaccactgaccctgggaatgtacccactgccaatctcctgcgtaaaccttggatactgggaagcctacagttgaaaatattgggcttgagatcctgaaacaaatcttgtatttcattaagactaatatttggtacagtgcagcaaatcaagggaattttggtggctgagttcttttagaacttttgcattgaaataggttcaagcagcaataagttaaaactacaacctcagctaaaggattaaaagacacgtgagctgggtaggatgaggtctaaggttgggtgtggcggctcatacctgtaatcccagcactttgggagactgaggtgggtggatcacttgaggtcaggagttcaaaaccagcctggccaacatggtgaaaacccatctctactaagaatacaaaaaaattagctgggcgaggtgccaggcacctgtaatcccagctactggggaggctgagggaggacaatcacttgaactcaggaggcagaggttgtagtgagctgagatcgcaccactgcactccagcctgggtgacagagcaagactccatttaaaaaaaaaataataataataacaataataataattcagacatatccaggcatcaaacagatacctggggcagatgaatagtcttgagattcaagtcacacatgaaatttaggtggaaaatgacattggagaaatttgagattatgatgaatggaaatttttcaaagaggaatttcaggctctgttcttgaggggatagatggacttccaacagcaataacacaggattaatgaggacttgggatgttacataaattagagatgttagatggataaagagataaaagtactctctctaagaacatgggaccagagataggctcacttctaaccatcagatataactagcagactaaacggtctaaaaataaaaatcatgccccactcctgcttaagacattttaattactctcagtaactcttcagtttttctactgtgttatctttaactacagggttggtctgggtgtgcaacacaagaaagcctggcatatacatggattcaagtgtatgccatgtgcaggtattctttcatgtactatttcatgtattctttttcacatctgttttttccttcattgaagtcaatggctgatattagattctactattcatgtgtactagttatatataattgttacaaaacaaattagcaaaaacttagtggcttaaagcaacacacatttattattacctaaggtctgtggatagaagttctgacatggcttaactgggttccctgcttcaagcctcatgtggctgcaatccaggtgttggctgagtctgaattctcatcagaggcttgattgtggaaatttccacttccaagctccctcaggtttgttgaaaaattcagttctttgcaccggtagaagcttcttggtagaggctgattcaacttctagaggctgtctgcagttcctgtcacccagggtggagtgcagtggagcaatcatagctcactgcagccttgacctcccagaatcaatctgttctcccacctcagcatcctgagtagctgggaccacaagtgtgtgccatcacacctgcctaaaaaacaaacaaacgaaaaaaaacccccagagaactttgtagagacaagctggtctggaactcctgcgctcaagcaattctcctgccttagcctaaaagttctgggattataggtataagccaccatacctggcatatggcaagtcttgagcaggacaaatacagatgatttatgtctgtcttccatggtattctaggttattgttgagatggtcctctattgtcttgttccatctattgattagataaaacgttgttccttctgttatttttcaacagtagcttttatgtgtctctctttatcttaaaattctaaccaaagagctgctcttttcttggtgtactttacctttggttgatccttcttaacctcttcttgccctctggggcctaagatgagggctgttatcagatgtgagtctatgggaaagcaagcaagaggttcttcagcctccgttcagccttaaatgtctaggtagaaatcagtcatggcccttccaatgtggtacagaccagatcacagagacaggggtctcagccaaggtcttgtggcctaagccttatagaaataatgagtgtttacttacttggagaactcccttggaatatctttttttgtgaacctgaggcaacttttggtgatttcttgatgtcttgggaatcttggtctagagccatttcaacccgatttcttttcatgtcagtggcattttgtgaccagatagtaaataagttctatgatgttcactcagagaaatacaatgacttatgatgcgaagcttctgtggttcagcccttacttcatcttcattccctcttatctgcatctgtctcctgcttgggaacaaaagtctggcttcattctatgacccccacgttgagtttcttagtagcacttacttttcaattaggagtgtcctcacttctatccgtcagacataactagccgactaaacagtctaaatataaaaatcatgtcctactcctgctgaaaacattttaattactccccatcatttaattttttctactgggttatctttaacttcagagttggtcttgtgtgcaacacaagaaaacctggcatatacatggattcaagtgtatgccacgtgcatgtattccttcatgtactatttcatgtattctttttcacatctgttttttcctctaaaatttatttccttttaaaaatgaaaattttgcatttgactaaatttgtcaaatttagtcaaatttgtttaaaaccatttttaaaatgtttcccgaagttttgagtgaagttagtacttcagaaaaactgttttgtatttttcctgtgacctcagtgcactgctgtgcatttccatttctgcgtccacacacatttgttttgaggaaatataggaacgacaagataaagttcaagctcctggacattgcataaaagaccgtcatgacctggtcctgttgacttccctagatttcccgctatttcctaagttgagatttttggtttggatgctttgtgttttcctaaaatcaaaataggtttttgccttttatgattatacagtaaataaatgctatttgtgtgaaactttaaacaatacaaaaaaaacctaaggaagaaagtcagattcatctaaaaatccttgtggccagaattaactaccttagttactattttctctatctctctctctcaatgtatatttggtgtaggtataggggtgtgtgtagtgtgtgtgtatgtatatatctgtttctattcctgtatgtggatgtgcacaacgcatcctgctttgtacactacagtactagcatttttctaatgtaattcaatattgttgaaaacattttaaaaaagcttgtatatatacacacacatacacatacatgcatgtatgtacatatacacatacagacaaaaatgtatcctatgtatattcacacatgtatacacactcacacatacatagagttttacatccatagtttataaatgttgcttttttttggtcacctttttgctaagtcttacactttttttttttttttttgagacggagttttgttgtcattgcccaggcttagtgcagtagcgcgatctcacctcactgcaacctcgacctcccgggttcaagcggttctcctgccttagcctcctgagtagctggtactacaggtgtgcgccaccatgcctggctaatttttgtagtttttttatagagacgaggtttcaccatgttggccaagctggtctggaactcctgacctcaagtgatctgcctgcctcagattcccaaagttctgggattacagatgtgagccactgcacccggccaagtcttacacatcttttttttaccactaaactgtttacccaaacctgataacccaagtcaacagctattatggctcacacaatcttatgtaaacaaagatacagatatatagaattttcttgattaatattcagaaaaaaatggagtccctttatacgtccttagtatctgctttactcatttaaaaatgtattacattatatgaaagtattcaggtcaaatgttatagatgtgattcattctttttaactgtgttatttttctgcaatgactatgtatcacaaagtactcagtcttccactgatgaaaatttgggctatttccagtttgtcttccatttttctttcttcctcttggattttcactcaatgtgtttactaatttaggaagaatcaatagtttttatggtattacttctcccattcaagaatatagcatatggtatagtatagtagagtacttagtttaatttagccagatcctgttttctgccctttaataaaattctatcattttctgcctttgagtcacattttccttgttcatataattcttaaaaaatgtatagttttcattctaagggaacataaaaacttctttccatttctattcctgtctagttaattctactattgggaaaagtaactgttaaaaaaaattcttatctttccagtcagttcaccacatttcctttatacctttgtactttaatccccagtcatgttgaacacttcttattcctcacaccaagcctcaacgggtttgctctttctggaaggtgcttcccctgtattactgacttattcataccacacatggagactggcgcagccctgttctgcctgggaagccttcccctgatacccccagttggcaggagtcttcatttgttcttttctagtcacctgtgcaagtttgtattgttcatgtttatcatccttcattctagttgtctgtctctgtgtgtggtctcattcagtggactctgaactcttatgaagtcatgtcatgggtcagatcttaataaattaatattgtcggaagctaatgtcatgtctagaatacagaaaatttatcaaaaaaaaatatagtatgttggctgggcgcagtggatcaagcccgtaatcccagcactttgggaggccgaggcaggaggatcacatgaggtcagaaattcaagaccagcctggccaaaatggtgaaacctcatctctactaaaaatacaaaaagtagccaggcgtggtggtgcccacctgtaatcccagctactcaggaggctgaagcgggaggatcacttgaacctgggaggcagagattgcaatgagctgagatcatgccactgcactccagcctgggcgacagtgagactccatctcaaaataataataataataataataataataataataataattgtatggaattgaactgctctgattggaaatagctgttttttaaaaaattattattttttaagttcctgggtacaagtacaggatgtgcaggtttgttacataggtaaacgtgtgccatggtgatttgctgcacctatcaacccatcacctaggtattaagtacagcatgcattagctcttttacctaatgttctcccacacccccaccccatcctcccccaacaggccccagtgagtgttgttcccctccctgtgtccacatgttctcattgttcagctcccactcataagtgagaacatgaggtgtttggttttctgttcctgccttagctgttaatgtcaggccagagaggcttaaatttttaaggatctctggacttttcttctacattactcttgatgtttataaatgttacaacttctttaatttcatttaatgtataccttattgagttgatttaactgagttaactttgttatatgaaaatcatgattgggagtgagggggttaaaccagctacagagatcttgattgttggtggtgaagcaatgcaagaattcattcattcagtaaactaatgtttattaagcgtgtactgtcttagtctgttcagactgctgtaacaaaatatcataaactgggtgacttataaacaacaaaaaatttatttcttacagttctggaggtgggaagtctaagattaaggccctggcaaatttagtgtctggtgaggacaggtagccatctttttgctgagtcctaacatggcagaagggttgaataaacttccttgggtttcttttataaggacactaatcctagtgatgaggtttctgccctcatggtataactactgcccaaagacccctccttctaatattatcactttgtgggttaggatttcaacatgagttttgagaggatacagacatttggatcatagcacacaccataggacagacactgtgccaagaattgtggatatagtgattctcaaaatgaacaagatcccctcagagagcttgcaaaatccagctataaaattatgctttttaaacaaattatgcagtttgaaaaatctactctgaatcttacttgtggcattgaatactttcggccactctttccttattatattaaatatttactcttgtttgggggatccagtctcacctactttttctaccagaactggtatcagctcatgctctgccttatgcaaattaagaaaatatcataccttttgggtaaattaagccaagaaagttctcctttcttctctttctctctttctttctttctctctttctctttctttctttctctctctctctttctttctttctttctttctttctttctttctttctttctttttctttctgacagggtcttgctctattgcctaggctggagtgcagtggtgcaatctcagctcactgcagccttgaactccagggctcaagcaatcctcctgagtagctgggactataggcatgtgccacaacatcaagctaatttttgcatttttttgtggagacgggatctccctatgttgctaaggctggtcttggattcctgggcttatgcgattctcctgcctcagcctcccaaagtcctgggattacaggcatgagccactgcccctggccattataactattttcattggcttatcaggcacatgataactataataaatcaataaccagaatttttaaataaagaaaggaaggaattgtttcaactcttcctgctacccctctatccctcaaaagggtaggctgaatgttgtcctccaaagatatccatgtcctaatccccagaacctgtaaatatattaccttatatgacaaaagggactttacatgtttaataagttaagaattttgagatgggcagattttcctgaattttgcagatgggccctagtgtaatcacaagggtccttataagagacaggcagaagagtcagaataagagaaaaatacttcaagatgttacactgctggctttaaggtggaggaaaggccaagagccaaaaaatgcagtggtcactacaagctgaaaagaaaaagaaatggattttcccctaaagcctctggagggggcacaaccttgccaataccttgattttggctcagtgaaacccattttggacttctgacctttagaattgtaaataaataaataattttgtgttgtttcaagccatcacagttgtggtaatttactacaacagcaataaaatagaattaaatacagagatctgaggagttgagtaggataagcctactccagcaggttatttcgggagtatggtgagactcactaggatggcggaactcaattaaggaagtctgaagctgataagccagagagggaaggctctcatttcattttataagggttgcgtcacactaggaagatccaatagcaaccacagtctcaaaattaatgattacaaataggacacaattccaagagtcgggagccaagcagaaaatggattagggaagacatggatgatatgaaacaggaaggaggggtacaaggcagcttcctgggaagttgccagggcagtcacagttcacattcattaggctgtgggcaccaaatgcatatggaaaatctagctgacttaactgaactcctgaagaggaatgaacacctcatttattgaggagctactaccaattagaatatgtatttcatttgttcaataaccccatgagtacagtaacacaatccttgctttactaaagcggaagccaattcaaagaggttcagtgacttgtccaagctcagggaaaacactaggaagtgaatatgggtctgactccatcactgatttcaggagccctgccctttcctccacaccatgcccccttgctttcagaaaaaaaggcttgttgactgaatggttgtatgcacagttcaaagcagaaacacacgatgacatcttttgagatactctaacagtgagaacttgaaaatgaagttaaaaattaagcggcaaaaccaagccgaggctttctgagaaagtggggccaaacctgttgccgtctgactgccacgtggctcactatttatccctgtaaaaatctgcaaaagtatttgaaagggaagaagggacagaaaactccctccttttccaagttagccttatagtctagggcttaaaatactggtttaatggtgaaggtaagtgcttttcttctttttgggtagaaggattattactaacttaccaaaggtccattaaggggagggaacagttttaggagaagtcagagaaaagacattaacagcaacataaggatctccatctggtaatattgcctaattccaaaatgaagagactctctgaaaaagataactgattcaatgaagaccctagggcaaggcttgagaagccactggtaccaatggacactgtggacaatggtcatttctccaaggacgctgtgagtattaactgtgatgctgtgattagtcagactgggattggctgtggaatgaaatactgatcagaactgacaagatttgtgtttgggactgtggctaacgagtcttttcagacttctatatgaatttgaaatggtctctcaggaaaaggagaacatggccgggcctggtggctcacgcctgtaatcccagcactttggcaggctgaggcgggcagatcacttgaggtcaggagtttgagaccagcctggccaacatggtgaaaccctgtctccactaaaaatacaaaaattagcagggcgtagcggcgcgtgcacctatgcgcatgcatagtgcgcgtgccagctattcagaaggctgaggcaggagaattgcttgaacccaggacgtagaggttgcagtagttgagatcataccactgcactccagcctaggtgacagagtaagactctgtctcaaaaaaataataataataaaagaaaaggagaacatgaccaaagttatgaataagactgaaggcaagaaaattgtacgcttgtagagatcacctagcttgttgccctcattgtacagctaagaaaaggcacccagggacattgtggtcagcaccaatttctcagaaagataggcagatgatgagagggccctcagtttttctaacactgaaggaattgcttctatgttttctggtgaactcctccccactcatcttgaggattccaggccagaagaatccactttaaaaaagaaacatttaaaaccaatttaacaaccaatcaaaggcacttttatagaaatacatttcatttgctgtaggcctgtatttatggatctgagagggctagactgccaatattgtgactgtttattattattgctgttgctagtatctagaatattatacaacatataacactttgcaatttacgaggcatgtctcatacttttgttttcactccaaactgcccagtgaagtaacattatcccaattcttcctatgaaacagtgaaagccctaagagtttttgaaactttacctggtttactcaatttgggaatggcagagcagaattcagtccttgaatatcctcccactgcaggttcatgctctttgatctaggtgtaacatttactctgagtaaactaggactctgggctaacagagatgaagcaagacaggctggatattaggagaatctaagagcaatctaacgaccattataataaaatcatgagttctagacttaaaaaaagggaaaaacctgtttttttgcttatgcgtataccataatatttacattatttatttttttctcaaattcaacctatactgtgtcaagtaattttttttaatataacattttcctttaacttaatttcaattcatttttctgtgtctacttacaactttggcactagaattcacaatttttttttagaggtatatctccttaaagggaagggttctgacactgttacatgttctcaattgtttgcaaataggttaataattattccagtgtctctaagtacatatcaaccatgccagtgttcagcctccataattttattagcttctgtgcttattttggaaaaacatttcccattaccatgaaagacctcagtttaggatggtttggtatgttagcctgatttctgcattcgtctcatgcaaaggaaaataggaaacgaagaactgaaattacctattgatacaaaatcaaagtagcatttgaaaccataaaacttaagtagggcttttcatcctttctcgttagacagcaacagagaatgggaagaaaaactaaagtgatgggtttgtgatacaattccagtaacataaagagcaaggagaagtagttttgttgtgtttatgtttaatattcaaagctcaacctaaaagtatttttcattatcaaacttccttctagaataaatgattaaaacttgatttaaaatatacaaattctcctttataatacctcaaaatggagctaccccattgagttttaagcttgtgattaaaatattacgaaaacaaaggggaagttgtaataggtagaacaagcagtagtctaggcattaggggatctggtgctggctctgtgcatcatgtggtttcaggcaacttttcaaattttctacgcaaattttcttatcaataaaataaacagttgggccagaggatctctgagtctctttcagctttcagtgtttataagattggagaagttggtgggaaagctttaagtggagtgtaagtaattgcagctgcatgtacagttaaagagttgccttcagccaagccacgggatcttgcataaaaagtgaaatcaaatagaaaatggtccaaactctgggtttgaccacagatgacttcagctaggatctgagtgtagagcaatgagctgaactcctgatatccagatgttagcaagacttggaggccttctaaggcagagcaacaaccagtatctgtcctggtgctgacctgatcttactagcaattgggcctccatttgggtccattgtacaaaacaacaacaacaacaacaataaaatctccaaacacccaaaattcaaaatttagatggagagatactattcccagaattctagagatatttggaaagcagaaaactatacttgccatgctgatgaagtccaattattgctcttttaaatacatttagctacttctgaatataaaatgagtatctactaattatttacaaaatcacttggtaaatatagaaagtcacaaagaatgaagtgatcatcctgttttgtaacccagaaatagtcattactggcacttgtgtgaatcagtttctattcctgtatgtggatgtgcacagcgtatcctgctttgtacactagagtactagcatttttctaatgtaattcaatattgtcgaaaacattttaaaatagcttccatcacaataatctatcaaattgacttgccagactctcattattaggttaatttatctctaacattatgcagtcatgagtaatactacaaaggatatttttggacacaatttttcatctatgcctttctttataatccttcatcctaaggtcacagattatgaatatctttaaagtacggacaagtcttttaaattttgtgtgcaaaaacagtgcaaagccttgaatgataaaatagaggtttgatatatgtgtttttttgtttgtttgttttgagacggattcctgctctgtcccccaagctgtagtgcagtggcacgatcttggctcactgcaacctttgcctcttgggttcaagcaattatcctgcctcagcctccttagtagcagggtctacaggcatgtgccaccacacccggctgtttttgtatttttagtagagatggggtttcaccatgttggccaggatgatctcgaacacctgacctcaagtgatccacccacctcagtctcccaaagtgctgggattacaggtgtgagccactgcacccggccgatacatgtgtttttaaagtcacagaaatttcagatgtcttgaaggattttaagcaatttaaaaaataaagtcatagaagcttcaatttaggaatgaatggaaaattgatgatattcttaggatatggatttttcctaaaagaaacaaatgtatgcatccccaaagataatttgattagtatacaaatattaaattaaacatgtccatatttagagccatgaattctctttgcctgtcacaatagctggatttattcacaattgtagtaattagtccctgttcattataattttctaggtgatatgaagactttgtcagtccaagcaagtgtccacattgtgtgtagcaaacatgagaataaacattttaaacttttaaatgtaatacatattagtgttatgtaatgtcatccttcatgttcgaaggcacatggaacattgttctggtggtacagaggggagagaaacaccatcagaatgaaaggaaagaccgctctggaaccttcctccttagctcttgagcttagtttaattgtcctgtcttatggtctgctacaagcaataccactcttcaccttcgcatgcttctctgtggtttgataaagtacatgcaatttttcatttaattcttccagctgcactaagaaaggagccttatctttattgaacagatgaggaaatgaatgattagagaatttaaatgactagctctaggtcacacagctggaacttacagccagatttccttttaacaatcctgtaaccaaaagcataccagtagtgccccataaaatgtaagttatagagctgtgttgggtcaaaacttttactgatgctaagaggaggcaacattaacaaggggaaattatttgtgtattatgttttggattatgttctctccatagataaaagactgtcgtagtaaaagagattcagggcacagggaaactccaccacaaagcgtggtaccatttcccacagaagctaaatggacgggaagcctgccaccaggaaaggtaaagccactgctcttgtttgcaggctatgttaataagctgaagcttattccgacacatttacacatctctgcatcacactgacccttcgtaaagatactcccagtgtaacattggagccagctccagcccctgatcctgttgctttttccttagccccatgaaatcatctgtgagaaattaagccaaataagcaataaatcctgggatctagggagtggaataagttttgggaaagtcttttttttttttttttttgactgagtcttgctctgtctcacaggctggagtgcagtggtgcgatctcggctcactgcaacctctgcctcccgggttcaagtgattctcctgcctcagcctcccgagtagcttggactacaggcacacaccaccatgcccagatgaatttttgtatttttagtagagatggagtttcgccgtgttagccaggatggtctcgatctcctgacctcgtgatccaccggcctcggcctcccaaagtgctgggattacaggcatgggccaccacgcctggcccgggaaagtcattttaaaccaacctatgtatgaatccctactataatattctcaccaagcggctggctctttctcctgagcttggaaacctccagtaaaatggaaataattatttcccagaccaccactcttatctgtgagcttttttggccattaaaaattatttcttccattatatttttatctgtgtcttcacaggttttctctttctttcactttagtgcttttcttcaaataagcaggaaaaatccaatctatcatgcacatgggaaccctttcaatattggtctgtggttgttccattttatggggatgcttttaaagaaaaaatttgtcctttcaatatattgaatatcttccagcaccacatcacctgcaagctttgtaaaaatagttctacatattaattttttttttttttttgagattgagtctcattctgtcacccaggctggagtacagtgacatgatcttggctcattgcaacctctgcctcctgggttcaagtgattctcctgactcagcctcccgagtagctgggattacaggcatgcatcaccatgcctgggtaatttttgtatttttagtagagatggggtttcaccatgttgaccaggctggtctcaaactcctgacctcaagtgatccacctgccttagcctcccaaaatgctgggactacaggcgtgagccactgcaccccacgtagtttttttttttttttaagttgaacatatgtgaaggcaggacctagtgacacatagcaataacatttccaagtagacattacactagggaattagtcgaagtgctcatttaaagtaccatctctcaaatgtattaaaagagaatccttggatgtgcaataccttaattcaaaggcagctcgttatgtataaactctcaagctttgtgataaacaaatgtgcataacagatgggactattcacttacagcccagggaattttattgacgctgagaaggttatgtgactggctctgccactgtcatccccattcacttcattttggagcaatatgacataaatgccttacatgtgggttttctctatttatcatgtgtttcctatccccttgaaagatggccatatttgctttacttggttataagatcccatattcgctgtcttgaagccaaccaaataatttgacaaagtgggtttgtagtgctggctattttggtgaaaaaaagacaatgagacttcatgtgtcatccaaagttctatcagatcgagctgtgagagaaaggaaaagaaaggggtctcagtcaggatgctcactacatacatctgtgttgttgtctaggtccagatttctgttcattacgctatgggctggctcttatcatgcacttctcaaacttcaccatgataacgcagcgtgtgagtctgagcattgcgatcatcgccatggtgaacaccactcagcagcaaggtctatctaatgcctccactgaggggcctgttgcagatgccttcaataactccagcatatccatcaaggaatttgatacaaaggtaagtatgatggaaaatagggctctttgttgagagaaaaaactttgaaaggaaggcatagatcttgattctgtggagtatggaagtatacatttccaatgacaaattaaaactgactggaactatttttctttgagacattgcttacttcaataataaaaataagatttcattgaggttattatgattataaggtgggggaactgtagagttaaatgtgaaaaatttaaaaatggaacagtttatgtgatgtcttcaatgaaaaactaggtattacctgggcacattcttataggttactcaatcctattcagttctctgcctgttttattgtttctgagcaattttatatccctgtaaattctatataaccaatagaaatgcaaacgattcttgtccatagctttgcaaataaattttgccaagagaaaaatcagttaaaacttttctccactcacctcccagttgaattagccaattttgctgtttgtttgtttgtttgttttttgagatagagtcttcctctgtcattcaggctggagtgcagtggcatgatctcagctcactgcagcctccgcctcccgggttcaagagattttcctgtctcggcctcccaagtagctgggagtaagggggcatgccaccgcggctggctaatttttgtatttttagtagagacagggtttcactaggctggtctcgaactcctgacctcaggtgatccacccgcctcggcctcccaaagtgttgggattacaggtgtgagccactgtgccaggctctgctgtatatttaaagtctatttcagcattgcttcctgcttgtgttatgcgtgattctttgagttttcctttgaaccagttataacatcttacttacttcctccattaatcaatgagttaaataaaatctttgttgtatgtttattttacatttatatgaaaaccatgaatttacccaattaaaaaaattatcctttaaattatcttgtactgtacatttcccatgtcatccctataattcatgattaatgattttattacattggacctagcttatttacaatgagtacataaatttattgtctccagtctttcctccattatcccgtctacatatccacactgagtagattcactactcaggaatcttggacaccttcaagttgccaaacatgcagtgttcactggacatgctgtgttccttcagaatttgggcctgcttctcagcacactcacatctgctatcaatgacccatggaaagtttttgccctgagcaagccagagtccctgttagtttcttccaaatgctacaagttcacttttgctattttttccgatgagataaaattttcctttttgactttctacaaatcatagtcatttttcaagggatagttcaagtattgcttcctttctgggaccttcccaaattattattttctcctctcaaagtctctgttttatttatgttcatcctcaaatcttgattctcacatgaatcatataccttgtattatttatagtttttttgagtgggtaaaatatttcatattttatattctttggctctctactttatagcatgatgccagatatttaggggccttattgcatttattttttattttattttaaaatctattttattttttatttatttattttaaaatctatttatttttaggtaaatattcaggtaatataatttatgtaattatttaggaattttaggtagttattttaaaataattcaaattatttattgagttatatcagaagaatgtgatcttattcatttgtaatatgtgttttaggaactcagttcagccagggcagaccatgattcccaaacttgacttttctttttaattaggcactgattttggttaagagttcagtaaagttttgtgtgtgtgttttaaaaaattctttgatataagagtcaagatgttactcaacttttactagaagcaaaatagaggaagtgctttcacagatgaaatatctctcaatgttttcttccatttacttcttcctattattcatctatataatcattttctttacctcttttcttcatttcttctgtttttctctccttctactaagacaagcaaattaggggtataattggttatttgggaaggtaggaagaatatagagagaaacaaaaatcaatattttatactagggtctcactaacctcaagcaactctgactgtaaagtagattttcataataggacttcttgacaaagagttttcctatttttcccccaggcctctgtgtatcaatggagcccagaaactcagggtatcatctttagctccatcaactatgggataatactgactctgatcccaagtggatatttagcagggatatttggagcaaaaaaaatgcttggtgctggtttgctgatctcttcccttctcaccctctttacaccactggctgctgacttcggagtgattttggtcatcatggttcggacagtccagggcatggcccaggtatccagatactttctcattcttggtgggatccagatttctgaattctacaaaatatcaaaggtcttaatgattttcatttcagggaatggcatggacaggtcagtttactatttgggcaaagtgggctcctccacttgaacgaagcaagctcaccaccattgcaggatcaggtaagtgtgcacagatgggtcatagctttgtcatctgttccatcccactgtgtcttatcttctatgaatcaaatggtttggggaagagagagaaaaagtactgctgaaaaattcaacaatataagacacttgcatcacaaataggaaagatgcatctgtgcagtaaagacattgaagcttagaagtagaaaaaaccattgtgagctaggtttcagctcagaaaagccttagtagtcagaaaagccttagtagtcagaaaagccttgtcggaaaaagtttaaacctttaagaattgcacacatggaaaaagatcaagtaagctatatatacaccatcttagcaatgattttgaagtgagaattaaggctaccacagctccaggtggtaaggagagaaatcaggctggaagagtttgaagtttctgtattattctaagctctttactattctattatgagctcattaattctcacaacaaccctctcatataagtaccattttaaattcttattttacagagaagggagttaaggaaggtggagattaagaaaattgcccaaatacaaatagccagcaggtggtaggtctgagatttaagcccatgcagattttagccccagagcagacattctcaatcactatgctagactgcctttccatggtatgtgatcctactcaggcctctacagctttatcattgctgttctccccagcctgtcgtgctgagagtatatactcgaagagcagaactaaaattccatccagcttctcactcctaggtccactacacagctgcatcctgcagacttttacctcaagcaaccctcctgcgttcttgcttccttccatcatagttgtaaccatctcctctatttgcaaatactatctgctgatctctctcttctagactggtttctttcaaccttcttcccaccaaaaccaagttagcttgctaaaataaagatggcacatttttactcacccgcttgagaattttcaatgtgttccttcatgcttacagagtaaagcctgacctctttattgcatgaatacaaaagttcttagccatctggccccaaccttgttccactcaactcccctgtgcaagcatggctccagtggcactggacattggctgctctccacatagatctgcactgcacttccctctggctctgctcccgttagtttatatgcctggaaagttctttgcccctgttccttgtgccaaaattccatctatcctattgcatagcttatgtaaaaacttcctaaaccttttttttttttttttttttttttttttgagacggtgtctcactctttcgcccaggccggactgcagtagcgctatctcggctcactgcaagctccgcctcccgggttcacgccattttcctgcctcagcctcccgagtagctgggactacaggcgcctgccaccatgaccggctaattttttgtatttttagtagagacggggtttcaagccaggatggtctcaatctcctgacctcgtgatccgcccgcctcggcctcccaaagtgctgggattacaggcgtgagccaccgcgcccggccaaaacttcctaaatcttataattattatcaatttatcctcagatatacttccacgtacattgtagttttattatatttatattttacatcttttttttcaaatttcagtttgggacccattagtgagtcataaaatccattgagcgggttaaaatcattattttaaaaaatgaatagaatagaatagaaattgttggagtgcattggacatggtaaagttaaatatcgattcatgaaaccatcgtttgaggcatatgtgtgtggttgtatgtacaagtgtttatgcatattggtgtgtgtgttatgttaccctgtaaaatgcatttcttactataggtctctgtgaaatatgtgtcttgttgttttttaatgtagacttccaaagcctacatggcatttcactagtgacaatcaattttattcacatttttctctccaattggaccagaagctctttgagggcaggggctgtatcttaccgatttttgtaagtctttcatttcctgcccctagcctcatattagatcatgcaagaatgcaactgtaatcacaagaaaatgctaatgggctgtgatagcagagagttactgtgacaaactaagggatttagatttggtcacattggtgttgaggagccattgaagaatcagagagtgtgttactattatttgttaattttaattatatcatattactttactggggaaaatctgtgagctattttagaaataaatactctcattgcccaataattctaagtctgccacctcactgttgggacattgtttagggaggccacgaagtctcagcctttgatattttcataagtgtttttctccctttttcctttagggtcagcatttggatccttcatcatcctctgtgtggggggactaatctcacaggccttgagctggccttttatcttctacatctttggtgagtcactttctcttaaatcctaacgcctccatttcctgagcatccattttggcacctacaccacccacattcttcctatatgaaagaaaatgtcctttatcaaatggaagatgataaaaaatgtcaacggttggtatcatttttaatctagtcacacaacctgattaacaccttcctggtggttctgggaagccacacgcacaaggtagaggagttgactattcacatggcacccaccgacttgtgatgcagtcttgtccttccatatcaagcaccttctgcagaatctctaccaccacatctgaagtgcctgctatatgcagttaagatgtcaaagatagtgaagtacattttcaatgtgtcttcatatttcattataattattatttctgtccaagatgcctttcacctgttctctaccaagttaatcttgcaaagttcaattcaaatgttcccttccccatgggcccttccagggcttaccctatcagattctggcattctctcctttatgatatttcctctctaggttatgttggtgtgtaattatttatttctccttttctttccactagactgtgaaatgcttgaggcaaggaatccattctatgttttcatcacttgggtgtcatcatggtgcctgatttttagctttaaaataaaagaatcagtgaatccagtaattagaggggatttaaagaaaactagtcctcagaatcttttaacatagaatgttcttcaaataaggaattccaataataagacaattttctacacttgattttgtttttatagccaaatggtgtcattaaatatagtcctggcctgaatggctttctcattaatgatgctaattattttggtttgtacatgttaaccaggtattgtacaaaaatatttcttttgggaatccataatggatgtatggcttgaatacaaataatactgtctcttgtaagtgcattggaaatttttccctgccacatgatttcatggaaggttgtttcgtgtatgtatgactgcaaacctgactattcagatcttccgcaacaagacaacttatgtgtgcattaagaagttgctgcctaaaatacataacactgtaatcattggagactttaaagtaattaatcagctatgcaatgccacgctcctgttatctccagagggctctgacattgacaaatggtggctttctatttgagacgtaatatctaaaaagctttaacaggtttgtagaaggattgaaagaaagaatgggaacatttaggtccttatggtagaataagcattaattgattagtgtgtagaagggagaggcatgccacttcagaggaaacttccttcccccagtaaacaaatctacctaaaaactaattttatcccttcttcccaggtagcactggctgtgtctgctgtctcctatggttcacagtgatttatgatgaccccatgcatcacccgtgcataagtgttagggaaaaggagcacatcctgtcctcactggctcaacaggtacagtgcacaccttgtacctgtggcccatgcagaggtctctagggcagggtgtggatctcctctgagaggcaccatcttggctgctctaatactcatgctgattagatctttcttttcagcccagttctcctggacgagctgtccccataaaggcgatggtcacatgcctaccactttgggccattttcctgggttttttcagccatttctggttgtgcaccatcatcctaacatacctaccaacgtatatcagtactctgctccatgttaacatcagagatgtgagtttacttcctatacttctacgaaaatgataatggtaataaggagaaacagttctgtgttacctattacattctggctttacatataaccattaatttaaccttcacaatgaccttgagagaggcattgttataattcccttttcacagatgtggaaacaggacacttagaggtgagataacttgccccaggttgcacaatactaagtgatagagctgctgcagcatccatattcttaaccactatgctatactaccacaccagctgattccaaagcttcttttagaaataatattgctgggccaggcatggtggctcatgcctgtaattccagcactttgggaggccgaggcaggcagatcatgaggtcaggaatgcaagaccagcctgaccaatatggtttactaaatatcatctactaaaaatacaaaaattagccaggtgtggtggcaggcacctgtaatcccagctattcaggaggctgagacaggagaatcgcttgaacccaggaggtggaggttgcattgagccaagatcatgccactgcactccagcctgggcgacagagtaagactccgtttcaaaaacaaaaaacccaagaaattaatattgcttttatctggagcccagagtgatgcagcttctggccctcttatctgagacagtgttcttttagtgtgaaaaaggatgctaattttcccccaaacaacccacagtatcatgggggtaagttaatggctggtctgtgtaactgacaaattttggtgctaacgtatctctataactactctgtataaacttccttccttcagagtggagttctgtcctccctgccttttattgctgctgcaagctgtacaattttaggaggtcagctggcagatttccttttgtccaggaatcttctcagattgatcactgtgcgaaagctcttttcatctcttggtaaggataagcgtgtgggcccatttaaccaatcccttttctgcacatggtctcagagggttccctgacagcatgtcctcattgcccagggctcctccttccatcaatatgtgctgtggccctgccctttgtggcctccagttacgtgataaccattattttgctgatacttattcctgggaccagtaacctatgtgactcagggtttatcatcaacaccttagatatcgcccccaggtaagagctctacctgttttttcccctcctccagacccctccagaggtgttagacctcagtggtcgccgtgaaactctttaatgttactgacattgcactaatggcagaatgacaaataactacaaatatctgtctgtggccatttttagaacaacaaatgtggcatttttagaacaacaatttccaatcttggccagtaatcattttgacaaaaaccttcccaagcttccctaacagagattgaactgtgtatgctgggaaaaggcccacacacaggtgatttggaaaagtttccatggtgttgttcatattagctaccatatatatatatatatatatatatatatatatacagtcacaataagccagctcctgtgccaagacttgccatatatcaacacatctaatcctcacagttatattaggtaggccctattgttatccccattttataagggagaaggctgaggcacaaggaggttaaatggtgtgactatggtcacataaaggcagagccaggatttggactgggggagtctggctttggagtctgtgtcctgcccgttgcacaaactggcttctccactgagcagccggggtaaagaaacgtggttcccagagagactgcattgctccctggttattgacttggtagattggtaatttcaggtttggcaaatagacattgccctgaatgtctttaggtgaatgaaaaactgcattaagcaaaatgactttgccattagagctgaattgcattaaagttgagttgctgcagaagctgtaggtggctttctatataaaatcatttataaaatcatcttcccacagatatgcaagtttcctcatgggaatctcaaggggatttgggctcatcgcaggaatcatctcttccactgccactggattcctcatcagtcaggttgggccagtttattgaacatcttcaagtggcaggtattgttttaggtgttggagatacacacggtgctctaaagatctggatggcaacacaattactctatttacatgagcctctaaatcagactctggtaggtcagatttcccagaggaagaaaaatataagcttattttctcaagatgaatagatgttagattgattaaaatgagctgttccggtgcagaagacagcacgtgtgacttcctagaggtacatgagcatgaaacagttcttagttatgaccagaatgaaagacacatgtcaaggaatagcaagagacgaagacagaggggcaaaagaagatcatgaagaatatgttcagactaatccaatttttaaaaaatcacaaaagggaaacaaagtgtcctaggccagtttaaagataatttaatgtctggaaacagatcggctgtgagacattgcaaggaggcttgctcggtgtttggaaatgcaggctcatgaggaagatgaaaagacagacccaggcagggatggaaggactgacgagaaccaacttacaaagagaagttttgtttttactacatttctatgtgatcaagttcccaggttaatatttgactaaactgctaggaatccactgtgactataatgctggaaatgacttagtagggctttctgaggagggtcacacagaagaccaaagagaactcatgttgaattgagatgggttgtagtgatagttgtcaacagccaatacagaaacaaaaaaaaacaaaacaaacagcaacaacaacaacaaaaaaaaacagagaagacacaaacacaatgccacaatgccattttaggcataattttaaatgagtaatattatatgttgaaatccaaattttcagaaaaacattagtgtattttatttttgtttaaagaaataaccatctcaactcagaaccccatgtgcattttggccattttgtttccaatagtttcataaactttcttaagtaactactgcacattgttccttatattccttgtgatcaacattgcaatacacaactgggagggctactagaactggtgtagaaggaacttgtgagattgatcattttctctgttttttacatctaggattttgagtctggttggaggaatgtctttttcctgtctgctgcagtcaacatgtttggcctggtcttttacctcacgtttggacaagcagaacttcaagactgggccaaagagaggacccttacccgcctctgaggacataaagttacaaacttaaatgtggtactgagcatgaactttttaaacattttttacttctctccatattcctgaccatagactcagcagttcttaactctggctgtgtgttagtcttccctggggagcctttataagacactgatacttgggacccactccagagattctgaatgaattggtctggggtggaacccagatactactaatttttagatactccttagaggtttctagcatgcgcccggggttgacaacagctggacaaacttgaaaagtcaattcatgtggcctttgaattttcctcattggaaagtactaaataaataaaaattcatgtgaaaatgatcactgataaatatcttcatggtggggcaggttattggatgcagagaagatctgctcggaattgtagccatatgttacagatctcagcaccgatcggaactgtaaagctataatccccagaattaaagtttttattattttttatacattgtaaaacatagacgtttatttatgtgattaaattctattaaaatttacatgctaaaataaaatagaccattttcaaattatttagatccagatatttccatcagattaaacagatatttatttatcctagcccaattgcaagagattaatgatgagaaaatgaccaatacaagattaaataaatgaggttaacttagaaatcaaggacagagaagatagaactggaaggcttgtattgtgagaagaatgaatgtgaaggaaggcaatgtagacacttccagaagggatagcaatatagtttagaccatataatgaaaattggagagagatgacagagacactttcaagtgaaatgacaatttatatgggggagaaaaatattgaagacataacaagatgagaaaaggcatagaaatgtatcacatacaaggcatagaagtgtatcacatacaagagaagttccttttgagcgtagaaaaagataatttaaccttcttcatatttttcttactttcccaagatactcagataggcagcgtcaactctaacaggaattaatttggctcctaacacttaagacatatcctttagtttgtctcctcacacagaactgattctggttttgccacaacatgtctagagaagaagttcccaccatattttaaatcctattaaaaaactgcttggacaagaaccttgggttaattcagcagatgaagagaatctcctaatgcaaatcaatgggtatttttgagcaagtttttcagaaaaacagagtgtcaggccctgagggtggtactaagatgagaacattgattttgccttcatgatattgacaacacaaagaggaaagggggtttgcagaaaactaaaagaagaagtagaagaaaaaagaaagacatagtataataggtagtcaaattatgtacagaaaaaagagaaaaaaaaaacaaaaaagggtgggggacagacaacccaactaaaaaatgggccaatgacttgaacagggacttcataaaagagaaaatgtaagtggctccttaacatataaaaagatgttcaacttcattagtcattacagaaatgaaaatcaaaactacaatgaaataccactataaaattaactaatggataaaatgaaaggagatggaaaacaaaatgttgccagacatgtggagcaactggaactttcatacgttacgaatgtgaactttggaaagctgctcggcaatatctcctaaagctaaatgtacaattccagtgactcaaacattttacttagaaatgcacatatacatccataaaacatgtacaacaatgttcataggagcactatctgtaatagcctgaacaggaagttgtctgttaaaaaaagaatgagtaaataaaccacggtctatttgtatagcaatgagaattaacagaccccaatatataatagatgaatgggtctcataagcacaatattgattaaaggaagacaaaacgcacattcttttaaaggtttataaaatactttttaaaaacagctacaaccaatctgtcctgttaaaaatcagtgagcgatttcccttgtgcagggatgggggttgtggctggatggatggtacttaagaagtgctcctggggtactagaaatattttatttcttgacttggatgtgtgtttactttgtgaatattgtacatttatgatttgtgcacgtttatgaatgtagaaaataaaacagaaagcaaattcaaagtatcatccttttgagagcttctgctctgacttcgttttgaccaatggagcagttgggaaggggtcttggtccttcggtcctttgctttttttttttttttttttttttttagacagagtcttactctgtcgcccgggctggagtgcagtggctcgatcttagctcactgaaagctttgcctcccgggttcatgccattctcctgcctcagcctccccagtagctgggactacaggcacctgccaccatgcccggctaattttttgtattttttagtagagacggggtttcaccatgttagccaggatggtctcgatctcctgacctcgtgatccgcccacctgagcctcccaaagtgctgggattacaggtgtgagccaccgcgcccggcccctggtcctctgctttcatgttcttcttggtcctgttcctcctcctcttttgttggaacttccagtatcagagcaggaaggaaggcaatgggtcaatcgatgctgtcagcttttggatcaaactgcaagttctcaaacagcaaaattaatgagctcaggctttgaagaaaccatgaccctgaaagcatcagttgcttccaattgcatcagttgccacgggtgataagaacaatgatgactcagaatgcctaggttttcccagcagcttctctgaggttttcccagcagcttctctgattgattcctgacagatgacttcggtgtgtcagactttcagggtatctttccttatgtgatggtttgaggaagagttaccattcacattcctaatggcttcagaatagatgcaattgtgaactgataggaaacatttctaattcatctcccctccccatccctaaaggattgtttctaacaatagtcatgaaaattaattcacttttctcaaatagtttattgtcatctacctaatgatgagatgacttactttttctccttgactgttaaatattatgaattatattaatgtatttcttaatgttgagctttcccttgaatattcttttgatgtacgacagaatttgattcactaatagtttatttaggactttggctgatgtactgatatatgagattggctctgtatgcatacatgtgttttgtgtatcttttttgtgtctggatatggagcttatgctgatttcaaaaacaagaaaggagaactttcctttttccccattactctgaaaaagattgactagaatggaatttttataattgctgttgttatttgaaagcttgaaagcattggtttgtaaaaatcatgcaggctgaaagccattttgaggagactttgataactttctcaatttccttcagttactggtcttttaaggggttttatatttttctttgatcaattttgaccatttatgttatcttggaggatcatctattttacacactatttaaagtatatttgcaaaaattcaactgttttatcaggctatctttttaataatatattcattttatctatatctgaggttttagcttctttgtacttctgacccaattgcatgtgtgctttctttctccttcattagactacttagtcatttactaattttaagaatagcttgtcttttatttatttacttatttatttttgagacggagtctcactctgtcacccaggctggagtgcagtggcgcgatctcggctcactgcaacctccgcctcccgggttcaagtgattctcctgcctcagactcccgagtagctgggattacagtcatgcaccaccatgtctggctaatttctgtatttttaatagagatggggttttgctatgttggccaagctggtctcaaactcctgaccttagatgatctacccaccttggcctcccaaagtgctgggattacaggcatgagccactgcgcccagccctgcttgtctttttattttatatttgattagctttatcttttatcaagcttatgtcctatttccctttgctttacttcatataaattttgttttggatagtttatttatttttcatttaattatgaaacaggttaaagcttagaggaaaattgctcctctaagtccaattttgtgggcagattacattttgctgtgttgtgctcccaaattcattgttcttttaatgctttatttctcaagttaataacctatatagtaaaaaagtggctgttgactctcagctttttttttttttttttttttttgtagatacagggatcttgctgtgttgctcaggctggtctgaaactgctggcttcaagggatcctcctgccttggtctcacaaaatgctgggatgacagacatgagacaccatgcctagccatgtctctctccttatatataataagaaaacagacacactgaggcatcctatcatctcactcttggtttcactactgttctctggaagttttgctctgaccttttgcagttaatgtattaattttgcattgagtagtttccatagaagaattatagcatttgcattctgttgggtattatacttttcactgttatttgaacataatttgagggctgaaaccaagatgaggcaagtgaggtgcccaggaagcaatatttaaggaggcatcctttcttaggctcatgcaagaacagaattggcacatgagagtgagtgcctccttaattttgagtgctggacacttcttgctcacttagcatacccctggacaatgaagtgttttttgttttgttttttcatgtccatcctttatccttcttcatctcaaaacatttcaatggagtatttttttggagcagtacttggatgagcctctgagtcccacagtagctgagaatttatttcatagtactctttatgatcactgtggagccttaaaacattgtaatattaacttagctgggaacagaaattttgttccacaatttgtcttattcagaacagtattgacttcctgctagtctcttctgatgtccaatatgaggaagtctagttagccagctactttttgtaggagagctatgtttaggctaggtgctataggattctctttatcctggaattccttcaccaagatgtgccaaggtgttaatcattttctcttgctttttggctggtggtcttagagtttccttcgattttgttttatttagtgattgtcctcaatttgttttctttactaagaatctctcttctatttatctgtatggtaaaaccttgttgcccatctttctggtttctgctgactttcatttttggaccttttactttgctttctccatggactttttggtagtggaggcaggcaaacactttccaaagtctttctcaatttccatcaatttcaacttatttcctaaaattgcctcagaatgtgcctatgtccacaatatccctccttccactttagaaaggaaaggcatccacactttatttaggtgcaatgcctgaagtgtaaacactttctggttgtcaacaaaggagtacttccaaatattggtttggggataacctgctaatgattaacacattcaccttggctcttggtttgcctgctccctcttcttttatctgctgtgtgtattttttttaatcactgagaatatgcacagtattgtatgttttattataagagaggactggccagagtgggaatgttctgaattcagaataactgaagcagtacaggataggaactcattctttcaaatgaagctggcatattttcccagagcaccaaatttcaatatatatttaaaaaacttgatatgaatgatacaataaagtggttagaacttttattaaaataaacttatgtcatgaaatacttattctaattatagtcactcttcatcttatttcatcttataacatgtttaatgttttcttttatttacaaaacaatttattttttgatgaaaagttttagaaatcaagttaaaaatattcaaaggaatgcctaaagttttcaaaattcttttacatgttgtacaatcaaaagagtctgaagaccatttagctatccaaattgtttatttttaagcagtatcccttctaatatttactatttataatccttaaaaatttgccttagcacaggagaattgcttgaacccaggagacggaggttgcagtgagccaacacagtgccactgccctccagcctcggcgacagagtgagactctgtctcaaaaaaaaaaaaaaaaaaaaaaaaaaaaggccaaaaacaaataaacaaacaaaaaaatccgccttaacattatttgttcattaaaaactttctttaatactactagtttccctttcctctcagcccattgtcatattttgatttttatcacttgctttgtaggacatatgaggtttttgtttttttttttttttggagatgcagtctccctctgttgcccgtgctggagtgcaatggcgcaatcttggctcactgcaacctctgcctcctgggttcaagcaattctcctgcctcagccttccaagtagctgggattacaggcacccactaccacgcctggctaatttttgtatttctggtagagacggggtttcaccatgttggccaggctggtctcgaactcctgacctcaagtgatccacaatccttggcctcccaaagtgctatgattacaagcatgagccacctgcccagccagaatatatgttcattttgagtcctttaacaaagtcataagaattttaggaattcagttactttcttgagaaaatctctgaaaagatgccaataatttgtagccaattatattgatttctctttttcatattgagaattgttttttaaaaagtttgtatgtgtgaagatttttgcactgtagttaaagaaaccacctgtgtgttggttaagccataagtacatgtattcaaataaattgaggtggggttactctgagaatcaaaggaaaacctgaagaaacaggcagcctcaaaaggtcttagctgtagcaacttgctccattgttgaaataaataggcttgaacttgtattttccctctactcaacatttaaggtctcagaagataatataattggtgaaatttaagtaaagtgctcactcttttgctttaacaaaccctagagagctggtaggcagagcctcaacagaccgttttagcttccaaagggagttcaggacaccatgattcacgaccacaatacatcacacataattgagaaaagatagttccaccaaataaagttgaaatgctgacaagaaggggtaagaaatcttggaaataagtttatataaaatttattttttccttttttattgttatggaataggaccagttctacttaagccacccatttgccaaaataaagtgagaatcgtttcttttggggactcctctttgtagctccaagtgccactaacaattcttaggacctgagctataagccaggtgatttcagttaatatgatcaattatttcatttaaatggctctaatgtgcagagggaacggagcccatcagcattccctgcagggaactgcagtggcttttatcaacttgaacagctagctttcaactgttttgaaatcactttcagggtggtcatgtagttgcttttttgaaatcagaagatgattctgcctcttttaatatgtgactcctcagattcagaaagtgctcgctagtcttaagagtgaattaccctcagtggtccagcgcttatgaacccacatctaaccctatcccctgggggaactatcagagaaattggtgccatggacataagaggaaggcacagtgaagcagagagccccgcatgatgaaaatcagtggacagcatcattatttacaactttgtaatcacccaggagcatgaaaatccaggccaatctggcaccatgagctctaatttttgttggagttcttggaaccgattctgatgaatgactgtttagccattttagagtgtggcatacgtggctgctggcatacagaggttggatgtaaacgggcctttgccctctcttatgaacatagacaggaactaaactgtgtcacataggttccaaatggtggcctgaatactatttacaactaaggtacaatgaaattgagtaagtcttttcctcttttgcagataccatcattattcatatatttcttcaaagttaactatttgtatttggtaatttttaatagaaatgtaataattgcttctcaagtttagtctttagtcttaaggttgatgctctccatgtccttccaaaaaaaggtatgttgcttttattatatcctcgccttcagatgggattattccattttgttctttgttaatatatactttgagccactttttttgtggctctgggtgagatgctataggtacaatgacaagtgatacgtgtgttgtccctgtcacaaaagtggatagcctaagtggtgacttttacctccactccaaatatatgtatcacacaccagccgtatgccaggcaccactctaggtgctagggatacagcagtaaacagacaaatgcaacccctgcccatgtgaaagagaataagacaataaataagtaaagtgcatgttatatggaggtggcaaatgctaaaaagaaaaattaagcaggcaagaggactcattgaaaagatgacatttgggtaaaagcccatgtatatatgttctattggttttatttctctggagagccctgactaatacacaatgactttgagaagttactggcttttgatttatcacactattcggagtgctgagagccttcttagtgtgtattcagtgttttaagagagcttgtggatgaataataaataggacaaaatttatccaaacttaagccttgctttaggtaaaagggctcctcttacaaggtagaaggttattatttggcatttaaatccaactgaagactaataagactaattaattaaaagtttttaaatcacaactgggtgcaaaataaatggaactgccatgctcgccaagtgtgcatgagtggtgtgcatgggagacagcacgaagctaatcccactcatcttgcaggttgctccatttttctcctaaaatcagtaagacagaagctggtcagattatcaagagccctagttaaacacagcagtagcatttggaaggggttgctctcattaggcagtgcctgaccacaacaagagatgaacaagccctgtatctgaagccatcatgcctagttatggtcccccactgttcatgatgcctgaaagggaggccccctgcaccctagaaagctgggtgggttctactgtctgctttactgctaaaaaccctcttctttggatctggactttacctctatctgatttttttttctaatatatgatttggcactgagtctgtcactgctgctaactcagcagttctagggtcattgccccattgcctcacagaaagaatttcatagcttccagcatcctctctccttcattatactttgatttcagcattgctattttttctcttgggtgttgcagctctctctctccttcccatgtcttgttggttttctgctaactcctgctttttttctttttttttttttgagacggagtctcgttctgtcacccaggctggagtgcagtggcacaatctcggctcactgcaacctccgcctcccgggttcaagctattctcctgcctcagcctcccaagtagctgggactacaggcgctcaccactatgccccactaatttttgtatttttagtattgctgtcatcaatccacatgtccagaagcacctagaaactctaattctttgtaggtatcaaaccctaggactctttcctctaatcacaatatataatccctgattcccaaacacggtcttttcatatacattttccactgtacatactttctgacctggaaagctcttacacaaacacgccctcccctaggaagcctttataaatgttcccaggaagaatcagtcacccaacagtgtccttgtcacatcttaggttctacacctttatttgttctatctgaatgtaatctcccagagggtgttatcatctttttttttgagatggaatcttgctttgctgcccaggctggagtgcagtggcatgatctcggctcacagcaacctccacctcctgggttcaagtgattctcctgcctcagcctcctgagtagctgggattacagacgtgtgtcaccacacctggctaatttttgtatttttagtagagacagggtttcaccgtgttggcaaggctttcctcgaactcccaaactcaggtgatccacccgcctcagcctcccaaagtgctgggattacaggtgtgagccaccatgtccagccccatctttttcttttagtttagttcttaacaaatagtctgacacaaagtggatataacaatattttgaattatgaataactaaatgaatatttccagatttcctggtgctctcaaagttttatgttacaaaagaaaaacaagtctaaaatacctgcctcaagtttttatctgtactatgatttcaaaccaaataaaaaacaggtggggtaaaaactgaaacaggaaatacatataactgaaaaattttggtatgttagtatgataatactaggtcatttttcctgtttccccaacttcattttctatagcaataaaaagaaacaagtaaatgtatattaatttaatttaaaagaagtagtctaccatctcttctgttaaaaagaaaaaagtattttaaaaaattatctctggaaggatacacagggaacattgctctggtttcttccaagagagaaatgaggaactagagagcatggccaagtggggttttgcttttgtttttgtttgtctatctgttagctttttattattttcttttgtaggtttgaatttcaaaccacataaatctgttacatgctcataataataagtttaaaataaaacttttggctgggtgcaatgacttacacctgtaatcccagcgctttgggaagcagaggtgggaggatacttgaggccaggaatttgagatcagcctgggcaacatagtgagaccctgcctctgtagaaataaacaaaaattagctggatatggtggtgcatgcttgtactcctagctacttgggaggttgaggcaggaggatcctttgagtccaggagtttgaggctgcagtgagctataatcacccactgcactatagcatgggcaataaggtgagaacttgtctcaaaaaaaaaaaaagggggggggaaacaaataaataaatataaacaaaacttttgtttcaaaatatgtaatatttagcactaaagaattctgaattgtagagctaaaaagtacttaaaagttaataattattgtctcctttaaaagaattgttatcaaagtataatttttatccagaaaatcatccatatcagcaagctaaactttctcaaaatgacatatccatgtaattagctcccaggtaattagcaggcagcctctactcaggttgagtattcctaatctaaaaattggaaattcaaaatgctccaaaatcggcaactttttgaatgctaacatgattctcaaaggagtgctcatggaatatttcagattttggatttttggatttgagatactcagtataatgcaaacattccaaatctgaaaaaatctgaaatacttctggttctaagcataagggatactcaacgtgtgttagctaattagacccttcatggtctcttctagacctcagcttcttcaaggtaacctctatcctcacttctaatagcatgaacttttctgttttagaataatttggattttcaggaaagttgcaaagatagtacaaagacagtacaggagagttcccatatatctttcacctagctttcccccattgttaggattttacattattatgatacatttgtcaaatataagcaactcacattgatacatgaaactctattaaccaaaccctagactttatgtggatttcaccactgtttccactaatgttttctttctgttccaaggtccaatctggaataccacactgcattttcttgtcatatctccctagtctttttttgtctgtgacaatgtctcagtcttttcttgcttttcatgaccttaacagtcctgaagatcatttgcttttttttcataattacaccggagttatagattttttgaaataataccacaagggcaaagggcccttcttgtcacatcattttagggagaacatgatatccacatgacatcactgatattaaccttcatcatgtggtttaggtaatgtttcaggtttctctactgcaaagtgatttttttcccttaatttagcccacctgaacttatcaattttgttttcttccatgactaatacttttgttattatagctaaaacttcattggggccaaatcttagatcatgtaaattttcttctatattttattctaaaagcttgtaatgtttgatacattctaaaagatgtaatgtttgatacattacatctagtcctttgatttatttttagttacttttgtataaggtgtgagagatgtctccagtttcactttattaacacattgtggtgttccagtactatttgttgctaagactatcttttttccattgattacctttgccttagttggcaatatttttgttggtttatttctagactgtttatctcattccactgatttgtgtctatctttttgacaaaactgttgattacagtaagctttgaaatagttcattttttgtgtcaacttgactgagtcaggggataaccagctatctggttaaacattatttctggctgtgtttgtgagcgtgtttctggatgagattagcctttgaataggtgatcctagtaaagtaaactgtctttcccagtgtggatggcattatgccacctgatattcagggtctgaatagaagaaaaggcagaggaagggggaatttgggcctttttttctgcctcactgcttgagctgggacatctcatctggtctcctgctcttgaactgggatttacatcatcagttcctctggttctcaggccttcagattcagactgaatcataccaccagctttcctgggtctccagcttgcagattacagatcatgggactcctcatcttccataaatgcatgagccaattcagtctatgtccttgaaaactgccccactgcagattaaggcttttttccactaggtgaaataaagaagcttgttagacagatttcccttcatccagtgccctctcctctttaagttacaacacattggctacacctaagtgcaggggtggggatgagggtatagtcctcttgtttgctgagaagagaactgtattgggaaagctctagaagtgtttgatacatacataaacaaggcatggtttttgcacttaatttcacattacatttttcccagaaaaaaaggaatgtataggcatcacgtaactgtactagctggagtcattcttcctgattatcaaaggtaaacagttattaatcctataccaagatgtcaaggagaagtacttttggaacacaaggaattctctgggagtccttactactctcaagcccagtgaaaaagttaatgaaaaactatagtaccttcctataagctggatgactaattaccaggctcatttaggaatttgccttaccaagtaaaacataagggcagctgaggtgctgactgaagacaaatggagcatagaataagagtagtaaagaatgccaaaaatgctgtcatgtatccattgacaaaaggagctataaagcctttaggtattttcacacttgctctgttacgtaaatgtatgtgtgtgtgtgtgtgtgtgtgtgtgtgtgtgatcgtttattttttccttctttcccactaagatgtattaatactgattaacactataagttaagcttataggataggctatcaaaaaatgattgtgactgagctgaaaagaacattactcaggatggatacagtgagtttcagatgtttgtattctacttgggagctacagacaataaaaaagtaaaaacatatacagtttgtcagctactgataagtgctatggaaaaaattaaagaaggaaacggggatagggtgggattaggtgtggtagccattctaaccttggtgctgaaatctatcagtattctgttcagcgatccactgtctgctacctggccatatccccctgggaagtgtgagccacattactagcttcatgtggtgaattctgactggtccacaccagtcatgtggtcccttcttctgtagctgattagctcaggcagcacctgagactaggccaagttttggcaaatgagacataagggggagttttctggaaaggcattccttgatctccaagagaaacgcactgtttcttcctgcctttaacttgtgtctgcatggacacttgaaactgtgaccagcatggggggtaaagcctgctgtgaaggagagcagaggcaagaagactgagggcagtggagccagagctctgatcaccctgctctggaacctttctgcctttgatgtcctgtttggggagataagaaatttatatagtgtttaaatttgttgagtcagcgttttctgtacctgcagtcaaaaacatgctgagtgattcaagaagttggtcagaacttcaaaaaattattattctacattttcccccaagtttttctgaggaaagagagtgcttggtaggcaggataaccctggaaagtggccatggggctgaggcgggttttggagaaatgcagacactgttgtctgatgtgagtttcacctgatgagggatcaggatcttctttcatataatttgggaaagcagatgttggtccctttagatctgttaactgacatttagcattcaaaactgtctcgtgattcacagaagtgttgtaagatattatgcagattttagcacagcattcaaccattcaatcagatttttataaagactttttttttttttttttttttttttttttgagacggagtcttgctctgtcgcccaggctggagtgcagtggcgggatctcggctcactgcaagctccgcctcccgggttcacgccattctcctgcctcagcctcccaagtagctgggactacaggcgcccgccactacgcccggctaattttttgtatttttagtagagacggggtttcaccgttttagccgggatggtctcgatctcctgacctcgtgatccgcccgcctcggcctcccaaagtgctgggattacaggcgtgagccaccgcgcccggccttataaagactttttagataaaaacagaatctatatctctaatgtatgtattaaggatgaaccccggctgggcgcagtggctcacacctgtaatcccagcactttgggaggccgaggcgggtagatcacttgaggtcaggagttcgagaccagcctggccaacacggcgaaaccctgtctctactaaaaatacaaaaattagctgggcatggtggcaggcacctgtaatcccagctgcttgggagactgaggcaggagaatcgtttgaacctgggacgtggggattgcagtgagccaagactgcaccactgcactccagcctgggcgacagggtgagacaacgtctcaaaaaataaaaaataaaataaaataaaaaatgaacccctctctgtcttactctctgaatgagtgagtctgaaatccagtgggtttggccaagcaaggtagatgtctgtgtatatatgggggaaggatgtttagtgacagttgcctggagtggagtgaagaaacctaagcagagtgagagagaggcaacagtggaggcccagtgagagtactgcaacttgaatagggtgatgaagctgtcttcaaagggggacaagagaacagccctgtgttaatgttggagcctgactggagtgaagagattatccatgtgacaggtaggcccatagcacagacattggcacttaagcagggtgaggagagcatccacatagaggtggtagctacaagatgatggtcatacacaatcaagattggtccaatgattaatataacaaggattattagagttgcccagaaatgtggtcgatcaactgtggccatcaattactaaatagcataaaaatatctcaaggagagaaggcaaaaactgaggactccacatacagaaacctgtccttaacatcctacagagaataatgataggccaagaaatatttttttgcccactgagttcacagtctcagatccccaaattgttcctgagtggagttagatggattataagagacctccttattcataataggcccaagttggcctagagagggagcagaattggtttaatgattccactccagactttcctgggatttttcacttcttcctgctctccatgccctcttatcacagttgcttgactggaaaaataacaagtggcaagagagatgccttgcctttttcttagaattccagactcacttctcaagtcactgagcttctgttagtgcagatattgcaatgacacttccacgtgcatgtgatcgggacatttaatggatcagctgctcagagcactcctccaaagtggcacttccctttttccaaatttgggtcctgaggtgaacacctccccagaggtattcataacaacgttgaagttgtagaggtgatgctccttcagaggccaacaaagaaaagcttggaggcatattacattttggattccagttcctacataactataaaataaattctgcatccttagactaaatcaacataattgaagttaagcatggttcagattaaagagtaagctcatgagtttgttaaaccattacttgagaatgcaggaaatgaacaagacatgcagtctatgtattccagttggttgttggtttgataagcaattcacaggcagtagatcaacaggcaggaaaatataatagttaatatgactgcaacacttattttggaaacttagatggctctttgaaaatcttcttttccaactaaaattactgatattcatattattcaaaaatgacaacctctgtgccatctgagatttgttgattcagcatttctaaaaatagttcttagaataaaatagagtacttagcttgacacttagctattgacagtgcccggatagcctacttaaatgtatgctttcagaacactgctaaacaccttgctttcaacaccccattcactttcaacacctcattcctcacccatgaccccacctgctctcatttctgcaagaaaacaatagaaattagagcagttggggtcatgagtgaggatatcactcacttctgatgatcatttagttgttaggggttaaaaatgcctctactattgccctagagatgtcctccaaatcactgacacctactctacaagctttgagcctggtgctttagattttttgtcaatagatagtgtgaatatatcaagactgccactagacaaaggaagttctaaaatgctatcagttttgtccatggatttcaacaatccatgggcaaaaatgtgatacaatacatgacttagaatcaattaaatattggtattttaggacatcctcttaagtgcatgccagaatttcacacaaattgcactacaggggagaaacatgcctgttcatggatatttcaaagaaacaaataaaaaaaaaacctttgagacatttttatgatttagactgtgtattatctttgcagtcatatcaaactaaagttcttgaagctgaatttctcagagaacaggtggaagtcattgatgagaaaaacatattattaatattatttctccattctttgaccacagaataagttgaggaagatgatagaataaaggaagtagaagtgggcctatagacaagtcagttttgtaagaataaaaggaaaataagtttcaaatctaaagaatcgatggagaaactagtatacatatttattaaatcaatgcatataagagaagcaaagagattaaatgattgagcaatcatttgataatgtgagctttttaaaagactaaatgaaagaaataccacctttttctgttgagaataaatcataagtgtgttaaatgtgagattattaacataaataaaatgtataaaataagtgcagcagagaaagtttttagaaacttttctgacaatgttacccaataagaaatatagtattatcgtgcaactcaggacatactcagaaacacaaacacatataaataaaatagaatacttacaaa

SEQ ID NO: 32093 - DNA, 6771 bp, Homo Sapiens
atatggaggtgaagggtgagatcgggaaacaaagggtatggccccctagttcccaaagggagcagggagatgggaatagaattgaaggtaggttttaggctacttgggaggaggaatatttaggtaattgtggagactttctcctgtgtgatgaaggcggcagacactgtgatcctgtgggcaagaagtaaaaatgaccagctgaggatttcttttcctccaggactgtgttggggtgacaggatgcctgataaggatgacattcggctgctgccgtcagcattgggtgtgaagaagagaaaacgaggacccaagaagcagaaggagaacaagccaggaaaaccccgaaaacgcaagaagcgtgacagtgaggaggaatttggttctgagcgagatgagtaccgggagaagtcagagagtgggggcagtgaatatggaaccggaccgggtcggaaacgaagaaggaagcaccgagaaaaaaaggagaagaagacaaagcggcggaaaaagggggagggagatggggggcaaaagcaagtggaacagaagtcatcagcaactctgcttctgacctggggcctggaggatgtggagcatgtgttctctgaggaggattaccacacgctcaccaactacaaagccttcagccagttcatgaggcccctaattgctaagaagaatcctaagatcccaatgtctaagatgatgaccatccttggggccaaatggagagagttcagtgccaacaaccccttcaaggggtcagcagctgctgtggcggcggcagcggcagcagcagcagcagctgtagctgagcaggtgtcagctgctgtctcgtcggccacccccatagcaccctccggaccccccgcccttccaccaccccctgctgctgatatccagcccccacccatccgaagagccaaaaccaaagagggcaaaggtccaggccataagaggcggagtaagagcccccgagtgcctgatggacgcaagaagcttcggggaaagaaaatggcaccactcaaaataaaactagggcttctgggtggcaagaggaagaaaggaggctcgtatgtttttcagagcgacgaaggtcctgaaccagaggctgaggaatcagacctggacagtggcagtgtccacagtgcctcaggccggcctgatggccctgtccgcaccaagaaactaaagagaggccggccaggaaggaagaagaagaaggtcctgggctgtcctgcagtggccggggaggaggaggttgatggctacgagacggatcaccaggattactgtgaggtgtgccagcagggtggggaaattattctgtgtgacacctgccctcgtgcctaccacctcgtctgccttgatcctgagcttgaccgggctccagagggcaaatggagctgccctcactgtgagaaggagggggtccagtgggaggccaaggaggaagaagaagaatacgaagaggagggagaggaagaaggggagaaggaggaggaggatgatcacatggagtactgccgcgtatgcaaggacggcggggagctcctgtgctgtgacgcgtgcatctcctcctaccacattcattgtctaaaccctcccctgcctgacattcccaatggtgaatggctgtgtccccgatgcacatgccccgtgctgaagggtcgagtgcagaagatcctacattggcggtggggggagccacctgtagcagtgccagcccctcaacaggcagatggaaatccagatgtcccacccccccgtcctcttcaaggcagatcagagcgagagttctttgtcaagtgggtaggactatcctactggcactgctcctgggccaaggagcttcagctggaaatcttccatttggttatgtatcgaaactaccagcggaagaatgacatggatgagcccccacccctggactatggctccggcgaggatgatgggaagagcgacaagcgtaaagtgaaagacccgcactatgctgagatggaggagaagtactatcgttttggcatcaagccagagtggatgaccgtccaccgcatcatcaaccacagtgtggataaaaaggggaattaccactatctagtaaaatggagggacttaccatatgaccagtccacgtgggaggaagatgaaatgaatatccctgaatacgaagaacataagcaaagctactggagacaccgagaactaattatgggggaagaccctgcccagccccgcaagtataagaagaagaagaaggagctacagggtgatgggcctcccagttctcccactaatgatcctaccgtgaaatatgagactcagccacggtttatcacagccactggaggcaccctgcacatgtatcagttggaagggctgaactggctacgcttctcctgggcccagggcactgacaccattctagctgatgagatggggctaggcaagaccatacaaaccatcgtcttcctctactcactctacaaggagggccacacaaaaggtcccttcctggtgagtgccccactctctaccatcattaactgggagcgggagttccagatgtgggcacccaaattctatgtggtgacatacacgggtgacaaggacagccgggccatcattcgtgagaatgaattctcctttgaggacaatgccatcaaagggggcaagaaagcttttaagatgaagagggaggcacaggtgaagttccatgttctcctgacatcgtatgagctgatcaccattgatcaggcagcacttggttccatccgctgggcctgtcttgtggtagatgaggcccatcgactcaagaacaaccagtccaagtttttcagggttctcaatggttacaagatagatcataagttgctgctgacaggaaccccattgcagaataatctggaggagctcttccatctcctgaacttcctcaccccagagagatttaacaacttggagggcttcctggaggagtttgctgacatatccaaagaggaccagatcaagaaactgcatgatttgctggggccacacatgctgcggagactcaaggcagatgtctttaagaacatgccagccaagacagagctcatcgttcgggtggagctaagccccatgcagaagaaatactacaaatacatcctgactcgaaattttgaggccttgaattcacgaggtggtgggaaccaggtgtcgctgcttaatatcatgatggatcttaagaagtgctgcaaccatccatacctttttcccgtggctgctatggagtcccccaaactccccagtggggcttatgagggtggggcacttattaagtcgtctgggaagctcatgctgctccagaagatgctgcgaaagctgaaggagcaaggacaccgagtgctcatcttctcgcagatgaccaaaatgttagacttgcttgaggacttcttagactatgaaggctacaagtatgagcgcatcgatggtggtatcacgggtgccctgaggcaggaggccatcgatcggtttaatgctcctggggcccaacaattctgcttcctcctgtccacccgagctgggggcctgggcatcaatctggccactgctgacactgtcatcatctttgattctgactggaacccccataatgacatccaggcctttagccgggctcatcggattggccaggccaacaaagtgatgatttaccggtttgtgactcgcgcgtcagtggaagagcgaatcacacaagtggccaagagaaagatgatgctgacacacctggttgtgcggcctgggctgggctccaaggcaggctccatgtccaagcaggagcttgacgacattctcaaatttggcactgaagagctattcaaggatgaaaacgagggggagaacaaggaggaggacagcagtgtgattcattatgacaatgaggccatcgctcggctgttggaccggaaccaggatgcaactgaggacactgacgtgcagaacatgaatgagtatctcagctccttcaaggtggcacagtacgtcgtgcgggaagaagacaagattgaggaaattgagcgagagatcatcaagcaggaggagaatgtggaccctgactactgggagaagctgctgaggcatcactatgagcaacagcaggaagacctagcccggaatctaggcaagggcaagcgggttcgcaagcaagttaactacaatgatgctgctcaggaagaccaagacaaccagtcagagtactcggtgggttcagaggaggaggatgaagacttcgatgaacgtcctgaagggcgtagacagtcaaagaggcagctccggaatgagaaagataagccactgcctccactgctggcccgagtcgggggcaacattgaggtgctgggcttcaacacccgtcagcggaaggctttcctcaatgctgtgatgcgctgggggatgccaccacaggatgccttcaccacacagtggctggtgcgggacctgaggggcaagactgagaaggagtttaaggcctatgtgtctttgttcatgcgccatctgtgtgagcctggggcagacggctctgaaacctttgccgatggggtccctcgggagggactgagtcgccagcaggtgttgacccgcattggagtcatgtctctcgtcaaaaagaaggtgcaggagtttgagcacatcaatgggcgttggtcaatgccggaactgatgcctgaccccagcgccgattctaagcgctcctccagagcctcctctcctaccaaaacgtctcccaccactcctgaggcttctgctaccaacagtccctgcacctctaaacctgctactccagctccaagtgagaaaggagaaggcataaggacacctcttgagaaggaggaagctgaaaaccaggaggaaaagccagagaagaacagcagaattggggagaagatggagacagaggctgatgcccccagcccagccccatcacttggggagcggctggagccaaggaagattcctctagaggatgaggtgccaggggtgcctggagagatggagcctgaacctgggtaccgtggggacagagagaagtcagccacagagtcgacgccaggagaaaggggggaggagaagccgttggatggacaggaacacagggagaggccggagggggaaacaggggatttgggcaagagagaagatgtaaaaggtgaccgggagcttcgaccagggcctcgagatgagccacggtccaatgggcgacgagaggaaaagacagagaacccccggttcatgttcaatatcgccgatggtggcttcacagagcttcacacactgtggcagaatgaggaacgggcagctatttcctcggggaaactcaatgagatctggcacagaagacatgactattggcttctggctgggattgtcctccatggctatgcacggtggcaggacatccagaatgatgctcaatttgccattatcaacgagccatttaaaactgaagccaataaggggaactttctggagatgaaaaataagttcctggcccggaggttcaagctcctggagcaggcgctggtgattgaggagcagctgcggcgggcggcctacctgaacctgtcgcaggagccggcgcaccccgccatggccctccacgcccgcttcgccgaggccgagtgcctggccgagagccaccagcacctctccaaggagtcgctggcggggaacaagccggccaacgccgtcctgcacaaggttctgaaccagctggaggagttgctgagcgacatgaaggcggacgtgacccgcctgccagccacgctgtcccgaataccccccatcgcagcccgccttcagatgtccgagcgcagcatcctcagccggctggccagcaagggcacggagcctcaccccacaccggcctacccgccgggtccctacgctacacctccggggtacggggcggccttcagcgccgcacccgtaggggccctggccgccgcaggcgccaattacagccagatgcctgcagggtccttcatcacagccgccaccaacggccctccagtgcttgtgaagaaggagaaggaaatggtgggggcattggtgtcagacgggctggatcggaaggagccccgagccggggaggtgatctgtatagacgactgactggatcccaggcctgcccttcacccaggccccgtccccgaggccgacccccagctcaagcgctggggcctgctgccagccctccaccttccccaccccttgggccatcactgggctaggaacccctttgcccctctctgcagctcctctcttcaagaagggccctttgtctttctccactcccacacacctttcccaccaagccttgaagactgtgctggtgagaagaagtctgggtgggagatggctggcagggtcttccaagtaccttcctcccacactgccaagtatacacaacttcccagtaaatggttgtggggaggaaagaggtggagcctccccagccgtttccctgcagaatcagctctgtctcatgtggaagtggagaatcagccttgcctggcctttaggaacttttgtggggaagagagctttgaagagaggagggggactttagagagggatgaaaatgagccctgggagggaggaagggacgaggaggggtggctgcatgttaccgtcccctacctctccccacgtggagggtggagcagttatgagggaggaagtcaactgctgttcagcctcagaataaaggtgccgttcactggctcagtt

SEQ ID NO: 32094 - DNA, 1909 bp, Homo Sapiens
  misc_feature (42)..(42): n is a, c, g, or t
cggagacggcggagcgggccttgttggcgtccactgcgcggntgcaccctgccccatcctgccgggatcatggtctgcggcagcccgggagggatgctgctgctgcgggccgggctgcttgccctggctgctctctgcctgctccgggtgcccggggctcgggctgcagcctgtgagcccgtccgcatccccctgtgcaagtccctgccctggaacatgactaagatgcccaaccacctgcaccacagcactcaggacaacgccatcctggccatcgagcagttcgaaggtctgctgggcacccactgcagccccgatctgctcttcttcctctgtgccatgtacgcgcccatctgcaccattgacttccagcacgagcccatcaagccctgtaagtctgtgtgcgagcgggcccggcagggctgtgagcccatactcatcaagtaccgccactcgtggccggagaacctggcctgcgaggagctgccagtgtacgacaggggcgtgtgcatctctcccgaggccatcgttactgcggacggagctgattttcctatggattctagtaacggaaactgtagaggggcaagcagtgaacgctgtaaatgtaagcctattagagctacacagaagacctatttccggaacaattacaactatgtcattcgggctaaagttaaagagataaagactaagtgccatgatgtgactgcagtagtggaggtgaaggagattctaaagtcctctctggtaaacattccacgggacactgtcaacctctataccagctctggctgcctctgccctccacttaatgttaatgaggaatatatcatcatgggctatgaagatgaggaacgttccagattactcttggtggaaggctctatagctgagaagtggaaggatcgactcggtaaaaaagttaagcgctgggatatgaagcttcgtcatcttggactcagtaaaagtgattctagcaatagtgattccactcagagtcagaagtctggcaggaactcgaacccccggcaagcacgcaactaaatcccgaaatacaaaaagtaacacagtggacttcctattaagacttacttgcattgctggactagcaaaggaaaattgcactattgcacatcatattctattgtttactataaaaatcatgtgataactgattattacttctgtttctcttttggtttctgcttctctcttctctcaacccctttgtaatggtttgggggcagactcttaagtatattgtgagttttctatttcactaatcatgagaaaaactgttcttttgcaataataataaattaaacatgctgttaccagagcctctttgctggagtctccagatgttaatttactttctgcaccccaattgggaatgcaatattggatgaaaagagaggtttctggtattcacagaaagctagatatgccttaaaacatactctgccgatctaattacagccttatttttgtatgccttttgggcattctcctcatgcttagaaagttccaaatgtttataaaggtaaaatggcagtttgaagtcaaatgtcacataggcaaagcaatcaagcaccaggaagtgtttatgaggaaacaacacccaagatgaattatttttgagactgtcaggaagtaaaataaataggagcttaagaaagaacattttgcctgattgagaagcacaactgaaaccagtagccgctggggtgttaatggtagcattcttcttttggcaatacatttgatttgttcatgaatatattaatcagcattagagaaatgaattataactagacatctgctgttatcaccatagttttgtttaatttgcttccttttaaataaacccattggtgaaagtcccaaaaaaaaaaaaaaaaaaaaa

SEQ ID NO: 32095 - DNA, 1603 bp, Homo Sapiens
tgagatgagagctgccgacagttgggggtcaagggaggagacgccatgatccccaccttcacggctctgctctgcctcgggctgagtctgggccccaggacccacatgcaggcagggcccctccccaaacccaccctctgggctgagccaggctctgtgatcagctgggggaactctgtgaccatctggtgtcaggggaccctggaggctcgggagtaccgtctggataaagaggaaagcccagcaccctgggacagacagaacccactggagcccaagaacaaggccagattctccatcccatccatgacagaggactatgcagggagataccgctgttactatcgcagccctgtaggctggtcacagcccagtgaccccctggagctggtgatgacaggagcctacagtaaacccaccctttcagccctgccgagtcctcttgtgacctcaggaaagagcgtgaccctgctgtgtcagtcacggagcccaatggacactttccttctgatcaaggagcgggcagcccatcccctactgcatctgagatcagagcacggagctcagcagcaccaggctgaattccccatgagtcctgtgacctcagtgcacggggggacctacaggtgcttcagctcacacggcttctcccactacctgctgtcacaccccagtgaccccctggagctcatagtctcaggatccttggagggtcccaggccctcacccacaaggtccgtctcaacagctgcaggccctgaggaccagcccctcatgcctacagggtcagtcccccacagtggtctgagaaggcactgggaggtactgatcggggtcttggtggtctccatcctgcttctctccctcctcctcttcctcctcctccaacactggcgtcagggaaaacacaggacattggcccagagacaggctgatttccaacgtcctccaggggctgccgagccagagcccaaggacgggggcctacagaggaggtccagcccagctgctgacgtccagggagaaaacttctgtgctgccgtgaagaacacacagcctgaggacggggtggaaatggacactcggcagagcccacacgatgaagacccccaggcagtgacgtatgccaaggtgaaacactccagacctaggagagaaatggcctctcctccctccccactgtctggggaattcctggacacaaaggacagacaggcagaagaggacagacagatggacactgaggctgctgcatctgaagccccccaggatgtgacctacgcccagctgcacagctttaccctcagacagaaggcaactgagcctcctccatcccaggaaggggcctctccagctgagcccagtgtctatgccactctggccatccactaatccaggggggacccagaccccacaagccatggagactcaggaccccagaaggcatggaagctgcctccagtagacatcactgaaccccagccagcccagacccctgacacagaccactagaagattccgggaacgttgggagtcacctgattctgcaaagataaataatatccctgcattatcaaaataaagtagcagacctctcaattca

SEQ ID NO: 32096 - DNA, 2267 bp, Homo Sapiens
ctgaccaattacagcttgcatggtccccgtgtccctgctgcgctgagagaatgttcttataatgatccaagaggaagtggcaaatgagtgctcttcttcaggatccaatgatagctggacaagtcagtaagcccttgctgtcagtgcggagtgaaatgaatgcggagttgagaggtgaggacaaggctgctacttcagacagcgagctgaatgagcccctgcttgcgcctgtggaatcaaatgacagcgaggacactcccagcaagctcttcggggctagaggaaacccagcattatcagacccaggcactcctgaccaacaccaggccagtcagacccaccccccatttccagttgggccacagccacttctgacggcacagcagttagcttctgctgtggccggcgtgatgccgggaggccccccagccctcaaccagccaatcctcattcccttcaacatggcgggacagctaggaggccagcaaggactggttctcacactgccaacagcgaatctcaccaacatccaagggctggtggcagcagctgcagccggaggcattatgactctgccactgcaaaatctacaagctacctcatccctgaactcccagctccagcagctccagctccagctccagcagcagcagcagcagcagcagcagcagcagcctcccccgtcaaccaaccagcacccgcaaccagccccacaggcgccctcgcagtcccagcagcagccgctgcagcccaccccaccccagcagccaccacccgcctctcagcagccgccagctcctacatctcagctgcaacaggcgcctcagccccagcagcaccaaccccactcccactcccacaaccagaaccaaccatctccaacccagcagagctccagccccccgcagaaacctagtcagtctccaggacatggcctgccttcaccgctcacgccacccaatcctctacagctggttaataatccactagcaagtcaggctgcagcggctgcagcagccatgagctccatagcaagctcacaggcctttggcaatgccctctccagtcttcagggggtcacaggtcaactagttactaatgcacaaggacagattatcgggaccattccactgatgcctaatccggggccatcgagccaagcagcaagcggcactcagggcttgcaagtgcagccaatcaccccccagctcctcacaaacgcccagggccagatcatcgccacagtcattgggaaccagatcctgcccgtgatcaacacccagggcatcacgctgtcacccatcaagcccggccagcagctccaccaaccctcccagacgtcagtgggtcaagcagcctcccaaggcaaccttctgcacctggctcacagccaagcatccatgtctcaaagtcccgtccggcaggcttcctcttcttcctcctcatcctcctcttcttcagctttgagcgtgggccagttagtcagcaatcctcaaacggcagcgggtgaggtggatggggttaatctggaggagatccgagaatttgccaaagcttttaaaatccggcgcctgtcccttggcctgacccagactcaggtgggacaggctctcagtgctacagagggccccgcgtacagccagtcggccatctgcagacacaccatcctgagaagccactttttcctaccacaggaagcccaagagaacactatagctagcagtctgacagccaaactgaaccctggccttttgtatcctgccaggtttgaaaagctggacatcacccctaaaagtgcccagaagatcaagccggtgcttgagcggtggatggctgaggctgaggcccgccatcgagcaggtatgcagaacctgaccgagtttatcgggagtgaaccatccaaaaagcgcaagcggcgcacctccttcacaccccaggcccttgagatcctcaatgcccactttgagaagaacacacacccttctgggcaggaaatgaccgaaattgctgagaagctgaactatgaccgagaagtagttagagtttggttctgcaataagaggcaagccctgaagaacacaattaaacgcttaaaacagcacgagccggccacggcagtccctttggagcccttaacagactctctggaagaaaactcctaaagagatgcccacccataatcagaagcaaaattcacagaaactaaactccacccttgggactccacaacaacaacaacaacaaaatttaatttaatttaaaaatag

SEQ ID NO: 32097 - DNA, 8427 bp, Homo Sapiens
atggccctggtcctggagatcttcaccctgctggcctccatctgctgggtgtcggccaatatcttcgagtaccaggtggatgcccagccccttcgtccctgtgagctgcagagggaaacggcctttctgaagcaagcagactacgtgccccagtgtgcagaggatggcagcttccagactgtccagtgccagaacgacggccgctcctgctggtgtgtgggtgccaacggcagtgaagtgctgggcagcaggcagccaggacggcctgtggcttgtctgtcattttgtcagctacagaaacagcagatcttactgagtggctacattaacagcacagacacctcctacctccctcagtgtcaggattcaggggactacgcgcctgttcagtgtgatgtgcagcaggtccagtgctggtgtgtggacgcagaggggatggaggtgtatgggacccgccagctggggaggccaaagcgatgtccaaggagctgtgaaataagaaatcgtcgtcttctccacggggtgggagataagtcaccaccccagtgttctgcggagggagagtttatgcctgtccagtgcaaatttgtcaacaccacagacatgatgatttttgatctggtccacagctacaacaggtttccagatgcatttgtgaccttcagttccttccagaggaggttccctgaggtatctgggtattgccactgtgctgacagccaagggcgggaactggctgagacaggtttggagttgttactggatgaaatttatgacaccatttttgctggcctggaccttccttccaccttcactgaaaccaccctgtaccggatactgcagagacggttcctcgcagttcaatcagtcatctctggcagattccgatgccccacaaaatgtgaagtggagcggtttacagcaaccagctttggtcacccctatgttccaagctgccgccgaaatggcgactatcaggcggtgcagtgccagacggaagggccctgctggtgtgtggacgcccaggggaaggaaatgcatggaacccggcagcaaggggagccgccatcttgtgctgaaggccaatcttgtgcctccgaaaggcagcaggccttgtccagactctactttgggacctcaggctacttcagccagcacgacctgttctcttccccagagaaaagatgggcctctccaagagtagccagatttgccacatcctgcccacccacgatcaaggagctctttgtggactctgggcttctccgcccaatggtggagggacagagccaacagttttctgtctcagaaaatcttctcaaagaagccatccgagcaatttttccctcccgagggctggctcgtcttgcccttcagtttaccaccaacccaaagagactccagcaaaacctttttggagggaaatttttggtgaatgttggccagtttaacttgtctggagcccttggcacaagaggcacatttaacttcagtcaatttttccagcaacttggtcttgcaagcttcttgaatggagggagacaagaagatttggccaagccactctctgtgggattagattcaaattcttccacaggaacccctgaagctgctaagaaggatggtactatgaataagccaactgtgggcagctttggctttgaaattaacctacaagagaaccaaaatgccctcaaattccttgcttctctcctggagcttccagaattccttctcttcttgcaacatgctatctctgtgccagaagatgtggcaagagatttaggtgatgtgatggaaacggtactcagctcccagacctgtgagcagacacctgaaaggctatttgtcccatcatgcacgacagaaggaagctatgaggatgtccaatgcttttccggagagtgctggtgtgtgaattcctggggcaaagagcttccaggctcaagagtcagaggtggacagccaaggtgccccacagactgtgaaaagcaaagggctcgcatgcaaagcctcatgggcagccagcctgctggctccaccttgtttgtccctgcttgtactagtgagggacatttcctgcctgtccagtgcttcaactcagagtgctactgtgttgatgctgagggtcaggccattcctggaactcgaagtgcaatagggaagcccaagaaatgccccacgccctgtcaattacagkctgagcaagctttcctcaggacggtgcaggccctgctctctaactccagcatgctacccaccctttccgacacctacatcccacagtgcagcaccgatgggcagtggagacaagtgcaatgcaatgggcctccygagcaggtcttcgagttgtaccaacgatgggaggctcagaacaagggccaggatctgacgcctgccaagctgctagtgaagatcatgagctacagagaagcagcttccggaaacttcagtctctttattcaaagtctgtatgaggctggccagcaagatgtcttcccggtgctgtcacaatacccttctctgcaagatgtcccactagcagcactggaagggaaacggccccagcccagggagaatatcctcctggagccctacctcttctggcagatcttaaatggccaactcagccaatacccggggtcctactcagacttcagcactcctttggcacattttgatcttcggaactgctggtgtgtggatgaggctggccaagaactggaaggaatgcggtctgagccaagcaagctcccaacatgtcctggctcctgtgaggaagcaaagctccgtgtactgcagttcattagggaaacggaagagattgtttcagcttccaacagttctcggttccctctgggggagagtttcctggtggccaagggaatccggctgaggaatgaggacctcggccttcctccgctcttcccgccccgggaggctttcgcggagcagtttctgcgtgggagtgattacgccattcgcctggcggctcagtctaccttaagcttctatcagagacgccgcttttccccggacgactcggctggagcatccgcccttctgcggtcgggcccctacrtgccacagtgtgatgcgtttggaagttgggagcctgtgcagtgccacgctgggactgggcactgctggtgtgtagatgagaaaggagggttcatccctggctcactgactgcccgctctctgcagattccacagtgcccgacaacctgcgagaaatctcgaaccagtgggctgctttccagttggaaacaggctagatcccaagaaaacccatctccaaaagacctgttcgtcccagcctgcctagaaacaggagagtatgccaggctgcaggcatcgggggctggcacctggtgtgtggaccctgcatcaggagaagagttgcggcctggctcgagcagcagtgcccagtgcccaagcctctgcaatgtgctcaagagtggagtcctctctaggagagtcagcccaggctatgtcccagcctgcagggcagaggatgggggcttttccccagtgcaatgtgaccaggcccagggcagctgctggtgtgtcatggacagcggagaagaggtgcctgggacgcgcgtgaccgggggccagcccgcctgtgagagcccgcggtgtccgctgccattcaacgcgtcggaggtggttggtggaacaatcctgtgtgagacaatctcgggccccacaggctctgccatgcagcagtgccaattgctgtgccgccaaggctcctggagcgtgtttccaccagggccattgatatgtagcctggagagcggacgctgggagtcacagctgcctcagccccgggcctgccaacggccccagctgtggcagaccatccagacccaagggcactttcagctccagctcccgccgggcaagatgtgcagtgctgactacgcgggtttgctgcagactttccaggttttcatattggatgagctgacagcccgcggcttctgccagatccaggtgaagacttttggcaccctggtttccattcctgtctgcaacaactcctctgtgcaggtgggttgtctgaccagggagcgtttaggagtgaatgttacatggaaatcacggcttgaggacatcccagtggcttctcttcctgacttacatgacattgagagagccttggtgggcaaggatctccttgggcgcttcacagatctgatccagagtggctcattccagcttcatctggactccaagacgttcccagcggaaaccatccgcttcctccaaggggaccactttggcacctctcccaggacatggtttgggtgctcggaaggattctaccaagtcttgacaagtgaggccagtcaggacggactgggatgcgttaagtgtcctgaaggaagctattcccaagatgaggaatgcattccttgtcctgttggattctaccaagaacaggcagggagcttggcctgtgtcccatgtcctgtgggcagaacgaccatttctgcyggagctttcagccagactcactgtgtcactgactgtcagaggaacgaagcaggcctgcaatgtgaccagaatggccagtatcgagccagccagaaggacaggggcagtgggaaggccttctgtgtggacggcgaggggcggaggctgccatggtgggaaacagaggcccctcttgaggactcacagtgtttgatgatgcagaagtttgagaaggttccagaatcaaaggtgatcttcgacgccaatgctcctgtggctgtcagatccaaagttcctgattctgagttccccgtgatgcagtgcttgacagattgcacagaggacgaggcctgcagcttcttcaccgtgtccacgacggagccagagatttcctgtgatttctatgcttggacaagtgacaatgttgcctgcatgacttctgaccagaaacgagatgcactggggaactcaaaggccaccagctttggaagtcttcgctgccaggtgaaagtgaggagccatggtcaagattctccagctgtgtatttgaaaaagggccaaggatccaccacaacacttcagaaacgctttgaacccactggtttccaaaacatgctttctggattgtacaaccccattgtgttctcagcctcaggagccaatctaaccgatgctcacctcttctgtcttcttgcatgcgaccgtgatctgtgttgcgatggcttcgtcctcacacaggttcaaggaggtgccatcatctgtgggttgctgagctcacccagtgtcctgctttgtaatgtcaaagactggatggatccctctgaagcctgggctaatgctacatgtcctggtgtgacatatgaccaggagagccaccaggtgatattgcgtcttggagaccaggagttcatcaagagtctgacacccttagaaggaactcaagacacctttaccaattttcagcaggtttatctctggaaagattctgacatggggtctcggcctgagtctatgggatgtagaaaaracacagtgccaaggccagcatctccaacagaagcaggtttgacaacagaacttttctcccctgtggacctcaaccaggtcattgtcaatggaaatcaatcactatccagccagaagcactggcttttcaagcacctgttttcagcccagcaggcaaacctatggtgcctttctcgttgtgtgcaggagcactctttctgtcagctcgcagagataacagagagtgcatccttgtacttcacctgcaccctctacccagaggcacaggtgtgtgatgacatcatggagtccaatgcccagggctgcagactgatcctgcctcagatgccaaaggccctgttccggaagaaagttatactggaagataaagtgaagaacttttacactcgcctgccgttccaaaaactgatggggatatccattagaaataaagtgcccatgtctgaaaaatctatttctaatgggttctttgaatgtgaacgacggtgcgatgcggacccatgctgcactggctttggatttctaaatgtttcccagttaaaaggaggagaggtgacatgtctcactctgaacagcttgggaattcagatgtgcagtgaggagaatggaggagcctggcgcattttggactgtggctctcctgacattgaagtccacacctatcccttcggatggtaccagaagcccattgctcaaaataatgctcccagtttttgccctttggttgttctgccttccctcacagagaaagtgtctctggactcgtggcagtccctggccctctcttcagtggttgttgatccatccattaggcactttgatgttgcccatgtcagcactgctgccaccagcaatttctctgctgtccgagacctctgtttgtcggaatgttcccaacatgaggcctgtctcatcaccactctgcaaacccaacctggggctgtgagatgtatgttctatgctgatactcaaagctgcacacatagtctgcagggtcagaactgccgacttctgcttcgtgaagaggccacccacatctaccggaagccaggaatctctctgctcagctatgaggcatctgtaccttctgtgcccatttccacccatggccggctgctgggcaggtcccaggccatccaggtgggtacctcatggaagcaagtggaccagttccttggagttccatatgctgccccgcccctggcagagaggcgcttccaggcaccagagcccttgaactggacaggctcctgggatgccagcaagccaagggccagctgctggcagccaggcaccagaacatccacgtctcctggagtcagtgaagattgtttgtatctcaatgtgttcatccctcagaatgtggcccctaacgcgtctgtgctggtgttcttccacaacaccatggacagggaggagagtgaaggatggccggctatcgacggctccttcttggctgctgttggcaacctcatcgtggtcactgccagctaccgagtgggtgtcttcggcttcctgagttctgggtccggagaggtgagtggcaactgggggctgctggaccaggtggcggctctgacctgggtgcagacccacatccgaggatttggcggggaccctcggcgcgtgtccctggcagcagaccgtggcggggctgatgtggccagcatccaccttctcacggccagggccaccaactcccaacttttccggagagctgtgctgatgggaggctccgcactctccccggccgccgtcatcagccatgagagggctcagcagcaggcaattgctttggcaaaggaggtcagttgccccatgtcatccagccaagaagtggtgtcctgcctccgccagaagcctgccaatgtcctcaatgatgcccagaccaagctcytggccgtgagtggccctttccactactggggtcctgtgatcgatggccacttcctccgtgagcctccagccagagcactgaagaggtctttaygggtagaggtcgatctgctcattgggagttctcaggacgacgggctcatcaacagagcaaaggctgtgaagcaatttgaggaaagtcaaggccggaccagtagcaaaacagccttttaccaggcactgcagaattctctgggtggcgaggactcagatgcccgcgtcgaggctgctgctacatggtattactctctggagcactccacggatgactatgcctccttctcccgggctctggagaatgccacccgggactactttatcatctgccctataatcgacatggccagtgcctgggcaaagagggcccgaggaaacgtcttcatgtaccatgctcctgaaaactacggccatggcagcctggagctgctggcggatgttcagtttgccttggggcttcccttctacccagcctacgaggggcagttttctctggaggagaagagcctgtcgctgaaaatcatgcagtacttttcccacttcatcagatcaggaaatcccaactacccttatgagttctcacggaaagtacccacatttgcaaccccctggcctgactttgtaccccgtgctggtggagagaactacaaggagttcagtgagctgctccccaatcgacagggcctgaagaaagccgactgctccttctggtccaagtacatctcgtctctgaagacatctgcagatggagccaagggcgggcagtcagcagagagtgaagaggaggagttgacggctggatctgggctaagagaagatctcctaagcctccaggaaccaggctctaagacctacagcaagtgaccagcccttgagctccccaaaaacctcacccgaggctgcccactatggtcatctttttctctaaaatagccacttaccttcaataaagtatctacatgcggtgaagcattgttgactcta

SEQ ID NO: 32098 - DNA, 1367 bp, Homo Sapiens
gatctcaggctcggctccccgcccgccgcagcccactgttgacccggcccgtactgcggccccgtggccaccatgtccctgcacggcaaacggaaggagatctacaagtatgaagcgccctggacagtctacgcgatgaactggagtgtgcggcccgataagcgctttcgcttggcgctgggcagcttcgtggaggagtacaacaacaaggttcagcttgttggtttagatgaggagagttcagagtttatttgcagaaacacctttgaccacccataccccaccacaaagctcatgtggatccctgacacaaaaggcgtctatccagacctactggcaacaagcggtgactatctccgtgtgtggagggttggtgaaacagagaccaggctggagtgtttgctaaacaataataagaactctgatttctgtgctcccctgacctcctttgactggaatgaggtggatccttatcttttaggtacctcaagcattgatacgacatgcaccatctgggggctggagacagggcaggtgttagggcgagtgaatctcgtgtctggccacgtgaagacccagctgatcgcccatgacaaagaggtctatgatattgcatttagccgggccgggggtggcagggacatgtttgcctctgtgggtgctgatggctcggtgcggatgtttgacctccgccatctagaacacagcaccatcatttacgaagacccacagcatcacccactgcttcgcctctgctggaacaagcaggaccctaactacctggccaccatggccatggatggaatggaggtggtgattctagatgtccgggttccctgcacacctgtcgccaggttaaacaaccatcgagcatgtgtcaatggcattgcttgggccccacattcatcctgccacatctgcactgcagcggatgaccaccaggctctcatctgggacatccagcaaatgccccgagccattgaggaccctatcctggcctacacagctgaaggagagatcaacaatgtgcagtgggcatcaactcagcccgactggatcgccatctgctacaacaactgcctggagatactcagagtgtagtgttggtggcgctgtgcccacgaggcaggggcttttgtatttcctgcctctgccccacccccaaagtaagaagaaacatgtttccagtggccagtatgtctttcattgctttgcacccactgttaccagaagctgctctaggagttcctggccagtcaccccatcgccctctgtggcagactcagtgctgtgtggcgccctcctagcccagggctgagttttaagattttctctcctttcctcttctcctttggttcctcaattaa

SEQ ID NO: 32099 - DNA, 127 bp, Homo Sapiens
gtaaggattataaaacctagttggcttcagctattgataagaatcaatcaattatgggtacttttgcagtgtctttggtggaggtgcatccattagctgccgttacactgttacttttaatcaaaag

SEQ ID NO: 32100 - DNA, 5253 bp, Homo Sapiens
ccggagagccccggagtgagcggagtagcgagtcggcaacccggaggggtagaaatatttctgtcatggctcattcaaagactaggaccaatgatggaaaaattacatatccgcctggggtcaaggaaatatcagataaaatatctaaagaggagatggtgagacgattaaagatggttgtgaaaacttttatggatatggaccaggactctgaagaagaaaaggagctttatttaaacctagctttacatcttgcttcagatttttttctcaagcatcctgataaagatgttcgcttactggtagcctgctgccttgctgatattttcaggatttatgctcctgaagctccttacacatcccctgataaactaaaggatatatttatgtttataacaagacagttgaaggggctagaggatacaaagagcccacagttcaataggtatttttatttgcttgagaacattgcttgggtcaagtcatataacatatgctttgagttagaagatagcaatgaaattttcacccagctatacagaaccttattttcagttataaacaatggccacaatcagaaagtccatatgcacatggtagaccttatgagctctattatttgtgaaggtgatacagtgtctcaggagcttttggatacggttttagtaaatctggtacctgctcataagaatttaaacaagcaagcatatgatttggcaaaggctttactgaagaggacagctcaagctattgagccatatattaccaatttttttaatcaggttctgatgcttgggaaaacatctatcagcgatttgtcagagcatgtctctgacttaattttggagctctacaatattgatagtcatttgctgctctctgttttaccccagcttgaatttaaattaaagagcaatgataatgaggagcgcctacaagttgttaaactactggcgaaaatgtttggggcaaaggattcagaattggcttctcaaaacaagccactttggcagtgctacttgggcaggtttaatgatatccatgtaccaatccgcctggaatgtgtgaaatttgctagccattgtctcatgaaccatcctgatttagcaaaagacttaacagagtatcttaaagtgaggtcacatgaccctgaggaagctattagacatgatgttattgtgtcaatagttacagctgctaaaaaggatattcttctggtcaatgatcacttacttaattttgtgggagagagaacattagacaaacgatggagagtacgcaaagaagccatgatgggacttgcccaaatttataagaaatatgctttacagtcagcagctggaaaagatgctgcaaaacagatagcatggatcaaagacaaattgctacatatatattatcaaaatagtattgatgatcgactacttgttgaacggatctttgctcaatacatggttcctcacaatttagaaactacagaacggatgaaatgcttatattacttgtatgccacactggatttaaatgctgtgaaagcattgaatgaaatgtggaaatgtcaaaatctgctccgacatcaagtaaaggatttgcttgacttgattaagcaacccaaaacagatgccagtgtcaaggccatattttcaaaagtgatggttattacaagaagtttacctgatcctggtaaggctcaggatttcatgaagaaattcacacaggtgttagaagatgatgagaaaataagaaagcagttagaagtacttgttagtccaacatgctcctgcaagcaggctgaaggttgtgtgcgtgaaataactaagaagttgggcaaccccaaacagcctacaaatcctttcctggaaatgatcaagtttctcttggagaggatagcacctgtgcacatagataccgaatctatcagtgctcttattaaacaagtgaacaaatcaatagatggaacagcagatgatgaagatgagggtgttccaactgatcaagccatcagagcaggtcttgaactgcttaaggtactctcatttacacatcccatctcatttcattctgctgaaacatttgaatcattactggcctgtctgaaaatggatgatgaaaaagtagcagaagctgcactacaaattttcaaaaacacaggaagcaaaattgaagaggattttccacacatcagatcagccttgcttcctgttttacatcacaaatctaaaaaaggacccccccgtcaagccaaatatgccattcattgtatccatgcgatattttctagtaaagaggcccagtttgcacagatatttgagcctctgcataagagcctagatccaagcaacctggaacatctcataacaccattggttactattggtcatattgctctccttgcacctgatcaatttgctgctcctttgaaatctttggtagctactttcattgtgaaagatcttctcatgaatgatcggcttccagggaaaaagacaactaaactttgggttccagatgaagaagtatctcctgagacaatggtcaaaattcaggctattaaaatgatggttcgatggctacttggaatgaaaaataatcacagtaaatcaggaacttctaccttaagattgctaacaacaatattgcatagtgatggagacttgacagaacaggggaaaattagtaaaccagatatgtcacgtctgagacttgctgctgggagtgctattgtgaagctggcacaagaaccctgttaccatgaaatcatcacattagaacaatatcagctatgtgcattagctatcaacgatgaatgctatcaagtaagacaagtgtttgcccagaaacttcacaaaggcctttcccgtttacggcttccacttgagtatatggcaatctgtgccctttgtgcaaaagatcctgtaaaggagagaagagctcatgctaggcaatgtttggtgaaaaatataaatgtaaggcgggagtatctgaagcagcatgcagctgttagtgaaaaattattgtctcttctaccagagtatgttgttccatatacaattcaccttttggcacatgacccagattatgtcaaagtacaggatattgaacaacttaaagatgttaaagaatgtctttggtttgttctggaaatattaatggctaaaaatgaaaataacagtcacgcttttatcagaaagatggtagaaaatattaagcaaacaaaagatgcccaaggaccagatgatgcaaaaatgaatgaaaaactgtacactgtgtgtgatgttgccatgaatatcatcatgtcaaagagtactacatacagtttggaatctcctaaagacccggtactaccagctcgtttcttcactcaacctgacaagaatttcagtaacaccaaaaattatctgcctcctggaatgaaatcatttttcactcctggaaaacctaaaacaaccaatgttctaggagctgttaacaagccactttcatcagcaggcaagcaatctcagaccaaatcatcacgaatggaaactgtaggcaatgcaagcagcagctcaaatccaagctctcctggaagaataaaggggaggcttgatagttctgaaatggatcacagtgaaaatgaagattacacaatgtcttcacctttgccggggaaaagaagtgacaagagagacgactctgatcttgtaaggtctgaattggagaagcctagaggcagaaaaaaaacgcccgtcacagaacgggaggagaaattaggtatggatgacttgactaagttggtacaggaacagagacctaaaggcagtcagcgaagtcggaaaagaggccatacggcttcagaatctgatgaacagcagtggcctgaggaaaagaggctcaaagaagatatattagaaaatgaagatgaacagaatagtccgccaaaaaagggtaaaagaggccgaccaccaaaacctcttggtggaggtacaccaaaagaagagccaacaatgaaaacttctaaaaaaggaagcaaaaaaaaatctggacctccagcaccagaggaggaggaagaagaagaaagacaaagtggaaatacggaacagaagtccaaaagcaaacagcaccgagtgtcaaggagagcacagcagagagcagaatcttctgaatctagtgcaattgaatccacacagtccacaccacagaaaggacgaggaagaccatcaaaaacgccatcaccatcacaaccaaaaaaaaatgtgtaagttgtaaatattacatttcaaaccaatttcaaattattttgcaaaagttcctaaatttgtaaacatacatattgctgtatttaaattccatatatttagccccattacactaggtacggcggcgaagtgctaaaagggaacggcgatgaacaaatgtaattaataactttctctgtgaaagctttggaaaaatcttttttttttttttttttttttggtcaagcttgaggctgaataaagcctttgatgcacaaaatgggactgctgaagagtggacagttggaccttactttggtgaccccatacatttgtggtcacatgctttagccatacacatggtaacattgactatggagtcttgtgaaagtgtaatgtgcgatggctatgtagacataaagaagaaacttgtaaatatcttttttcttttttttaatgtttctgatttctgaagtgcttgtatagcttttatctgcggctttaaactgacagtacccgactgtttattggatctattgatttgaaaagaatttgttaggatagatcttaagcagtaatctgtcagtgtttgtatttgtattttctgcaattttactgtgaaaaaaaatttgttttcaacaattggtgtcattttcttgatgtcactatttgttggagagttaaatggtctcttccctttgtgtatcttacctagtgtttactcctgggcacccttaatcttcagaggtgctaaattgtctgccattacaccagaaggatgcctctgataggaggacaaccatgcaaattgtgaaatagtcctgaagttcttggattactttacacctcagtattgatttgtcccagaattttctggcctttcatggcaatgaaaattttaagaagaaagatttaaagtattttaattttaaagagtgtgttataaaataatgtactgaattctttatcccattttatcatcctttcagtttttattaatctactgtatcaataaaattctgtaatttgaatgagt

SEQ ID NO: 32101 - DNA, 2175 bp, Homo Sapiens
  misc_feature (1850)..(1850): n is a, c, g, or t
  misc_feature (1863)..(1863): n is a, c, g, or t
  misc_feature (1898)..(1898): n is a, c, g, or t
  misc_feature (1909)..(1909): n is a, c, g, or t
  misc_feature (1960)..(1960): n is a, c, g, or t
  misc_feature (1968)..(1968): n is a, c, g, or t
  misc_feature (1982)..(1982): n is a, c, g, or t
  misc_feature (2017)..(2017): n is a, c, g, or t
  misc_feature (2021)..(2021): n is a, c, g, or t
  misc_feature (2023)..(2023): n is a, c, g, or t
  misc_feature (2026)..(2026): n is a, c, g, or t
  misc_feature (2042)..(2042): n is a, c, g, or t
  misc_feature (2139)..(2139): n is a, c, g, or t
  misc_feature (2146)..(2146): n is a, c, g, or t
tgggtcggacctgaacccctaaaagcggaaccgcctcccgccctcgccatcccggagctgagtcgccggcggcggtggctgctgccagacccggagtttcctctttcactggatggagctgaactttgggcggccagagcagcacagctgtccggggatcgctgcatgctgagctccctcggcaagacccagcggcggctcgggatttttttgggggggcggggaccagccccgcgccggcaccatgttcctggcgaccctgtacttcgcgctgccgctcttggacttgctcctgtcggccgaagtgagcggcggagaccgcctggattgcgtgaaagccagtgatcagtgcctgaaggagcagagctgcagcaccaagtaccgcacgctaaggcagtgcgtggcgggcaaggagaccaacttcagcctggcatccggcctggaggccaaggatgagtgccgcagcgccatggaggccctgaagcagaagtcgctctacaactgccgctgcaagcggggtatgaagaaggagaagaactgcctgcgcatttactggagcatgtaccagagcctgcagggaaatgatctgctggaggattccccatatgaaccagttaacagcagattgtcagatatattccgggtggtcccattcatatcagtggagcacattcccaaagggaacaactgcctggatgcagcgaaggcctgcaacctcgacgacatttgcaagaagtacaggtcggcgtacatcaccccgtgcaccaccagcgtgtccaatgatgtctgcaaccgccgcaagtgccacaaggccctccggcagttctttgacaaggtcccggccaagcacagctacggaatgctcttctgctcctgccgggacatcgcctgcacagagcggaggcgacagaccatcgtgcctgtgtgctcctatgaagagagggagaagcccaactgtttgaatttgcaggactcctgcaagacgaattacatctgcagatctcgccttgcggatttttttaccaactgccagccagagtcaaggtctgtcagcagctgtctaaaggaaaactacgctgactgcctcctcgcctactcggggcttattggcacagtcatgacccccaactacatagactccagtagcctcagtgtggccccatggtgtgactgcagcaacagtgggaacgacctagaagagtgcttgaaattcttgaatttcttcaaggacaatacatgtcttaaaaatgcaattcaagcctttggcaatggctccgatgtgaccgtgtggcagccagccttcccagtacagaccaccactgccactaccaccactgccctccgggttaagaacaaacccctggggccagcagggtctgagaatgaaattcccactcatgttttgccaccgtgtgcaaatttacaggcacagaagctgaaatccaatgtgtcgggcaatacacacctctgtatttccaatggtaattatgaaaaagaaggtctcggtgcttccagccacataaccacaaaatcaatggctgctcctccaagctgtggtctgagcccactgctggtcctggtggtaaccgctctgtccaccctattatctttaacagaaacatcatagctgcattaaaaaaatacaatatggacatgtaaaaagacaaaaaccaagttatctgtttcctgttctcttgtatagctgaaattccagtttaggagctcagttgagaaacagttccattcaactggaacattttttttttttccttttaaaaaagcttcttgtgatcctttggggcttctgtgaaaaacctgatgcagtgctccatccaaactcaaaaggcttngggatatgctgtnttttaaagggacagtttgtaacttgggctgtaaancaaactggggntgtgttttcgatgatgatgatgatcatgatgatgatcctcgtgatcatgangatgatcntcatgatcatgatnatgattttaacagttttacttctggcctttcctanctananaangagttaatatttctanggtaactcccatatctcctttaatgacattgatttctaatgatataaatttcaccctacattgatgccaagcttttttgccacaaaaaaaattcttnccaaaantgggctttgtggaaacagctggtactgat

SEQ ID NO: 32102 - DNA, 1417 bp, Homo Sapiens
ccctccttaattacctaattttaacttatttacctcttaaaagaccctatcttcaaacacagtcacattctgagatactgtgagctagggctttgacatgtagatttttgggggacacaatttagcccatcacactctccttttccacaacacttctgtttcctttgaggaaagaacgggcattgttatacaggaatgcccattaatctccttgtgttttctttgttatgttttatcaggaggtgaggacaagccagaggtccttggtgtgccctcagaaatctgcctgcagttctcaccaagccgctgtgaaaatggggataaacacccgggagctgtttctcaacttcactattgtcttgattacggttattcttatgtggctccttgtgaggtcctatcagtactgagaggccatgccatggtcctgggattgactgagatgctccggagctgcctgctctatgccctgagaccccactgctgtcattgtcacaggatgccattctccatccgagggcacctgtgacctgcactcacaatatctgctatgctgtagtgctaggattgattatgtgttctccaaagatgctgctcccaagggctgccaagtgtttgccagggaacggtagatttattccccaactcttaactgaaaatgtgttagacaagccacaaagttaaaattaaactggattcatgatgatgtaggattgttacaagcccctgatctgtctcaccacacatcccttcaacccacacggtctgcaaccaaactctaattcaacctgccagaaggaatgttagaggaagtctttgtcagcccttatagctatcatgtgaataaagttaagtcaacttcaaaaacaacttctagaacttattttagcttccatgtgtgacagagcatttgacccttggctgggattggagtgacaagtgctaccgtatttctagcatttgaggtaagccaagatgctccaactgctgaagatttgaaaccaagtcaacacactgtgtcatatttcaagtaattccattggttcagcgctcctcaaacttttcccctaaactagtctgaagggcagagggagaataaatccattccactacggggtctgaagcacaggctgaattgctggctaaaagtgcaacatttctttgaagtcttgtgttttatctttagaatccacaagaaatgtattttctatcttataatatcttcatgtttgttttcatataaatatttaaaattatttacactaagtaacacaagaacatgagtcatgtccctaagagtagcatagtctattttgattattgttattacacaaatggagctagtctttaatcaactacagttctaaaaggaggaaaatagaaaatgcaaacttatatgtttataaaagacatataa

SEQ ID NO: 32103 - DNA, 1576 bp, Homo Sapiens
  misc_feature (54)..(54): n is a, c, g, or t
  misc_feature (204)..(204): n is a, c, g, or t
  misc_feature (293)..(294): n is a, c, g, or t
  misc_feature (1394)..(1394): n is a, c, g, or t
  misc_feature (1536)..(1537): n is a, c, g, or t
aagcttttcatatgtagttttcttgaaactgaccatatgctcttttggggtgangggaggagacggaagaaggagatggagaaggtctgagatgatttttttcgacagcagcgtccactaggcccttggggaggccgggtcacggggcctccttgcaccagtggtctacacgtcttgcctgcggtttacaaccgctcttttaanataattccctttgggacggcccccggcttcttcctgccacccccatccccaccccgcccccatcctcatccttagaggccccaggcaanngttcggattcccggttaggtctcagagtaaacagcacgcttggaggattactatcgacccgaggccaattcgaccctttccctttgccgccctcaattgacccttgaagcagcccctgctctcccttcaaatggaaaacccacagacacacacacaaacaaaaaccccaagtcttcctttcggttgctacccgcaatgacgtttccccctcggtcccgcccctccagggttggaattttgggattggccgagaggctgtggcgacaaggcccggattggacagcatggcgctgactgacagtcggggcggccgccgcgccctccctctctccccggtgtgcaaatgtgtgtgtgcggtgttatgccggacaagagggaggtgacgcaggcggcggcggcggcggctctgtttattgtccctctcggtgtgtgtgtgtgaggaaatcggggctgcagcgaggctaaggctgcctttgaagcagcggcggcgaccgggacgactacctggcgactcgagtggctggccttcgcggagtgtgagaaggacaaggcacctctgcgtcctcgccacgtccgagcgcctcgggctccccggccgccctcgcggctcgcacgcccgggcttcagcccggcctgcagcggcgcccgctggcggcagaaggcaacgccgccgctcggccgccgccggtcgctccctgctttctcctcagccgccgcgctaggcccgggctgatcgcggacgccgcgcctcgagtttgagggcagccggcggcgcggcctcctcagcgggctcggctgacgtccgctccggatcttcgcgatggggcgcgggggtcggcgcggctaggagtgcggcgagtggagcggtgggtgcggagcggcggggcccagcggcccgcagggaggcgggagcggcggctgcggcctcagggcctgtgagctggaggcactcgccatggccaagtcgggtggctgcggcgcgggagccggcgtgggcggcggcaacggggcactgacctgggtggtaagtggctggtccccgggacgggcggctgcattgttccgggcccgcggcgggggcggaattccgaacgggcggnggagggaaagggagggaaatccgtcccccgaacgggcgctccataggggcctgtgcttgcagaatcctccagcccgctccccgcgccttttctttctttctttctctgtacgtctctggaagtctgactgccagagcgtaanntctactgaaactttggggggacaaaacgcgaacgtaaca

SEQ ID NO: 32104 - DNA, 5869 bp, Homo Sapiens
aaacgccgcccaggacgcagccgccgccgccgccgctcctctgccactggctctgcgccccagcccggctctgctgcagcggcagggaggaagagccgccgcagcgcgactcgggagccccgggccacagcctggcctccggagccacccacaggcctccccgggcggcgcccacgctcctaccgcccggacgcgcggatcctccgccggcaccgcagccacctgctcccggcccagaggcgacgacacgatgcgctgcgcgctggcgctctcggcgctgctgctactgttgtcaacgccgccgctgctgccgtcgtcgccgtcgccgtcgccgtcgccgtcgccctcccagaatgcaacccagactactacggactcatctaacaaaacagcaccgactccagcatccagtgtcaccatcatggctacagatacagcccagcagagcacagtccccacttccaaggccaacgaaatcttggcctcggtcaaggcgaccacccttggtgtatccagtgactcaccggggactacaaccctggctcagcaagtctcaggcccagtcaacactaccgtggctagaggaggcggctcaggcaaccctactaccaccatcgagagccccaagagcacaaaaagtgcagacaccactacagttgcaacctccacagccacagctaaacctaacaccacaagcagccagaatggagcagaagatacaacaaactctggggggaaaagcagccacagtgtgaccacagacctcacatccactaaggcagaacatctgacgacccctcaccctacaagtccacttagcccccgacaacccactttgacgcatcctgtggccaccccaacaagctcgggacatgaccatcttatgaaaatttcaagcagttcaagcactgtggctatccctggctacaccttcacaagcccggggatgaccaccaccctaccgtcatcggttatctcgcaaagaactcaacagacctccagtcagatgccagccagctctacggccccttcctcccaggagacagtgcagcccacgagcccggcaacggcattgagaacacctaccctgccagagaccatgagctccagccccacagcagcatcaactacccaccgataccccaaaacaccttctcccactgtggctcatgagagtaactgggcaaagtgtgaggatcttgagacacagacacagagtgagaagcagctcgtcctgaacctcacaggaaacaccctctgtgcagggggcgcttcggatgagaaattgatctcactgatatgccgagcagtcaaagccaccttcaacccggcccaagataagtgcggcatacggctggcatctgttccaggaagtcagaccgtggtcgtcaaagaaatcactattcacactaagctccctgccaaggatgtgtacgagcggctgaaggacaaatgggatgaactaaaggaggcaggggtcagtgacatgaagctaggggaccaggggccaccggaggaggccgaggaccgcttcagcatgcccctcatcatcaccatcgtctgcatggcgtcattcctgctcctcgtggcggccctctatggctgctgccaccagcgcctctcccagaggaaggaccagcagcggctaacagaggagctgcagacagtggagaatggttaccatgacaacccaacactggaagtgatggagacctcttctgagatgcaggagaagaaggtggtcagcctcaacggggagctgggggacagctggatcgtccctctggacaacctgaccaaggacgacctggatgaggaggaagacacacacctctagtccggtctgccggtggcctccagcagcaccacagagctccagaccaaccaccccaagtgccgtttggatggggaagggaaagactggggagggagagtgaactccgaggggtgtcccctcccaatccccccagggccttaatttttcccttttcaacctgaacaaatcacattctgtccagattcctcttgtaaaataacccactagtgcctgagctcagtgctgctggatgatgagggagatcaagaaaaagccacgtaagggactttatagatgaactagtggaatcccttcattctgcagtgagattgccgagacctgaagagggtaagtgacttgcccaaggtcagagccacttggtgacagagccaggatgagaacaaagattccatttgcaccatgccacactgctgtgttcacatgtgccttccgtccagagcagtcccgggcaggggtgaaactccagcaggtggctgggctggaaaggagggcagggctacatcctggctcggtgggatctgacgacctgaaagtccagctcccaagttttccttctcctaccccagcctcgtgtacccatcttcccaccctctatgttcttacccctccctacactcagtgtttgttcccacttactctgtcctggggcctctgggattagcacaggttattcataaccttgaaccccttgttctggattcggattttctcacatttgcttcgtgagatgggggcttaacccacacaggtctccgtgcgtgaaccaggtctgcttaggggacctgcgtgcaggtgaggagagaaggggacactcgagtccaggctggtatctcagggcagctgatgaggggtcagcaggaacactggcccattgcccctggcactccttgcagaggccacccacgatcttctttgggcttccatttccaccagggactaaaatctgctgtagctagtgagagcagcgtgttccttttgttgttcactgctcagctgatgggagtgattccctgagacccagtatgaaagagcagtggctgcaggagaggccttcccggggccccccatcagcgatgtgtcttcagagacaatccattaaagcagccaggaaggacaggctttcccctgtatatcataggaaactcagggacatttcaagttgctgagagttttgttatagttgttttctaacccagccctccactgccaaaggccaaaagctcagacagttggcagacgtccagttagctcatctcactcactctgattctcctgtgccacaggaaaagagggcctggaaagcgcagtgcatgctgggtgcatgaagggcagcctgggggacagactgttgtgggaacgtcccactgtcctggcctggagctaggccttgctgttcctcttctctgtgagcctagtggggctgctgcggttctcttgcagtttctggtggcatctcaggggaacacaaaagctatgtctattccccaatataggacttttatgggctcggcagttagctgccatgtagaaggctcctaagcagtgggcatggtgaggtttcatctgattgagaagggggaatcctgtgtggaatgttgaactttcgccatggtctccatcgttctgggcgtaaattccctgggatcaagtaggaaaatgggcagaactgcttaggggaatgaaattgccatttttcgggtgaaacgccacacctccagggtcttaagagtcaggctccggctgtagtagctctgatgaaataggctatccactcgggatggcttactttttaaaagggtagggggaggggctggggaagatctgtcctgcaccatctgcctaattccttcctcacagtctgtagccatctgatatcctagggggaaaaggaaggccaggggttcacatagggccccagcgagtttcccaggagttagagggatgcgaggctaacaagttccaaaaacatctgccccgatgctctagtgtttggaggtgggcaggatggagaacagtgcctgtttgggggaaaacaggaaatcttgttaggcttgagtgaggtgtttgcttccttcttgcccagcgctgggttctctccacccagtaggttttctgttgtggtcccgtgggagaggccagactggattattcctcctttgctgatcctgggtcacacttcaccagccagggcttttgacggagacagcaaataggcctctgcaaatcaatcaaaggctgcaaccctatggcctcttggagacagatgatgactggcaaggactagagagcaggagtgcctggccaggtcggtcctgactctcctgactctccatcgctctgtccaaggagaacccggagaggctctgggctgattcagaggttactgctttatattcgtccaaactgtgttagtctaggcttaggacagcttcagaatctgacaccttgccttgctcttgccaccaggacacctatgtcaacaggccaaacagccatgcatctataaaggtcatcatcttctgccacctttactgggttctaaatgctctctgataattcagagagcattgggtctgggaagaggtaagaggaacactagaagctcagcatgacttaaacaggttgtagcaaagacagtttatcatcaactctttcagtggtaaactgtggtttccccaagctgcacaggaggccagaaaccacaagtatgatgactaggaagcctactgtcatgagagtggggagacaggcagcaaagcttatgaaggaggtacagaatattctttgcgttgtaagacagaatacgggtttaatctagtctaggcrccagatttttttcccgcttgataaggaaagctagcagaaagtttatttaaaccacttcttgagctttatcttttttgacaatatactggagaaactttgaagaacaagttcaaactgatacatatacacatatttttttgataatgtaaatacagtgaccatgttaacctaccctgcactgctttaagtgaacatactttgaaaaagcattatgttagctgagtgatggccaagttttttctctggacaggaatgtaaatgtcttactggaaatgacaagtttttgcttgatttttttttttaaacaaaaaatgaaatataacaagacaaacttatgataaagtatttgtcttgtagatcaggtgttttgttttgtttttttaattttaaaatgcaaccctgccccctccccagcaaagtcacagctccatttcagtaaaggttggagtcaatatgctctggttggcaggcaaccctgtagtcatggagaaaggtatttcaagatctagtccaatctttttctagagaaaaagataatctgaagctcacaaagatgaagtgacttcctcaaaatcacatggttcaggacagaaacaagattaaaacctggatccacagactgtgcgcctcagaaggaataatcggtaaattaagaattgctactcgaaggtgccagaatgacacaaaggacagaattcctttcccagttgttaccctagcaaggctagggagggcatgaacacaaacataagaactggtcttctcacactttctctgaatcatttaggtttaagatgtaagtgaacaattctttctttctgccaagaaacaaagttttggatgagcttttatatatggaacttactccaacaggactgagggaccaaggaaacatgatgggggaggcaagagagggcaaagagtaaaactgtagcatagcttttgtcacggtcactagctgatccctcaggtctgctgcaaacacagcatggaggacacagatgactctttggtgttggtctttttgtctgcagtgaatgttcaacagtttgcccaggaactgggggatcatatatgtcttagtggacaggggtctgaagtacactggaatttactgagaaacttgtttgtaaaaactatagttaataattattgcattttcttacaaaaatatattttggaaaattgtatactgtcaattaaagt

SEQ ID NO: 32105 - DNA, 2335 bp, Homo Sapiens
gaattccccccccccccccccgagagactggatggacccacaagggtgacagcccaggcggaccgatcttcccatcccacatcctccggcgcgatgccaaaaagaggctgacggcaactgggccttctgcagagaaagacctccgcttcactgccccggctggtcccaagggtcaggaagatggattcatacctgctgatgtggggactgctcacgttcatcatggtgcctggctgccaggcagagctctgtgacgatgacccgccagagatcccacacgccacattcaaagccatggcctacaaggaaggaaccatgttgaactgtgaatgcaagagaggtttccgcagaataaaaagcgggtcactctatatgctctgtacaggaaactctagccactcgtcctgggacaaccaatgtcaatgcacaagctctgccactcggaacacaacgaaacaagtgacacctcaacctgaagaacagaaagaaaggaaaaccacagaaatgcaaagtccaatgcagccagtggaccaagcgagccttccaggtcactgcagggaacctccaccatgggaaaatgaagccacagagagaatttatcatttcgtggtggggcagatggtttattatcagtgcgtccagggatacagggctctacacagaggtcctgctgagagcgtctgcaaaatgacccacgggaagacaaggtggacccagccccagctcatatgcacaggtgaaatggagaccagtcagtttccaggtgaagagaagcctcaggcaagccccgaaggccgtcctgagagtgagacttcctgcctcgtcacaacaacagattttcaaatacagacagaaatggctgcaaccatggagacgtccatatttacaacagagtaccaggtagcagtggccggctgtgttttcctgctgatcagcgtcctcctcctgagtgggctcacctggcagcggagacagaggaagagtagaagaacaatctagaaaaccaaaagaacaagaatttcttggtaagaagccgggaacagacaacagaagtcatgaagcccaagtgaaatcaaaggtgctaaatggtcgcccaggagacatccgttgtgcttgcctgcgttttggaagctctgaagtcacatcacaggacacggggcagtggcaaccttgtctctatgccagctcagtcccatcagagagcgagcgctacccacttctaaatagcaatttcgccgttgaagaggaagggcaaaaccactagaactctccatcttattttcatgtatatgtgttcattaaagcatgaatggtatggaactctctccaccctatatgtagtataaagaaaagtaggtttacattcatctcattccaacttcccagttcaggagtcccaaggaaagccccagcactaacgtaaatacacaacacacacactctaccctatacaactggacattgtctgcgtggttcctttctcagccgcttctgactgctgattctcccgttcacgttgcctaataaacatccttcaagaactctgggctgctacccagaaatcattttacccttggctcaatcctctaagctaacccccttctactgagccttcagtcttgaatttctaaaaaacagaggccatggcagaataatctttgggtaacttcaaaacggggcagccaaacccatgaggcaatgtcaggaacagaaggatgaatgaggtcccaggcagagaatcatacttagcaaagttttacctgtgcgttactaattggcctctttaagagttagtttctttgggattgctatgaatgataccctgaatttggcctgcactaatttgatgtttacaggtggacacacaaggtgcaaatcaatgcgtacgtttcctgagaagtgtctaaaaacaccaaaaagggatccgtacattcaatgtttatgcaaggaaggaaagaaagaaggaagtgaagagggagaagggatggaggtcacactggtagaacgtaaccacggaaaagagcgcatcaggcctggcacggtggctcaggcctataaccccagctccctaggagaccaaggcgggagcatctcttgaggccaggagtttgagaccagcctgggcagcatagcaagacacatccctacaaaaaattagaaattggctggatgtggtggcatacgcctgtagtcctagccactcaggaggctgaggcaggaggattgcttgagcccaggagttcgaggctgcagtcagtcatgatggcaccactgcactccagcctgggcaacagagcaagatcctgtctttaaggaaaaaaagacaagggaattc

SEQ ID NO: 32106 - DNA, 2190 bp, Homo Sapiens
atggccctggtcctggagatcttcaccctgctggcctccatctgctgggtgtcggccaatatcttcgagtaccaggttgatgcccagccccttcgtccctgtgagctgcagagggaaacggcctttctgaagcaagcagactacgtgccccagtgtgcagaggatggcagcttccagactgtccagtgccagaacgacggccgctcctgctggtgtgtgggtgccaacggcagtgaagtgctgggcagcaggcagccaggacggcctgtggcttgtctgtcattttgtcagctacagaaacagcagatcttactgagtggctacattaacagcacagacacctcctacctccctcagtgtcaggattcaggggactacgcgcctgttcagtgtgatgtgcagcatgtccagtgctggtgtgtggacgcagaggggatggaggtgtatgggacccgccagctggggaggccaaagcgatgtccaaggagctgtgaaataagaaatcgtcgtcttctccacggggtgggagataagtcaccaccccagtgttctgcggagggagagtttatgcctgtccagtgcaaatttgtcaacaccacagacatgatgatttttgatctggtccacagctacaacaggtttccagatgcatttgtgaccttcagttccttccagaggaggttccctgaggtatctgggtattgccactgtgctgacagccaagggcgggaactggctgagacaggtttggagttgttactggatgaaatttatgacaccatttttgctggcctggaccttccttccaccttcactgaaaccaccctgtaccggatactgcagagacggttcctcgcagttcaatcagtcatctctggcagattccgatgccccacaaaatgtgaagtggagcggtttacagcaaccagctttggtcacccctatgttccaagctgccgccgaaatggcgactatcaggcggtgcagtgccagacggaagggccctgctggtgtgtggacgcccaggggaaggaaatgcatggaacccggcagcaaggggagccgccatcttgtgctgaaggccaatcttgtgcctccgaaaggcagcaggccttgtccagactctactttgggacctcaggctacttcagccagcacgacctgttctcttccccagagaaaagatgggcctctccaagagtagccagatttgccacatcctgcccacccacgatcaaggagctctttgtggactctgggcttctccgcccaatggtggagggacagagccaacagttttctgtctcagaaaatcttctcaaagaagccatccgagcaatttttccctcccgagggctggctcgtcttgcccttcagtttaccaccaacccaaagagactccagcaaaacctttttggagggaaatttttggtgaatgttggccagtttaacttgtctggagcccttggcacaagaggcacatttaacttcagtcaatttttccagcaacttggtcttgcaagcttcttgaatggagggagacaagaagatttggccaagccactctctgtgggattagattcaaattcttccacaggaacccctgaagctgctaagaaggatggtactatgaataagccaactgtgggcagctttggctttgaaattaacctacaagagaaccaaaatgccctcaaattccttgcttctctcctggagcttccagaattccttctcttcttgcaacatgctatctctgtgccagaagatgtggcaagagatttaggtgatgtgatggaaacggtactcgactcccagacctgtgagcagacacctgaaaggctatttgtcccatcatgcacgacagaaggaagctatgaggatgtccaatgcttttccggagagtgctggtgtgtgaattcctggggcaaagagcttccaggctcaagagtcagagatggacagccaaggtgccccacagactgtgaaaagcaaagggctcgcatgcaaagcctcatgggcagccagcctgctggctccaccttgtttgtccctgcttgtactagtgagggacatttcctgcctgtccagtgcttcaactcagagtgctactgtgttgatgctgagggtcaggccattcctggaactcgaagtgcaatagggaagcccaagaaatgccccacgccctgt

SEQ ID NO: 32107 - DNA, 5180 bp, Homo Sapiens
accgggagcgcgcgctctgatccgaggagaccccgcgctcccgcagccatgggcaccgggggccggcggggggcggcggccgcgccgctgctggtggcggtggccgcgctgctactgggcgccgcgggccacctgtaccccggagaggtgtgtcccggcatggatatccggaacaacctcactaggttgcatgagctggagaattgctctgtcatcgaaggacacttgcagatactcttgatgttcaaaacgaggcccgaagatttccgagacctcagtttccccaaactcatcatgatcactgattacttgctgctcttccgggtctatgggctcgagagcctgaaggacctgttccccaacctcacggtcatccggggatcacgactgttctttaactacgcgctggtcatcttcgagatggttcacctcaaggaactcggcctctacaacctgatgaacatcacccggggttctgtccgcatcgagaagaacaatgagctctgttacttggccactatcgactggtcccgtatcctggattccgtggaggataattacatcgtgttgaacaaagatgacaacgaggagtgtggagacatctgtccgggtaccgcgaagggcaagaccaactgccccgccaccgtcatcaacgggcagtttgtcgaacgatgttggactcatagtcactgccagaaagtttgcccgaccatctgtaagtcacacggctgcaccgccgaaggcctctgttgccacagcgagtgcctgggcaactgttctcagcccgacgaccccaccaagtgcgtggcctgccgcaacttctacctggacggcaggtgtgtggagacctgcccgcccccgtactaccacttccaggactggcgctgtgtgaacttcagcttctgccaggacctgcaccacaaatgcaagaactcgcggaggcagggctgccaccagtacgtcattcacaacaacaagtgcatccctgagtgtccctccgggtacacgatgaattccagcaacttgctgtgcaccccatgcctgggtccctgtcccaaggtgtgccacctcctagaaggcgagaagaccatcgactcggtgacgtctgcccaggagctccgaggatgcaccgtcatcaacgggagtctgatcatcaacattcgaggaggcaacaatctggcagctgagctagaagccaacctcggcctcattgaagaaatttcagggtatctaaaaatccgccgatcctacgctctggtgtcactttccttcttccggaagttacgtctgattcgaggagagaccttggaaattgggaactactccttctatgccttggacaaccagaacctaaggcagctctgggactggagcaaacacaacctcaccatcactcaggggaaactcttcttccactataaccccaaactctgcttgtcagaaatccacaagatggaagaagtttcaggaaccaaggggcgccaggagagaaacgacattgccctgaagaccaatggggaccaggcatcctgtgaaaatgagttacttaaattttcttacattcggacatcttttgacaagatcttgctgagatgggagccgtactggccccccgacttccgagacctcttggggttcatgctgttctacaaagaggccccttatcagaatgtgacggagttcgacgggcaggatgcatgtggttccaacagttggacggtggtagacattgacccacccctgaggtccaacgaccccaaatcacagaaccacccagggtggctgatgcggggtctcaagccctggacccagtatgccatctttgtgaagaccctggtcaccttttcggatgaacgccggacctatggggccaagagtgacatcatttatgtccagacagatgccaccaacccctctgtgcccctggatccaatctcagtgtctaactcatcatcccagattattctgaagtggaaaccaccctccgaccccaatggcaacatcacccactacctggttttctgggagaggcaggcggaagacagtgagctgttcgagctggattattgcctcaaagggctgaagctgccctcgaggacctggtctccaccattcgagtctgaagattctcagaagcacaaccagagtgagtatgaggattcggccggcgaatgctgctcctgtccaaagacagactctcagatcctgaaggagctggaggagtcctcgtttaggaagacgtttgaggattacctgcacaacgtggttttcgtccccaggccatctcggaaacgcaggtcccttggcgatgttgggaatgtgacggtggccgtgcccacggtggcagctttccccaacacttcctcgaccagcgtgcccacgagtccggaggagcacaggccttttgagaaggtggtgaacaaggagtcgctggtcatctccggcttgcgacacttcacgggctatcgcatcgagctgcaggcttgcaaccaggacacccctgaggaacggtgcagtgtggcagcctacgtcagtgcgaggaccatgcctgaagccaaggctgatgacattgttggccctgtgacgcatgaaatctttgagaacaacgtcgtccacttgatgtggcaggagccgaaggagcccaatggtctgatcgtgctgtatgaagtgagttatcggcgatatggtgatgaggagctgcatctctgcgtctcccgcaagcacttcgctctggaacggggctgcaggctgcgtgggctgtcaccggggaactacagcgtgcgaatccgggccacctcccttgcgggcaacggctcttggacggaacccacctatttctacgtgacagactatttagacgtcccgtcaaatattgcaaaaattatcatcggccccctcatctttgtctttctcttcagtgttgtgattggaagtatttatctattcctgagaaagaggcagccagatgggccgctgggaccgctttacgcttcttcaaaccctgagtatctcagtgccagtgatgtgtttccatgctctgtgtacgtgccggacgagtgggaggtgtctcgagagaagatcaccctccttcgagagctggggcagggctccttcggcatggtgtatgagggcaatgccagggacatcatcaagggtgaggcagagacccgcgtggcggtgaagacggtcaacgagtcagccagtctccgagagcggattgagttcctcaatgaggcctcggtcatgaagggcttcacctgccatcacgtggtgcgcctcctgggagtggtgtccaagggccagcccacgctggtggtgatggagctgatggctcacggagacctgaagagctacctccgttctctgcggccagaggctgagaataatcctggccgccctccccctacccttcaagagatgattcagatggcggcagagattgctgacgggatggcctacctgaacgccaagaagtttgtgcatcgggacctggcagcgagaaactgcatggtcgcccatgattttactgtcaaaattggagactttggaatgaccagagacatctatgaaacggattactaccggaaagggggcaagggtctgctccctgtacggtggatggcaccggagtccctgaaggatggggtcttcaccacttcttctgacatgtggtcctttggcgtggtcctttgggaaatcaccagcttggcagaacagccttaccaaggcctgtctaatgaacaggtgttgaaatttgtcatggatggagggtatctggatcaacccgacaactgtccagagagagtcactgacctcatgcgcatgtgctggcaattcaaccccaacatgaggccaaccttcctggagattgtcaacctgctcaaggacgacctgcaccccagctttccagaggtgtcgttcttccacagcgaggagaacaaggctcccgagagtgaggagctggagatggagtttgaggacatggagaatgtgcccctggaccgttcctcgcactgtcagagggaggaggcggggggccgggatggagggtcctcgctgggtttcaagcggagctacgaggaacacatcccttacacacacatgaacggaggcaagaaaaacgggcggattctgaccttgcctcggtccaatccttcctaacagtgcctaccgtggcgggggcgggcaggggttcccattttcgctttcctctggtttgaaagcctctggaaaactcaggattctcacgactctaccatgtccaatggagttcagagatcgttcctatacatttctgttcatcttaaggtggactcgtttggttaccaatttaactagtcctgcagaggatttaactgtgaacctggagggcaaggggtttccacagttgctgctcctttggggcaacgacggtttcaaaccaggattttgtgttttttcgttccccccacccgcccccagcagatggaaagaaagcacctgtttttacaaattctttttttttttttttttttttgctggtgtctgagcttcagtataaaagacaaaacttcctgtttgtggaacaaaagttcgaaagaaaaaacaaaacaaaaacacccagccctgttccaggagaatttcaagttttacaggttgagcttcaagatggtttttttggttttttttttttctctcatccaggctgaaggattttttttttctttacaaaatgagttcctcaaattgaccaatagctgctgctttcatattttggataagggtctgtggtcccggcgtgtgctcacgtgtgtatgcacgtgtgtgtgtccattagacacggctgacgtgtgtgcaaagtatccatgcggagttgatgctttgggaattggctcatgaaggttcttctcaagggtgcgagctcatccccctctctccttccttcttattgactgggagactgtgctctcgacagattcttcttgtgtcagaagtctagcctcaggtttctaccctcccttcacattggtggccaagggaggagcatttcatttggagtgattatgaatcttttcaagaccaaaccaagctaggacattaaaaaaaaaaaaaagaaaaagaaagaaaaaacaaaatggaaaaaggaaaaaaaaaaagaactgagatgacagagttttgagaatatatttgtaccatattta

SEQ ID NO: 32108 - DNA, 1843 bp, Homo Sapiens
ctgcaggggggggggggggggggggctgtcatggcggcaggacggcgaacttgcagtatctccacgacccgcccctacaggtgccagtgcctccagaatgtggcagctcacaagcctcctgctgttcgtggccacctggggaatttccggcacaccagctcctcttgactcagtgttctccagcagcgagcgtgcccaccaggtgctgcggatccgcaaacgtgccaactccttcctggaggagctccgtcacagcagcctggagcgggagtgcatagaggagatctgtgacttcgaggaggccaaggaaattttccaaaatgtggatgacacactggccttctggtccaagcacgtcgacggtgaccagtgcttggtcttgcccttggagcacccgtgcgccagcctgtgctgcgggcacggcacgtgcatcgacggcatcggcagcttcagctgcgactgccgcagcggctgggagggccgcttctgccagcgcgaggtgagcttcctcaattgctcgctggacaacggcggctgcacgcattactgcctagaggaggtgggctggcggcgctgtagctgtgcgcctggctacaagctgggggacgacctcctgcagtgtcaccccgcagtgaagttcccttgtgggaggccctggaagcggatggagaagaagcgcagtcacctgaaacgagacacagaagaccaagaagaccaagtagatccgcggctcattgatgggaagatgaccaggcggggagacagcccctggcaggtggtcctgctggactcaaagaagaagctggcctgcggggcagtgctcatccacccctcctgggtgctgacagcggcccactgcatggatgagtccaagaagctccttgtcaggcttggagagtatgacctgcggcgctgggagaagtgggagctggacctggacatcaaggaggtcttcgtccaccccaactacagcaagagcaccaccgacaatgacatcgcactgctgcacctggcccagcccgccaccctctcgcagaccatagtgcccatctgcctcccggacagcggccttgcagagcgcgagctcaatcaggccggccaggagaccctcgtgacgggctggggctaccacagcagccgagagaaggaggccaagagaaaccgcaccttcgtcctcaacttcatcaagattcccgtggtcccgcacaatgagtgcagcgaggtcatgagcaacatggtgtctgagaacatgctgtgtgcgggcatcctcggggaccggcaggatgcctgcgagggcgacagtggggggcccatggtcgcctccttccacggcacctggttcctggtgggcctggtgagctggggtgagggctgtgggctccttcacaactacggcgtttacaccaaagtcagccgctacctcgactggatccatgggcacatcagagacaaggaagccccccagaagagctgggcaccttagcgaccctccctgcagggctgggcttttgcatggcaatggatgggacattaaagggacatgtaacaagcacaccggcctgctgttctgtccttccatccctcttttgggctcttctggagggaagtaacatttactgagcacctgttgtatgtcacatgccttatgaatagaatcttaactcctagagcaactctgtggggtggggaggagcagatccaagttttgcggggtctaaagctgtgtgtgttgagggggatactctgtttatgaaaaagaataaaaaacacaaccacgaaaaaaaaaaaaaaaaaaaaaaaaaaaaaaaaaaaaaaaacccccccccgccccccccccctgcag

SEQ ID NO: 32109 - DNA, 2027 bp, Homo Sapiens
agctgccagccagagagggagtcatttcattggcgtttgagtcagcaaagaagtcaagatggccaaagttccagacatgtttgaagacctgaagaactgttacagtgaaaatgaagaagacagttcctccattgatcatctgtctctgaatcagaaatccttctatcatgtaagctatggcccactccatgaaggctgcatggatcaatctgtgtctctgagtatctctgaaacctctaaaacatccaagcttaccttcaaggagagcatggtggtagtagcaaccaacgggaaggttctgaagaagagacggttgagtttaagccaatccatcactgatgatgacctggaggccatcgccaatgactcagaggaagaaatcatcaagcctaggtcatcaccttttagcttcctgagcaatgtgaaatacaactttatgaggatcatcaaatacgaattcatcctgaatgacgccctcaatcaaagtataattcgagccaatgatcagtacctcacggctgctgcattacataatctggatgaagcagtgaaatttgacatgggtgcttataagtcatcaaaggatgatgctaaaattaccgtgattctaagaatctcaaaaactcaattgtatgtgactgcccaagatgaagaccaaccagtgctgctgaaggagatgcctgagatacccaaaaccatcacaggtagtgagaccaacctcctcttcttctgggaaactcacggcactaagaactatttcacatcagttgcccatccaaacttgtttattgccacaaagcaagactactgggtgtgcttggcaggggggccaccctctatcactgactttcagatactggaaaaccaggcgtaggtctggagtctcacttgtctcacttgtgcagtgttgacagttcatatgtaccatgtacatgaagaagctaaatcctttactgttagtcatttgctgagcatgtactgagccttgtaattctaaatgaatgtttacactctttgtaagagtggaaccaacactaacatataatgttgttatttaaagaacaccctatattttgcatagtaccaatcattttaattattattcttcataacaattttaggaggaccagagctactgactatggctaccaaaaagactctacccatattacagatgggcaaattaaggcataagaaaactaagaaatatgcacaatagcagtcgaaacaagaagccacagacctaggatttcatgatttcatttcaactgtttgccttctgcttttaagttgctgatgaactcttaatcaaatagcataagtttctgggacctcagttttatcattttcaaaatggagggaataatacctaagccttcctgccgcaacagttttttatgctaatcagggaggtcattttggtaaaatacttctcgaagccgagcctcaagatgaaggcaaagcacgaaatgttattttttaattattatttatatatgtatttataaatatatttaagataattataatatactatatttatgggaaccccttcatcctctgagtgtgaccaggcatcctccacaatagcagacagtgttttctgggataagtaagtttgatttcattaatacagggcattttggtccaagttgtgcttatcccatagccaggaaactctgcattctagtacttgggagacctgtaatcatataataaatgtacattaattaccttgagccagtaattggtccgatctttgactcttttgccattaaacttacctgggcattcttgtttcattcaattccacctgcaatcaagtcctacaagctaaaattagatgaactcaactttgacaaccatgagaccactgttatcaaaactttcttttctggaatgtaatcaatgtttcttctaggttctaaaaattgtgatcagaccataatgttacattattatcaacaatagtgattgatagagtgttatcagtcataactaaataaagcttgcaacaaaattctctg

SEQ ID NO: 32110 - DNA, 3791 bp, Homo Sapiens
tttttagaaaaaaaaaatatatttccctcctgctccttctgcgttcacaagctaagttgtttatctcggctgcggcgggaactgcggacggtggcgggcgagcggctcctctgccagagttgatattcactgatggactccaaagaatcattaactcctggtagagaagaaaaccccagcagtgtgcttgctcaggagaggggagatgtgatggacttctataaaaccctaagaggaggagctactgtgaaggtttctgcgtcttcaccctcactggctgtcgcttctcaatcagactccaagcagcgaagacttttggttgattttccaaaaggctcagtaagcaatgcgcagcagccagatctgtccaaagcagtttcactctcaatgggactgtatatgggagagacagaaacaaaagtgatgggaaatgacctgggattcccacagcagggccaaatcagcctttcctcgggggaaacagacttaaagcttttggaagaaagcattgcaaacctcaataggtcgaccagtgttccagagaaccccaagagttcagcatccactgctgtgtctgctgcccccacagagaaggagtttccaaaaactcactctgatgtatcttcagaacagcaacatttgaagggccagactggcaccaacggtggcaatgtgaaattgtataccacagaccaaagcacctttgacattttgcaggatttggagttttcttctgggtccccaggtaaagagacgaatgagagtccttggagatcagacctgttgatagatgaaaactgtttgctttctcctctggcgggagaagacgattcattccttttggaaggaaactcgaatgaggactgcaagcctctcattttaccggacactaaacccaaaattaaggataatggagatctggttttgtcaagccccagtaatgtaacactgccccaagtgaaaacagaaaaagaagatttcatcgaactctgcacccctggggtaattaagcaagagaaactgggcacagtttactgtcaggcaagctttcctggagcaaatataattggtaataaaatgtctgccatttctgttcatggtgtgagtacctctggaggacagatgtaccactatgacatgaatacagcatccctttctcaacagcaggatcagaagcctatttttaatgtcattccaccaattcccgttggttccgaaaattggaataggtgccaaggatctggagatgacaacttgacttctctggggactctgaacttccctggtcgaacagttttttctaatggctattcaagccccagcatgagaccagatgtaagctctcctccatccagctcctcaacagcaacaacaggaccacctcccaaactctgcctggtgtgctctgatgaagcttcaggatgtcattatggagtcttaacttgtggaagctgtaaagttttcttcaaaagagcagtggaaggacagcacaattacctatgtgctggaaggaatgattgcatcatcgataaaattcgaagaaaaaactgcccagcatgccgctatcgaaaatgtcttcaggctggaatgaacctggaagctcgaaaaacaaagaaaaaaataaaaggaattcagcaggccactacaggagtctcacaagaaacctctgaaaatcctggtaacaaaacaatagttcctgcaacgttaccacaactcacccctaccctggtgtcactgttggaggttattgaacctgaagtgttatatgcaggatatgatagctctgttccagactcaacttggaggatcatgactacgctcaacatgttaggagggcggcaagtgattgcagcagtgaaatgggcaaaggcaataccaggtttcaggaacttacacctggatgaccaaatgaccctactgcagtactcctggatgtttcttatggcatttgctctggggtggagatcatatagacaatcaagtgcaaacctgctgtgttttgctcctgatctgattattaatgagcagagaatgactctaccctgcatgtacgaccaatgtaaacacatgctgtatgtttcctctgagttacacaggcttcaggtatcttatgaagagtatctctgtatgaaaaccttactgcttctctcttcagttcctaaggacggtctgaagagccaagagctatttgatgaaattagaatgacctacatcaaagagctaggaaaagccattgtcaagagggaaggaaactccagccagaactggcagcggttttatcaactgacaaaactcttggattctatgcatgaaaatgttatgtggttaaaaccagaaagcacatctcacacattaatctgattttcatcccaacaatcttggcgctcaaaaaatagaactcaatgagaaaaagaagattatgtgcacttcgttgtcaataataagtcaactgatgctcatcgacaactataggaggcttttcattaaatgggaaaagaagctgtgcccttttaggatacgtgggggaaaagaaagtcatcttaattatgtttaattgtggatttaagtgctatatggtggtgctgtttgaaagcagatttatttcctatgtatgtgttatctggccatcccaacccaaactgttgaagtttgtagtaacttcagtgagagttggttactcacaacaaatcctgaaaagtatttttagtgtttgtaggtattctgtgggatactatacaagcagaactgaggcacttaggacataacacttttggggtatatatatccaaatgcctaaaactatgggaggaaaccttggccaccccaaaaggaaaactaacatgatttgtgtctatgaagtgctggataattagcatgggatgagctctgggcatgccatgaaggaaagccacgctcccttcagaattcagaggcagggagcaattccagtttcacctaagtctcataattttagttcccttttaaaaaccctgaaaactacatcaccatggaatgaaaaatattgttatacaatacattgatctgtcaaacttccagaaccatggtagccttcagtgagatttccatcttggctggtcactccctgactgtagctgtaggtgaatgtgtttttgtgtgtgtgtgtctggttttagtgtcagaagggaaataaaagtgtaaggaggacactttaaaccctttgggtggagtttcgtaatttcccagactattttcaagcaacctggtccacccaggattagtgaccaggttttcaggaaaggatttgcttctctctagaaaatgtctgaaaggattttattttctgatgaaaggctgtatgaaaataccctcctcaaataacttgcttaactacatatagattcaagtgtgtcaatattctattttgtatattaaatgctatataatggggacaaatctatattatactgtgtatggcattattaagaagctttttcattattttttatcacagtaattttaaaatgtgtaaaaattaaaaccagtgactcctgtttaaaaataaaagttgtagttttttattcatgctgaataataatctgtagttaaaaaaaaagtgtctttttacctacgcagtgaaatgtcagactgtaaaaccttgtgtggaaatgtttaacttttattttttcatttaaatttgctgttctggtattaccaaaccacacatttgtaccgaattggcagtaaatgttagccatttacagcaatgccaaatatggagaaacatcataataaaaaaatctgcttttttc

SEQ ID NO: 32111 - DNA, 3992 bp, Homo Sapiens
ggcttcaggaagggcagacagagtgtccaaaagcgtgagagcacgaagtgaggagaaggtggagaagagagaagaggaagaggaagaggaagagaggaagcggagggaactgcggccaggctaaaaggggaagaagaggatcagcccaaggaggaggaagaggaaaacaagacaaacagccagtgcagaggagaggaacgtgtgtccagtgtcccgatccctgcggagctagtagctgagagctctgtgccctgggcaccttgcagccctgcacctgcctgccacttccccaccgaggccatgggcccaggagttctgctgctcctgctggtggccacagcttggcatggtcagggaatcccagtgatagagcccagtgtccccgagctggtcgtgaagccaggagcaacggtgaccttgcgatgtgtgggcaatggcagcgtggaatgggatggccccgcatcacctcactggaccctgtactctgatggctccagcagcatcctcagcaccaacaacgctaccttccaaaacacggggacctatcgctgcactgagcctggagaccccctgggaggcagcgccgccatccacctctatgtcaaagaccctgcccggccctggaacgtgctagcacaggaggtggtcgtgttcgaggaccaggacgcactactgccctgtctgctcacagacccggtgctggaagcaggcgtctcgctggtgcgtgtgcgtggccggcccctcatgcgccacaccaactactccttctcgccctggcatggcttcaccatccacagggccaagttcattcagagccaggactatcaatgcagtgccctgatgggtggcaggaaggtgatgtccatcagcatccggctgaaagtgcagaaagtcatcccagggcccccagccttgacactggtgcctgcagagctggtgcggattcgaggggaggctgcccagatcgtgtgctcagccagcagcgttgatgttaactttgatgtcttcctccaacacaacaacactaagctcgcaatccctcaacaatctgactttcataataaccgttaccaaaaagtcctgaccctcaacctcgatcaagtagatttccaacatgccggcaactactcctgcgtggccagcaacgtgcagggcaagcactccacctccatgttcttccgggtggtagagagtgcctacttgaacttgagctctgagcagaacctcatccaggaggtgaccgtgggggaggggctcaacctcaaagtcatggtggaggcctacccaggcctgcaaggttttaactggacctacctgggacccttttctgaccaccagcctgagcccaagcttgctaatgctaccaccaaggacacatacaggcacaccttcaccctctctctgccccgcctgaagccctctgaggctggccgctactccttcctggccagaaacccaggaggctggagagctctgacgtttgagctcacccttcgataccccccagaggtaagcgtcatatggacattcatcaacggctctggcacccttttgtgtgctgcctctgggtacccccagcccaacgtgacatggctgcagtgcagtggccacactgataggtgtgatgaggcccaagtgctgcaggtctgggatgacccataccctgaggtcctgagccaggagcccttccacaaggtgacggtgcagagcctgctgactgttgagaccttagagcacaaccaaacctacgagtgcagggcccacaacagcgtggggagtggctcctgggccttcatacccatctctgcaggagcccacacgcatcccccggatgagttcctcttcacaccagtggtggtcgcctgcatgtccatcatggccttgctgctgctgctgctcctgctgctattgtacaagtataagcagaagcccaagtaccaggtccgctggaagatcatcgagagctatgagggcaacagttatactttcatcgaccccacgcagctgccttacaacgagaagtgggagttcccccggaacaacctgcagtttggtaagaccctcggagctggagcctttgggaaggtggtggaggccacggcctttggtctgggcaaggaggatgctgtcctgaaggtggctgtgaagatgctgaagtccacggcccatgctgatgagaaggaggccctcatgtccgagctgaagatcatgagccacctgggccagcacgagaacatcgtcaaccttctgggagcctgtacccatggaggccctgtactggtcatcacggagtactgttgctatggcgacctgctcaactttctgcgaaggaaggctgaggccatgctgggacccagcctgagccccggccaggaccccgagggaggcgtcgactataagaacatccacctcgagaagaaatatgtccgcagggacagtggcttctccagccagggtgtggacacctatgtggagatgaggcctgtctccacttcttcaaatgactccttctctgagcaagacctggacaaggaggatggacggcccctggagctccgggacctgcttcacttctccagccaagtagcccagggcatggccttcctcgcttccaagaattgcatccaccgggacgtggcagcgcgtaacgtgctgttgaccaatggtcatgtggccaagattggggacttcgggctggctagggacatcatgaatgactccaactacattgtcaagggcaatgcccgcctgcctgtgaagtggatggccccagagagcatctttgactgtgtctacacggttcagagcgacgtctggtcctatggcatcctcctctgggagatcttctcacttgggctgaatccctaccctggcatcctggtgaacagcaagttctataaactggtgaaggatggataccaaatggcccagcctgcatttgccccaaagaatatatacagcatcatgcaggcctgctgggccttggagcccacccacagacccaccttccagcagatctgctccttccttcaggagcaggcccaagaggacaggagagagcgggactataccaatctgccgagcagcagcagaagcggtggcagcggcagcagcagcagtgagctggaggaggagagctctagtgagcacctgacctgctgcgagcaaggggatatcgcccagcccttgctgcagcccaacaactatcagttctgctgaggagttgacgacagggagtaccactctcccctcctccaaacttcaactcctccatggatggggcgacacggggagaacatacaaactctgccttcggtcatttcactcaacagctcggcccagctctgaaacttgggaaggtgagggattcaggggaggtcagaggatcccacttcctgagcatgggccatcactgccagtcaggggctgggggctgagccctcaccccccgcctcccctactgttctcatggtgttggcctcgtgtttgctatgccaactagtagaaccttctttcctaatccccttatcttcatggaaatggactgactttatgcctatgaagtccccaggagctacactgatactgagaaaaccaggctctttggggctagacagactggcagagagtgagatctccctctctgagaggagcagcagatgctcacagaccacactcagctcaggccccttggagcaggatggctcctctaagaatctcacaggacctcttagtctctgccctatacgccgccttcactccacagcctcacccctcccacccccatactggtactgctgtaatgagccaagtggcagctaaaagttgggggtgttctgcccagtcccgtcattctgggctagaaggcaggggaccttggcattggctggccacaccaagcaggaagcacaaactcccccaagctgactcatcctaactaacagtcacgccgtgggatgtctctgtccacattaaactaacagcattaatgc

SEQ ID NO: 32112 - DNA, 1962 bp, Homo Sapiens
gtctttggtgaagggtctgctgtgcaccatcccccatcctacgtggcccacctggcctcagacttcggggtgagggtgtttcagcaggtggcgcaggcctccaaggaccgcaacgtggttttctcaccctatggggtggcctcggtgttggccatgctccagctgacaacaggaggagaaacccagcagcagattcaagcagctatgggattcaagattgatgacaagggcatggcccccgccctccggcatctgtacaaggagctcatggggccatggaacaaggatgagatcagcaccacagacgcgatcttcgtccagcgggatctgaagctggtccagggcttcatgccccacttcttcaggctgttccggagcacggtcaagcaagtggacttttcagaggtggagagagccagattcatcatcaatgactgggtgaagacacacacaaaaggtatgatcagcaacttgcttgggaaaggagccgtggaccagctgacacggctggtgctggtgaatgccctctacttcaacggccagtggaagactcccttccccgactccagcacccaccgccgcctcttccacaaatcagacggcagcactgtctctgtgcccatgatggctcagaccaacaagttcaactatactgagttcaccacgcccgatggccattactacgacatcctggaactgccctaccacggggacaccctcagcatgttcattgctgccccttatgaaaaagaggtgcctctctctgccctcaccaacattctgagtgcccagctcatcagccactggaaaggcaacatgaccaggctgccccgcctcctggttctgcccaagttctccctggagactgaagtcgacctcaggaagcccctagagaacctgggaatgaccgacatgttcagacagtttcaggctgacttcacgagtctttcagaccaagagcctctccacgtcgcgcaggcgctgcagaaagtgaagatcgaggtgaacgagagtggcacggtggcctcctcatccacagctgtcatagtctcagcccgcatggcccccgaggagatcatcatggacagacccttcctctttgtggtccggcacaaccccacaggaacagtccttttcatgggccaagtgatggaaccctgaccctggggaaagacgccttcatctgggacaaaactggagatgcatcgggaaagaagaaactccgaagaaaagaattttagtgttaatgactctttctgaaggaagagaagacatttgccttttgttaaaagatggtaaaccagatctgtctccaagaccttggcctctccttggaggacctttaggtcaaactccctagtctccacctgagaccctgggagagaagtttgaagcacaactcccttaaggtctccaaaccagacggtgacgcctgcgggaccatctggggcacctgcttccacccgtctctctgcccactcgggtctgcagacctggttcccactgaggccctttgcaggacggaactacggggcttacaggagcttttgtgtgcctggtagaaactatttctgttccagtcacattgccatcactcttgtactgcctgccaccgcggaggaggctggtgacaggccaaaggccagtggaagaaacaccctttcatctcagagtccactgtggcactggccacccctccccagtacaggggtgctgcaggtggcagagtgaatgtcccccatcatgtggcccaactctcctggcctggccatctccctccccagaaacagtgtgcatgggttattttggagtgtaggtgacttgtttactcattgaagcagatttctgcttccttttatttttataggaatagaggaagaaaggtcagatgcgtgcccagctcttcaccccccaatctcttggtggggaggggtgtacctaaatatttatcatatccttgcc

SEQ ID NO: 32113 - DNA, 1816 bp, Homo Sapiens
cggacctccacactgagccatgcccacccccgacgccaccacgccacaggccaagggcttccgcagggccgtgtctgagctggacgccaagcaggcagaggccatcatgtccccgcggttcattgggcgcaggcagagcctcatcgaggacgcccgcaaggagcgggaggcggcggtggcagcagcggccgctgcagtcccctcggagcccggggaccccctggaggctgtggcctttgaggagaaggaggggaaggccgtgctaaacctgctcttctccccgagggccaccaagccctcggcgctgtcccgagctgtgaaggtgtttgagacgtttgaagccaaaatccaccatctagagacccggcccgcccagaggccgcgagctgggggcccccacctggagtacttcgtgcgcctcgaggtgcgccgaggggacctggccgccctgctcagtggtgtgcgccaggtgtcagaggacgtgcgcagccccgcggggcccaaggtcccctggttcccaagaaaagtgtcagagctggacaagtgtcatcacctggtcaccaagttcgaccctgacctggacttggaccacccgggcttctcggaccaggtgtaccgccagcgcaggaagctgattgctgagatcgccttccagtacaggcacggcgacccgattccccgtgtggagtacaccgccgaggagattgccacctggaaggaggtctacaccacgctgaagggcctctacgccacgcacgcctgcggggagcacctggaggcctttgctttgctggagcgcttcagcggctaccgggaagacaatatcccccagctggaggacgtctcccgcttcctgaaggagcgcacgggcttccagctgcggcctgtggccggcctgctgtccgcccgggacttcctggccagcctggccttccgcgtgttccagtgcacccagtatatccgccacgcgtcctcgcccatgcactcccctgagccggactgctgccacgagctgctggggcacgtgcccatgctggccgaccgcaccttcgcgcagttctcgcaggacattggcctggcgtccctgggggcctcggatgaggaaattgagaagctgtccacgctgtcatggttcacggtggagttcgggctgtgtaagcagaacggggaggtgaaggcctatggtgccgggctgctgtcctcctacggggagctcctgcactgcctgtctgaggagcctgagattcgggccttcgaccctgaggctgcggccgtgcagccctaccaagaccagacgtaccagtcagtctacttcgtgtctgagagcttcagtgacgccaaggacaagctcaggagctatgcctcacgcatccagcgccccttctccgtgaagttcgacccgtacacgctggccatcgacgtgctggacagcccccaggccgtgcggcgctccctggagggtgtccaggatgagctggacacccttgcccatgcgctgagtgccattggctaggtgcacggcgtccctgagggcccttcccaacctcccctggtcctgcactgtcccggagctcaggccctggtgaggggctgggtcccgggtgccccccatgccctccctgctgccaggctcccactgcccctgcacctgcttctcagcgcaacagctgtgtgtgcccgtggtgaggttgtgctgcctgtggtgaggtcctgtcctggctcccagggtcctgggggctgctgcactgccctccgcccttccctgacactgtctgctgccccaatcaccgtcacaataaaagaaactgtggtctct

SEQ ID NO: 32114 - DNA, 5420 bp, Homo Sapiens
ccaagttgaaaacccaaaccaatgcatctgactttcccattgggacatctttaaagtacgaatgccgtcctgagtactacgggaggccattctctatcacatgtctagataacctggtctggtcaagtcccaaagatgtctgtaaacgtaaatcatgtaaaactcctccagatccagtgaatggcatggtgcatgtgatcacagacatccaggttggatccagaatcaactattcttgtactacagggcaccgactcattggtcactcatctgctgaatgtatcctctcgggcaatgctgcccattggagcacgaagccgccaatttgtcaacgaattccttgtgggctaccccccaccatcgccaatggagatttcattagcaccaacagagagaattttcactatggatcagtggtgacctaccgctgcaatcctggaagcggagggagaaaggtgtttgagcttgtgggtgagccctccatatactgcaccagcaatgacgatcaagtgggcatctggagcggcccggcccctcagtgcattatacctaacaaatgcacgcctccaaatgtggaaaatggaatattggtatctgacaacagaagcttattttccttaaatgaagttgtggagtttaggtgtcagcctggctttgtcatgaaaggaccccgccgtgtgaagtgccaggccctgaacaaatgggagccggagctaccaagctgctccagggtatgtcagccacctccagatgtcctgcatgctgagcgtacccaaagggacaaggacaacttttcacccgggcaggaagtgttctacagctgtgagcccggctatgacctcagaggggctgcgtctatgcgctgcacaccccagggagactggagccctgcagcccccacatgtgaagtgaaatcctgtgatgacttcatgggccaacttcttaatggccgtgtgctatttccagtaaatctccagcttggagcaaaagtggattttgtttgtgatgaaggatttcaattaaaaggcagctctgctagttattgtgtcttggctggaatggaaagcctttggaatagcagtgttccagtgtgtgaacaaatcttttgtccaagtcctccagttattcctaatgggagacacacaggaaaacctctggaagtctttccctttggaaaagcagtaaattacacatgcgacccccacccagacagagggacgagcttcgacctcattggagagagcaccatccgctgcacaagtgaccctcaagggaatggggtttggagcagccctgcccctcgctgtggaattctgggtcactgtcaagccccagatcattttctgtttgccaagttgaaaacccaaaccaatgcatctgactttcccattgggacatctttaaagtacgaatgccgtcctgagtactacgggaggccattctctatcacatgtctagataacctggtctggtcaagtcccaaagatgtctgtaaacgtaaatcatgtaaaactcctccagatccagtgaatggcatggtgcatgtgatcacagacatccaggttggatccagaatcaactattcttgtactacagggcaccgactcattggtcactcatctgctgaatgtatcctctcaggcaatactgcccattggagcacgaagccgccaatttgtcaacgaattccttgtgggctacccccaaccatcgccaatggagatttcattagcaccaacagagagaattttcactatggatcagtggtgacctaccgctgcaatcttggaagcagagggagaaaggtgtttgagcttgtgggtgagccctccatatactgcaccagcaatgacgatcaagtgggcatctggagcggccccgcccctcagtgcattatacctaacaaatgcacgcctccaaatgtggaaaatggaatattggtatctgacaacagaagcttattttccttaaatgaagttgtggagtttaggtgtcagcctggctttgtcatgaaaggaccccgccgtgtgaagtgccaggccctgaacaaatgggagccagagttaccaagctgctccagggtgtgtcagccgcctccagaaatcctgcatggtgagcataccccaagccatcaggacaacttttcacctgggcaggaagtgttctacagctgtgagcctggctatgacctcagaggggctgcgtctctgcactgcacaccccagggagactggagccctgaagccccgagatgtgcagtgaaatcctgtgatgacttcttgggtcaactccctcatggccgtgtgctatttccacttaatctccagcttggggcaaaggtgtcctttgtctgtgatgaagggtttcgcttaaagggcagttccgttagtcattgtgtcttggttggaatgagaagcctttggaataacagtgttcctgtgtgtgaacatatcttttgtccaaatcctccagctatccttaatgggagacacacaggaactccctctggagatattccctatggaaaagaaatatcttacacatgtgacccccacccagacagagggatgaccttcaacctcattggggagagcaccatccgctgcacaagtgaccctcatgggaatggggtttggagcagccctgcccctcgctgtgaactttctgttcgtgctggtcactgtaaaaccccagagcagtttccatttgccagtcctacgatcccaattaatgactttgagtttccagtcgggacatctttgaattatgaatgccgtcctgggtattttgggaaaatgttctctatctcctgcctagaaaacttggtctggtcaagtgttgaagacaactgtagacgaaaatcatgtggacctccaccagaacccttcaatggaatggtgcatataaacacagatacacagtttggatcaacagttaattattcttgtaatgaagggtttcgactcattggttccccatctactacttgtctcgtctcaggcaataatgtcacatgggataagaaggcacctatttgtgagatcatatcttgtgagccacctccaaccatatccaatggagacttctacagcaacaatagaacatcttttcacaatggaacggtggtaacttaccagtgccacactggaccagatggagaacagctgtttgagcttgtgggagaacggtcaatatattgcaccagcaaagatgatcaagttggtgtttggagcagccctccccctcggtgtatttctactaataaatgcacagctccagaagttgaaaatgcaattagagtaccaggaaacaggagtttcttttccctcactgagatcatcagatttagatgtcagcccgggtttgtcatggtagggtcccacactgtgcagtgccagaccaatggcagatgggggcccaagctgccacactgctccagggtgtgtcagccgcctccagaaatcctgcatggtgagcataccctaagccatcaggacaacttttcacctgggcaggaagtgttctacagctgtgagcccagctatgacctcagaggggctgcgtctctgcactgcacgccccagggagactggagccctgaagcccctagatgtacagtgaaatcctgtgatgacttcctgggccaactccctcatggccgtgtgctacttccacttaatctccagcttggggcaaaggtgtcctttgtttgcgatgaagggttccgattaaaaggcaggtctgctagtcattgtgtcttggctggaatgaaagccctttggaatagcagtgttccagtgtgtgaacaaatcttttgtccaaatcctccagctatccttaatgggagacacacaggaactccctttggagatattccctatggaaaagaaatatcttacgcatgcgacacccacccagacagagggatgaccttcaacctcattggggagagctccatccgctgcacaagtgaccctcaagggaatggggtttggagcagccctgcccctcgctgtgaactttctgttcctgctgcctgcccacatccacccaagatccaaaacgggcattacattggaggacacgtatctctatatcttcctgggatgacaatcagctacacttgtgaccccggctacctgttagtgggaaagggcttcattttctgtacagaccagggaatctggagccaattggatcattattgcaaagaagtaaattgtagcttcccactgtttatgaatggaatctcgaaggagttagaaatgaaaaaagtatatcactatggagattatgtgactttgaagtgtgaagatgggtatactctggaaggcagtccctggagccagtgccaggcggatgacagatgggaccctcctctggccaaatgtacctctcgtgcacatgatgctctcatagttggcactttatctggtacgatcttctttattttactcatcattttcctctcttggataattctaaagcacagaaaaggcaataatgcacatgaaaaccctaaagaagtggctatccatttacattctcaaggaggcagcagcgttcatccccgaactctgcaaacaaatgaagaaaatagcagggtccttccttgacaaagtactatacagctgaagaacatctcgaatacaattttggtgggaaaggagccaattgatttcaacagaatcagatctgagcttcataaagtctttgaagtgacttcacagagacgcagacatgtgcacttgaagatgctgccccttccctggtacctagcaaagctcctgcctctttgtgtgcgtcactgtgaaacccccacccttctgcctcgtgctaaacgcacacagtatctagtcaggggaaaagactgcatttaggagatagaaaatagtttggattacttaaaggaataaggtgttgcctggaatttctggtttgtaaggtggtcactgttcttttttaaaatatttgtaatatggaatgggctcagtaagaagagcttggaaaatgcagaaagttatgaaaaataagtcacttataattatgctacctactgataaccactcctaatattttgattcattttctgcctatcttctttcacatatgtgtttttttacatacgtacttttccccccttagtttgtttccttttattttatagagcagaaccctagtcttttaaacagtttagagtgaaatatatgctatatcagtttttactttctctagggagaaaaattaatttactagaaaggcatgaaatgatcatgggaagagtggttaagactactgaagagaaatatttggaaaataagatttcgatatcttctttttttttgagatggagtctggctctgtctcccaggctggagtgcagtggcgtaatctcggctcactgcaacgtccgcctcccg

SEQ ID NO: 32115 - DNA, 3416 bp, Homo Sapiens
gagtgtggctgcagtgcgccgggacaccagggctccgcgctccgcactcaagaggctcccgcgtcccaacccctcgcgcccgcgcgttcgcggatccaggccgaggaccgaaaggggccgcccgagcccccggggccggcgcccagagagcccagcaaggccggccgccctgccggtgtgccgccggcgggtgcttctggaagggccaatgcgttcgggcagcagccctgaagccgagcccgaggctaagtgggactgaccggggcccagagtggacgaaccgccagcatggggagagaccagcgcgcggtggccggccctgccctacggcggtggctgctgctggggacagtgaccgtggggttcctcgcccagagcgtcttggcgggtgtgaagaagtttgatgtgccgtgtggaggaagagattgcagtgggggctgccagtgctaccctgagaaaggtggacgtggtcagcctgggccagtgggcccccaggggtacaatgggccaccaggattacaaggattccccgggctgcagggacgtaaaggagacaagggtgaaaggggagcccccggagtaacaggacccaagggcgacgtgggagcaagaggcgtttctggattccctggtgccgatggaattcctggacacccggggcaaggtgggcccaggggaaggccgggctacgatggctgcaacggaacccagggagactcaggtccacaggggccccccggctctgaggggttcaccgggcctcccgggccccaaggaccaaaagggcagaaaggtgagccttatgcactgcctaaagaggagcgcgacagatatcggggtgaacctggagagcctggattggtcggtttccagggacctcccggccgccctgggcatgtgggacagatgggtccagttggagctccagggagaccaggaccacctggaccccctggaccaaaaggacagcaaggcaacagaggacttggtttctacggagttaagggtgaaaagggtgacgtagggcagccgggacccaacgggattccatcagacaccctccaccccatcatcgcgcccacaggagtcaccttccacccagatcagtacaagggtgaaaaaggcagtgagggggaaccaggaataagaggcatttccttgaagggagaagaaggaatcatgggctttcctggacttaggggttaccctggcttgagtggtgaaaaaggatcaccaggacagaagggaagccgaggcctggatggctatcaagggcctgatggaccccggggacctaagggagaagccggagacccagggccccctggactacctgcctactcccctcacccttccctagcaaaaggtgccagaggtgacccaggattcccaggggcccaaggggagccaggaagccagggtgagccaggagacccgggcctcccaggtccccctggcctctccattggagatggagatcagaggagaggcctgccgggtgagatgggacccaagggcttcatcggagaccccggcatccctgcgctctacgggggcccacctggacctgatggaaagcgagggcctccaggaccccccgggctccctggaccacctggacctgatggcttcctgtttgggctgaaaggagcaaaaggaagagcaggcttccctgggcttcccggctcccctggagcccccggaccaaaggggtggaaaggtgacgctggggaatgcagatgtacagaaggcgacgaagctatcaaaggtcttccaggactgccaggacccaagggcttcgcaggcatcaacggggagccggggaggaaaggggacaaaggagaccccggccaacacggcctccctgggttcccagggctcaagggagtgcctggcaacattggtgctcccggacccaaaggagcaaaaggagattccagaacaatcacaaccaaaggtgagcggggacagcccggcgtcccaggtgtgcccgggatgaaaggtgacgatggcagcccaggccgcgatgggctcgatggattccccggcctcccaggccctcccggtgatggcatcaagggccctccaggggacccaggttatccaggaatacctggaacgaagggtactccaggagaaatgggccccccaggactgggccttcccggcctcaaaggccaacgtggtttccctggagacgccggcttacctggaccaccaggcttcctgggccctcctggccccgcagggaccccaggacaaatagattgtgacacagatgtgaaaagggccgttggaggtgacagacaggaggccatccagccaggttgcataggagggcccaagggattgccaggcctgccaggacccccaggccccacaggtgccaaaggcctccgaggaatcccaggcttcgcaggagctgatggaggaccagggcccaggggcttgccaggagacgcaggtcgtgaagggttcccaggacccccagggttcataggaccccgaggatccaaaggtgcagtgggcctccctggcccagatggatccccaggtcccatcggcctgccagggccagatgggccccctggggaaaggggcctccctggagaagtcctgggagctcagcccgggccacggggagatgctggtgtgcctggacagcctgggcttaaaggccttcccggagacagaggcccccctggattcagaggaagccaagggatgcctgggatgccagggctgaagggccagccaggcctcccaggaccttccggccagccaggcctgtatgggcctccaggactgcatggattcccaggagctcctggccaagaggggcccttggggctgccaggaatcccaggccgtgaaggtctgcctggtgatagaggggaccctggggacacaggcgctcctggccctgtgggcatgaaaggtctctctggtgacagaggagatgctggcttcacaggggagcaaggccatccaggaagccctggatttaaaggaattgatggaatgcctgggacccccgggctaaaaggagatagaggctcacctgggatggatggtttccaaggcatgcctggactcaaagggagacccgggtttccagggagcaaaggcgaggctggatttttcggaatacccggtctgaagggtctggctggtgagccaggttttaaaggcagccgaggggaccctgggcccccaggaccacctcctgtcatcctgccaggaatgaaagacattaaaggagagaaaggagatgaagggcctatggggctgaaaggatacctgggcgcaaaaggtatccaaggaatgccaggcatcccagggctgtcaggaatccctgggctgcctgggaggcccggccacatcaaaggagtcaagggagacatcggagtccctgg

SEQ ID NO: 32116 - DNA, 1724 bp, Homo Sapiens
ctttttggagacagattcgcagtggtcgcttcttctccttggatttgttaaggattccaagtaactcttatttggagagaagacgatctgcacttcgcattttggcattgacatttaattttagggtcctttatatagaagggagagtagctacatgaatgtgtaagatcttggaggaagacagcagagagagagagagagatcagagatcccagggttaaaagttggagaaatttcacagtacatcatccaaaagaggagtccatgatggaggcagaggtaaacttggagaggacaggaagatgtcacccaagcgcatagctaaaagaaggtcccccccagcagatgccatccccaaaagcaagaaggtgaaggtctcacacaggtcccacagcacagaacccggcttggtgctgacactaggccagggcgacgtgggccagctggggctgggtgagaatgtgatggagaggaagaagccggccctggtatccattccggaggatgttgtgcaggctgaggctgggggcatgcacaccgtgtgtctaagcaaaagtggccaggtctattccttcggctgcaatgatgagggtgccctgggaagggacacatcagtggagggctcggagatggtccctgggaaagtggagctgcaagagaaggtggtacaggtgtcagcaggagacagtcacacagcagccctcaccgatgatggccgtgtcttcctctggggctccttccgggacaataacggtgtgattggactgttggagcccatgaagaagagcatggtgcctgtgcaggtgcagctggatgtgcctgtggtaaaggtggcctcaggaaacgaccacttggtgatgctgacagctgatggtgacctctacaccttgggctgcggggaacagggccagctaggccgtgtgcctgagttatttgccaaccgtggtggccggcaaggcctcgaacgactcctggtccccaagtgtgtgatgctgaaatccaggggaagccggggccacgtgagattccaggatgccttttgtggtgcctatttcacctttgccatctcccatgagggccacgtgtacggcttcggcctctccaactaccatcagcttggaactccgggcacagaatcttgcttcataccccagaacctaacatccttcaagaattccaccaagtcctgggtgggcttctctggtggccagcaccatacagtctgcatggattcggaaggaaaagcatacagcctgggccgggctgagtatgggcggctgggccttggagagggtgctgaggagaagagcatacccaccctcatctccaggctgcctgctgtctcctcggtggcttgtggggcctctgtggggtatgctgtgaccaaggatggtcgtgttttcgcctggggcatgggcaccaactaccagctgggcacagggcaggatgaggacgcctggagccctgtggagatgatgggcaaacagctggagaaccgtgtggtcttatctgtgtccagcgggggccagcatacagtcttattagtcaaggacaaagaacagagctgatgaagcctctgagggcctggcttctgtcctgcacaacctccctcacagaacagggaagcagtgacagctgcagatggcagcgggcctctccccagccctgagcactgtgtcagttcctgccttttctcatcagcagaacagaatccttttcctctt

SEQ ID NO: 32117 - DNA, 3181 bp, Homo Sapiens
gcaagtcagaaagtcagatggatataactgatatcaacactccaaagccaaagaagaaacagcgatggactccactggagatcagcctctcggtccttgtcctgctcctcaccatcatagctgtgacaatgatcgcactctatgcaacctacgatgatggtatttgcaagtcatcagactgcataaaatcagctgctcgactgatccaaaacatggatgccaccactgagccttgtacagactttttcaaatatgcttgcggaggctggttgaaacgtaatgtcattcccgagaccagctcccgttacggcaactttgacattttaagagatgaactagaagtcgttttgaaagatgtccttcaagaacccaaaactgaagatatagtagcagtgcagaaagcaaaagcattgtacaggtcttgtataaatgaatctgctattgatagcagaggtggagaacctctactcaaactgttaccagacatatatgggtggccagtagcaacagaaaactgggagcaaaaatatggtgcttcttggacagctgaaaaagctattgcacaactgaattctaaatatgggaaaaaagtccttattaatttgtttgttggcactgatgataagaattctgtgaatcatgtaattcatattgaccaacctcgacttggcctcccttctagagattactatgaatgcactggaatctataaagaggcttgtacagcatatgtggattttatgatttctgtggccagattgattcgtcaggaagaaagattgcccatcgatgaaaaccagcttgctttggaaatgaataaagttatggaattggaaaaagaaattgccaatgctacggctaaacctgaagatcgaaatgatccaatgcttctgtataacaagatgacattggcccagatccaaaataacttttcactagagatcaatgggaagccattcagctggttgaatttcacaaatgaaatcatgtcaactgtgaatattagtattacaaatgaggaagatgtggttgtttatgctccagaatatttaaccaaacttaagcccattcttaccaaatattctgccagagatcttcaaaatttaatgtcctggagattcataatggatcttgtaagcagcctcagccgaacctacaaggagtccagaaatgctttccgcaaggccctttatggtacaacctcagaaacagcaacttggagacgttgtgcaaactatgtcaatgggaatatggaaaatgctgtggggaggctttatgtggaagcagcatttgctggagagagtaaacatgtggtcgaggatttgattgcacagatccgagaagtttttattcagactttagatgacctcacttggatggatgccgagacaaaaaagagagctgaagaaaaggccttagcaattaaagaaaggatcggctatcctgatgacattgtttcaaatgataacaaactgaataatgagtacctcgagttgaactacaaagaagatgaatacttcgagaacataattcaaaatttgaaattcagccaaagtaaacaactgaagaagctccgagaaaaggtggacaaagatgagtggataagtggagcagctgtagtcaatgcattttactcttcaggaagaaatcagatagtcttcccagccggcattctgcagccccccttctttagtgcccagcagtccaactcattgaactatgggggcatcggcatggtcataggacacgaaatcacccatggcttcgatgacaatggcagaaactttaacaaagatggagacctcgttgactggtggactcaacagtctgcaagtaactttaaggagcaatcccagtgcatggtgtatcagtatggaaacttttcctgggacctggcaggtggacagcaccttaatggaattaatacactgggagaaaacattgctgataatggaggtcttggtcaagcatacagagcctatcagaattatattaaaaagaatggcgaagaaaaattacttcctggacttgacctaaatcacaaacaactatttttcttgaactttgcacaggtgtggtgtggaacctataggccagagtatgcggttaactccattaaaacagatgtgcacagtccaggcaatttcaggattattgggactttgcagaactctgcagagttttcagaagcctttcactgccgcaagaattcatacatgaatccagaaaagaagtgccgggtttggtgatcttcaaaagaagcattgcagcccttggctagacttgccaacaccacagaaatggggaattctctaatcgaaagaaaatgggccctaggggtcactgtactgacttgagggtgattaacagagagggcaccatcacaatacagataacattaggttgtcctagaaagggtgtggagggaggaagggggtctaaggtctatcaagtcaatcatttctcactgtgtacataatgcttaatttctaaagataatattactgtttatttctgtttctcatatggtctaccagtttgctgatgtccctagaaaacaatgcaaaacctttgaggtagaccaggatttctaatcaaaagggaaaagaagatgttgaagaatacagttaggcaccagaagaacagtaggtgacactatagtttaaaacacattgcctaactactagtttttacttttatttgcaacatttacagtccttcaaaatccttccaaagaattcttatacacattggggccttggagcttacatagttttaaactcatttttgccatacatcagttattcattctgtgatcatttattttaagcactcttaaagcaaaaaatgaatgtctaaaattgttttttgttgtacctgctttgactgatgctgagattcttcaggcttcctgcaattttctaagcaatttcttgctctatctctcaaaacttggtatttttcagagatttatataaatgtaaaaataataatttttatatttaattattaactacatttatgagtaactattattataggtaatcaatgaatattgaagtttcagcttaaaataaacagttgtgaaccaagatctataaagcgatatacagatgaaaatttgagactatttaaacttataaatcatattgatgaaaagatttaagcacaaactttaggg

SEQ ID NO: 32118 - DNA, 1597 bp, Homo Sapiens
aacaaactgcacccactgaactccgcagctagcatccaaatcagcccttgagatttgaggccttggagactcaggagttttgagagcaaaatgacaacacccagaaattcagtaaatgggactttcctggcagagccaatgaaaggccctattgctatgcaatctggtccaaaaccactcttcaggaggatgtcttcactggtgggccccacgcaaagcttcttcatgagggaatctaagactttgggggctgtccagattatgaatgggctcttccacattgccctggggggtcttctgatgatcccagcagggatctatgcacccatctgtgtgactgtgtggtaccctctctggggaggcattatgtatattatttccggatcactcctggcagcaacggagaaaaactccaggaagtgtttggtcaaaggaaaaatgataatgaattcattgagcctctttgctgccatttctggaatgattctttcaatcatggacatacttaatattaaaatttcccattttttaaaaatggagagtctgaattttattagagctcacacaccatatattaacatatacaactgtgaaccagctaatccctctgagaaaaactccccatctacccaatactgttacagcatacaatctctgttcttgggcattttgtcagtgatgctgatctttgccttcttccaggaacttgtaatagctggcatcgttgagaatgaatggaaaagaacgtgctccagacccaaatctaacatagttctcctgtcagcagaagaaaaaaaagaacagactattgaaataaaagaagaagtggttgggctaactgaaacatcttcccaaccaaagaatgaagaagacattgaaattattccaatccaagaagaggaagaagaagaaacagagacgaactttccagaacctccccaagatcaggaatcctcaccaatagaaaatgacagctctccttaagtgatttcttctgttttctgtttccttttttaaacattagtgttcatagcttccaagagacatgctgactttcatttcttgaggtactctgcacatacgcaccacatctctatctggcctttgcatggagtgaccatagctccttctctcttacattgaatgtagagaatgtagccattgtagcagcttgtgttgtcacgcttcttcttttgagcaactttcttacactgaagaaaggcagaatgagtgcttcagaatgtgatttcctactaacctgttccttggataggctttttagtatagtatttttttttgtcattttctccatcagcaaccagggagactgcacctgatggaaaagatatatgactgcttcatgacattcctaaactatcttttttttattccacatctacgtttttggtggagtcccttttgcatcattgttttaaggatgataaaaaaaaaataacaactagggacaatacagaacccattccatttatctttctacagggctgacattgtggcacattcttagagttaccacaccccatgagggaagctctaaatagccaacacccatctgttttttgtaaaaacagcatagctt

SEQ ID NO: 32119 - DNA, 3185 bp, Homo Sapiens
atcaaacagaaatgactattgaaggcttgcagcccacagtggagtatgtggttagtgtctatgctcagaatccaagcggagagagtcagcctctggttcagactgcagtaaccagtacgtaaccactgcttggtttccattttcaaagtcaaattttgttcttgggtgtctgaatgcccacgacatgtcttttgcaattacacatagggaaagtgaacttgttggttagtttatgtcttgagctgagccctttacgaacatcttttttccttctcagtgccaagcgaggaatttacagagaaagaagttgtgaaaccaccatagttagttgctgtgctttgaatttctttttgctcaaatggcctcagcgaaatcttatttgcctatagcaaatctacaaaaaattttcctagaccgtcttttctacaactggatggtaaagttgattgaagtgtgcctcatgtagctttatgtttggggcatttgaagggctatggctggaccagagtgtaatataaatgcttaatagagaggggaaaagaagagtgtaagaaccattatagggctgggctcacgcctgtaatcccagcattttgggaggctgaggcggatcacgaggtcaggagttcgagaccagcctgaccaacatggtgaaaccccatctctactaaaaatacaaaaattagccagtcgcggtggcacgtgcctgtaatcccagctactcacggaggctgaggcagaagaatcacttggacccaggaggcagaagttgcagtgagccaagatcatgcctctgcaccccagcctaggtgatagagtgagactccatctcaaaaaaaaacaaaacaaaacaattataacaatttgaatctgaaccatatgcaaatcagctttaccacttccaaggtataagaaaatccaggtctatgagactaacatcacattgtaaaaatcaaatcgtggtagaatacctttaaattaatataaatacatccccattgtggggacattttgcagggtatctgcttatctcacatacaccatgttttaataagtgatgcaacattgcatattttctaaaccaagaaaaattaagcaagtgtttaagtgatttttcctttgatagtgggttaattggacttcatcaaagaaaatggtatctgcaaaactgctttgcatgttataaaaatgcttatttcacaacttgctttcacataacctcttaccattaatttgcctaacagacattgatcgccctaaaggactggcattcactgatgtggatgtcgattccatcaaaattgcttgggaaagcccacaggggcaagtttccaggtacagggtgacctactcgagccctgaggatggaatccatgagctattccctgcacctgatggtgaagaagacactgcagagctgcaaggcctcagaccgggttctgagtacacagtcagtgtggttgccttgcacgatgatatggagagccagcccctgattggaacccagtccacaggtatatggttaattgcacacaggtgccatgggagcagcggctttatgcctactgaatgaattatgcttcactgggctattgattcccgtgtaagggtgaaaaagaattattaggaaagatcctctttaaagaggaatggtaagaaacaataaaacttaggtgatatttaaggaaacaagtctgattaaaagaaattttggagtatcctggcttatacacaagaccataaagcaagacatttgaagaggatactaaagttgtggattatttcctaagctctgactccctgtgattaccctcactatgtataaagaaaagaagtttggcattacagagcttacttataaaaaggaacccaaactcgggcatttcatagcagcatgattctgagcacacgtgggtaagacctttcttctctggttagatatcatatgctggtgtataattagcttaaatgattgtgatttagacacctaggaaataatcaatagggcaattgctttccataatactttatcttcttgtgctttatttctgaagcagagtagaatgctaaagatgtatcctagtgacagcataaaccctagaggtgacagtctgtattattgcttttcgcttctcttttctgcttctgttgggagccagttttcttcttacgccgcattacagagagaacgtcaaatttagcaagccatatctgccataggtccaaataaagagacaataaaaattattctctcttttttggatggaatactgcgtgaaatggttatccatacaaagatactttatgtagaatagaaaaaggaggccgggtgcagtggctcacacatgtaatcctagtgctttgggaggctaagccgggagcactgattgaggccaggagttcatgatcagcctgggcaatgaagtgagaccccgtctctacaaaaaaatatgaaaaaattagcgaggtgtggtgacacatgcctgtagtcccagctactcaagaggctgaggtagaggatcacttgagcctacgagttcaaggctgcagtgagctatgataactccactgcactgctgcctggatgacacagagagaccgtttctaaattaattaattaacaattttaagaaagaaaaagggccattgcttatttttccatacaaaagtaaaataaatcataatggccaataagccaatgtaacttttttttttaagggaaagcaaaacttgtaaaacctaaaatctcttagagttttggcatttacccaaatgttttcagtgattctgagaattggtggatataaaacacatttctcagcaaacactttcttcattttgcatcccttactgtactttcttgtactgaatctttgcttgaccagggaacccacctagcccaacaagaacaatccattctacttcttggaactacgtttattttccttttcccccatttcctataagataacctctaaccaatgacaatctcgacagctattcctgcaccaactgacctgaagttcactcaggtcacacccacaagcctgagcgcccagtggacaccacccaatgttcagctcactggatatcgagtgcgggtgacccccaaggagaagaccggaccaatgaaagaagtcaaccttgctcctgacagctcatccgtggttgtatcaggacttatc

SEQ ID NO: 32120 - DNA, 2301 bp, Homo Sapiens
agcagagcggacgggcgcgcgggaggcgcgcagagctttcgggctgcaggcgctcgctgccgctggggaattgggctgtgggcgaggcggtccgggctggcctttatcgctcgctgggcccatcgtttgaaactttatcagcgagtcgccactcgtcgcaggaccgagcggggggcgggggcgcggcgaggcggcggccgtgacgaggcgctcccggagctgagcgcttctgctctgggcacgcatggcgcccgcacacggagtctgacctgatgcagacgcaagggggttaatatgaacgcccctctcggtggaatctggctctggctccctctgctcttgacctggctcacccccgaggtcaactcttcatggtggtacatgagagctacaggtggctcctccagggtgatgtgcgataatgtgccaggcctggtgagcagccagcggcagctgtgtcaccgacatccagatgtgatgcgtgccattagccagggcgtggccgagtggacagcagaatgccagcaccagttccgccagcaccgctggaattgcaacaccctggacagggatcacagcctttttggcagggtcctactccgaagtagtcgggaatctgcctttgtttatgccatctcctcagctggagttgtatttgccatcaccagggcctgtagccaaggagaagtaaaatcctgttcctgtgatccaaagaagatgggaagcgccaaggacagcaaaggcatttttgattggggtggctgcagtgataacattgactatgggatcaaatttgcccgcgcatttgtggatgcaaaggaaaggaaaggaaaggatgccagagccctgatgaatcttcacaacaacagagctggcaggaaggctgtaaagcggttcttgaaacaagagtgcaagtgccacggggtgagcggctcatgtactctcaggacatgctggctggccatggccgacttcaggaaaacgggcgattatctctggaggaagtacaatggggccatccaggtggtcatgaaccaggatggcacaggtttcactgtggctaacgagaggtttaagaagccaacgaaaaatgacctcgtgtattttgagaattctccagactactgtatcagggaccgagaggcaggctccctgggtacagcaggccgtgtgtgcaacctgacttcccggggcatggacagctgtgaagtcatgtgctgtgggagaggctacgacacctcccatgtcacccggatgaccaagtgtgggtgtaagttccactggtgctgcgccgtgcgctgtcaggactgcctggaagctctggatgtgcacacatgcaaggcccccaagaacgctgactggacaaccgctacatgaccccagcaggcgtcaccatccaccttcccttctacaaggactccattggatctgcaagaacactggacctttgggttctttctggggggatatttcctaaggcatgtggcctttatctcaacggaagccccctcttcctccctgggggccccaggatggggggccacacgctgcacctaaagcctaccctattctatccatctcctggtgttctgcagtcatctcccctcctggcgagttctctttggaaatagcatgacaggctgttcagccgggagggtggtgggcccagaccactgtctccacccaccttgacgtttcttctttctagagcagttggccaagcagaaaaaaaagtgtctcaaaggagctttctcaatgtcttcccacaaatggtcccaattaagaaattccatacttctctcagatggaacagtaaagaaagcagaatcaactgcccctgacttaactttaacttttgaaaagaccaagacttttgtctgtacaagtggttttacagctaccacccttagggtaattggtaattacctggagaagaatggctttcaatacccttttaagtttaaaatgtgtatttttcaaggcatttattgccatattaaaatctgatgtaacaaggtggggacgtgtgtcctttggtactatggtgtgttgtatctttgtaagagcaaaagcctcagaaagggattgctttgcattactgtccccttgatataaaaaatctttagggaatgagagttccttctcacttagaatctgaagggaattaaaaagaagatgaatggtctggcaatattctgtaactattgggtgaatatggtggaaaataatttagtggatggaatatcagaagtatatctgtacagatcaagaaaaaaaggaagaataaaattcctatatcat

SEQ ID NO: 32121 - DNA, 685 bp, Homo Sapiens
agcaagctgtcctgtgagccgccagcatggatgacatctacaaggctgcggtagagcagctgacagaagagcagaaaaatgagttcaaggcagccttcgacatcttcgtgctgggcgctgaggatggctgcatcagcaccaaggagctgggcaaggtgatgaggatgctgggccagaaccccacccctgaggagctgcaggagatgatcgatgaggtggacgaggacggcagcggcacggtggactttgatgagttcctggtcatgatggttcggtgcatgaaggacgacagcaaagggaaatctgaggaggagctgtctgacctcttccgcatgtttgacaaaaatgctgatggctacatcgacctggatgagctgaagataatgctgcaggctacaggcgagaccatcacggaggacgacatcgaggagctcatgaaggacggagacaagaacaacgacggccgcatcgactatgatgagttcctggagttcatgaagggtgtggagtagatgctgaccttcacccagagctgcctatgcccagcctccaactccagctgagtcctggggttggggagggggtcggggtcccaggacctgagcctggccatgtcctcaaccccaaatcccccgactccctccccagatctgtcctgggggatgcaaataaagcctgctctccc

SEQ ID NO: 32122 - DNA, 7530 bp, Homo Sapiens
cacgcctgtagttcagctactcagaaggctaggcagaactacttgaacccagagtggaggttgcagtgagccaagatcgcaccattgcactccaccctgggcaacagagtgagaccctgtctcaaaaaaaaaaaaaaattaaaaataggtaaattccattttcaaagatacctgtaaagatttttaaaatcattcatgaatgcggtctgttcgttgcacagagtagatgctcaaaaatggtgaatgagaccctctattttggtctcatgctgaagaagtccataaagcccacaagtcattttcatgatggacagaaaaatgtgtgtgctttctctgtctactgcctcaactgcacagaccccgggactgtagcagaaccatcttttgagcttgacaccgggaggcccaaattctagcacgggacctagggccagttgctctctggtcctcagtctcctcacccataaaatgggaaggagagaaccctgaatcattgcttctagcttctgaactcagttgttcagaacaaggactcactgctgatttttcaacagcacagggaattgcactgttcctggaatgatggacagtaccctctgttccactgggcaagtgagatttcccaggcctctctgttcccttctccccttagagagcaacagacgtgtggccccaccacctccctcaaccctctctctcctccctcaggactgggcacctcgctgcccccgctgctgcccactctgcgactgtgcctgtacgtgccagctccccgactgccgagacctcaactgtctctgcttcgagatcaagctccataggacccaggcccctgcctctggggagcggccagcccccaggcccatgtgccctcctccctgaagagcctttccccacgccactggaaccacagatggcctgccgagcacccaggcctgggaactggaatggcagcgcagggcctggctcctgcagggcaggactcttggccggctggacggcagctcctctggagggccagaaaagagagggctagtgctcggcagtgccctgcttcccttcccctccacacgtcaacgattctatttgaagttgggcagggggtggcgctgctcaccacacacaagtgttataggaggagtctggccccgtagtaccgggtacgcaggggtgcctcaaccacactccgtccacggactctccgttattttaggaggtagatgtagtgccagtatctactctccttcttaaaaaaaaccagggctccagagaatcagaacagccaccatcaccgcagggagtcaagggaggagggagattagagaaggagccagggagggtggcagggaggccacgtgatccgagtcccctcacccctttccttcccacaggtccctggccaaagatttatttctcttgacaaccaagggcctccgtctggatttccaaggaagaatttcctctgaagcaccggtgagtgggcaggggctctttgtccccaatcaatcagggccgacccaagtcttcctcccccttccccatgccgggccccacgatagtgtgaatgtcaggggcttcaggtttccctaaatataggtccctgccagaggatccgtggcgggaaaagggcaggggtcattagagaagatcggggacacatgtggggctgggcaggagctgccttataaccacccgggaacccctagctcactcgctgctgaccaggctctgccggctccttgccctcgccgcaggtgggccccttgcaggaccggccgggtgggatgggttggaattgggccaacaggtccagatgggtccaggtaggaggggagatttggacgataggagcagggggctcagcatctgggaggcagatcagttcggggacggattttcttttggagaaggaagtcaggctcaaggaagacgtttggcaggaactgtgaccccgcatgccagaggccgagcagcggccgtgcatagccgcgcattctggttttctgtggcgcagaggactaccagcctggctgcggcggcccggcggagaccgccaccatgcgcgacccagcccgcctgccagcctggaactcggatggggaggtctgcctccgcgcgccgctagtttccgaccgccttctcgctcccctgctgtcctctcgatgccctttcctccgcctcccttgacgcctgggccagtgacaggtgtcgtccgcgccgattcagcccgcgggcgaggcagctaacgcacgactgcgcgatgtggcccctatggtgacacgctgcagccgcgaagaccggaagctggggccccgggccgcgcgcgctgggcctgggaggcgaaactcagcttccttcgtttccgacttttccatccgcgtcctccacttccccgttccgccctcccccattgccaacattctggctgagatcagcgcccagagcgcgccaggctgggggaaaggagcagaagggagggccctagcgacccgcgggatgtggtccgagtcacgtccgagggggtggggagggatcgtgttctcgcgcccgccccttcctagcgcggcctctggctcgcctctcgggggcggcccgtagcccagtccgtcgcctgccattggacgccgcccgctcctcgtaaaggaaaaagctcggcggagggcggagtggtgcctttaaaaggccggcgccgccttccgcctgcaccgcctcctgcgccgccccttccgaggctaaatcgcttcctctcggaacgcgccgcagaaggggtcctggtgacgagtcccgcgttctctccttgaatccactcgccagcccgccgccctctgccgccgcaccctgcacacccgcccctctcctgtgccaggtgagcgcccctcttgcggggacccagggaccgtggagagggtcttgggggcagtggcgggttggcgtccgcgtggaggcctcccccattcgcgcccatgccagcgtctccccactaccaggcacacacaggctccccggcccctccagcctgaggtcctctaactgcgcaatgcagctgcgcgcgctgagtcatggcggggaggaagccggacgagatgaaggaccattctcccccttttcttgcagggacccctgtggcaaaggattagggccccttaccgctggcgtggatcctaagaggcagtgaggggtgggggccggcccatgtacagccccagggttctcgcaagtgggagcttggtttctgtcctgggaaacgggcgcccttcgcgaggagggaaacccctcgcgtgcttgatgcccccttaacactttccctgtctctccttatcgggcgaccattgattctgagcccggaacagctgcagccatgcgaagcgacgggagcatttttcaggggaaggcgcttgctcctccacgttcttgccccgtaggaacagtgacgatggcaaagcttaccgctttcctgcctgggctagggctagttccgccgccctttcctgggcttctccttgctctcttatatttttcctaatgcccctttcctaccacccgccccctccttgtggggaaaagcctgaccttgggatgtccttgaagccttggagcccgggccagccctgggatcttgaggggattggaaggaacacccagtggcagtcagaagagctgggttctaacctcagatctggctccggggttgctgtgtggcttgaagcacagacctttcccatatctgggccctttcccacgagggtgttgggccctctgcttgattcacgatctttacattctaaaatactccggttcggttttgttttcaggcaaggtgaccccatggcaaggcgcaagccagaagggtccagcttcaacatgacccacctgtccatgctatggccttttcctttcccccagttgccagtgggcaactccaccctcagctgggcaacacccagcaccagacagagttaggaaaggtaccggggcaggcctagcaaagggaagttgggcgtaagagagagctggggaccagaagtgccccagggcctgctgggtgtggggcaggggaggtagggaacatttccctgacctccaggagaggggccctggtcatcgggagatgatgggaaaccctagctaactagtccttcccctctgtttcctgtatccaggaacttgctactaccagcaccatgccctaccaatatccagcactgaccccggagcagaagaaggaactgtctgacatcgctcaccgcatcgtggcacctggcaagggcatcctggctgcagatgagtccactggtcgcgggcaggagacagaatgggtggagggtgcagggttgggagtggcaggctgatcccctaattcccatgtgacactcccagggagcattgccaagcggctgcagtccattggcaccgagaacaccgaggagaaccggcgcttctaccgccagctgctgctgacagctgacgaccgcgtgaaccccggcattgggggtgtcatcctcttccatgagacactctaccagaaggcggatgatgggcgtcccttcccccaagttatcaaatccaagggcggtgttgtgggcatcaaggtaaggggagggcctccggacgtgaggtttgagtaggaagtggaggaaggaaatccaggttagtgaggcagggaatgaatgctggattggtggcctagagacttgcatggagcctgcttcaggcttagggcatttactcgacattttttatcctcacaattctgagagaacagtatcattcccactttacacatgaaaatctcagaagctcagggaagtgaagtgttttgctcagagtaagtggcagagcccagtctgacacccaattcactcaacatttctgttgtcaataacatcccagtgtatcctgtctcagaggattgttactaagtgaactaagtgaaaatattttaatttaattgtaactaagtatttgagtaactaaacattttaagtaaatttttattttttttttttttgagatggagtctcgctgtctcccaggctggagtgcagtggtgcgatctcttggctcactgcaagttccgcctcccaggttcacgccattctcctgcctcagcctcccgagtagctgggactacaggcgcccgccaccacccggctaattttttttgtatttttagtagacactgggtttcaccatgttagccaggatggtctcgatctcctgatctcgtgatctgcccacctcggcctccctaagtgctgggattacaggcgtgcagccatgcccggcttaagtaactaaatattttaattgtaactaagtgaaaatatttgccagccctgaagatgcagtttaagggattaacgtaaaatagtgggggaagactggggctaaagaagaggaaagaggggcacgccagctacctaggaggctgaggcgggaggatcacttgagtccaggaaggggaggcttcaggtgagctgagattccaccactgtactccagccgaggcgaaagtggaaagggtgctagaggtcatttcctgtgtcttaatgttgttaccctgaccccaacaggtagacaagggcgtggtccccctggcagggacaaatggcgagactaccacccaaggtgagaactgtttgattctctgccctacgaacccaaccagagcaggtttgggtgctgggaggagtggaaaccacatgcccctcccaccctgctctgaccttcctcttctcttagggttggatgggctgtctgagcgctgtgcccagtacaagaaggacggagctgacttcgccaagtggcgttgtgtgctgaagattggggaacacaccccctcagccctcgccatcatggaaaatgccaatgttctggcccgttatgccagtatctgccagcaggtggcctgcaggtcctcaataggcaacctcctacctcatttggttccagtgttgttaatttgcctattaactgccatgatgcctacctccccaaaagcaagcattagctttggcgcgtggaggcactcaagggctgttgaaggcagaggggccaaggagggatggtgggtggatctgaggcggctcttgtctcctgtaatctagggctttgaagcctgagtccctggcatcatcaagatacggtcttgaccagtggctgtggagagatgtaggtgggactctgggttaggaggcctcacagtgaccctgtccctcgccctgcagaatggcattgtgcccatcgtggagcctgagatcctccctgatggggcccatgacttgaagcgctgccagtatgtgaccgagaaggtaaatggctacctgcctgaccagtgcaaggtggctggccggggaccctggggctaacccctatcctctcctccaccccactacccaccgtgcgcctgctctgctcaggtgctggctgctgtctacaaggctctgagtgaccaccacatctacctggaaggcaccttgctgaatcccaacatggtcaccccaggccatgcttgcactcagaagttttcacatgaggagattgccatggcgaccgtcacagcgctgcgccgcacagtgccccccgctgtcactggtgaggcccactcatcttgatctctatgcagtagataagctccacccacaaccctatgcccatttggacggatttcccatggcaacttccaccagctcctgccagcttcctgggtctctgacacagccccctctgctaccccctgcactacagggatcaccttcctgtctggaggccagagtgaggaggagtcgtccatcaacctcaatgccattaacaagtgccccctgctgaagccctgggccctgaccttctcctacggccgagccctgcaggcctctgccctgaaggcctggggcgggaagaaggagaacctgaaggctgcgcaggaggagtatgtcaagcgagccctggtaaggataggcaggaggtgggcagggtgcctgggtggatgggactcggggaagagcccttctcactccacccctctccctgcttaggccaacagccttgcctgtcaaggaaagtacactccgagcggtcaggctggggctgctgccagcgagtccctcttcgtctctaaccacgcctattaagcggaggtgttcccaggctgcccccaacactccaggccctgccccctcccactcttgaagaggaggccgcctcctggggctccaggctggcttgccgcgctctttcttccctcgtgacagtgttgtgtggtgtcgtctgtgaatgctaagtccatcaccctttccgggacactgccaaataaacagctatttaagggggagtcggccgtccgtgtcttgtggtgtctaatgcaggggagggcctggggaggtagcagagcccagaagaagaaagagcccctgttctctgttttttctgggcagaaaaggagtgaaaggtggaaggaccttcctgctctgttttatacttggccagggcttcaagaaaggctgagagctgtgacattttcttcactgcagg

SEQ ID NO: 32123 - DNA, 4379 bp, Homo Sapiens
  misc_feature (1968)..(1971): n is a, c, g, or t
  misc_feature (2012)..(2050): n is a, c, g, or t
  misc_feature (2541)..(2541): n is a, c, g, or t
tcccccccccaactctgtactgtcttctgtactgccttccgaccttctttctacacattcccatcatatttttccccaactttctgccttctttctcttcctttaccacaaagcctctgcaccttgctagtggcgccaaagtttggaaaagcagacaagtccacttaatgttccacagtatagaaactggcctacgccgggcgcagtggctcacgcctgtaatcccagaactttgcgaggccgaggcgggtggctcacgaggtcaggagttcgagacctacctggccaacatggtgaaaccccgtctctactaaaaatacaaaaattagccgggcgcgggggcggacgcctgtaatcttagctacgcgggaggcttagagaggagaatggattgaacccgggaggcggaggttgcagggaggcggaggttgcagtgagccgagatcgcgccactgcactccgggctgggtgacagagcaagactcagtctcagaaaataaatacataaaatagaaataggcgctcggtcaatacttgaacgaaaggaggaactccgcacagagcctggcgtccaggtcggtcaaactcaaccctggggccccagggctgggcaccttgagcggcaacgtggccaaaaccctaaccccgggcacccagccctgctaacgtctaaccctctgtcccattgcctttagaggtcgcagcgtaatcgggaatgcctggggctccctcccagagcgggtcgccccagcgatcacaacagcttcagatgcgctgccaagcgattggtccaggcagcgccaagcgccgaccagctcacccgcaccgcgcccgcgccggcgcgtcactcccagagacgtcacaaccggtcggagcccagcgagcagccggagttgagctggacgctgaggggggggcggggccctgacgcgcggggcggggaagggaggggcttcggtgggcgggccctgacaggccgagctcgcgggcgactgcctgccaggcagacgctgcagctaagctgcgcggtggctgtggcaggtgagagcctccggaagggaggcggcctctggccccgaccctgctccgcgatcgcccactcgggcgcccggccgggcctggcagggaagggccgccgccgccgccgcgcgtttgcgaggcctggcggggccgcggggcccaggaatggcgtaaggggcccccccagactccgagacggcccgagcgggtcgccggctgtgggacggcggcgtgcccttcctttcctccctcccaggttcgcgcccgagctctgctagccacccgtccgacaacttccggactcccaggtagggaggagcccctgttagcactgccagttaccccgaacacttggccgttttggaagggccgggactccctcccctgccttgtgggtgcatctgctcaaactctgtcggcccctcaagcagaaatggtgtgggatctgggccaaacccctcttggagtgactcagagccgccagccctactggagggatggggcatggggtggatggcccctagcctttcccttctgagctggtttgtatcaccccggtggcttcagtcctggtgccttcatcttagctcctgtactttgcctctcccaccccactggttttcctgcctccctcttcagaggtaagacacatggctggaccaaggcctccagggtaagtgacccgaacttcaagccagcagaggccatgtcatcctaagctagggataggggaggctcgccgggatgagcctttgctaacctaacctctgctccctacttctgcctcaccccagtctcagatgacgggaggccaatgccaaagacggataggatctatagaggcagtcctcttccaggaccgggacacaacagtgcatgaggcaaccgacaggggtgatgtaaagccgttgtgtctccatctggttgccccagtcctagcgggtgaannnntgtacggtggtcgctgcccagaccgagaagtgaaagggggnnnnnnnnnnnnnnnnnnnnnnnnnnnnnnnnnnnnnnnctagaacactcataattccctgagtttgaggctctggtagggggcgcatgtgggcatgggaaggagccctgcactctgagcacagcctctcagatgtaacgcagtggctctgggagctcaaagtctcagcccagtgggagctctgacaaaaggaggagaaacccccccagtagacatgtggctctgtctgatccactcctgccgccccttctggcaacttccctggggagggaggacctgcttcccagcaggaccttcatcgagtcactgtaggggcaggtagagtgggccaaggagccacagctggcgagggtcacttacctcggaggccttggtccagccatgtgtcttacctccgaagagggaggcagtcaagaacccaggagcatggggatctggaagcccactgctaagagtaaaactcagcagggacccttgccccacactcaggaatggaagaggcaatgcctagtgatggcccttgagtgccncagctgcctctctgtgtcccttacctcctcagggacagccctgccatcaaggaagacagcacaggactgggacccacccatgaacccttctcaggacaacccaacagcaccagtggggatgttctcctaagccgcagagggcctgggcacgccatccgtcctccaggaagagccatggtgttaatgcaggacaagggcagctctcagcagtggcctggtctggggggcgagggtggtggcacaggtcccttaagcatgctcagagctgccctgctgctcatcagcctgccatggggggcccaagggacagccagcaccagcctcagcactgctgggggtcacaccgtgccaccgactgggggccgctacttgagcattggagatggctctgtgatggagtttgagtttcctgaggacagtgagggcatcatcgtgatctccagccagtacccaggccaggccaacaggacggcgcctggccccatgctcagggtcacctccctggacacagaggtgctgaccatcaagaacgtgagtgctataacctggggaggcgggggtggctttgtggtgagcatccactcaggcctggctgggctggccccactccacatccagctcgtggacgcccatgaggccccgcccacactgattgaggagcggagagacttctgcatcaaggtctcacctgctgaagacacgcctgccaccctcagcgccgacctggcccacttctcggaaaacccaatcctctacctgctcctgcctcttatctttgtcaacaagtgttcgtttgggtgcaaagtggaactcgaggttctgaaggggctcatgcagagcccccagcccatgctgctgggcctcctgggccagtttctggtcatgcccttgtacgctttcctcatggccaaggtcttcatgctgcccaaggccctggctctgggcctcatcatcacctgctcgtcgcctggcggcggggggagctacctcttcagcctccttcttggaggggacgtcaccctggccatctccatgactttcctctctacggtggctgccactggcttcttgcctctgtcttcggccatctacagccgcctgctcagcatccatgagacgctccacgtgcccatctccaagatcctggggaccctgctgttcattgccatccccatagccgtgggcgtgctgatcaagtccaagctccccaagttctcccagctgctgctgcaggtcgtcaagcccttcagctttgtgctcctcctgggcggcctcttcctggcctatcgcatgggggtcttcatcctggcaggcatccggctacccatcgtactggtgggtatcacggtgcccctggttggcctgttggtgggctactgcctagccacgtgtctgaagctgccagtggcccagcggcggacggtcagcattgaggtaggggtgcagaacagcctgctggccttggccatgctgcagctatccctccgccgccttcaagctgactatgcctcccaggcccccttcattgtggcgctgagcggcacctccgagatgctggccttggtcattggccacttcatctacagcagcctgttcccagttccctgaggcctctgggtcaagctttcatcagccccagcccccacactccaccaaagttctcatgcactatgcactcagaaaaatccaggcttatttttttactgattttttattctccagctttcagtgccaaagaggccatgctgagttaggtaggtgggcgctgcccagaaaatatatttcaataaaagagagaagcaagcttgggtcccttctactctttgccctttggggcc

SEQ ID NO: 32124 - DNA, 2615 bp, Homo Sapiens
gcgcctgcggcgccgcgggcgggtcgcctcccctcctgtagcccacacccttcttaaagcggcggcgggaagatgaggcttcgggagccgctcctgagccggagcgccgcgatgccaggcgcgtccctacagcgggcctgccgcctgctcgtggccgtctgcgctctgcaccttcgcgtcaccctcgtttactacctggctggccgcgacctgagccgcctgccccaactggtcggagtctccacaccgctgcagggcgggtcgaacagtgccgccgccatcgggcagtcctccggggagctccggaccggaggggcccggccgccgcctcctctaggcgcctcctcccagccgcgcccgggtggcgactccagcccagtcgtggattctggccctggccccgctagcaacttgacctcggtcccagtgccccacaccaccgcactgtcgctgcccgcctgccctgaggagtccccgctgcttgtgggccccatgctgattgagtttaacatgcctgtggacctggagctcgtggcaaagcagaacccaaatgtgaagatgggcggccgctatgcccccagggactgcgtctctcctcacaaggtggccatcatcattccattccgcaaccggcaggagcacctcaagtactggctatattatttgcacccagtcctgcagcgccagcagctggactatggcatctatgttatcaaccaggcgggagacactatattcaatcgtgctaagctcctcaatgttggctttcaagaagccttgaaggactatgactacacctgctttgtgtttagtgacgtggacctcattccaatgaatgatcataatgcgtacaggtgtttttcacagccacggcacatttccgttgcaatggataagtttggattcagcctaccttatgttcagtattttggaggtgtctctgctctaagtaaacaacagtttctaaccatcaatggatttcctaataattattggggctggggaggagaagatgatgacatttttaacagattagtttttagaggcatgtctatatctcgcccaaatgctgtggtcgggaggtgtcgcatgatccgccactcaagagacaagaaaaatgaacccaatcctcagaggtttgaccgaattgcacacacaaaggagacaatgctctctgatggtttgaactcactcacctaccaggtgctggatgtacagagatacccattgtatacccaaatcacagtggacatcgggacaccgagctagcgttttggtacacggataagagacctgaaattagccagggacctctgctgtgtgtctctgccaatctgctgggctggtccctctcatttttaccagtctgagtgacagctccccttcgctcatcattcagatggctttccagatgaccaggacaggtgggatattttgcccccaacttggctcggcatgtgaattcttagctctggaaggtgtttatgcctttgcgggtttcttgatgtgttcgcagtgtcacccaagagtcagaactgtacacatcccaaaatttggtggccgtggaacacattcccggtgatagaattgctaaattgtcgtgaaataggttagaatttttctttaaattatggttttcttattcgtgaaaattcggagagtgctgctaaaattggattggtgtgatctttttggtagttgtaatttaacagaaaaacacaaaatttcaaccattcttaatgttacgtcctccccccacccccttctttcagtggtatgcaaccactgcaatcactgtgtcatatgtcttttcttagcaaaaggatttaaaacttgagccctggaccttttgcctatgtgtgtggattccagggcaactctagcatcagagcaaaagccttgggtttctcgcattcagtggcctatctccagattgtctgatttctgaatgtaaagttgttgtgtttttttttaaatagtaggtttgtagtattttaaagaaagaacagatcgagttctaattatgatctagcttgattttgtgttgatccaaatttgcatagctgtttaatgttaagtcatgacaatttatttttcttggcatgctatgtaaacttgaatttcctatgtatttttattgtggtgttttaaatatggggaggggtattgagcattttttagggagaaaaataaatatatgctgtagtggccacaaataggcctatgatttagctggcaggccaggttttctcaagagcaaaatcaccctctggccccttggcaggtaaggcctcccggtcagcattatcctgccagacctcggggaggatacctgggagacagaagcctctgcacctactgtgcagaactctccacttccccaaccctccccaggtgggcagggcggagggagcctcagcctccttagactgacccctcaggcccctaggctggggggttgtaaataacagcagtcaggttgtttaccagccctttgcacctccccaggcagagggagcctctgttctggtgggggccacctccctcagaggctctgctaccaacactccgtggcccaccctttgttaccagttcttcctccttccgtcttttcc

SEQ ID NO: 32125 - DNA, 3848 bp, Homo Sapiens
ggcatctgaggtttcctccaaggccctctgaagtgcagcccataatgaaggtcttggcggcaggagttgtgcccctgctgttggttctgcactggaaacatggggcggggagccccctccccatcacccctgtcaacgccacctgtgccatacgccacccatgtcacaacaacctcatgaaccagatcaggagccaactggcacagctcaatggcagtgccaatgccctctttattctctattacacagcccagggggagccgttccccaacaacctggacaagctatgtggccccaacgtgacggacttcccgcccttccacgccaacggcacggagaaggccaagctggtggagctgtaccgcatagtcgtgtaccttggcacctccctgggcaacatcacccgggaccagaagatcctcaaccccagtgccctcagcctccacagcaagctcaacgccaccgccgacatcctgcgaggcctccttagcaacgtgctgtgccgcctgtgcagcaagtaccacgtgggccatgtggacgtgacctacggccctgacacctcgggtaaggatgtcttccagaagaagaagctgggctgtcaactcctggggaagtataagcagatcatcgccgtgttggcccaggccttctagcaggaggtcttgaagtgtgctgtgaaccgagggatctcaggagttgggtccagatgtgggggcctgtccaagggtggctggggcccagggcatcgctaaacccaaatgggggctgctggcagaccccgagggtgcctggccagtccactccactctgggctgggctgtgatgaagctgagcagagtggaaacttccatagggagggagctagaagaaggtgccccttcctctgggagattgtggactggggagcgtgggctggacttctgcctctacttgtccctttggccccttgctcactttgtgcagtgaacaaactacacaagtcatctacaagagccctgaccacagggtgagacagcagggcccaggggagtggaccagcccccagcaaattatcaccatctgtgcctttgctgccccttaggttgggacttaggtgggccagaggggctaggatcccaaaggactccttgtcccctagaagtttgatgagtggaagatagagaggggcctctgggatggaaggctgtcttcttttgaggatgatcagagaacttgggcataggaacaatctggcagaagtttccagaaggaggtcacttggcattcaggctcttggggaggcagagaagccaccttcaggcctgggaaggaagacactgggaggaggagaggcctggaaagctttggtaggttcttcgttctcttccccgtgatcttccctgcagcctgggatggccagggtctgatggctggacctgcagcaggggtttgtggaggtgggtagggcaggggcaggttgctaagtcaggtgcagaggttctgagggacccaggctcttcctctgggtaaaggtctgtaagaaggggctggggtagctcagagtagcagctcacatctgaggccctgggaggtcttgtgaggtcacacagaggtacttgagggggactggaggccgtctctggtccccagggcaagggaacagcagaacttagggtcagggtctcagggaaccctgagctccaagcgtgctgtgcgtctgacctggcatgatttctatttattatgatatcctatttatattaacttattggtgctttcagtggccaagttaattcccctttccctggtccctactcaacaaaatatgatgatggctcccgacacaagcgccagggccagggcttagcagggcctggtctggaagtcgacaatgttacaagtggaataagcttacgggtgaagctcagagaagggtcggatctgagagaatggggaggcctgagtgggagtggggggccttgctccacccccatcccctactgtgacttgctttagcgtgtcagggtccaggctgcaggggctgggccaatttgtggagaggccgggtgcctttctgtcttgcttccagggggctggttcacactgttcttgggcgccccagcattgtgttgtgaggcgcactgttcctggcagatattgtgccccctggagcagtgggcaagacagtccttgtggcccaccctgtccttgtttctgtgtccccatgctgcctctgaaatagcgccctggaacaaccctgcccctgcacccagcatgctccgacacagcagggaagctcctcctgtggcccggacacccatagacggtgcggggggcctggctgggccagaccccaggaaggtggggtagactggggggatcagctgcccattgctcccaagaggaggagagggaggctgcagacgcctgggactcagaccaggaagctgtgggccctcctgctccacccccatcccactcccacccatgtctgggctcccaggcagggaacccgatctcttcctttgtgctggggccaggcgagtggagaaacgccctccagtctgagagcaggggagggaaggaggcagcagagttggggcagctgctcagagcagtgttctggcttcttctcaaaccctgagcgggctgccggcctccaagttcctccgacaagatgatggtactaattatggtacttttcactcactttgcacctttccctgtcgctctctaagcactttacctggatggcgcgtgggcagtgtgcaggcaggtcctgaggcctggggttggggtggagggtgcggcccggagttgtccatctgtccatcccaacagcaagacgaggatgtggctgttgagatgtgggccacactcacccttgtccaggatgcagggactgccttctccttcctgcttcatccggcttagcttggggctggctgcattcccccaggatgggcttcgagaaagacaaacttgtctggaaaccagagttgctgattccacccggggggcccggctgactcgcccatcacctcatctccctgtggacttgggagctctgtgccaggcccaccttgcggccctggctctgagtcgctctcccacccagcctggacttggccccatgggacccatcctcagtgctccctccagatcccgtccggcagcttggcgtccaccctgcacagcatcactgaatcacagagcctttgcgtgaaacagctctgccaggccgggagctgggtttctcttccctttttatctgctggtgtggaccacacctgggcctggccggaggaagagagagtttaccaagagagatgtctccgggcccttatttattatttaaacatttttttaaaaagcactgctagtttacttgtctctcctccccatcgtccccatcgtcctccttgtccctgacttggggcacttccaccctgacccagccagtccagctctgccttgccggctctccagagtagacatagtgtgtggggttggagctctggcacccggggaggtagcatttccctgcagatggtacagatgttcctgccttagagtcatctctagttccccacctcaatcccggcatccagccttcagtcccgcccacgtgctagctccgtgggcccaccgtgcggccttagaggtttccctccttcctttccactgaaaagcacatggccttgggtgacaaattcctctttgatgaatgtaccctgtggggatgtttcatactgacagattatttttatttattcaatgtcatatttaaaatatttattttttataccaaatgaatcacttttttttttaagaaaaaaaagagaaatgaataaagaatctactcttcg

SEQ ID NO: 32126 - DNA, 2574 bp, Homo Sapiens
cctgtttagacacatggacaacaatcccagcgctacaaggcacacagtccgcttcttcgtcctcagggttgccagcgcttcctggaagtcctgaagctctcgcagtgcagtgagttcatgcaccttcttgccaagcctcagtctttgggatctggggaggccgcctggttttcctccctccttctgcacgtctgctggggtctcttcctctccaggccttgccgtccccctggcctctcttcccagctcacacatgaagatgcacttgcaaagggctctggtggtcctggccctgctgaactttgccacggtcagcctctctctgtccacttgcaccaccttggacttcggccacatcaagaagaagagggtggaagccattaggggacagatcttgagcaagctcaggctcaccagcccccctgagccaacggtgatgacccacgtcccctatcaggtcctggccctttacaacagcacccgggagctgctggaggagatgcatggggagagggaggaaggctgcacccaggaaaacaccgagtcggaatactatgccaaagaaatccataaattcgacatgatccaggggctggcggagcacaacgaactggctgtctgccctaaaggaattacctccaaggttttccgcttcaatgtgtcctcagtggagaaaaatagaaccaacctattccgagcagaattccgggtcttgcgggtgcccaaccccagctctaagcggaatgagcagaggatcgagctcttccagatccttcggccagatgagcacattgccaaacagcgctatatcggtggcaagaatctgcccacacggggcactgccgagtggctgtcctttgatgtcactgacactgtgcgtgagtggctgttgagaagagagtccaacttaggtctagaaatcagcattcactgtccatgtcacacctttcagcccaatggagatatcctggaaaacattcacgaggtgatggaaatcaaattcaaaggcgtggacaatgaggatgaccatggccgtggagatctggggcgcctcaagaagcagaaggatcaccacaaccctcatctaatcctcatgatgattcccccacaccggctcgacaacccgggccaggggggtcagaggaagaagcgggctttggacaccaattactgcttccgcaacttggaggagaactgctgtgtgcgccccctctacattgacttccgacaggatctgggctggaagtgggtccatgaacctaagggctactatgccaacttctgctcaggcccttgcccatacctccgcagtgcagacacaacccacagcacggtgctgggactgtacaacactctgaaccctgaagcatctgcctcgccttgctgcgtgccccaggacctggagcccctgaccatcctgtactatgttgggaggacccccaaagtggagcagctctccaacatggtggtgaagtcttgtaaatgtagctgagaccccacgtgcgacagagagaggggagagagaaccaccactgcctgactgcccgctcctcgggaaacacacaagcaacaaacctcactgagaggcctggagcccacaaccttcggctccgggcaaatggctgagatggaggtttccttttggaacatttctttcttgctggctctgagaatcacggtggtaaagaaagtgtgggtttggttagaggaaggctgaactcttcagaacacacagactttctgtgacgcagacagaggggatggggatagaggaaagggatggtaagttgagatgttgtgtggcaatgggatttgggctaccctaaagggagaaggaagggcagagaatggctgggtcagggccagactggaagacacttcagatctgaggttggatttgctcattgctgtaccacatctgctctagggaatctggattatgttatacaaggcaagcatttttttttttaaagacaggttacgaagacaaagtcccagaattgtatctcatactgtctgggattaagggcaaatctattacttttgcaaactgtcctctacatcaattaacatcgtgggtcactacagggagaaaatccaggtcatgcagttcctggcccatcaactgtattgggccttttggatatgctgaacgcagaagaaagggtggaaatcaaccctctcctgtctgccctctgggtccctcctctcacctctccctcgatcatatttccccttggacacttggttagacgccttccaggtcaggatgcacatttctggattgtggttccatgcagccttggggcattatgggtcttcccccacttcccctccaagaccctgtgttcatttggtgttcctggaagcaggtgctacaacatgtgaggcattcggggaagctgcacatgtgccacacagtgacttggccccagacgcatagactgaggtataaagacaagtatgaatattactctcaaaatctttgtataaataaatatttttggggcatcctggatgatttcatcttctggaatattgtttctagaacagtaaaagccttattctaaggtg

SEQ ID NO: 32127 - DNA, 3627 bp, Homo Sapiens
gctgacacgctgtcctctggcgacctgtcgctggagaggttgggcctctggatgcgcgcggggctctggcctaccggtgacccggctagccggccgcgctcctgcttgagccgcctgccggggcccgcgggcctgctgttctcccgcgcgtccgagcgtcccgactcccggtgccggcccgggtccgggtctctgacccacccgggggcggcggggaaggcggcgagggccaccgtgccccgtgcgctctccgctgcgggcgcccggggcgccacaaccccaccccgctggctccgtgccgtgcgtgtcaggcgttctcgtctccgcggggttgtccgccgccccttccccggagtgggggttggccggagccgatcggctcgctggccggccggcctccgctcccggggggctcttcgtgatcgatgtggtgacgtcgtgctctcccgggccgggtccgagccgcgacgggcgaggggcggacgttcgtggcgaacgggaccgtccttctcgctccgcccgcgggggtcccctcgtctctcctctccccgcccgccggcggtgcgtgtgggaaggcgtggggtgcggaccccggcccgacctcgccgtcccgcccgccgccttctgcgtcgcggggcgggccggcggggtcctctgacgcggcagacagccctcgctgtcgcctccagtggttgtcgacttgcgggcggcccccctccgcggcggtgggggtgccgtcccgccggcccgtcgtgctgccctctcgggggggtttgcgcgagcgtcggctccgcctgggcccttgcggtgctcctggagcgctccgggttgtccctcaggtgcccgaggccgaacggtggtgtgtcgttcccgcccccggcgccccctcctccggtcgccgccgcggtcgtctgcgcgtgggtcctgagggagctcgtcggtgtggggttcgaggcggtttgagtgagacgagacgagacgcgcccctcccacgcggggaagggcgccgctgctctcggtgagcgcagtcccgtgtcccctctggcgggtgcgcgcgggccgtgtgagcgatcggtggttcgggccggtgtgaccgcgtgcgccggccggcgccgaggggctgccgttctgcctccgaccggtcgtgtgtgggttgacttcggaggcgctctgcctcggaaggaaggaggtgggtggacgggggggcctggtggggttgcgcgcacgcgcgcaccggccgggcccccgccctgaacgcgaacgctcgaggtggccgcgcgcaggtgtttcctcgtaccgcagggccccctcccttccccaggcgtccctcggcgcctctgcgggcccgaggaggagcggctggcgggtggggggagtgtgacccaccctcggtgagaaaagccttctctagcgatctgagaggcgtgccttgggggtacggatcccccgggccgccgcctctgtctctgcctccgttatggtagcgctgccgttagcgacccgctcgcagaggaccctcctccgcttccccctcgacggggttgggggggagaagcgagggttccgccggccaccgcggtggtggccgagtgcggctcgtcgcctactgtggcccgcgcctccccccttccgagtcgggggaggatcccgccgggccgggcccggcgttcccagcgggttgggacgcggcggccggcgggcggtgggtgtgcgcgcccggcgctctgtccggcgcgtgaccccctccgccgcgagtccgggcctctgccgcccgctcccgtgccgagtccgtgaccggtgccgacgacccgcggtttgcgtggcacggggtcgggcccgcctggccctgggaaagcgtcccacggtgggggcgcgccggtctcccggagcgggaccgggtcggaggatggacgagaatcacgagcgacggtggtgcgggcgtgtcgggttcgtggctgcggtcgctccggggcccccggtggcggggccccggggctcgcgaggcggttctcggtgggggccgagggccgtccggcgtcccaggcggggcgccgcgggaccgccctcgtgtctgtggcggtgggatcccgcggccgtgttttcctggtggcccggccgtgcctgaggtttctccccgagccgccgcctctgcgggctcccgggtgcccttgccctcgcggtccccggccctcgcccgtctgtgccctcttccccgcccgccgcccgccgatcctcttcttccccccgagcggctcaccggcttcacgtccgttggtggccccgcctgggaccgaacccggcaccgcctcgtggggcgccgccgccggccgctgatcggcccggcgtgccgcggtcccccggcggcgccttggggaccgggtcggtggcgcccccgcgtgcggggcccggtgcggttggccggagttccggggtcggctgcggcgcgtgcgggggaggagaggttcggggacgccgcgactggcggtggtgggggagccgcgtacgccaggcggtcggccgccccgggtgccgcggtgccggcggcggtgaggccccgcgcgtgtgtcccggctgcggtcggccgctcgcggggtccccgtggcgtccccttccccgccggccgcctttctcgcgccttccccgtcgccccggcctcgcccgtggtctctcgtcttctcccggcccgctcttccgaaccgggtcggcgcgtcccccgggtgcgcctcgcttcccgggcctgccgcggcccttccccgaggcgtccgtcccgggcgtcggcgtcggggagagcccgtcctccccgcgtggcgtcgccccgttcggcgcgcgcgtgcgcccgagcgcggcccggtggtccctcccggacaggcgttcgtgcgacgtgtggcgtgggtcgacctccgccttgccggtcgctcgccctctccccgggtcggggggtggggcccgggccggggcctcggccccggtcgcggtcccccgtcccgggcgggggcgggcgcgccggccggcctcggtcgccctccctgggccgtcgtgtggcgtgtgccacccctgcgcccgcgcccgccggcggggctcggagccgggcttcggccgggccccgggccctcgaccggaccggtgcgcgggcgctgcggccgcacggcgcgactgtccccgggccgggcaccgcggtccgcctctcgctcgccgcccggacgtcggggccgccccgcggggcgggcggagcgccgtccccgcctcgccgccgcccgcgggcgccggccgcgcgcgcgcgcgcgtggccgccggtccctcccggccgccgggcgcgggtcgggccgtccgcctcctcgcgggcgggcgcgacgaagaagcgtcgcgggtctgtggcgcggggcccccggtggtcgtgtcgcgtggggggcgggtggttggggcgtccggttcgccgcgccccgccccggccccaccggtcccggccgccgcccccgcgcccgctcgctccctcccgtccgcccgtccgcggcccgtccgtccgtccgtccgtcgtcctcctcgcttgcggggcgccgggcccgtcctcgcgaggccccccggccggccgtccggccgcgtcggggcctcgccgcgctctaccttacc

SEQ ID NO: 32128 - DNA, 2035 bp, Homo Sapiens
cgagccccgccgaaccgaggccacccggagccgtgcccagtccacgccggccgtgcccggcggccttaagaaccaggcaacctctgccttcttccctcttccactcggagtcgcgctccgcgcgccctcactgcagcccctgcgtcgccgggaccctcgcgcgcgaccagccgaatcgctcctgcagcagagccaacatgcccatcactcggatgcgcatgagaccctggctagagatgcagattaattccaaccaaatcccggggctcatctggattaataaagaggagatgatcttccagatcccatggaagcatgctgccaagcatggctgggacatcaacaaggatgcctgtttgttccggagctgggccattcacacaggccgatacaaagcaggggaaaaggagccagatcccaagacgtggaaggccaactttcgctgtgccatgaactccctgccagatatcgaggaggtgaaagaccagagcaggaacaagggcagctcagctgtgcgagtgtaccggatgcttccacctctcaccaagaaccagagaaaagaaagaaagtcgaagtccagccgagatgctaagagcaaggccaagaggaagtcatgtggggattccagccctgataccttctctgatggactcagcagctccactctgcctgatgaccacagcagctacacagttccaggctacatgcaggacttggaggtggagcaggccctgactccagcactgtcgccatgtgctgtcagcagcactctccccgactggcacatcccagtggaagttgtgccggacagcaccagtgatctgtacaacttccaggtgtcacccatgccctccacctctgaagctacaacagatgaggatgaggaagggaaattacctgaggacatcatgaagctcttggagcagtcggagtggcagccaacaaacgtggatgggaaggggtacctactcaatgaacctggagtccagcccacctctgtctatggagactttagctgtaaggaggagccagaaattgacagcccagggggggatattgggctgagtctacagcgtgtcttcacagatctgaagaacatggatgccacctggctggacagcctgctgaccccagtccggttgccctccatccaggccattccctgtgcaccgtagcagggcccctgggcccctcttattcctctaggcaagcaggacctggcatcatggtggatatggtgcagagaagctggacttctgtgggcccctcaacagccaagtgtgaccccactgccaagtggggatgggcctccctccttgggtcattgacctctcagggcctggcaggccagtgtctgggtttttcttgtggtgtaaagctggccctgcctcctgggaagatgaggttctgagaccagtgtatcaggtcagggacttggacaggagtcagtgtctggctttttcctctgagcccagctgcctggagagggtctcgctgtcactggctggctcctaggggaacagaccagtgaccccagaaaagcataacaccaatcccagggctggctctgcactaagcgaaaattgcactaaatgaatctcgttccaaagaactaccccttttcagctgagccctggggactgttccaaagccagtgaatgtgaaggaaactcccctccttcggggcaatgctccctcagcctcagaggagctctaccctgctccctgctttggctgaggggcttgggaaaaaaacttggcactttttcgtgtggatcttgccacatttctgatcagaggtgtacactaacatttcccccgagctcttggcctttgcatttatttatacagtgccttgctcggggcccaccaccccctcaagccccagcagccctcaacaggcccagggagggaagtgtgagcgccttggtatgacttaaaattggaaatgtcatctaaccattaagtcatgtgtgaacacataaggacgtgtgtaaatatgtacatttgtctttttataaaaagtaaaattgtt

SEQ ID NO: 32129 - DNA, 6325 bp, Homo Sapiens
aagcttttttgggcaaattacacataattagataggctgggttagggctgtctacaagatcccagcctagagtgtggtgcagtagcctattttctctaggactcttgctgcaacaggatatgggagaagggaaacattaacgttagcagaatgggaggaatcagattatggagacatgatccttgccttctggcacctctcccagctgatttagaagaggacacagagggagacagacatatggccatttctataattataaactctgctacatgctgagaggatggcttctcaaagccagttagtgtacaagcagtggaggttgggactgccctacttctcctgcctagggtcacacagtctggcagatctggaaagacttccctgagaaagtgaccttggaactgataccttagtggaaataactaggcattgggagggggtgaggtgaggagaaggtcaagaactttcatgtagagggaactttgtgcagagaccttagtcaggaagaggttttgcatagtggaggaactgaaagctaacagccaggctacagtacagagcaaatgatgctggggtgtgaggtgatgtcaaaaggtagacaccagggctagagggcgcataatcttgcaggccgtgctaatgattttgttttctacccaagaatgctacttcaggagatcagtcaaaaggttagggtgatggtgacggtggaaatatagaaaaaggaatttattcaagaggtattcaaaaagaagtgaaatagagatgagttggagatagattggataaaaagagtgagggagagggaggtgtcaggctgcagcccaggttctgagttgccaaagaggagtcttttcctccaggtgagctaaggcttagaaccacgatttttggtcactttttcttattttcagtgtgagaagtggcgagttggctgtccaggtacacactgtcatcttacacttactgtttaagacagaggcgcatatttggaaagtgaatgagtcaggagccagaggagaaggtatgtcggcagagcctagggcgagaggaggaagagagtctgggggcgcgtccccaaaaaggagacagggaagacagagcagaggccggggaggggagagcaaggaccatgacaggaggaaagagaggctagggaacactgaggtggaggaatcctgggatatgacagttgtaaagaattgtagccaacctaatccagttctctcaatgtgcaactgaggaaattaattttcatgcgtttactttattgtaaatgtggtacttgcacttgagaaattttggaaaacataaagatgtaaagcaaattaagatcactcatagtctttccacctagagacatgtactgctaaagcaaggactttgatccttttttccctttgcatttttaccatggttggaattgtaacacagacacaaccttatgtcctgcttccaaaacataaataatggttgtaaagcgtcccacacgttgacccaaagtctcctttgaaacaggaaattgagacacgccggttgtgaaacctactgaagtgagcggcggcgccaggaattcctgggaccccgacctctttgcagctcgcacagctaagggcgagggcgcccttcggcagaagcagcaaaccgccggcaagcccagcgaggagggctgccggggtctgggcttgggaattggctggcacccagcggaaagggacgtgagctgagcggcgggggagaagagtgcgcaggtcagagggcggccgcagcgggcctccgcgaggtccccacgccgggcgatatggggtgcctgctgtttctgctgctctgggcgctcctccaggcttggggaagcgctgaaggtgggtggaacgagggcgcttgagtgcactcgcgggagggcggagagagggagctgggtagggacggggagggcaacgcctgatggggactggtgagacccgggacgcactggcgcgatctaggtagaaaactcgctgctccctggctccggggagaggcagcgcggcacagagttcgctggcatcagccgcctcctgaagctcatctcctcttgtttctttcttccttctctttatgctggctgctctcccggccacttgctacacgcctccaatcttcattctctcccagtcccgcaaaggcttttccccctccgctgcctccagatctcgtccttcgccaatagcagctggacgcgcaccgacggcttggcgtggctgggggagctgcagacgcacagctggagcaacgactcggacaccgtccgctctctgaagccttggtcccagggcacgttcagcgaccagcagtgggagacgctgcagcatatatttcgggtttatcgaagcagcttcaccagggacgtgaaggaattcgccaaaatgctacgcttatcctgtgagctgagggataggatcctgggccggtacccaaggggagagaatggccacagaaactcaactgggagactgtggcaccacctgatgagattctctgctctgtccaccctcttctgatttcccttctacctggagatgtcccaggctttgactcctcaaatgtccctcgttcctgcctactccaggtcacttactttcctttccctgaagtctgggtccccattataacctgcacatcaatttcttctctttcatctctcccagtcttttaaacccttctttgatctttctccattcctctccacagatcccttggagctccaggtgtccgctggctgtgaggtgcaccctgggaacgcctcaaataacttcttccatgtagcatttcaaggaaaagatatcctgagtttccaaggaacttcttgggagccaacccaagaggccccactttgggtaaacttggccattcaagtgctcaaccaggacaagtggacgagggaaacagtgcagtggctccttaatggcacctgcccccaatttgtcagtggcctccttgagtcagggaagtcggaactgaagaagcaaggtcagcctgccttccttactccctgcattccacttcagggctccaaacgggcttttccattccagggttctcatccctttgagcattcaaagaagaggaaggcccaggaggggctggataaggggtgagggtatttattcatttcacagacatcaactgagcacctcttgggttctatgaattcaattaatgaacaactgggggtgaaaggtgtcaggcagttagttaggatccctgcttggtagggggatgttaattaatgcaatgcttgaaataggctacatatgttacttcaaaacaaagggtgttataggggaacagacaaggggcattcataggaggctgggaccagagaagaagaaggagtatcagggcaggctccctgaagaaggtgggacaaatggattgaaagttgtgggagacttcatttccagaagtgaacatgtcaggggcatacaggaaggagggaaataaagacctgaaagtcaaaaaggatgatatgaggcctggagcctctaatgcagagttttcactttaagatcccccccattcccttgttggatacagtgaagcccaaggcctggctgtcccgtggccccagtcctggccctggccgtctgctgctggtgtgccatgtctcaggattctacccaaagcctgtatgggtgaagtggatgcggggtgagcaggagcagcagggcactcagccaggggacatcctgcccaatgctgacgagacatggtatctccgagcaaccctggatgtggtggctggggaggcagctggcctgtcctgtcgggtgaagcacagcagtctagagggccaggacatcgtcctctactggggtgagaaaaagctgggcccaagctggaaatggcaggaggtggtcctcaggcatagagggaggcactggggtgggatgtggcttgatatacccaggttagaggagtttcagagatgaggcccccagtaaaaggatagagagaggggttccagacacaggaaggagggaaataaagacctgaaagtctaaaaggattgaaatagtgctctctatatacaagaagaaacaagactacaaaactcagggatccagaagtaggcagcgaataaacaatcccaggacgattcattccttggcttaaagggagccaggcctttgggaaggcaggttagcaaagatagcttggttggttgagtgctccctgtgtaggggccaatgaatctgcatataatatctcatctcatcattcacagttttctttgaagcaagtactgctcttttcgttatatagatgaggaaatgaaggcggagataggttaactgcccggagccacatagaaagtggacgggctggatttagattcaggtctgccttgctacaaagctgttgccctttccctctatgctacactagcaaatgccaaagtgggctgaatttgggatgcccaggcactgaaaacaagatggggaatctaaacttatgaggaatagaaattggggttttaagtggaggaggaaataagaagcacctggtaccctcacacatgcctagaccaggggattggatatatgtagagaggggtcctgtgctgagagacagcctatgttcctccagagcaggtgggagctacacctccatgggcttgattgccttggcagtcctggcgtgcttgctgttcctcctcattgtgggctttacctcccggtttaagaggcaaacgtaagttctcccctttccctttcctcaactctctctccccttcattcctggcttcccttttccttaatggtctttccctttctattctctcacagttcctatcagggcgtcctgtgactcgccttgccacatctgtgtctctggaacccaggacctctggacctcaggttcccaagacttcagtcctggtctgctcaggaattgaagatgtaaggaattgaagataggagagataccttgaaaaagtagagaacagtcatgaggcagctttcatcacacccttttaacatttatctaaaagaatttaaattctttttcaaaaattacactacaagtttataagcccaaatggctctgtgaaatcagaagtgcaaaggtgtgcaaacttgtatctgaagacctaccagggacaagcaggtaagagctgatgtgagtgtgtgtgatgggatctgtaaggaactggaacacacatgtcctatccaaaggaatcagctgcagctgcttgttgtcaagtataaagtcaggacctggcttggctttaaccgtttttcaagaaaactggaaatctggattttcagcgaacatgcctgattttaaaaggttgactcaagtttttacaaaatactatgtgggacacctcaaatacatacctactgactgatgacaaacccaggagtttgtgtgtcttttataaaaagtttgccctggatgtcatattggcagttggaggacacagtttctattgtaaatttggatttacgactgaagaaggacattttctctttaaaagaaagttaggttataagaaacagaggcgtctcacatttttacttggtgtaattaataaacgaagataaatcatagtgtatgtgtattatgttgaaaaaaactactctgagtaaggatatttctctcaaatggtcatcactttttttccttggaggaagattgtcatgaaggcatcccttccttcccaaaacgacaacggcaacaacaacagtctcctttacttacagctattaaaagagacaatgtagggaaagggccaacaccacttgggcaagcatgagctgcagcgatgatggtgatggtagcccagccatgctgtgttcttatcttagagaggacagagcaggaaacttacaggggtagcagacctttctgatgccaaagaaataaggaggccaaaatcatgtttgcctagctgggaggtaaatctcttggcagtcagggtccctgaacacccagaaaaaataagtgagacttaactgttggagagtgtttgcttgagaaaagtaacatttcacactctctatactagacttgcacatatgaatttaggatgtgcgtgaagattctgctagcttcaacatatcccaaagcacttggatatgcctataatccaagtgctttgggaggctgagataggaggattgtttaaggccaggcatttgaaatcagcctgggcaacatagtgagaccctgtctctacaaaaaattaaaaaactagccacccatggtggtgagcgcctgtagtcctagctactctggaggctgaggtgggaggatcccttgagcccatgaattc

SEQ ID NO: 32130 - DNA, 2840 bp, Homo Sapiens
ggtttcaaattggccctttggcctctggagcaaattcaaatgtaactcttccccaatcccccttctcttcttccagattaattaaaagaagaatgaactataatccttgaagataactgggcaattttttaagtcggaggctgttcttactggtgtgaggatttacacacgtcttcagtttttcagcacagaccagcagaccatcatttttagaggaaatactccctctgccctcctttttggtttccttggtggtaaagattaaatttggttgcatcattttgacttgtgtttgagtctagattttatggcacaaggaatggcataaacttttcatgtgttttggttaaaacaaaccagaccattgcattgaccctggacatctttaattgagaaattggtaactttattttaatatgtatatctgaagaattcaagaaaacaaaggcatcctcagaggtgtgcctcttttctttattattagaggcaaaacgaacaattttataggatttgtagtgaaattataccagattataaggagaaccaaaactaagtcgcaaaatttattaatttaaggggctctcgctttgaaagtttgagagtaagttacgataggcatttgtatccattcattactttcctcttttcaaataagcaactaaatagaaatgctaatctcagacttaattatttaacagaagagtgtaccatggaaaacctccagacaaatttctccttggttcagggctcaactaaaaaactgaatgggatgggagatgatggcagccccccagcgaaaaaaatgataacggacattcatgtaaatggaaaaacgataaacaaggtgccaacagttaagaaggaacacttggatgactatggagaagcaccagtggaaactgatggagagcatgttaagcgaacctgtacttctgttcctgaaactttgcatttaaatcccagtttgaaacacacattggcacaattccatttaagtagtcagagctcgctgggtggaccagcagcattttctgctcggcattcccaagaaagcatgtcgcctactgtatttctgcctcttccatcacctcaggttcttcctggcccattgctcatcccttcagatagctccacagaactcactcagactgtgttggaaggggaatctatttcttgttttcaagttggaggagaaaagagactctgtttgccccaagtcttaaattctgttctccgagaatttacactccagcaaataaatacagtgtgtgatgaactgtacatatattgttcaaggtgtacttcagaccagcttcatatcttaaaggtactgggcatacttccattcaatgccccatcctgtgggctgattacattaactgatgcacaaagattatgtaatgctttattgcggccacgaacttttcctcaaaatggtagcgtacttcctgctaaaagctcattggcccagttaaaggaaactggcagtgcctttgaagtggagcatgaatgcctaggcaaatgtcagggtttatttgcaccccagttttatgttcagcctgatgctccgtgtattcaatgtctggagtgttgtggaatgtttgcaccccagacgtttgtgatgcattctcacagatcacctgacaaaagaacttgccactggggctttgaatcagctaaatggcattgctatcttcatgtgaaccaaaaatacttaggaacacctgaagaaaagaaactgaagataattttagaagaaatgaaggagaagtttagcatgagaagtggaaagagaaatcaatccaagacagatgcaccatcaggaatggaattacagtcatggtatcctgttataaagcaggaaggtgaccatgtttctcagacacattcatttttacaccccagctactacttatacatgtgtgataaagtggttgccccaaatgtgtcacttacttctgctgtatcccagtctaaagagctcacaaagacagaggcaagtaagtccatatcaagacagtcagagaaggctcacagtagtggtaaacttcaaaaaacagtgtcttatccagatgtctcacttgaggaacaggagaaaatggatttaaaaacaagtagagaattatgtagccgtttagatgcatcaatctcaaataattctacaagtaaaaggaaatctgagtctgccacttgcaacttagtcagagacataaacaaagtgggaattggccttgttgctgccgcttcatctccgcttcttgtgaaagatgtcatttgtgaggatgataagggaaaaatcatggaagaagtaatgagaacttatttaaaacaacaggaaaaactaaacttgattttgcaaaagaagcaacaacttcagatggaagtaaaaatgttgagtagttcaaaatctatgaaggaactcactgaagaacagcagaatttacagaaagagcttgaatctttgcagaatgaacatgctcaaagaatggaagaattttatgttgaacagaaagacttagagaaaaaattggagcagataatgaagcaaaaatgtacctgtgactcaaatttagaaaaagacaaagaggctgaatatgcaggacagttggcagaactgaggcagagattggaccatgctgaggccgataggcaagaactccaagatgaactcagacaggaacgggaagcaagacagaagttagagatgatgataaaagagctaaagctgcaaattctgaaatcatcaaagactgctaaagaatagaaactgttaaagagattcatctgtgtattactgacaaggttttttttgtttgttgcttgctttggtaattgaattc

SEQ ID NO: 32131 - DNA, 8224 bp, Homo Sapiens
gctgccccgagcctttctggggaagaactccaggcgtgcggacgcaacagccgagaacattaggtgttgtggacaggagctgggaccaagatcttcggccagccccgcatcctcccgcatcttccagcaccgtcccgcaccctccgcatccttccccgggccaccacgcttcctatgtgacccgcctgggcaacgccgaacccagtcgcgcagcgctgcagtgaattttccccccaaactgcaataagccgccttccaaggccaagatgttcataaatataaagagcatcttatggatgtgttcaaccttaatagtaacccatgcgctacataaagtcaaagtgggaaaaagcccaccggtgaggggctccctctctggaaaagtcagcctaccttgtcatttttcaacgatgcctactttgccacccagttacaacaccagtgaatttctccgcatcaaatggtctaagattgaagtggacaaaaatggaaaagatttgaaagagactactgtccttgtggcccaaaatggaaatatcaagattggtcaggactacaaagggagagtgtctgtgcccacacatcccgaggctgtgggcgatgcctccctcactgtggtcaagctgctggcaagtgatgcgggtctttaccgctgtgacgtcatgtacgggattgaagacacacaagacacggtgtcactgactgtggatggggttgtgtttcactacagggcggcaaccagcaggtacacactgaattttgaggctgctcagaaggcttgtttggacgttggggcagtcatagcaactccagagcagctctttgctgcctatgaagatggatttgagcagtgtgacgcaggctggctggctgatcagactgtcagatatcccatccgggctcccagagtaggctgttatggagataagatgggaaaggcaggagtcaggacttatggattccgttctccccaggaaacttacgatgtgtattgttatgtggatcatctggatggtgatgtgttccacctcactgtccccagtaaattcaccttcgaggaggctgcaaaagagtgtgaaaaccaggatgccaggctggcaacagtgggggaactccaggcggcatggaggaacggctttgaccagtgcgattacgggtggctgtcggatgccagcgtgcgccaccctgtgactgtggccagggcccagtgtggaggtggtctacttggggtgagaaccctgtatcgttttgagaaccagacaggcttccctccccctgatagcagatttgatgcctactgctttaaacgtcgaatgagtgatttgagtgtaattggtcatccaatagattcagaatctaaagaagatgaaccttgtagtgaagaaacagatccagtgcatgatctaatggctgaaattttacctgaattccctgacataattgaaatagacctataccacagtgaagaaaatgaagaagaagaagaagagtgtgcaaatgctactgatgtgacaaccaccccatctgtgcagtacataaatgggaagcatctcgttaccactgtgcccaaggacccagaagctgcagaagctaggcgtggccagtttgaaagtgttgcaccttctcagaatttctcggacagctctgaaagtgatactcatccatttgtaatagccaaaacggaattgtctactgctgtgcaacctaatgaatctacagaaacaactgagtctcttgaagttacatggaagcctgagacttaccctgaaacatcagaacatttttcaggtggtgagcctgatgttttccccacagtcccattccatgaggaatttgaaagtggaacagccaaaaaaggggcagaatcagtcacagagagagatactgaagttggtcatcaggcacatgaacatactgaacctgtatctctgtttcctgaagagtcttcaggagagattgccattgaccaagaatctcagaaaatagcctttgcaagggctacagaagtaacatttggtgaagaggtagaaaaaagtacttctgtcacatacactcccactatagttccaagttctgcatcagcatatgtttcagaggaagaagcagttaccctaataggaaatccttggccagatgacctgttgtctaccaaagaaagctgggtagaagcaactcctagacaagttgtagagctctcagggagttcttcgattccaattacagaaggctctggagaagcagaagaagatgaagatacaatgttcaccatggtaactgatttatcacagagaaatactactgatacactcattactttagacactagcaggataatcacagaaagcttttttgaggttcctgcaaccaccatttatccagtttctgaacaaccttctgcaaaagtggtgcctaccaagtttgtaagtgaaacagacacttctgagtggatttccagtaccactgttgaggaaaagaaaaggaaggaggaggagggaactacaggtacggcttctacatttgaggtatattcatctacacagagatcggatcaattaattttaccctttgaattagaaagtccaaatgtagctacatctagtgattcaggtaccaggaaaagttttatgtccttgacaacaccaacacagtctgaaagggaaatgacagattctactcctgtctttacagaaacaaatacattagaaaatttgggggcacagaccactgagcacagcagtatccatcaacctggggttcaggaagggctgaccactctcccacgtagtcctgcctctgtctttatggagcagggctctggagaagctgctgccgacccagaaaccaccactgtttcttcattttcattaaacgtagagtatgcaattcaagccgaaaaggaagtagctggcactttgtctccgcatgtggaaactacattctccactgagccaacaggactggttttgagtacagtaatggacagagtagttgctgaaaatataacccaaacatccagggaaatagtgatttcagagcgattaggagaaccaaattatggggcagaaataaggggcttttccacaggttttcctttggaggaagatttcagtggtgactttagagaatactcaacagtgtctcatcccatagcaaaagaagaaacggtaatgatggaaggctctggagatgcagcatttagggacacccagacttcaccatctacagtacctacttcagttcacatcagtcacatatctgactcagaaggacccagtagcaccatggtcagcacttcagccttcccctgggaagagtttacatcctcagctgagggctcaggtgagcaactggtcacagtcagcagctctgttgttccagtgcttcccagtgctgtgcaaaagttttctggtacagcttcctccattatcgacgaaggattgggagaagtgggtactgtcaatgaaattgatagaagatccaccattttaccaacagcagaagtggaaggtacgaaagctccagtagagaaggaggaagtaaaggtcagtggcacagtttcaacaaactttccccaaactatagagccagccaaattatggtctaggcaagaagtcaaccctgtaagacaagaaattgaaagtgaaacaacatcagaggaacaaattcaagaagaaaagtcatttgaatcccctcaaaactctcctgcaacagaacaaacaatctttgattcacagacatttactgaaactgaactcaaaaccacagattattctgtactaacaacaaagaaaacttacagtgatgataaagaaatgaaggaggaagacacttctttagttaacatgtctactccagatccagatgcaaatggcttggaatcttacacaactctccctgaagctactgaaaagtcacattttttcttagctactgcattagtaactgaatctataccagctgaacatgtagtcacagattcaccaatcaaaaaggaagaaagtacaaaacattttccgaaaggcatgagaccaacaattcaagagtcagatactgagctcttattctctggactgggatcaggagaagaagttttacctactctaccaacagagtcagtgaattttactgaagtggaacaaatcaataacacattatatccccacacttctcaagtggaaagtacctcaagtgacaaaattgaagactttaacagaatggaaaatgtggcaaaagaagttggaccactcgtatctcaaacagacatctttgaaggtagtgggtcagtaaccagcacaacattaatagaaattttaagtgacactggagcagaaggacccacggtggcacctctccctttctccacggacatcggacatcctcaaaatcagactgtcaggtgggcagaagaaatccagactagtagaccacaaaccataactgaacaagactctaacaagaattcttcaacagcagaaattaacgaaacaacaacctcatctactgattttctggctagagcttatggttttgaaatggccaaagaatttgttacatcagcaccaaaaccatctgacttgtattatgaaccttctggagaaggatctggagaagtggatattgttgattcatttcacacttctgcaactactcaggcaaccagacaagaaagcagcaccacatttgtttctgatgggtccctggaaaaacatcctgaggtgccaagcgctaaagctgttactgctgatggattcccaacagtttcagtgatgctgcctcttcattcagagcagaacaaaagctcccctgatccaactagcacactgtcaaatacagtgtcatatgagaggtccacagacggtagtttccaagaccgtttcagggaattcgaggattccaccttaaaacctaacagaaaaaaacccactgaaaatattatcatagacctggacaaagaggacaaggatttaatattgacaattacagagagtaccatccttgaaattctacctgagctgacatcggataaaaatactatcatagatattgatcatactaaacctgtgtatgaagacattcttggaatgcaaacagatatagatacagaggtaccatcagaaccacatgacagtaatgatgaaagtaatgatgacagcactcaagttcaagagatctatgaggcagctgtcaacctttctttaactgaggaaacatttgagggctctgctgatgttctggctagctacactcaggcaacacatgatgaatcaatgacttatgaagatagaagccaactagatcacatgggctttcacttcacaactgggatccctgctcctagcacagaaacagaattagacgttttacttcccacggcaacatccctgccaattcctcgtaagtctgccacagttattccagagattgaaggaataaaagctgaagcaaaagccctggatgacatgtttgaatcaagcactttgtctgatggtcaagctattgcagaccaaagtgaaataataccaacattgggccaatttgaaaggactcaggaggagtatgaagacaaaaaacatgctggtccttcttttcagccagaattctcttcaggagctgaggaggcattagtagaccatactccctatctaagtattgctactacccaccttatggatcagagtgtaacagaggtgcctgatgtgatggaaggatccaatcccccatattacactgatacaacattagcagtttcaacatttgcgaagttgtcttctcagacaccatcatctcccctcactatctactcaggcagtgaagcctctggacacacagagatcccccagcccagtgctctgccaggaatagacgtcggctcatctgtaatgtccccacaggattcttttaaggaaattcatgtaaatattgaagcaactttcaaaccatcaagtgaggaataccttcacataactgagcctccctctttatctcctgacacaaaattagaaccttcagaagatgatggtaaacctgagttattagaagaaatggaagcttctcccacagaacttattgctgtggaaggaactgagattctccaagatttccaaaacaaaaccgatggtcaagtttctggagaagcaatcaagatgtttcccaccattaaaacacctgaggctggaactgttattacaactgccgatgaaattgaattagaaggtgctacacagtggccacactctacttctgcttctgccacctatggggtcgaggcaggtgtggtgccttggctaagtccacagacttctgagaggcccacgctttcttcttctccagaaataaaccctgaaactcaagcagctttaatcagagggcaggattccacgatagcagcatcagaacagcaagtggcagcgagaattcttgattccaatgatcaggcaacagtaaaccctgtggaatttaatactgaggttgcaacaccaccattttcccttctggagacttctaatgaaacagatttcctgattggcattaatgaagagtcagtggaaggcacggcaatctatttaccaggacctgatcgctgcaaaatgaacccgtgccttaacggaggcacctgttatcctactgaaacttcctacgtatgcacctgtgtgccaggatacagcggagaccagtgtgaacttgattttgatgaatgtcactctaatccctgtcgtaatggagccacttgtgttgatggttttaacacattcaggtgcctctgccttccaagttatgttggtgcactttgtgagcaagataccgagacatgtgactatggctggcacaaattccaagggcagtgctacaaatactttgcccatcgacgcacatgggatgcagctgaacgggaatgccgtctgcagggtgcccatctcacaagcatcctgtctcacgaagaacaaatgtttgttaatcgtgtgggccatgattatcagtggataggcctcaatgacaagatgtttgagcatgacttccgttggactgatggcagcacactgcaatacgagaattggagacccaaccagccagacagcttcttttctgctggagaagactgtgttgtaatcatttggcatgagaatggccagtggaatgatgttccctgcaattaccatctcacctatacgtgcaagaaaggaacagttgcttgcggccagccccctgttgtagaaaatgccaagacctttggaaagatgaaacctcgttatgaaatcaactccctgattagataccactgcaaagatggtttcattcaacgtcaccttccaactatccggtgcttaggaaatggaagatgggctatacctaaaattacctgcatgaacccatctgcataccaaaggacttattctatgaaatactttaaaaattcctcatcagcaaaggacaattcaataaatacatccaaacatgatcatcgttggagccggaggtggcaggagtcgaggcgctgatccctaaaatggcgaacatgtgttttcatcatttcagccaaagtcctaacttcctgtgcctttcctatcacctcgagaagtaattatcagttggtttggatttttggaccaccgttcagtcattttgggttgccgtgctcccaaaacattttaaatgaaagtattggcattcaaaaagacagcagacaaaatgaaagaaaatgagagcagaaagtaagcatttccagcctatctaatttctttagttttctatttgcctccagtgcagtccatttcctaatgtataccagcctactgtactatttaaaatgctcaatttcagcaccgatggccatgtaaataagatgatttaatgttgattttaatcctgtatataaaataaaaagtcacaatgagtttgggcatatttaatgatgattatggagccttagaggtctttaatcattggttcggctgcttttatgtagtttaggctggaaatggtttcacttgctctttgactgtcagcaagactgaagatggcttttcctggacagctagaaaacacaaaatcttgtaggtcattgcacctatctcagccataggtgcagtttgcttctacatgatgctaaaggctgcgaatgggatcctgatggaactaaggactccaatgtcgaactcttctttgctgcattcctttttcttcacttacaagaaaggcctgaatggaggacttttctgtaaccagg

SEQ ID NO: 32132 - DNA, 2443 bp, Homo Sapiens
aaatggcgtgcccgtctctccgccggccccctgcctcgcagtggtttctcctgcagctcccctgggctccgcggccagtagtgcagcccgtggagccgcggctttgcccgtctcctctgggtggccccagtgcgcgggctgacactcattcagccggggaaggtgaggcgagtagaggctggtgcggaacttgccgcccccagcagcgccggcgggctaagcccagggccgggcagacaaaagaggccgcccgcgtaggaaggcacggccggcggcggcggagcgcagcgatggccgggcgagggggcagcgcgctgctggctctgtgcggggcactggctgcctgcgggtggctcctgggcgccgaagcccaggagcccggggcgcccgcggcgggcatgaggcggcgccggcggctgcagcaagaggacggcatctccttcgagtaccaccgctaccccgagctgcgcgaggcgctcgtgtccgtgtggctgcagtgcaccgccatcagcaggatttacacggtggggcgcagcttcgagggccgggagctcctggtcatcgagctgtccgacaaccctggcgtccatgagcctggtgagcctgaatttaaatacattgggaatatgcatgggaatgaggctgttggacgagaactgctcattttcttggcccagtacctatgcaacgaataccagaaggggaacgagacaattgtcaacctgatccacagtacccgcattcacatcatgccttccctgaacccagatggctttgagaaggcagcgtctcagcctggtgaactcaaggactggtttgtgggtcgaagcaatgcccagggaatagatctgaaccggaactttccagacctggataggatagtgtacgtgaatgagaaagaaggtggtccaaataatcatctgttgaaaaatatgaagaaaattgtggatcaaaacacaaagcttgctcctgagaccaaggctgtcattcattggattatggatattccttttgtgctttctgccaatctccatggaggagaccttgtggccaattatccatatgatgagacgcggagtggtagtgctcacgaatacagctcctccccagatgacgccattttccaaagcttggcccgggcatactcttctttcaacccggccatgtctgaccccaatcggccaccatgtcgcaagaatgatgatgacagcagctttgtagatggaaccaccaacggtggtgcttggtacagcgtacctggagggatgcaagacttcaattaccttagcagcaactgttttgagatcaccgtggagcttagctgtgagaagttcccacctgaagagactctgaagacctactgggaggataacaaaaactccctcattagctaccttgagcagatacaccgaggagttaaaggatttgtccgagaccttcaaggtaacccaattgcgaatgccaccatctccgtggaaggaatagaccacgatgttacatccgcaaaggatggtgattactggagattgcttatacctggaaactataaacttacagcctcagctccaggctatctggcaataacaaagaaagtggcagttccttacagccctgctgctggggttgattttgaactggagtcattttctgaaaggaaagaagaggagaaggaagaattgatggaatggtggaaaatgatgtcagaaactttaaatttttaaaaaggcttctagttagctgctttaaatctatctatataatgtagtatgatgtaatgtggtcttttttttagattttgtgcagttaatacttaacattgatttattttttaatcatttaaatattaatcaactttccttaaaataaatagcctcttaggtaaaaatataagaacttgatatatttcattctcttatatagtattcattttcctacctatattacacaaaaaagtatagaaaagatttaagtaattttgccatcctaggcttaaatgcaatattcctggtattatttacaatgcagaattttttgagtaattctagctttcaaaaattagtgaagttcttttactgtaattggtgacaatgtcacataatgaatgctattgaaaaggttaacagatacagctcggagttgtgagcactctactgcaagacttaaatagttcagtataaattgtcgtttttttcttgtgctgactaactataagcatgatcttgttaatgcatttttgatgggaagaaaaggtacatgtttacaaagaggttttatgaaaagaataaaaattgacttcttgcttgtacatataggagcaatactattatattatgtagtccgttaacactacttaaaagtttagggttttctcttggttgtagagtggcccagaattgcattctgaatgaataaaggttaaaaaaaaatccccagtgaaaaaaaa

SEQ ID NO: 32133 - DNA, 2402 bp, Homo Sapiens
agctcacagcaagtccaggctagaggtagaaacgtgagagccccacggctggggaagattgccatgggattggagatgagctccaaggacagccctggcagtctggatggaagagcttgggaagatgctcagaaaccacaaagtgcctggtgcggtgggaggaaaaccagagtgtatgctacaagcagccggcgggcgccgccgagtgaggggacgcggcgcggtggggcggcgcggcccgaggaggcggcggaggaggggccgcccgcggcccccggctcactccggcactccgggccgctcggcccccatgcctgcccgaccgcgctgccggagccccaggtgaccagcgccatgtccagccaggtggtgggcattgagcctctctacatcaaggcagagccggccagccctgacagtccaaagggttcctcggagacagagaccgagcctcctgtggccctggcccctggtccagctcccactcgctgcctcccaggccacaaggaagaggaggatggggagggggctgggcctggcgagcagggcggtgggaagctggtgctcagctccctgcccaagcgcctctgcctggtctgtggggacgtggcctccggctaccactatggtgtggcatcctgtgaggcctgcaaagccttcttcaagaggaccatccaggggagcatcgagtacagctgtccggcctccaacgagtgtgagatcaccaagcggagacgcaaggcctgccaggcctgccgcttcaccaagtgcctgcgggtgggcatgctcaaggagggagtgcgcctggaccgcgtccggggtgggcggcagaagtacaagcggcggccggaggtggacccactgcccttcccgggccccttccctgctgggcccctggcagtcgctggaggcccccggaagacagcagccccagtgaatgcactggtgtctcatctgctggtggttgagcctgagaagctctatgccatgcctgaccccgcaggccctgatgggcacctcccagccgtggctaccctctgtgacctctttgaccgagagattgtggtcaccatcagctgggccaagagcatcccaggcttctcatcgctgtcgctgtctgaccagatgtcagtactgcagagcgtgtggatggaggtgctggtgctgggtgtggcccagcgctcactgccactgcaggatgagctggccttcgctgaggacttagtcctggatgaagagggggcacgggcagctggcctgggggaactgggggctgccctgctgcaactagtgcggcggctgcaggccctgcggctggagcgagaggagtatgttctactaaaggccttggcccttgccaattcagactctgtgcacatcgaagatgagccgaggctgtggagcagctgcgagaagctcctgcacgaggccctgctggagtatgaagccggccgggctggccccggagggggtgctgagcggcggcgggcgggcaggctgctgctcacgctaccgctcctccgccagacagcgggcaaagtgctggcccatttctatggggtgaagctggagggcaaggtgcccatgcacaagctgttcttggagatgctcgaggccatgatggactgaggcaaggggtgggactggtgggggttctggcaggacctgcctagcatggggtcagccccaagggctggggcggagctggggtctgggcagtgcacagcctgctggcagggccagggctaatgccatcagcccctgggaacaggccccacgccctctcctccccctcctagggggtgtcagaagctgggaacgtgtgtccaggctctgggcacagtgctgccccttgcaagccataacggtgcccccagagtgtagggggccttgcggaagccatagggggctgcacgggatgcgtgggaggcagaaacctatctcagggagggaaggggatggaggccagagtctcccagtgggtgatgcttttgctgctgcttaatcctaccccctcttcaaagcagagtgggacttggagagcaaaggcccatgcccccttcgctcctcctctcatcatttgcattgggcattagtgtccccccttgaagcaataactccaagcagactccagcccctggacccctggggtggccagggcttccccatcagctcccaacgagcctcctcagggggtaggagagcactgcctctatgccctgcagagcaataacactatatttatttttgggtttggccagggaggcgcagggacatggggcaagccagggcccagagcccttggctgtacagagactctattttaatgtatatttgctgcaaagagaaaccgcttttggttttaaacctttaatgagaaaaaaatatataataccgagctc

SEQ ID NO: 32134 - DNA, 7680 bp, Homo Sapiens
gcggacactcctctcggctcctccccggcagcggcggcggctcggagcgggctccggggctcgggtgcagcggccagcgggcctggcggcgaggattacccggggaagtggttgtctcctggctggagccgcgagacgggcgctcagggcgcggggccggcggcggcgaacgagaggacggactctggcggccgggtcgttggccgggggagcgcgggcaccgggcgagcaggccgcgtcgcgctcaccatggtcagctactgggacaccggggtcctgctgtgcgcgctgctcagctgtctgcttctcacaggatctagttcaggttcaaaattaaaagatcctgaactgagtttaaaaggcacccagcacatcatgcaagcaggccagacactgcatctccaatgcaggggggaagcagcccataaatggtctttgcctgaaatggtgagtaaggaaagcgaaaggctgagcataactaaatctgcctgtggaagaaatggcaaacaattctgcagtactttaaccttgaacacagctcaagcaaaccacactggcttctacagctgcaaatatctagctgtacctacttcaaagaagaaggaaacagaatctgcaatctatatatttattagtgatacaggtagacctttcgtagagatgtacagtgaaatccccgaaattatacacatgactgaaggaagggagctcgtcattccctgccgggttacgtcacctaacatcactgttactttaaaaaagtttccacttgacactttgatccctgatggaaaacgcataatctgggacagtagaaagggcttcatcatatcaaatgcaacgtacaaagaaatagggcttctgacctgtgaagcaacagtcaatgggcatttgtataagacaaactatctcacacatcgacaaaccaatacaatcatagatgtccaaataagcacaccacgcccagtcaaattacttagaggccatactcttgtcctcaattgtactgctaccactcccttgaacacgagagttcaaatgacctggagttaccctgatgaaaaaaataagagagcttccgtaaggcgacgaattgaccaaagcaattcccatgccaacatattctacagtgttcttactattgacaaaatgcagaacaaagacaaaggactttatacttgtcgtgtaaggagtggaccatcattcaaatctgttaacacctcagtgcatatatatgataaagcattcatcactgtgaaacatcgaaaacagcaggtgcttgaaaccgtagctggcaagcggtcttaccggctctctatgaaagtgaaggcatttccctcgccggaagttgtatggttaaaagatgggttacctgcgactgagaaatctgctcgctatttgactcgtggctactcgttaattatcaaggacgtaactgaagaggatgcagggaattatacaatcttgctgagcataaaacagtcaaatgtgtttaaaaacctcactgccactctaattgtcaatgtgaaaccccagatttacgaaaaggccgtgtcatcgtttccagacccggctctctacccactgggcagcagacaaatcctgacttgtaccgcatatggtatccctcaacctacaatcaagtggttctggcacccctgtaaccataatcattccgaagcaaggtgtgacttttgttccaataatgaagagtcctttatcctggatgctgacagcaacatgggaaacagaattgagagcatcactcagcgcatggcaataatagaaggaaagaataagatggctagcaccttggttgtggctgactctagaatttctggaatctacatttgcatagcttccaataaagttgggactgtgggaagaaacataagcttttatatcacagatgtgccaaatgggtttcatgttaacttggaaaaaatgccgacggaaggagaggacctgaaactgtcttgcacagttaacaagttcttatacagagacgttacttggattttactgcggacagttaataacagaacaatgcactacagtattagcaagcaaaaaatggccatcactaaggagcactccatcactcttaatcttaccatcatgaatgtttccctgcaagattcaggcacctatgcctgcagagccaggaatgtatacacaggggaagaaatcctccagaagaaagaaattacaatcagagatcaggaagcaccatacctcctgcgaaacctcagtgatcacacagtggccatcagcagttccaccactttagactgtcatgctaatggtgtccccgagcctcagatcacttggtttaaaaacaaccacaaaatacaacaagagcctggaattattttaggaccaggaagcagcacgctgtttattgaaagagtcacagaagaggatgaaggtgtctatcactgcaaagccaccaaccagaagggctctgtggaaagttcagcatacctcactgttcaaggaacctcggacaagtctaatctggagctgatcactctaacatgcacctgtgtggctgcgactctcttctggctcctattaaccctccttatccgaaaaatgaaaaggtcttcttctgaaataaagactgactacctatcaattataatggacccagatgaagttcctttggatgagcagtgtgagcggctcccttatgatgccagcaagtgggagtttgcccgggagagacttaaactgggcaaatcacttggaagaggggcttttggaaaagtggttcaagcatcagcatttggcattaagaaatcacctacgtgccggactgtggctgtgaaaatgctgaaagagggggccacggccagcgagtacaaagctctgatgactgagctaaaaatcttgacccacattggccaccatctgaacgtggttaacctgctgggagcctgcaccaagcaaggagggcctctgatggtgattgttgaatactgcaaatatggaaatctctccaactacctcaagagcaaacgtgacttattttttctcaacaaggatgcagcactacacatggagcctaagaaagaaaaaatggagccaggcctggaacaaggcaagaaaccaagactagatagcgtcaccagcagcgaaagctttgcgagctccggctttcaggaagataaaagtctgagtgatgttgaggaagaggaggattctgacggtttctacaaggagcccatcactatggaagatctgatttcttacagttttcaagtggccagaggcatggagttcctgtcttccagaaagtgcattcatcgggacctggcagcgagaaacattcttttatctgagaacaacgtggtgaagatttgtgattttggccttgcccgggatatttataagaaccccgattatgtgagaaaaggagatactcgacttcctctgaaatggatggctcccgaatctatctttgacaaaatctacagcaccaagagcgacgtgtggtcttacggagtattgctgtgggaaatcttctccttaggtgggtctccatacccaggagtacaaatggatgaggacttttgcagtcgcctgagggaaggcatgaggatgagagctcctgagtactctactcctgaaatctatcagatcatgctggactgctggcacagagacccaaaagaaaggccaagatttgcagaacttgtggaaaaactaggtgatttgcttcaagcaaatgtacaacaggatggtaaagactacatcccaatcaatgccatactgacaggaaatagtgggtttacatactcaactcctgccttctctgaggacttcttcaaggaaagtatttcagctccgaagtttaattcaggaagctctgatgatgtcagatatgtaaatgctttcaagttcatgagcctggaaagaatcaaaacctttgaagaacttttaccgaatgccacctccatgtttgatgactaccagggcgacagcagcactctgttggcctctcccatgctgaagcgcttcacctggactgacagcaaacccaaggcctcgctcaagattgacttgagagtaaccagtaaaagtaaggagtcggggctgtctgatgtcagcaggcccagtttctgccattccagctgtgggcacgtcagcgaaggcaagcgcaggttcacctacgaccacgctgagctggaaaggaaaatcgcgtgctgctccccgcccccagactacaactcggtggtcctgtactccaccccacccatctagagtttgacacgaagccttatttctagaagcacatgtgtatttatacccccaggaaactagcttttgccagtattatgcatatataagtttacacctttatctttccatgggagccagctgctttttgtgatttttttaatagtgctttttttttttgactaacaagaatgtaactccagatagagaaatagtgacaagtgaagaacactactgctaaatcctcatgttactcagtgttagagaaatccttcctaaacccaatgacttccctgctccaacccccgccacctcagggcacgcaggaccagtttgattgaggagctgcactgatcacccaatgcatcacgtaccccactgggccagccctgcagcccaaaacccagggcaacaagcccgttagccccaggggatcactggctggcctgagcaacatctcgggagtcctctagcaggcctaagacatgtgaggaggaaaaggaaaaaaagcaaaaagcaagggagaaaagagaaaccgggagaaggcatgagaaagaatttgagacgcaccatgtgggcacggagggggacggggctcagcaatgccatttcagtggcttcccagctctgacccttctacatttgagggcccagccaggagcagatggacagcgatgaggggacattttctggattctgggaggcaagaaaaggacaaatatcttttttggaactaaagcaaattttagacctttacctatggaagtggttctatgtccattctcattcgtggcatgttttgatttgtagcactgagggtggcactcaactctgagcccatacttttggctcctctagtaagatgcactgaaaacttagccagagttaggttgtctccaggccatgatggccttacactgaaaatgtcacattctattttgggtattaatatatagtccagacacttaactcaatttcttggtattattctgttttgcacagttagttgtgaaagaaagctgagaagaatgaaaatgcagtcctgaggagagttttctccatatcaaaacgagggctgatggaggaaaaaggtcaataaggtcaagggaagaccccgtctctataccaaccaaaccaattcaccaacacagttgggacccaaaacacaggaagtcagtcacgtttccttttcatttaatggggattccactatctcacactaatctgaaaggatgtggaagagcattagctggcgcatattaagcactttaagctccttgagtaaaaaggtggtatgtaatttatgcaaggtatttctccagttgggactcaggatattagttaatgagccatcactagaagaaaagcccattttcaactgctttgaaacttgcctggggtctgagcatgatgggaatagggagacagggtaggaaagggcgcctactcttcagggtctaaagatcaagtgggccttggatcgctaagctggctctgtttgatgctatttatgcaagttagggtctatgtatttaggatgcgcctactcttcagggtctaaagatcaagtgggccttggatcgctaagctggctctgtttgatgctatttatgcaagttagggtctatgtatttaggatgtctgcaccttctgcagccagtcagaagctggagaggcaacagtggattgctgcttcttggggagaagagtatgcttccttttatccatgtaatttaactgtagaacctgagctctaagtaaccgaagaatgtatgcctctgttcttatgtgccacatccttgtttaaaggctctctgtatgaagagatgggaccgtcatcagcacattccctagtgagcctactggctcctggcagcggcttttgtggaagactcactagccagaagagaggagtgggacagtcctctccaccaagatctaaatccaaacaaaagcaggctagagccagaagagaggacaaatctttgttgttcctcttctttacacatacgcaaaccacctgtgacagctggcaattttataaatcaggtaactggaaggaggttaaactcagaaaaaagaagacctcagtcaattctctacttttttttttttttttccaaatcagataatagcccagcaaatagtgataacaaataaaaccttagctgttcatgtcttgatttcaataattaattcttaatcattaagagaccataataaatactccttttcaagagaaaagcaaaaccattagaattgttactcagctccttcaaactcaggtttgtagcatacatgagtccatccatcagtcaaagaatggttccatctggagtcttaatgtagaaagaaaaatggagacttgtaataatgagctagttacaaagtgcttgttcattaaaatagcactgaaaattgaaacatgaattaactgataatattccaatcatttgccatttatgacaaaaatggttggcactaacaaagaacgagcacttcctttcagagtttctgagataatgtacgtggaacagtctgggtggaatggggctgaaaccatgtgcaagtctgtgtcttgtcagtccaagaagtgacaccgagatgttaattttagggacccgtgccttgtttcctagcccacaagaatgcaaacatcaaacagatactcgctagcctcatttaaattgattaaaggaggagtgcatctttggccgacagtggtgtaactgtgtgtgtgtgtgtgtgtgtgtgtgtgtgtgtgtgtgtgtgggtgtgggtgtatgtgtgttttgtgcataactatttaaggaaactggaattttaaagttacttttatacaaaccaagaatatatgctacagatataagacagacatggtttggtcctatatttctagtcatgatgaatgtattttgtataccatcttcatataatatacttaaaaatatttcttaattgggatttgtaatcgtaccaacttaattgataaacttggcaactgcttttatgttctgtctccttccataaatttttcaaaatactaattcaacaaagaaaaagctcttttttttcctaaaataaactcaaatttatccttgtttagagcagagaaaaattaagaaaaactttgaaatggtctcaaaaaattgctaaatattttcaatggaaaactaaatgttagtttagctgattgtatggggttttcgaacctttcactttttgtttgttttacctatttcacaactgtgtaaattgccaataattcctgtccatgaaaatgcaaattatccagtgtagatatatttgaccatcaccctatggatattggctagttttgcctttattaagcaaattcatttcagcctgaatgtctgcctatatattctctgctctttgtattctcctttgaacccgttaaaacatcctgtggcactc

SEQ ID NO: 32135 - DNA, 2259 bp, Homo Sapiens
tcttgaaagcgccacaagcagcagctgctgagccatggctgaaggggaaatcaccaccttcacagccctgaccgagaagtttaatctgcctccagggaattacaagaagcccaaactcctctactgtagcaacgggggccacttcctgaggatccttccggatggcacagtggatgggacaagggacaggagcgaccagcacattcagctgcagctcagtgcggaaagcgtgggggaggtgtatataaagagtaccgagactggccagtacttggccatggacaccgacgggcttttatacggctcacagacaccaaatgaggaatgtttgttcctggaaaggctggaggagaaccattacaacacctatatatccaagaagcatgcagagaagaattggtttgttggcctcaagaagaatgggagctgcaaacgcggtcctcggactcactatggccagaaagcaatcttgtttctccccctgccagtctcttctgattaaagagatctgttctgggtgttgaccactccagagaagtttcgaggggtcctcacctggttgacccaaaaatgttcccttgaccattggctgcgctaacccccagcccacagagcctgaatttgtaagcaacttgcttctaaatgcccagttcacttctttgcagagccttttacccctgcacagtttagaacagagggaccaaattgcttctaggagtcaactggctggccagtctgggtctgggtttggatctccaattgcctcttgcaggctgagtccctccatgcaaaagtggggctaaatgaagtgtgttaaggggtcggctaagtgggacattagtaactgcacactatttccctctactgagtaaaccctatctgtgattcccccaaacatctggcatggctcccttttgtccttcctgtgccctgcaaatattagcaaagaagcttcatgccaggttaggaaggcagcattccatgaccagaaacagggacaaagaaatccccccttcagaacagaggcatttaaaatggaaaagagagattggattttggtgggtaacttagaaggatggcatctccatgtagaataaatgaagaaagggaggcccagccgcaggaaggcagaataaatccttgggagtcattaccacgccttgaccttcccaaggttactcagcagcagagagccctgggtgacttcaggtggagagcactagaagtggtttcctgataacaagcaaggatatcagagctgggaaattcatgtggatctggggactgagtgtgggagtgcagagaaagaaagggaaactggctgaggggataccataaaaagaggatgatttcagaaggagaaggaaaaagaaagtaatgccacacattgtgcttggcccctggtaagcagaggctttggggtcctagcccagtgcttctccaacactgaagtgcttgcagatcatctggggacctggtttgaatggagattctgattcagtgggttgggggcagagtttctgcagttccatcaggtcccccccaggtgcaggtgctgacaatactgctgccttacccgccatacattaaggagcagggtcctggtcctaaagagttattcaaatgaaggtggttcgacgccccgaacctcacctgacctcaactaacccttaaaaatgcacacctcatgagtctacctgagcattcaggcagcactgacaatagttatgcctgtactaaggagcatgattttaagaggctttggccaatgcctataaaatgcccatttcgaagatatacaaaaacatacttcaaaaatgttaaacccttaccaacagcttttcccaggagaccatttgtattaccattacttgtataaatacacttcctgcttaaacttgacccaggtggctagcaaattagaaacaccattcatctctaacatatgatactgatgccatgtaaaggcctttaataagtcattgaaatttactgtgagactgtatgttttaattgcatttaaaaatatatagcttgaaagcagttaaactgattagtattcaggcactgagaatgatagtaataggatacaatgtataagctactcacttatctgatacttatttacctataaaatgagatttttgttttccactgtgctattacaaattttcttttgaaagtaggaactcttaagcaatggtaattgtgaataaaaattgatgagagtgttaaaaaaaaaaaaaaaaacccgaattc

SEQ ID NO: 32136 - DNA, 2374 bp, Homo Sapiens
cttcatccctctcatatcaacccgagtgtctcttcggaaaacccgccagcctccagagcggatcgccagcggccatcaccaagggcgtggtcctggacagcaccgaggccgctgtgcctcgccatctctaggaactccgagcagatgccagccacagcgcagtgctggaggccggcaaaaacctctacacgttctgcgtgagctatgtggattccatccagcaaatgaggaacaagtttgccttccgagaggccatcaacaaactggagaataatctccgggagcttcagatctgcccggcgacagcaggcagtggtccagcggccactcaggacttcagcaagctcctcagttcggtgaaggaaatcagtgacatagtgcagaggtagcagcagtcaggggtcaggtgtcaggcccgtcggagctgcctgcagcacatgcggctcgcccatacccgtgacagtggctgacaagggactagtgagtcagcaccttggccccaggagctctgcgctaggcagagctgagggccctgtggagtccagctctactacctacgtttgcaccgcctgccctcccgcaccttcctcctccccgctccgtctctgtcctcgaattttatctgtggagttcctgctccgtggactgcagtcggcatgccaggacccgccagccccgctcccacctagtgccccagactgagctctccaggccaggtgggaacggctgatgtggactgtctttttcatttttttctctctggagcccctcctccccggctgggcctccttcttccacttctccaagaatggaagcctgaactgaggccttgtgtgtcaggccctctgcctgcactccctggccttgcccgtcgtgtgctgaagacatgtttcaagaaccgcatttcgggaagggcatgcacgggcatgcacacggctggtcactctgccctctgctgctgcccggggtggggtgcactcgccatttcctcacgtgcaggacagctcttgatttgggtggaaaacagggctgctaaagccaaccagcctttgggtcctgggcaggtgggagctgaaaaggatcgaggcatggggcatgtctttccatctgtcacatccccagagcccagctcttgctctcttgtgacgtgcactgtgaatcctggcaagaaagcttgagtctcaagggtggcaggtcactgtcactgccgacatccctcccccagcagaatggaggcaggggacaagggaggcagtggctagtggggtgaacagctggtgccaaatagccccaggatctggggcccaggcaggtctgcaagggcccagagtgaaccgtcctttcacacatctgggtgccctgaaagccttcccctcccccactcctctaagacaaagtagattcttacaaggccctttcctttggaacaagacagccttcacttttctgagttcttgaagcatttcaaagccctgcctctgtgtagccgccctgagagagaatagagctgccactgggcacctgcgcacaggtgggaggaaagggcctggcagtcctggtcctggctgcactcttgaactgggcgaatgtcttatttaattaccgtgagtgacatagcctcatgttctgtgggggtcatcagggagggttaggaaaaccacaaacggagcccctgaaagcctcacgtatttcacagagcacgcctgccatcttctccccgaggctgccccaggccggagcccagatacgggggctgtgactccgggcagggacccgggtctcctggaccttgacagagcagctaactccgagagcagtgggcaggtggccgcccctgaggcttcacgccgggagaagccaccttcccaccccttcataccgcctcgtgccagcagcctcgcacaggccctagctttacgctcatcacctaaacttgtactttatttttctgatagaatggttctctggatcgttttatgcggttctttacagcacatcacctctttgcccccgacggctgtgacgcagccggagaggcactagtcaccgacagcggccttgaagacagagcaaagcgcccacccaggtcccccgactgcctgtctccatgaggtactggtcccttccttttgttaacgtgatgtgccactatattttcacgtatctcttggtatgcatcttttatagacgctcttttctaagtggcgtgtgcatagcgtcctgccctgccccctcggcctgtggtggctccccctctgcttctcggggtccagtgcattttgtttctgtatatgattctctgtggttttttttgaatccaaatctgtcctctgtagtattttttaaataaatcagtgtttacattaaaaaaaaa

SEQ ID NO: 32137 - DNA, 5696 bp, Homo Sapiens
gggaagaggatggcagggccacgccccagcccatgggccaggctgctcctggcagccttgatcagcgtcagcctctctgggaccttggcaaaccgctgcaagaaggccccagtgaagagctgcacggagtgtgtccgtgtggataaggactgcgcctactgcacagacgagatgttcagggaccggcgctgcaacacccaggcggagctgctggccgcgggctgccagcgggagagcatcgtggtcatggagagcagcttccaaatcacagaggagacccagattgacaccaccctgcggcgcagccagatgtccccccaaggcctgcgggtccgtctgcggcccggtgaggagcggcattttgagctggaggtgtttgagccactggagagccccgtggacctgtacatcctcatggacttctccaactccatgtccgatgatctggacaacctcaagaagatggggcagaacctggctcgggtcctgagccagctcaccagcgactacactattggatttggcaagtttgtggacaaagtcagcgtcccgcagacggacatgaggcctgagaagctgaaggagccttggcccaacagtgacccccccttctccttcaagaacgtcatcagcctgacagaagatgtggatgagttccggaataaactgcagggagagcggatctcaggcaacctggatgctcctgagggcggcttcgatgccatcctgcagacagctgtgtgcacgagggacattggctggcgcccggacagcacccacctgctggtcttctccaccgagtcagccttccactatgaggctgatggcgccaacgtgctggctggcatcatgagccgcaacgatgaacggtgccacctggacaccacgggcacctacacccagtacaggacacaggactacccgtcggtgcccaccctggtgcgcctgctcgccaagcacaacatcatccccatctttgctgtcaccaactactcctatagctactacgagaagcttcacacctatttccctgtctcctcactgggggtgctgcaggaggactcgtccaacatcgtggagctgctggaggaggccttcaatcggatccgctccaacctggacatccgggccctagacagcccccgaggccttcggacagaggtcacctccaagatgttccagaagacgaggactgggtcctttcacatccggcggggggaagtgggtatataccaggtgcagctgcgggcccttgagcacgtggatgggacgcacgtgtgccagctgccggaggaccagaagggcaacatccatctgaaaccttccttctccgacggcctcaagatggacgcgggcatcatctgtgatgtgtgcacctgcgagctgcaaaaagaggtgcggtcagctcgctgcagcttcaacggagacttcgtgtgcggacagtgtgtgtgcagcgagggctggagtggccagacctgcaactgctccaccggctctctgagtgacattcagccctgcctgcgggagggcgaggacaagccgtgctccggccgtggggagtgccagtgcgggcactgtgtgtgctacggcgaaggccgctacgagggtcagttctgcgagtatgacaacttccagtgtccccgcacttccgggttcctctgcaatgaccgaggacgctgctccatgggccagtgtgtgtgtgagcctggttggacaggcccaagctgtgactgtcccctcagcaatgccacctgcatcgacagcaatgggggcatctgtaatggacgtggccactgtgagtgtggccgctgccactgccaccagcagtcgctctacacggacaccatctgcgagatcaactactcggcgatccacccgggcctctgcgaggacctacgctcctgcgtgcagtgccaggcgtggggcaccggcgagaagaaggggcgcacgtgtgaggaatgcaacttcaaggtcaagatggtggacgagcttaagagagccgaggaggtggtggtgcgctgctccttccgggacgaggatgacgactgcacctacagctacaccatggaaggtgacggcgcccctgggcccaacagcactgtcctggtgcacaagaagaaggactgccctccgggctccttctggtggctcatccccctgctcctcctcctcctgccgctcctggccctgctactgctgctatgctggaagtactgtgcctgctgcaaggcctgcctggcacttctcccgtgctgcaaccgaggtcacatggtgggctttaaggaagaccactacatgctgcgggagaacctgatggcctctgaccacttggacacgcccatgctgcgcagcgggaacctcaagggccgtgacgtggtccgctggaaggtcaccaacaacatgcagcggcctggctttgccactcatgccgccagcatcaaccccacagagctggtgccctacgggctgtccttgcgcctggcccgcctttgcaccgagaacctgctgaagcctgacactcgggagtgcgcccagctgcgccaggaggtggaggagaacctgaacgaggtctacaggcagatctccggtgtacacaagctccagcagaccaagttccggcagcagcccaatgccgggaaaaagcaagaccacaccattgtggacacagtgctgatggcgccccgctcggccaagccggccctgctgaagcttacagagaagcaggtggaacagagggccttccacgacctcaaggtggcccccggctactacaccctcactgcagaccaggacgcccggggcatggtggagttccaggagggcgtggagctggtggacgtacgggtgcccctctttatccggcctgaggatgacgacgagaagcagctgctggtggaggccatcgacgtgcccgcaggcactgccaccctcggccgccgcctggtaaacatcaccatcatcaaggagcaagccagagacgtggtgtcctttgagcagcctgagttctcggtcagccgcggggaccaggtggcccgcatccctgtcatccggcgtgtcctggacggcgggaagtcccaggtctcctaccgcacacaggatggcaccgcgcagggcaaccgggactacatccccgtggagggtgagctgctgttccagcctggggaggcctggaaagagctgcaggtgaagctcctggagctgcaagaagttgactccctcctgcggggccgccaggtccgccgtttccacgtccagctcagcaaccctaagtttggggcccacctgggccagccccactccaccaccatcatcatcagggacccagatgaactggaccggagcttcacgagtcagatgttgtcatcacagccaccccctcacggcgacctgggcgccccgcagaaccccaatgctaaggccgctgggtccaggaagatccatttcaactggctgcccccttctggcaagccaatggggtacagggtaaagtactggattcagggtgactccgaatccgaagcccacctgctcgacagcaaggtgccctcagtggagctcaccaacctgtacccgtattgcgactatgagatgaaggtgtgcgcctacggggctcagggcgagggaccctacagctccctggtgtcctgccgcacccaccaggaagtgcccagcgagccagggcgtctggccttcaatgtcgtctcctccacggtgacccagctgagctgggctgagccggctgagaccaacggtgagatcacagcctacgaggtctgctatggcctggtcaacgatgacaaccgacctattgggcccatgaagaaagtgctggttgacaaccctaagaaccggatgctgcttattgagaaccttcgggagtcccagccctaccgctacacggtgaaggcgcgcaacggggccggctgggggcctgagcgggaggccatcatcaacctggccacccagcccaagaggcccatgtccatccccatcatccctgacatccctatcgtggacgcccagagcggggaggactacgacagcttccttatgtacagcgatgacgttctacgctctccatcgggcagccagaggcccagcgtctccgatgacactgagcacctggtgaatggccggatggactttgccttcccgggcagcaccaactccctgcacaggatgaccacgaccagtgctgctgcctatggcacccacctgagcccacacgtgccccaccgcgtgctaagcacatcctccaccctcacacgggactacaactcactgacccgctcagaacactcacactcgaccacactgccgagggactactccaccctcacctccgtctcctcccacggcctccctcccatctgggaacacgggaggagcaggcttccgctgtcctgggccctggggtcccggagtcgggctcagatgaaagggttccccccttccaggggcccacgagactctataatcctggctgggaggccagcagcgccctcctggggcccagactctcgcctgactgctggtgtgcccgacacgcccacccgcctggtgttctctgccctggggcccacatctctcagagtgagctggcaggagccgcggtgcgagcggccgctgcagggctacagtgtggagtaccagctgctgaacggcggtgagctgcatcggctcaacatccccaaccctgcccagacctcggtggtggtggaagacctcctgcccaaccactcctacgtgttccgcgtgcgggcccagagccaggaaggctggggccgagagcgtgagggtgtcatcaccattgaatcccaggtgcacccgcagagcccactgtgtcccctgccaggctccgccttcactttgagcactcccagtgccccaggcccgctggtgttcactgccctgagcccagactcgctgcagctgagctgggagcggccacggaggcccaatggggatatcgtcggctacctggtgacctgtgagatggcccaaggaggagggccagccaccgcattccgggtggatggagacagccccgagagccggctgaccgtgccgggcctcagcgagaacgtgccctacaagttcaaggtgcaggccaggaccactgagggcttcgggccagagcgcgagggcatcatcaccatagagtcccaggatggaggacccttcccgcagctgggcagccgtgccgggctcttccagcacccgctgcaaagcgagtacagcagcatcaccaccacccacaccagcgccaccgagcccttcctagtggatgggccgaccctgggggcccagcacctggaggcaggcggctccctcacccggcatgtgacccaggagtttgtgagccggacactgaccaccagcggaacccttagcacccacatggaccaacagttcttccaaacttgaccgcaccctgccccacccccgccatgtcccactaggcgtcctcccgactcctctcccggagcctcctcagctactccatccttgcacccctgggggcccagcccacccgcatgcacagagcaggggctaggtgtctcctgggaggcatgaagggggcaaggtccgtcctctgtgggcccaaacctatttgtaaccaaagagctgggagcagcacaaggacccagcctttgttctgcacttaataaatggttttgctactgctaaaaaaa

SEQ ID NO: 32138 - DNA, 6711 bp, Homo Sapiens
gaattcccttgtaaggttttcttaacaaaacaccagtcacataagtgcattttattttatatttttgtttatttatttgagacggagtctcttgtctctcaggctggagtgcagtggcgccatctctgctcgctgcaacctccacctcctgggttccagcgattctcctgcctcagcctcccgagggggtagctgggactacaggtgcgcaccaccatgcccagctaattttgtatttttcgtagagatggggtttcaccatgttgtccaggctggtcttgaactcctgacctcaggtgatcctcccgcctcggcctcccaaagtgctggaattacaggcgtgatccaccgcacccggcctattttttgagagagggtcacactctgtcgtcccggctggaatgcagtgatgcgatcaccgcccactacagcctcgacctccgggctcaagcaatcctccccgcccagcctcctgagtagcgagcgcctcgacgcccagctaatttttatttttatttatttttttgtagagacggcgtctctctaagatgcccaggctggtggccggtgtcgaactcctaagatgaagcgatcctccccggccttggcctccgcgcctcctaaagcgccaggtatgagccaccgcgcctggcctacaagtgcattttaattaaagtattattaatgtctttgcctgaagaaattcgcttttaaattgtgacttatctttcacccaaaaatcaaagcacaattcagccccgaggcgggggcggtaggagctgggcggggcgggggcagggaaagaccaggagcagagattcaaaaagagtaagagggcaaaatgtgcataatgcatcttcacaggtaagagcctggccaggctcctgttttaatggcttcctcctgaagaagattcaagcagagtgtaagatattttcggaaagtagagcattttgaaagcatttcataatctctcaaaaccggagactgctcctgtcccacctcgttagagaaaacagcgatgctcaaaggcaacctccttcctgacattgcctggtaggacgcgacgtggtgtttgcccgcgcggaatgcggacgcaaggctgctcctaggtctcggggacgcgccatccccatttccgctcgcggaggcgtagggtccgggcgcgggaccccagtcgaccttgactggcggcgcgaccttgaggcctgcgttcgcctcagttgccccctctgtgcaatggggagacgcgcctcatcgcttgacaacggccgaagagccgccgcgcttccgtctcccgcgtgcgcgcgccatgctgcccacccccgttccgcactgaccctcccccgtgccccgcgtcccgtactgccgccccgccccgagtcccatgccgcagccaccgcgacggagcccgcaggcgggaacctgcctccgcgcgttagcgcgcacgcgcgcctcatgtgtcgtccccatcagcgccggcttccgtctataggccagatgcactgtcactctggcgaagtcgcagacccgattggccgggacggaggcgcgagaccgggttgcgggcggggccgaacgtggtataaaacgggcgggaggccaggctcgtgccgttttgcagacgccaccgccgaggaaaaccgtgtactattagccatggtcaaccccaccgtgttcttcgacattgccgtcgacggcgagcccttgggccgcgtctcctttgaggtcgggcgggcggcggcgtgcgggaatggggcccagaaagtgggccggggtcggggtgggtggtagcgccccaaaggcccgggcgcggggcgaccctgcttgaggggcgagcgcgggcgggctgcggcgccatttcctgacgaggggccattttgggaggtccgcgagtcgcgggaggaggccgggacgcggcggacaaaggcaggcggggcggctgcgaggccgttgggggagggggcccgcgtccgcccgcccgcctcatgtggccgcgccctgtcctgtccgacgcacgtgctcggcggccgcgctcaggtccgcgccttgagagtcgttgtccgccctagcttggcctgggcgccgcagaccggagccagaagcacgctcgcgggggcttgcgaccgccttcctgggaagctgtcccctggcaggcatgggtgctttacatcctgagctgggaagctgtttgcttgagggtttttctcaaggatcgaggcgcggtgtgagcccgtccatgctcggtcctgtagatcccgggaggccatgttataaaaggagacttgctgggatgtgacgggttgccacttgaaatatcttccatttggataaagtaggaatatttatacatgtgccccaaacgtccctccgtgtcccccacccccaagcggaaatgtgaaaatgggccttgcctttgctggtgcccaaggaccgccttccactgcagtgacggcgctggcgggggaggcgctcttgagcccctcccgattgtccctctgcctagcaagcaagttgcgactggccacaaggcaggcctcttccgaccaaggtggattaccagtgattacctaattagttttgagagcgttaaatgagttcttaaagatcagttgtaattatagcatagtatctaaacttggcgcgtgtcttcaaagttaaatattgagtacgattccgttccagttaacatggatagaccttagggagtagcgaaataggatgttagtggttttattcctttaaatcacatctcaaaaggccaccaatggctagtttggatcttattccgaaaatagattgatcctcatgcagtcttcgtgaggacagagcgatttccttgttgcctaccctgtccatagtgcctggcacataggcactgaaacactgcatgttaatccacaccccaccccacctatgagtgtagtcaaagctggtaagtgacaagggctttcgtggaaacttggcctgacctaatgttgggcatcaggttacccaaagagcttcagggaaatgagaaaggacttgcaggtcttgatgagaatggaggggtaactgccaatgagggctttggctttagcgaaagtctgaaagggaagccataggaacttaaacgtaccgactataaagctctgagaaaagctgatgttttagaaagaccatacattctaggtacaaatacctaaaaactaaaaaataagtacgttggccaggcgggcggatcacgaagtcaggagattgagaccatcctgggcccctggtgaaaccccacctctattaaaaatacaaaaattagctgggcgtggtggcgcttgcctgtaatctcagctactctagaggctgaggcaggagatcgcttgaaccccggaggcggaggctgcagtgagccgagatcgtgccactgcactccagcctggtgacagcgagactcttgtctcaaaaaaaaaaaagtacattgctataagagaagtgcacacggatactagtagttaattcagtcacatctgtgaaatagcttataaaatgctacttttaaacaagctgtttttatgaaagggcttgtaaatgtttatggtatttaagctacctctctagccataacgtattatacattcaagaaaggttcaaaaccagatatactagaaaccaatctttattttttaccccactactaggtaagggcctggataccaagaagtgactgctcatctaatccataaagctatgttaacagattggaggtagtagcattttcattacaagtgactaaaagaacagctgtttacccctgatcgtgcagcagtgcttgctgttccttagaattttgccttgtaagttctagctcaagttggggggtggtgatagacatttaagaagccatatatcttttcagaagtaggtgtgatgtactaaaagtttgagacactttctagaagtctcactatttaagttatgactagtattggatttttggcatgtctttgggtttcatgtttcttaacccaactgcctgcagggccttatggctgtcaggagcagttcttgggaattaaagtaattactgaagaagtattctagtgagaaaatgaatttatgactcagaagcccctaaagacatgggtactaagcaacaaaataagcagatgttaattaactgtaattttctcttacagctgtttgcagacaaggtcccaaagacagcaggttggtccattttctaagtttaacaaagatgttccaattgtgacagtttgtgtgtgtgtgtgtatatatatatttttatgtatgtatatatgtgtttaatttttttttaaacagaaaattttcgtgctctgagcactggagagaaaggatttggttataagggttcctgctttcacagaattattccagggtttatgtgtcaggtacgaaatttactgaattttattttatttgggttgctcccttcatttgggattgagccagaatatttcaggatacacatatctgaactgttactctaccatttcggttctatttaacccttctattcagtttgaacttgggtttaaagtttgaaccttgcagatttggcacacttcatggttatgttgtcagaagtgacatttttcctatatgttgacagggtggtgacttcacacgccataatggcactggtggcaagtccatctatggggagaaatttgaagatgagaacttcatcctaaagcatacgggtcctggcatcttgtccatggcaaatgctggacccaacacaaatggttcccagtttttcatctgcactgccaagactgagtggtaagggtacaacatggcacactaaccacctgactaaatgaaaagttgccctggggggaacggaacaaacactacttttcttcaacctttgcttccacagactttttcatccctaagatactagaagaagagcatacataaatgacaaatatagccaatgtgatacagaatgtcagatactatgatagaaacttggcccttagctgggtggttgaattaggtgctacttttttgagatggagttttgctctgttgccaggttggagtgcagtggcacaatctgggctcactgcaacctctgcctcctgggttcaagcgattctcctgccttggcctcctgagtagctgagaatacagatgtgtgccagcatgcctggctaattttttgtatttttgtggagacggggtttcatcatgttggccaagctggtcttgaactcgtgacttaaggtgaaccacctgccttggccccccaaagtgctgggatttcaggcatgagccactgcgcccaaccaattaagtgcttttttttttttttttcttttctcagactggatctcgctcttatctcccaggttggagtgcagtggtgccatctcagctcactgcaacctcctcccgggttcaagcaattcttctgcctcagcctctcaagtagctggaactacaggcatgcaccaccactcccagctaaattgtgtattattagtagagcgggatttaccatgttgtccaggctggtctcgaactcctgggctcaagtgatctgcctgccttgacccccccgaagtgctgggattacaggcatgagccactgtgcccacccaattaagtgctgcttttatgttactattaataacatgcggttggttgggttttttgtttctttggggtttttgttttgttttgtttgtttttgggggaggggggcgcaattcattctatatgtgtaactcttttttgagatggagtttcgctctgtcgcccaggctggagtgcagtggcgcgatctcggctcactgcaagctccgcctcccaggttcacgccattctcctgcctcagcctcccgagtagctgggactataggcacatgccaccatgcccggctaattttttgtatttttagtagagacagggtttcaccgtgttagccaggatggtctcgatctcctgacctcgtgatccgcccgccttggcctcccaaagtgctgggattacaggcgtgagccaccgcacccggcctatatgtgtaactctttaatggtaattggagaatcatgtttaatgacatttagtacaaaaggcttcagttaaaaaaaaaaaaaaaaagctacctttctcgtcttggttcatgacacatggaggctgcttgtttgtggttgccagtcataatgattgttcttccttttcaaggttggatggcaagcatgtggtgtttggcaaagtgaaagaaggcatgaatattgtggaggccatggagcgctttgggtccaggaatggcaagaccagcaagaagatcaccattgctgactgtggacaactcgaataagtttgacttgtgttttatcttaaccaccagatcattccttctgtagctcaggagagcacccctccaccccatttgctcgcagtatcctagaatctttgtgctctcgctgcagttccctttgggttccatgttttccttgttccctcccatgcctagctggattgcagagttaagtttatgattatgaaataaaaactaaataacaattgtcctcgtttgagttaagtgttgatgtaggctttattttaagcagtaatgggttacttctgaaacatcacttgtttgcttaattctacacagtacttagattttttttactttccagtcccaggaagtgtcaatgtttgttgagtggaatatt

SEQ ID NO: 32139 - DNA, 2670 bp, Homo Sapiens
tccattgtgctctaaaggtttgagagcggggactttgtctccttttcagaagtacagggcatggttgaactcaacggaaatcagcccatggagatcaaagtcctgggtccttatacctttagcatctgtgacacctccaacttctccgactacatccgtggaggcatcgtcagtcaggtcaaagtacctaagaagattagctttaaatccttggtggcctcactggcagaacctgactttgtggtgacggacttcgccaagttttctcgccctgcccagctgcacattggcttccaggccctgcaccagttctgtgctcagcatggccggccacctcggccccgcaatgaggaggatgcagcagaactggtagccttagcacaggctgtgaatgctcgagccctgccagcagtgcagcaaaataacctggacgaggacctcatccggaagctggcatatgtggctgctggggatctggcacccataaacgccttcattgggggcctggctgcccaggaagtcatgaaggcctgctccgggaagttcatgcccatcatgcagtggctatactttgatgcccttgagtgtctccctgaggacaaagaggtcctcacagaggacaagtgcctccagcgccagaaccgttatgacgggcaagtggctgtgtttggctcagacctgcaagagaagctgggcaagcagaagtatttcctggtgggtgcgggggccattggctgtgagctgctcaagaactttgccatgattgggctgggctgcggggagggtggagaaatcatcgttacagacatggacaccattgagaagtcaaatctgaatcgacagtttcttttccggccctgggatgtcacgaagttaaagtctgacacggctgctgcagctgtgcgccaaatgaatccacatatccgggtgacaagccaccagaaccgtgtgggtcctgacacggagcgcatctatgatgacgattttttccaaaacctagatggcgtggccaatgccctggacaacgtggatgcccgcatgtacatggaccgccgctgtgtctactaccggaagccactgctggagtcaggcacactgggcaccaaaggcaatgtgcaggtggtgatccccttcctgacagagtcgtacagttccagccaggacccacctgagaagtccatccccatctgtaccctgaagaacttccctaatgccatcgagcacaccctgcagtgggctcgggatgagtttgaaggcctcttcaagcagccagcagaaaatgtcaaccagtacctcacagaccccaagtttgtggagcgaacactgcggctggcaggcactcagcccttggaggtgctggaggctgtgcagcgcagcctggtgctgcagcgaccacagacctgggctgactgcgtgacctgggcctgccaccactggcacacccagtactcgaacaacatccggcagctgctgcacaacttccctcctgaccagctcacaagctcaggagcgccgttctggtctgggcccaaacgctgtccacacccgctcacctttgatgtcaacaatcccctgcatctggactatgtgatggctgctgccaacctgtttgcccagacctacgggctgacaggctctcaggaccgagctgctgtggccacattcctgcagtctgtgcaggtccccgaattcacccccaagtctggcgtcaagatccatgtttctgaccaggagctgcagagcgccaatgcctctgttgatgacagtcgtctagaggagctcaaagccactctgcccagcccagacaagctccctggattcaagatgtaccccattgactttgagaaggatgatgacagcaactttcatatggatttcatcgtggctgcatccaacctccgggcagaaaactatgacattccttctgcagaccggcacaagagcaagctgattgcagggaagatcatcccagccattgccacgaccacagcagccgtggttggccttgtgtgtctggagctgtacaaggttgtgcaggggcaccgacagcttgactcctacaagaatggtttcctcaacttggccctgcctttctttggtttctctgaaccccttgccgcaccacgtcaccagtactataaccaagagtggacattgtgggatcgctttgaggtacaagggctgcagcctaatggtgaggagatgaccctcaaacagttcctcgactattttaagacagagcacaaattagagatcaccatgctgtcccagggcgtgtccatgctctattccttcttcatgccagctgccaagctcaaggaacggttggatcagccgatgacagagattgtgagccgtgtgtcgaagcgaaagctgggccgccacgtgcgggcgctggtgcttgagctgtgctgtaacgacgagagcggcgaggatgtcgaggttccctatgtccgatacaccatccgctgaccccgtctgctcctctaggctggccccttgtccacccctctccacaccccttccagcccagggttcccatttggcttctggcagtggcccaactagccaagtctggtgttccctcatcatccccctacctgaacccctcttgccactgccttctaccttgtttgaaacctgaatcctaataaagaattaataactccc

SEQ ID NO: 32140 - DNA, 2480 bp, Homo Sapiens
gacatgcaggggccctgggtgctgctcctgctgggcctgaggctacagctctccctgggcatcatcccagttgaggaggagaacccggacttctggaaccgccaggcagccgaggccctgggtgccgccaagaagctgcagcctgcacagacagccgccaagaacctcatcatcttcctgggtgacgggatgggggtgtctacggtgacagctgccaggatcctaaaagggcagaagaaggacaaactggggcctgagaccttcctggccatggaccgcttcccgtacgtggctctgtccaagacatacagtgtagacaagcatgtgccagacagtggagccacagccacggcctacctgtgcggggtcaagggcaacttccagaccattggcttgagtgcagccgcccgctttaaccagtgcaacacgacacgcggcaacgaggtcatctccgtgatgaatcgggccaagaaagcaggaaagtcagtgggagtggtaaccaccacacgggtgcagcatgcctcgccagccggcgcctacgcccacacggtgaaccgcaactggtactcggatgccgacgtgcctgcctcggcccgccaggaggggtgccaggacatcgccacgcagctcatctccaacatggacattgatgtgatcctaggtggaggccgaaagtacatgtttcccatggggaccccagaccctgagtacccagatgactacagccaaggtgggaccaggctggacgggaagaatctggtgcaggaatggctggcgaagcaccagggtgcccggtacgtgtggaaccgcactgagctcatgcaggcttccctggacccgtctgtgacccatctcatgggtctctttgagcctggagacatgaaatacgagatccaccgagactccacactggacccctccctgatggagatgacagaggctgccctgcgcctgctgagcaggaacccccgcggcttcttcctcttcgtggagggtggtcgcatcgaccatggtcatcatgaaagcagggcttaccgggcactgactgagacgatcatgttcgacgacgccattgagagggcgggccagctcaccagcgaggaggacacgctgagcctcgtcactgccgaccactcccacgtcttctccttcggaggctaccccctgcgagggagctccatcttcgggctggcccctggcaaggcccgggacaggaaggcctacacggtcctcctatacggaaacggtccaggctatgtgctcaaggacggcgcccggccggatgttaccgagagcgagagcgggagccccgagtatcggcagcagtcagcagtgcccctggacggagagacccacgcaggcgaggacgtggcggtgttcgcgcgcggcccgcaggcgcacctggttcacggcgtgcaggagcagaccttcatagcgcacgtcatggccttcgccgcctgcctggagccctacaccgcctgcgacctggcgcccagcgccggcaccaccgacgccgcgcacccggggccgtccgtggtccccgcgttgcttcctctgctggcagggaccttgctgctgctggggacggccactactccctgagtgtcccgtccctggggctcctgcttccccatcccggagttcccctgctccccacctccagtcgtcctgccggacctccacctggagctgtcacccccggagtcgccacacagacgtcctgccatggaaccttcccctcccggtgcaccctggggaccgagcccttgacaccacgccctttgctttatcttgctcttgaaattttggccccaactccagggactggggatttgtgcctggcagctgcctgcatttcaggaaaagaggaggctcagaccatccagcccccgcccatatgctgaggtggatcaggcaggctctctccccggggacatgaggcacccatacctaggaccccctgcgccttttttagcttcagtcatggcagcacctgagggacacaaggacttgggtgcatcaggacgccttggagaagcgtggcttcctgccaccctgcaacccaccctcccagccaaggaggctgctgtggtggggatccccaggggggctttgacacagtcctctgctgtccctccactgggctaattctacacccctgtgcccctcctaggggcccatgagtcagagaggcttgccccaagtcacagccactcagatgttcgacgccccctaaggtccattccagcacccacctgagttccgaggagcacctgggaagctctgggtgcaggatagcagtccagagtccatggccccgcctaggccatctgggtgctgggcatggatttctcagcaaggaagactcattaccttccctccctgggcctccattcttctgggaaacacaaagcaataataaaaggaagtgttagacaaaaaaaaaaaaaaaaaaaaaaaaaaaaaaaaaaaaaaaaaaa

SEQ ID NO: 32141 - DNA, 3097 bp, Homo Sapiens
gccagacaaagcccgagatggcgaagcggagcgacggctaatggcgagccccacgcgccgcgctccgcccgccccgctccggtgaggtggctttgaccccgggttgcccggccagcacgaccgaggaggtggctggacagctggaggatgaacggagaagccgactgccccacagacctggaaatggccgcccccaaaggccaagaccgttggtcccaggaagacatgctgactttgctggaatgcatgaagaacaaccttccatccaatgacagctccaagttcaaaaccaccgaatcacacatggactgggaaaaagtagcatttaaagacttttctggagacatgtgcaagctcaaatgggtggagatttctaatgaggtgaggaagttccgtacattgacagaattgatcctcgatgctcaggaacatgttaaaaatccttacaaaggcaaaaaactcaagaaacacccagacttcccaaagaagcccctgaccccttatttccgcttcttcatggagaagcgggccaagtatgcgaaactccaccctgagatgagcaacctggacctaaccaagattctgtccaagaaatacaaggagcttccggagaagaagaagatgaaatatattcaggacttccagagagagaaacaggagttcgagcgaaacctggcccgattcagggaggatcaccccgacctaatccagaatgccaagaaatcggacatcccagagaagcccaaaaccccccagcagctgtggtacacccacgagaagaaggtgtatctcaaagtgcggccagatgccactacgaaggaggtgaaggactccctggggaagcagtggtctcagctctcggacaaaaagaggctgaaatggattcataaggccctggagcagcggaaggagtacgaggagatcatgagagactatatccagaagcacccagagctgaacatcagtgaggagggtatcaccaagtccaccctcaccaaggccgaacgccagctcaaggacaagtttgacgggcgacccaccaagccacctccgaacagctactcgctgtactgcgcagagctcatggccaacatgaaggacgtgcccagcacagagcgcatggtgctgtgcagccagcagtggaagctgctgtcccagaaggagaaggacgcctatcacaagaagtgtgatcagaaaaagaaagattacgaggtggagctgctccgtttcctcgagagcctgcctgaggaggagcagcagcgggtcttgggggaagagaagatgctgaacatcaacaagaagcaggccaccagccccgcctccaagaagccagcccaggaagggggcaagggcggctccgagaagcccaagcggcccgtgtcggccatgttcatcttctcggaggagaaacggcggcagctgcaggaggagcggcctgagctctccgagagcgagctgacccgcctgctggcccgaatgtggaacgacctgtctgagaagaagaaggccaagtacaaggcccgagaggcggcgctcaaggctcagtcggagaggaagcccggcggggagcgcgaggaacggggcaagctgcccgagtcccccaaaagagctgaggagatctggcaacagagcgttatcggcgactacctggcccgcttcaagaatgaccgggtgaaggccttgaaagccatggaaatgacctggaataacatggaaaagaaggagaaactgatgtggattaagaaggcagccgaagaccaaaagcgatatgagagagagctgagtgagatgcgggcacctccagctgctacaaattcttccaagaagatgaaattccagggagaacccaagaagcctcccatgaacggttaccagaagttctcccaggagctgctgtccaatggggagctgaaccacctgccgctgaaggagcgcatggtggagatcggcagtcgctggcagcgcatctcccagagccagaaggagcactacaaaaagctggccgaggagcagcaaaagcagtacaaggtgcacctggacctctgggttaagagcctgtctccccaggaccgtgcagcatataaagagtacatctccaataaacgtaagagcatgaccaagctgcgaggcccaaaccccaaatccagccggactactctgcagtccaagtcggagtccgaggaggatgatgaagaggatgaggatgacgaggacgaggatgaagaagaggaagatgatgagaatggggactcctctgaagatggcggcgactcctctgagtccagcagcgaggacgagagcgaggatggggatgagaatgaagaggatgacgaggacgaagacgacgacgaggatgacgatgaggatgaagataatgagtccgagggcagcagctccagctcctcctcctcaggggactcctcagactctgactccaactgaggctcagccccaccccagggcagccagggagagcccaggagctcccctccccaactgaccacctttgtttctcccccatgttctgtcccttgcccccctggcctcccccactttctttctttctttaaaaaaaaaaaaaaaaatacggtgggggtagggggctggaggagcccaggccaggactctgcagcctcagagacatcagcccttgggggtcctcctccagggacagcaactatcagactaagccagcaccggaccagcctggcccaccccacccacttctgcacttgcggttccggcatggacaatggaccggagagtgggggtggggggtcccaaagagtttgatgaggccctccacacctgcggcccaatccaaggtggggtggaagcttggggaagacccattccttcccagaggggcctgccacctggacccctgcattggaactggaggcagggaacatggggaggaggagggtcggtgccttcaagaaaacaggcactgccctggtggccctctcccctgccccctgcaggaaggagctgcctggacccgttcatgggggagggggcagaagtgttttttatatatgtgtatatatttttttttaagctctgagctgtcaacgagacgtttcctaccgaaaaa

SEQ ID NO: 32142 - DNA, 5994 bp, Homo Sapiens; identical to SEQ ID NO: 29062

SEQ ID NO: 32143 - DNA, 6075 bp, Homo Sapiens
gtctcctctggatcttaactactgagcgcaatgctgagccatggagccgggttggccttgtggatcacactgagcctgctgcagactggactggcggagccagagagatgtaacttcaccctggcggagtccaaggcctccagccattctgtgtctatccagtggagaattttgggctcaccctgtaactttagcctcatctatagcagtgacaccctgggggccgcgttgtgccctacctttcggatagacaacaccacatacggatgtaaccttcaagatttacaagcaggaaccatctataacttcaagattatttctctggatgaagagagaactgtggtcttgcaaacagatcctttacctcctgctaggtttggagtcagtaaagagaagacgacttcaaccggcttgcatgtttggtggactccttcttccggaaaagtcacctcatatgaggtgcaattatttgatgaaaataaccaaaagatacagggggttcaaattcaagaaagtacttcatggaatgaatacacttttttcaatctcactgctggtagtaaatacaatattgccatcacagctgtttctggaggaaaacgttctttttcagtttataccaatggatcaacagtgccatctccagtgaaagatattggtatttccacaaaagccaattctctcctgatttcctggtcccatggttctgggaatgtggaacgataccggctgatgctaatggataaagggatcctagttcatggcggtgttgtggacaaacatgctacttcctatgcttttcacgggctgtcccctggctacctctacaacctcactgttatgactgaggctgcagggctgcaaaactacaggtggaaactagtcaggacagcccccatggaagtctcaaatctgaaggtgacaaatgatggcagtttgacctctctaaaagtcaaatggcaaagacctcctggaaatgtggattcttacaatatcaccctgtctcacaaagggaccatcaaggaatccagagtattagcaccttggattactgaaactcactttaaagagttagtccccggtcgactttatcaagttactgtcagctgtgtctctggtgaactgtctgctcagaagatggcagtgggcagaacatttccagacaaagttgcaaacctggaggcaaacaataatggcaggatgaggtctcttgtagtgagctggtcgccccctgctggagactgggagcagtatcggatcctactcttcaatgattctgtggtgctgctcaacatcactgtgggaaaggaagaaacacagtatgtcatggatgacacggggctcgtaccgggaagacagtatgaggtggaagtcattgttgagagtggaaatttgaagaattctgagcgttgccaaggcaggacagtccccctggctgtcctccagcttcgtgtcaaacatgccaatgaaacctcactgagtatcatgtggcagacccctgtagcagaatgggagaaatacatcatttccctagctgacagagacctcttactgatccacaagtcactctccaaagatgccaaagaattcacttttactgacctggtgcctggacgaaaatacatggctacagtcaccagtattagtggagacttaaaaaattcctcttcagtaaaaggaagaacagtgcctgcccaagtgactgacttgcatgtggccaaccaaggaatgaccagtagtctgtttactaactggacccaggcacaaggagacgtagaattttaccaagtcttactgatccatgaaaatgtggtcattaaaaatgaaagcatctccagtgagaccagcagatacagcttccactctctcaagtccggcagcctgtactccgtggtggtaacaacagtgagtggagggatctcttcccgacaagtggttgtggagggaagaacagtcccttccagtgtgagtggagtaacggtgaacaattccggtcgtaatgactacctcagcgtttcctggctcgtggcgcccggagatgtggataactatgaggtaacattgtctcatgacggcaaggtggttcagtcccttgtcattgccaagtctgtcagagaatgttccttcagctccctcaccccaggccgcctctacaccgtgaccataactacaaggagtggcaagtatgaaaatcactccttcagccaagagcggacagtgcctgacaaagtccagggagtcagtgttagcaactcagccaggagtgactatttaagggtatcctgggtgcatgccactggagactttgatcactatgaagtcaccattaaaaacaaaaacaacttcattcaaactaaaagcattcccaagtcagaaaacgaatgtgtatttgttcagctagtccctggacggttgtacagtgtcactgttactacaaaaagtggacaatatgaagccaatgaacaagggaatgggagaacaattccagagcctgttaaggatctaacattgcgcaacaggagcactgaggacttgcatgtgacttggtcaggagctaatggggatgtcgaccaatatgagatccagctgctcttcaatgacatgaaagtatttcctccttttcaccttgtaaataccgcaaccgagtatcgatttacttccctaacaccaggccgccaatacaaaattcttgtcttgacgattagcggggatgtacagcagtcagccttcattgagggcttcacagttcctagtgctgtcaaaaatattcacatttctcccaatggagcaacagatagcctgacggtgaactggactcctggtgggggagacgttgattcctacacggtgtcggcattcaggcacagtcaaaaggttgactctcagactattcccaagcacgtctttgagcacacgttccacagactggaggccggggagcagtaccagatcatgattgcctcagtcagcgggtccctgaagaatcagataaatgtggttgggcggacagttccagcatctgtccaaggagtaattgcagacaatgcatacagcagttattccttaatagtaagttggcaaaaagctgctggtgtggcagaaagatatgatatcctgcttctaactgaaaatggaatccttctgcgcaacacatcagagccagccaccactaagcaacacaaatttgaagatctaacaccaggcaagaaatacaagatacagatcctaactgtcagtggaggcctctttagcaaggaagcccagactgaaggccgaacagtcccagcagctgtcaccgacctgaggatcacagagaactccaccaggcacctgtccttccgctggaccgcctcagagggggagctcagctggtacaacatctttttgtacaacccagatgggaatctccaggagagagctcaagttgacccactagtccagagcttctctttccagaacttgctacaaggcagaatgtacaagatggtgattgtaactcacagtggggagctgtctaatgagtctttcatatttggtagaacagtcccagcctctgtgagtcatctcagggggtccaatcggaacacgacagacagcctttggttcaactggagtccagcctctggggactttgacttttatgagctgattctctataatcccaatggcacaaagaaggaaaactggaaagacaaggacctgacggagtggcggtttcaaggccttgttcctggaaggaagtacgtgctgtgggtggtaactcacagtggagatctcagcaataaagtcacagcggagagcagaacagctccaagtcctcccagtcttatgtcatttgctgacattgcaaacacatccttggccatcacgtggaaagggcccccagactggacagactacaacgactttgagctgcagtggttgcccagagatgcacttactgtcttcaacccctacaacaacagaaaatcagaaggacgcattgtgtatggtcttcgtccagggagatcctatcaattcaacgtcaagactgtcagtggtgattcctggaaaacttacagcaaaccaatttttggatctgtgaggacaaagcctgacaagatacaaaacctgcattgccggcctcagaactccacggccattgcctgttcttggatccctcctgattctgactttgatggttatagtattgaatgccggaaaatggacacccaagaagttgagttttccagaaagctggagaaagaaaaatctctgctcaacatcatgatgctagtgccccataagaggtacctggtgtccatcaaagtgcagtcggccggcatgaccagcgaggtggttgaagacagcactatcacaatgatagaccgcccccctcctccacccccacacattcgtgtgaatgaaaaggatgtgctaattagcaagtcttccatcaactttactgtcaactgcagctggttcagcgacaccaatggagctgtgaaatacttcacagtggtggtgagagaggctgatggcagtgatgagctgaagccagaacagcagcaccctctcccttcctacctggagtacaggcacaatgcctccattcgggtgtatcagactaattattttgccagcaaatgtgccgaaaatcctaacagcaactccaagagttttaacattaagcttggagcagagatggagagcttaggtggaaaacgcgatcccactcagcaaaaattctgtgatggaccactgaagccacacactgcctacagaatcagcattcgagcttttacacagctctttgatgaggacctgaaggaattcacaaagccactctattcagacacatttttttctttacccatcactactgaatcagagcccttgtttggagctattgaaggtgtgagtgctggtctgtttttaattggcatgctagtggctgttgttgccttattgatctgcagacagaaagtgagccatggtcgagaaagaccctctgcccgtctgagcattcgtagggatcgaccattatctgtccacttaaacctgggccagaaaggtaaccggaaaacttcttgtccaataaaaataaatcagtttgaagggcatttcatgaagctacaggctgactccaactaccttctatccaaggaatacgaggagttaaaagacgtgggccgaaaccagtcatgtgacattgcactcttgccggagaatagagggaaaaatcgatacaacaatatattgccctatgatgccacgcgagtgaagctctccaatgtagatgatgatccttgctctgactacatcaatgccagctacatccctggcaacaacttcagaagagaatacattgtcactcagggaccgcttcctggcaccaaggatgacttctggaaaatggtgtgggaacaaaacgttcacaacatcgtcatggtgacccagtgtgttgagaagggccgagtaaagtgtgaccattactggccagcggaccaggattccctctactatggggacctcatcctgcagatgctctcagagtccgtcctgcctgagtggaccatccgggagtttaagatatgcggtgaggaacagcttgatgcacacagactcatccgccactttcactatacggtgtggccagaccatggagtcccagaaaccacccagtctctgatccagtttgtgagaactgtcagggactacatcaacagaagcccgggtgctgggcccactgtggtgcactgcagtgctggtgtgggtaggactggaacctttattgcattggaccgaatcctccagcagttagactccaaagactctgtggacatttatggagcagtgcacgacctaagacttcacagggttcacatggtccagactgagtgtcagtatgtctacctacatcagtgtgtaagagatgtcctcagagcaagaaagctacggagtgaacaagaaaaccccttgtttccaatctatgaaaatgtgaatccagagtatcacagagatccagtctattcaaggcattgagaatgtacctgaagagctcctggataaaaattattcactgtgtgatttgtt

SEQ ID NO: 32144 - DNA, 3692 bp, Homo Sapiens
ggctgcccgagcgagcgttcggacctcgcaccccgcgcgccccgcgccgccgccgccgccggcttttgttgtctccgcctcctcggccgccgccgcctctggaccgcgagccgcgcgcgccgggaccttggctctgcccttcgcgggcgggaactgcgcaggacccggccaggatccgagagaggcgcgggcgggtggccgggggcgccgccggccccgccatggagctccgggcccgaggctggtggctgctatgtgcggccgcagcgctggtcgcctgcgcccgcggggacccggccagcaagagccggagctgcggcgaggtccgccagatctacggagccaagggcttcagcctgagcgacgtgccccaggcggagatctcgggtgagcacctgcggatctgtccccagggctacacctgctgcaccagcgagatggaggagaacctggccaaccgcagccatgccgagctggagaccgcgctccgggacagcagccgcgtcctgcaggccatgcttgccacccagctgcgcagcttcgatgaccacttccagcacctgctgaacgactcggagcggacgctgcaggccaccttccccggcgccttcggagagctgtacacgcagaacgcgagggccttccgggacctgtactcagagctgcgcctgtactaccgcggtgccaacctgcacctggaggagacgctggccgagttctgggcccgcctgctcgagcgcctcttcaagcagctgcacccccagctgctgctgcctgatgactacctggactgcctgggcaagcaggccgaggcgctgcggcccttcggggaggccccgagagagctgcgcctgcgggccacccgtgccttcgtggctgctcgctcctttgtgcagggcctgggcgtggccagcgacgtggtccggaaagtggctcaggtccccctgggcccggagtgctcgagagctgtcatgaagctggtctactgtgctcactgcctgggagtccccggcgccaggccctgccctgactattgccgaaatgtgctcaagggctgccttgccaaccaggccgacctggacgccgagtggaggaacctcctggactccatggtgctcatcaccgacaagttctggggtacatcgggtgtggagagtgtcatcggcagcgtgcacacgtggctggcggaggccatcaacgccctccaggacaacagggacacgctcacggccaaggtcatccagggctgcgggaaccccaaggtcaacccccagggccctgggcctgaggagaagcggcgccggggcaagctggccccgcgggagaggccaccttcaggcacgctggagaagctggtctctgaagccaaggcccagctccgcgacgtccaggacttctggatcagcctcccagggacactgtgcagtgagaagatggccctgagcactgccagtgatgaccgctgctggaacgggatggccagaggccggtacctccccgaggtcatgggtgacggcctggccaaccagatcaacaaccccgaggtggaggtggacatcaccaagccggacatgaccatccggcagcagatcatgcagctgaagatcatgaccaaccggctgcgcagcgcctacaacggcaacgacgtggacttccaggacgccagtgacgacggcagcggctcgggcagcggtgatggctgtctggatgacctctgcggccggaaggtcagcaggaagagctccagctcccggacgcccttgacccatgccctcccaggcctgtcagagcaggaaggacagaagacctcggctgccagctgcccccagcccccgaccttcctcctgcccctcctcctcttcctggcccttacagtagccaggccccggtggcggtaactgccccaaggccccagggacagaggccaaggactgactttgccaaaaatacaacacagacgatatttaattcacctcagcctggagaggcctggggtgggacagggagggccggcggctctgagcaggggcaggcgcagaggtcccagccccaggcctggcctcgcctgcctttctgccttttaattttgtatgaggtcctcaggtcagctgggagccagtgtgcccaaaagccatgtatttcagggacctcaggggcacctccggctgcctagccctccccccagctccctgcaccgccgcagaagcagcccctcgaggcctacagaggaggcctcaaagcaacccgctggagcccacagcgagcctgtgccttcctccccgcctcctcccactgggactcccagcagagcccaccagccagccctggcccaccccccagcctccagagaagccccgcacgggctgtctgggtgtccgccatccagggtctggcagagcctctgagatgatgcatgatgccctcccctcagcgcaggctgcagagcccggccccacctccctgcgcccttgaggggccccagcgtctgcagggtgacgcctgagacagcaccactgctgaggagtctgaggactgtcctcccacagaccctgcagtgaggggccctccatgcgcagatgaggggccactgacccacctgcgcttctgctggaggaggggaagctgggcccaaaggcccagggaggcagcgtgggctctgccaatgtgggctgcccctcgcacacagggctcacagggcaggccttgctggggtccagggctgttggaggaccccgagggctgaggagcagccaggacccgcctgctcccatcctcacccagatcaggaaccagggcctccctgttcacggtgacacaggtcagggctcagagtgaccctcggctgtcacctgctcacagggatgctggtggctggtgagaccccgcactgcacacgggaatgcctaggtcccttcccgacccagccagctgcactgcagggcacggggacctggatagttaagggcttttccaaacatgcatccatttactgacacttcctgtccttgttcatggagagctgttcgctcctcccagatggcttcggaggcccgcagggcccaccttggaccctggtgacctcctgtcactcactgaggccatcagggccctgccccaggcctggacgggccctccttccctcctgtgccccagctgccaggtggccctggggaggggtggtgtggtgttgggaaggggtcctgcagggggaggaggacttggagggtctgggggcagctgtcctgaaccgactgaccctgaggaggccgcttagtgctgctttgcttttcatcaccgtcccgcacagtggacggaggtccccggttgctggtcaggtccccatggcttgttctctggaacctgactttagatgttttgggatcaggagcccccaacacaggcaagtccaccccataataaccctgccagtgccagggtgggctggggactctggcacagtgatgccgggcgccaggacagcagcactcccgctgcacacagacggcctaggggtggcgctcagaccccaccctacgctcatctctggaaggggcagccctgagtggtcactggtcagggcagtggccaagcctgctgtgtccttcctccacaaggtccccccaccgctcagtgtcagcgggtgacgtgtgttcttttgagtccttgtatgaataaaaggctggaaacctaaa

SEQ ID NO: 32145 - DNA, 970 bp, Homo Sapiens
ccctcaaagacagagacaccaagaagaatcggaacatacaggctttgatatcaaaggtttataaagccaatatctgggaaagagaaaaccgtgacttccagatcttctctggtgaagtgtgtttcctgcaacgatcacgaacatgaacatcaaaggatcgccatgaaagggtccctcctgctgctgctggtgtcaaacctgctcctgtgccagagcgtggcccccttgcccatctgtcccggcggggctgcccgatgccaggtgacccttcgagacctgtttgaccgcgccgtcgtcctgtcccactacatccataacctctcctcagaaatgttcagcgaattcgataaacggtatacccatggccgggggttcattaccaaggccatcaacagctgccacacttcttcccttgccacccccgaagacaaggagcaagcccaacagatgaatcaaaaagactttctgagcctgatagtcagcatattgcgatcctggaatgagcctctgtatcatctggtcacggaagtacgtggtatgcaagaagccccggaggctatcctatccaaagctgtagagattgaggagcaaaccaaacggcttctagagggcatggagctgatagtcagccaggttcatcctgaaaccaaagaaaatgagatctaccctgtctggtcgggacttccatccctgcagatggctgatgaagagtctcgcctttctgcttattataacctgctccactgcctacgcagggattcacataaaatcgacaattatctcaagctcctgaagtgccgaatcatccacaacaacaactgctaagcccacatccatttcatctatttctgagaaggtccttaatgatccgttccattgcaagcttcttttagttgtatctcttttgaatccatgcttgggtgtaacaggtctcctcttaaaaaataaaaactgactccttagagacatc

SEQ ID NO: 32146 - DNA, 3400 bp, Homo Sapiens
ccctcacgcccctcttccctcacagaccgatcgggcctgctgtgtgtggacaagatcgagaagagtcaggaggcgtacctgctggcgttcgagcactacgtcaaccaccgcaaacacaacattccgcacttctggcccaagctgctgatgaaggtgactgacctccgcatgatcggggcctgccacgccagccgcttcctccacatgaaagtcgagtgccccaccgaactcttccccccactcttcctcgaggtctttgaggatcaggaagtctaaagcctcaggcggccagagggtgtgcggagctggtggggaggagcctggagagaaggggcagagctgggggctgagggagacccccccacaccccttctctccttcctctcgtccttggatagattcagctcccacacacacacccgcactgcccaggtccctcctcagacctccagccctgggacaggcaaacaactgaacttgctatggaaaggacagtgtgggaggctgggggagctgtgtcctgcagttcccaggaccccatcctctcagaaggtaggggaagggcgggaggattgagaagggacaagccaccttgaccgtagggaaggaggaatgtgggctgggggaagatgccctcaactcaccccctacacacacatgagagagagcccccacccagttccttggcctaggtctcccctccaggctgagggcctctctacttccccagatgcctgggtgcaaagaacggcttggcttggctcctcctctggagttaaaatttatagtcattctaactgcactttggaaaccaagcaaggggagaagacaaatgaagaaaaactagacagagagaaaaatacaaaaaagagagagcgagcgatagagagagatgatattaagttattaactgaggctgaccagaggggaggaccccccctttaccaccccatgcactttgcgagctgccccttcttcccccacatcagagagaaatgcccccacaccagagccccaagggtagggctgccgatcagagctgtgagttaacacaacagggtcctggccaccccccttgccataccccgccctctgtgcccctttggcaccccccaaccctagtatgtcctctgctttctgccactcgtgcccgctgagttccatctacctctcatgctggatgccagctggcccctcaccagcctgccctgctgcccacacagctcccctttaagtgcccagccctaggggcctctccccatccacctcctccttccacaccttggcacccacccaggaaaaaactgtggctccaactcctaccctccttatatcctgcagtattagctagaaaccggatgctgctgcattggttgggtcgggggtaggagggctgtgcgtgagcgtctcccagaaccctccacccctttagcactctgtttccctgtttcccatctgtcttctgggctctctctaacctctgccctcctccccagctcctactcactgcactaactctgggcgggcaggtaccagaatgggggtgtttagataagtgacacttagttggggcccaggggaggggtggtcggtgctcctttttctttaaagctcttttggccagctgcccctctgccccgggaccccttcccctcttcttttctctaattcagggactttggcttgagcccctctcgccctcctggtgagggtgctctgttggtctgcacttgggtgagctgtcctcctccccctccctgtggctgccgccactcctcaggggagagagggagagaggaggtggtcctcccatgggagcaggaggtggggtgggacagagcagaccagagggtgctgggctcagggctgcatgtcggcagggatggatgggtggacacagatgcccccggaagccatggggattggggcagggggtggggggaggggtgccagggttcctgcgctttgcactattggggcaaaaatgtcttaagcagtggggaacctgccaccccaccctgaccctcagcctgcacagccccctacacacacacacacacacacacacacacacacacacggacatgcacacacggacatgggaaggcaatgctatgctgcccgtcagggcactgtccttccccaatcgttcaggtgttccaacaggggtggagggcctggaggagcacccgctgtcacctgtgcatgtgcctgtcccaccctgctggggcctcgggctgcccgcgctgtctttgtctctatcctctctctctctcctggagtactgaatcctgtattactccagtcccatgggtaggccctcttgtaccttcctaccacgcctgggggcccagtggaattctgacctgtctgctgtcttccccatccctccatccccaccccaacccctccatccccattctcagccatggacacggcagagaaaaggccttgaagagccttagcctcttataggcacttgggactcccccaccctccccaatcatatgagctgtgatcccatcctccccggacccctcccttccccctcggtgatgtggggtgtatgtgtgcgttcctctgcgtgaatgtgtgagtgagtacacatggtaggggaggagccagggcgactcaggagtgccacgcacctgctctagagcggcagctgtcccagtccctgctgtggaagtgggggacagggccctctcctgggggccattggtgctaatgagggggatggccttgatgtgggtgctcagcatgcctcccccagtattggcccggggcactagggcaggcagggtggagcagcaggtgcagtatcggtgggaggacgggttgctgggaataggacgagggggccaggccaggacaaggggttgccagagccatgaccactaccccgccccccaccacccgcctctccatctcagtattgcccctcccatcactcataacacacatacctcatccagcctcctccctgctcaagacttggggagggtggggaaggagcccctaccccttctcctggtgggcgggtctgcagggctgggagagggcagggcgttgtgagagagagaccgtccataaggaggacagtaactcctgccctgggaactcctgggtgggggggagggggacactgcccagaggcgctactgaatgtatgagaagttggtgctgggctgggggaggggggttgtggccagaaacagggaaggaggtaggtctcttccccagggaggcgtgggaccggcaggggtgacttgaggggctcctactcctgccccacgttgacaatcagtatgtctgttatgtgcgatttttcaccccgttgtgttttgggtcaggattttaaagaaagatatttttatggtaattgttgctcgtctatttt

SEQ ID NO: 32147 - DNA, 2161 bp, Homo Sapiens
cggcccagtgatcttgaaccccaaaggccagaactggagcctcagtccagagaattctgagaaaattaaagcagagaggaggggagagatcactgggaccaggccgtgatctctatgcccgagtctcaaccctcaactgtcaccccaaggcacttgggacgtcctggacagaccgagtcccgggaagccccagcactgccgctgccacactgccctgagcccaaatgggggagtgagaggccatagctgtctggcatgggcctctccaccgtgcctgacctgctgctgccgctggtgctcctggagctgttggtgggaatatacccctcaggggttattggactggtccctcacctaggggacagggagaagagagatagtgtgtgtccccaaggaaaatatatccaccctcaaaataattcgatttgctgtaccaagtgccacaaaggaacctacttgtacaatgactgtccaggcccggggcaggatacggactgcagggagtgtgagagcggctccttcaccgcttcagaaaaccacctcagacactgcctcagctgctccaaatgccgaaaggaaatgggtcaggtggagatctcttcttgcacagtggaccgggacaccgtgtgtggctgcaggaagaaccagtaccggcattattggagtgaaaaccttttccagtgcttcaattgcagcctctgcctcaatgggaccgtgcacctctcctgccaggagaaacagaacaccgtgtgcacctgccatgcaggtttctttctaagagaaaacgagtgtgtctcctgtagtaactgtaagaaaagcctggagtgcacgaagttgtgcctaccccagattgagaatgttaagggcactgaggactcaggcaccacagtgctgttgcccctggtcattttctttggtctttgccttttatccctcctcttcattggtttaatgtatcgctaccaacggtggaagtccaagctctactccattgtttgtgggaaatcgacacctgaaaaagagggggagcttgaaggaactactactaagcccctggccccaaacccaagcttcagtcccactccaggcttcacccccaccctgggcttcagtcccgtgcccagttccaccttcacctccagctccacctatacccccggtgactgtcccaactttgcggctccccgcagagaggtggcaccaccctatcagggggctgaccccatccttgcgacagccctcgcctccgaccccatccccaacccccttcagaagtgggaggacagcgcccacaagccacagagcctagacactgatgaccccgcgacgctgtacgccgtggtggagaacgtgcccccgttgcgctggaaggaattcgtgcggcgcctagggctgagcgaccacgagatcgatcggctggagctgcagaacgggcgctgcctgcgcgaggcgcaatacagcatgctggcgacctggaggcggcgcacgccgcggcgcgaggccacgctggagctgctgggacgcgtgctccgcgacatggacctgctgggctgcctggaggacatcgaggaggcgctttgcggccccgccgccctcccgcccgcgcccagtcttctcagatgaggctgcgcccctgcgggcagctctaaggaccgtcctgcgagatcgccttccaaccccacttttttctggaaaggaggggtcctgcaggggcaagcaggagctagcagccgcctacttggtgctaacccctcgatgtacatagcttttctcagctgcctgcgcgccgccgacagtcagcgctgtgcgcgcggagagaggtgcgccgtgggctcaagagcctgagtgggtggtttgcgaggatgagggacgctatgcctcatgcccgttttgggtgtcctcaccagcaaggctgctcgggggcccctggttcgtccctgagcctttttcacagtgcataagcagttttttttgtttttgttttgttttgttttgtttttaaatcaatcatgttacactaatagaaacttggcactcctgtgccctctgcctggacaagcacatagcaagctgaactgtcctaaggcaggggcgagcacggaacaatggggccttcagctggagctgtggacttttgtacatacactaaaattctgaagtt

SEQ ID NO: 32148 - DNA, 2150 bp, Homo Sapiens
tgtattgaaacaatttaatgaaaatattaaatatttggtttcaaaaggcagatttatcttctcccaacattctgttatttctgatacttttgaaaaactaataaaaacaattgttcggcgatcgctggctgccgggacttttctcgcgctggtctcttcggtggtcagggatggcgcggaagtcgaacttgcctgtgcttctcgtgccgtttctgctctgccaggccctagtgcgctgctccagccctctgcccctggtcgtcaacacttggccctttaagaatgcaaccgaagcagcgtggagggcattagcatctggaggctctgccctggatgcagtggagagcggctgtgccatgtgtgagagagagcagtgtgacggctctgtaggctttggaggaagtcctgatgaacttggagaaaccacactagatgccatgatcatggatggcactactatggatgtaggagcagtaggagatctcagacgaattaaaaatgctattggtgtggcacggaaagtactggaacatacaacacacacacttttagtaggagagtcagccaccacatttgctcaaagtatggggtttatcaatgaagacttatctaccagtgcttctcaagctcttcattcagattggcttgctcggaattgccagccaaattattggaggaatgttataccagatccctcaaaatactgcggaccctacaaaccacctggtatcttaaagcaggatattcctatccataaagaaacagaagatgatcgtggtcatgacactattggcatggttgtaatccataagacaggacatattgctgctggtacatctacaaatggtataaaattcaaaatacatggccgtgtaggagactcaccaatacctggagctggagcctatgctgacgatactgcaggggcagccgcagccactgggaatggtgatatattgatgcgcttcctgccaagctaccaagctgtagaatacatgagaagaggagaagatccaaccatagcttgccaaaaagtgatttcaagaatccagaagcattttccagaattctttggggctgttatatgtgccaatgtgactggaagttacggtgctgcttgcaataaactttcaacatttactcagtttagtttcatggtttataattccgaaaaaaatcagccaactgaggaaaaagtggactgcatctaatccatctttactgtcaacatctgtatttaaagaagaaagaaacaaaggctgaaaaggctgctcactctcatcatctagtgttcctcatgtgttctaaagtctttttgtaaaataaacacaaaaataaatttatgttgaattggcactttctatatctgaaattgtattatctatttttatttaacctttcttatattatctgaagatgaatatgtatgtggctgtattttgtatatatttaagttttaagtgacacttggatttctgatcagtgttgcaaaaaattgctactttgagatttatttccacagtgatatattaaacccaaaaggaatcatcatatttggatgcttaaaatagagtatacaagttttttagacccaaagaaaaaaacatgcagagtctcagcatgatcagtcctgattgaatttcattatgtcacagtgatgcatgtcttagcactgattattggttttacttaatatcccctaaaaacttgaggaaggaagatgatagaacatgagatactctttgttttgtacatactagaaaatacagctatctcctgatgagcaattgtgttgattttctttgcttttttcctcttatggagctctcagtgtgtgaaagttctaaagccacaagaatcaatgatgttttagctgctaatatttagtattgatcgtttcttttaaaaatgatttggggaacttgatctgtactgtaattttactaattccttgtgcagaggtgggtatggcaattagaagtcaagaaatgggttgtttagcttggtttgtttccctaacttctgattaactctctgtatgacaactctacagaagttgtgcgcgtgctttctcagcagcatttttccttcaaaatcatctttttaatcaacagtcattaataaatgtacatgtacgatattcaaacttt

SEQ ID NO: 32149 - DNA, 7286 bp, Homo Sapiens
gaattcgctagagccctagagccccagcagcacccagccaaacccacctccaccatgggggccatgactcagctgttggcaggtgtctttcttgctttccttgccctcgctaccgaaggtggggtcctcaagaaagtcatccggcacaagcgacagagtggggtgaacgccaccctgccagaagagaaccagccagtggtgtttaaccacgtttacaacatcaagctgccagtgggatcccagtgttcggtggatctggagtcagccagtggggagaaagacctggcaccgccttcagagcccagcgaaagctttcaggagcacacagtagatggggaaaaccagattgtcttcacacatcgcatcaacatcccccgccgggcctgtggctgtgccgcagcccctgatgttaaggagctgctgagcagactggaggagctggagaacctggtgtcttccctgagggagcaatgtactgcaggagcaggctgctgtctccagcctgccacaggccgcttggacaccaggcccttctgtagcggtcggggcaacttcagcactgaaggatgtggctgtgtctgcgaacctggctggaaaggccccaactgctctgagcccgaatgtccaggcaactgtcaccttcgaggccggtgcattgatgggcagtgcatctgtgacgacggcttcacgggcgaggactgcagccagctggcttgccccagcgactgcaatgaccagggcaagtgcgtgaatggagtctgcatctgtttcgaaggctacgcggctgactgcagccgtgaaatctgcccagtgccctgcagtgaggagcacggcacatgtgtagatggcttgtgtgtgtgccacgatggctttgcaggcgatgactgcaacaagcctctgtgtctcaacaattgctacaaccgtggacgatgcgtggagaatgagtgcgtgtgtgatgagggtttcacgggcgaagactgcagtgagctcatctgccccaatgactgcttcgaccggggccgctgcatcaatggcacctgctactgcgaagaaggcttcacaggtgaagactgcgggaaacccacctgcccacatgcctgccacacccagggccggtgtgaggaggggcagtgtgtatgtgatgagggctttgccggtgtggactgcagcgagaagaggtgtcctgctgactgtcacaatcgtggccgctgtgtagacgggcggtgtgagtgtgatgatggtttcactggagctgactgtggggagctcaagtgtcccaatggctgcagtggccatggccgctgtgtcaatgggcagtgtgtgtgtgatgagggctatactggggaggactgcagccagctacggtgccccaatgactgtcacagtcggggccgctgtgtcgagggcaaatgtgtatgtgagcaaggcttcaagggctatgactgcagtgacatgagctgccctaatgactgtcaccagcacggccgctgtgtgaatggcatgtgtgtttgtgatgacggctacacaggggaagactgccgggatcgccaatgccccagggactgcagcaacaggggcctctgtgtggacggacagtgcgtctgtgaggacggcttcaccggccctgactgtgcagaactctcctgtccaaatgactgccatggccagggtcgctgtgtgaatgggcagtgcgtgtgccatgaaggatttatgggcaaagactgcaaggagcaaagatgtcccagtgactgtcatggccagggccgctgcgtggacggccagtgcatctgccacgagggcttcacaggcctggactgtggccagcactcctgccccagtgactgcaacaacttaggacaatgcgtctcgggccgctgcatctgcaacgagggctacagcggagaagactgctcagaggtgtctcctcccaaagacctcgttgtgacagaagtgacggaagagacggtcaacctggcctgggacaatgagatgcgggtcacagagtaccttgtcgtgtacacgcccacccacgagggtggtctggaaatgcagttccgtgtgcctggggaccagacgtccaccatcatccgggagctggagcctggtgtggagtactttatccgtgtatttgccatcctggagaacaagaagagcattcctgtcagcgccagggtggccacgtacttacctgcacctgaaggcctgaaattcaagtccatcaaggagacatctgtggaagtggagtgggatcctctagacattgcttttgaaacctgggagatcatcttccggaatatgaataaagaagatgagggagagatcaccaaaagcctgaggaggccagagacctcttaccggcaaactggtctagctcctgggcaagagtatgagatatctctgcacatagtgaaaaacaatacccggggccctggcctgaagagggtgaccaccacacgcttggatgcccccagccagatcgaggtgaaagatgtcacagacaccactgccttgatcacctggttcaagcccctggctgagatcgatggcattgagctgacctacggcatcaaagacgtgccaggagaccgtaccaccatcgatctcacagaggacgagaaccagtactccatcgggaacctgaagcctgacactgagtacgaggtgtccctcatctcccgcagaggtgacatgtcaagcaacccagccaaagagaccttcacaacaggcctcgatgctcccaggaatcttcgacgtgtttcccagacagataacagcatcaccctggaatggaggaatggcaaggcagctattgacagttacagaattaagtatgcccccatctctggaggggaccacgctgaggttgatgttccaaagagccaacaagccacaaccaaaaccacactcacaggtctgaggccgggaactgaatatgggattggagtttctgctgtgaaggaagacaaggagagcaatccagcgaccatcaacgcagccacagagttggacacgcccaaggaccttcaggtttctgaaactgcagagaccagcctgaccctgctctggaagacaccgttggccaaatttgaccgctaccgcctcaattacagtctccccacaggccagtgggtgggagtgcagcttccaagaaacaccacttcctatgtcctgagaggcctggaaccaggacaggagtacaatgtcctcctgacagccgagaaaggcagacacaagagcaagcccgcacgtgtgaaggcatccactgaacaagcccctgagctggaaaacctcaccgtgactgaggttggctgggatggcctcagactcaactggaccgcggctgaccaggcctatgagcactttatcattcaggtgcaggaggccaacaaggtggaggcagctcggaacctcaccgtgcctggcagccttcgggctgtggacataccgggcctcaaggctgctacgccttatacagtctccatctatggggtgatccagggctatagaacaccagtgctctctgctgaggcctccacaggggaaactcccaatttgggagaggtcgtggtggccgaggtgggctgggatgccctcaaactcaactggactgctccagaaggggcctatgagtactttttcattcaggtgcaggaggctgacacagtagaggcagcccagaacctcaccgtcccaggaggactgaggtccacagacctgcctgggctcaaagcagccactcattataccatcaccatccgcggggtcactcaggacttcagcacaacccctctctctgttgaagtcttgacagaggaggttccagatatgggaaacctcacagtgaccgaggttagctgggatgctctcagactgaactggaccacgccagatggaacctatgaccagtttactattcaggtccaggaggctgaccaggtggaagaggctcacaatctcacggttcctggcagcctgcgttccatggaaatcccaggcctcagggctggcactccttacacagtcaccctgcacggcgaggtcaggggccacagcactcgaccccttgctgtagaggtcgtcacagaggatctcccacagctgggagatttagccgtgtctgaggttggctgggatggcctcagactcaactggaccgcagctgacaatgcctatgagcactttgtcattcaggtgcaggaggtcaacaaagtggaggcagcccagaacctcacgttgcctggcagcctcagggctgtggacatcccgggcctcgaggctgccacgccttatagagtctccatctatggggtgatccggggctatagaacaccagtactctctgctgaggcctccacagccaaagaacctgaaattggaaacttaaatgtttctgacataactcccgagagcttcaatctctcctggatggctaccgatgggatcttcgagacctttaccattgaaattattgattccaataggttgctggagactgtggaatataatatctctggtgctgaacgaactgcccatatctcagggctaccccctagtactgattttattgtctacctctctggacttgctcccagcatccggaccaaaaccatcagtgccacagccacgacagaggccctgccccttctggaaaacctaaccatttccgacattaatccctacgggttcacagtttcctggatggcatcggagaatgcctttgacagctttctagtaacggtggtggattctgggaagctgctggacccccaggaattcacactttcaggaacccagaggaagctggagcttagaggcctcataactggcattggctatgaggttatggtctctggcttcacccaagggcatcaaaccaagcccttgagggctgagattgttacagaagccgaaccggaagttgacaaccttctggtttcagatgccaccccagacggtttccgtctgtcctggacagctgatgaaggggtcttcgacaattttgttctcaaaatcagagataccaaaaagcagtctgagccactggaaataaccctacttgcccccgaacgtaccagggacataacaggtctcagagaggctactgaatacgaaattgaactctatggaataagcaaaggaaggcgatcccagacagtcagtgctatagcaacaacagccatgggctccccaaaggaagtcattttctcagacatcactgaaaattcggctactgtcagctggagggcacccacggcccaagtggagagcttccggattacctatgtgcccattacaggaggtacaccctccatggtaactgtggacggaaccaagactcagaccaggctggtgaaactcatacctggcgtggagtaccttgtcagcatcatcgccatgaagggctttgaggaaagtgaacctgtctcagggtcattcaccacagctctggatggcccatctggcctggtgacagccaacatcactgactcagaagccttggccaggtggcagccagccattgccactgtggacagttatgtcatctcctacacaggcgagaaagtgccagaaattacacgcacggtgtccgggaacacagtggagtatgctctgaccgacctcgagcctgccacggaatacacactgagaatctttgcagagaaagggccccagaagagctcaaccatcactgccaagttcacaacagacctcgattctccaagagacttgactgctactgaggttcagtcggaaactgccctccttacctggcgacccccccgggcatcagtcaccggttacctgctggtctatgaatcagtggatggcacagtcaaggaagtcattgtgggtccagataccacctcctacagcctggcagacctgagcccatccacccactacacagccaagatccaggcactcaatgggcccctgaggagcaatatgatccagaccatcttcaccacaattggactcctgtaccccttccccaaggactgctcccaagcaatgctgaatggagacacgacctctggcctctacaccatttatctgaatggtgataaggctcaggcgctggaagtcttctgtgacatgacctctgatgggggtggatggattgtgttcctgagacgcaaaaacggacgcgagaacttctaccaaaactggaaggcatatgctgctggatttggggaccgcagagaagaattctggcttgggctggacaacctgaacaaaatcacagcccaggggcagtacgagctccgggtggacctgcgggaccatggggagacagcctttgctgtctatgacaagttcagcgtgggagatgccaagactcgctacaagctgaaggtggaggggtacagtgggacagcaggtgactccatggcctaccacaatggcagatccttctccacctttgacaaggacacagattcagccatcaccaactgtgctctgtctacaaggggcttctggtacaggaactgtcaccgtgtcaacctgatggggagatatggggacaataaccacagtcagggcgttaactggttccactggaagggccacgaacactcaatccagtttgctgagatgaagctgagaccaagcaacttcagaaatcttgaaggcaggcgcaaacgggcataaattggagggaccactgggtgagagaggaataaggcggcccagagcgaggaaaggattttaccaaagcatcaatacaaccagcccaaccatcggtccacacctgggcatttggtgagaatcaaagctgaccatggatccctggggccaacggcaacagcatgggcctcacctcctctgtgatttctttctttgcaccaaagacatcagtctccaacatgtttctgttttgttgtttgattcagcaaaaatctcccagtgacaacatcgcaatagttttttacttctcttaggtggctctgggatgggagaggggtaggatgtacaggggtagtttgttttagaaccagccgtattttacatgaagctgtataattaattgtcattatttttgttagcaaagattaaatgtgtcattggaagccatccctttttttacatttcatacaacagaaaccagaaaagcaatactgtttccattttaaggatatgattaatattattaatataataatgatgatgatgatgatgaaaactaaggatttttcaagagatctttctttccaaaacatttctggacagtacctgattgtattttttttttaaataaaagcacaagtacttttgaaaaaaaa

SEQ ID NO: 32150 - DNA, 1891 bp, Homo Sapiens
ccgaggctataagagggcgcacaagtggcgcggcgcaggagccgccgccagtggagggccgggcgctgcggccgcggccggggcgggcgcagggccgagcggacgggggggcgcgggccccccgggaggccgcggccactcccccccgggccggcgcggcgggggaggcggaggatggaaacacccttctacggcgatgaggcgctgagcggcctgggcggcggcgccagtggcagcggcggcacgttcgcgtccccgggccgcttgttccccggggcgcccccgacggccgcggccggcagcatgatgaagaaggacgcgctgacgctgagcctgagtgagcaggtggcggcagcgctcaagcctgcgcccgcgcccgcctcctacccccctgccgccgacggcgcccccagcgcggcaccccccgacggcctgctcgcctctcccgacctggggctgctgaagctggcctcccccgagctcgagcgcctcatcatccagtccaacgggctggtcaccaccacgccgacgagctcacagttcctctaccccaaggtggcggccagcgaggagcaggagttcgccgagggcttcgtcaaggccctggaggatttacacaagcagaaccagctcggcgcgggccgggccgctgccgccgccgccgccgccgccggggggccctcgggcacggccacgggctccgcgccccccggcgagctggccccggcggcggccgcgcccgaagcgcctgtctacgcgaacctgagcagctacgcgggcggcgccgggggcgcggggggcgccgcgacggtcgccttcgctgccgaacctgtgcccttcccgccgccgccacccccaggcgcgttggggccgccgcgcctggctgcgctcaaggacgagccacagacggtgcccgacgtgccgagcttcggcgagagcccgccgttgtcgcccatcgacatggacacgcaggagcgcatcaaggcggagcgcaagcggctgcgcaaccgcatcgccgcctccaagtgccgcaagcgcaagctggagcgcatctcgcgcctggaagagaaagtgaagaccctcaagagtcagaacacggagctggcgtccacggcgagcctgctgcgcgagcaggtggcgcagctcaagcagaaagtcctcagccacgtcaacagcggctgccagctgctgccccagcaccaggtcccggcgtactgagtcgggcatggcggccacctccaaggggcgggctcgcgggggggtgtcgtgggcgccccggacttggagagggtgcggccctccacccccccctccccgagtgtgcccaggaactcagagaggcgcggccccggggattcccccccgaggtgcccaggactcggaaggggcgccccggactcgacaagctggaccccctgctcccgggggcgagcgcatgacccccccgccctcgcgctgcctctttcccccgcgcggccgccccgtgttgcacaaacccgcgcgtctcggctgcccctttgtacaccgcgccgcaagggggctccgagggggcgcacgtcaaaccctgcctttcctttacttttactttttttttttctttggaagagagaagaacagagtgttcgattctgccctatttatgtttctactcggggaacaaacgttggttgtgtgtgtgtgtgttttcttgtgttggttttttaaagaaatgggaagaagaaaaaaaaattctccgcccctttcctcgatctcgctcccccttcggtctttcgaccgtccccccctcccctttttttgttctgttttgttttgttttgctacgagtccacattcctgtttgtaatccttggttcgcccggttttctgttttcagtaaagtctcgttacgcca

SEQ ID NO: 32151 - DNA, 730 bp, Homo Sapiens
atgggaaaaatcagcagtcttccaacccaattatttaagtgctgcttttgtgatttcttgaaggtgaagatgcacaccatgtcctcctcgcatctcttctacctggcgctgtgcctgctcaccttcaccagctctgccacggctggaccggagacgctctgcggggctgagctggtggatgctcttcagttcgtgtgtggagacaggggcttttatttcaacaagcccacagggtatggctccagcagtcggagggcgcctcagacaggcatcgtggatgagtgctgcttccggagctgtgatctaaggaggctggagatgtattgcgcacccctcaagcctgccaagtcagctcgctctgtccgtgcccagcgccacaccgacatgcccaagacccagaagtatcagcccccatctaccaacaagaacacgaagtctcagagaaggaaaggttggccaaagacacatccaggaggggaacagaaggaggggacagaagcaagtctgcagatcagaggaaagaagaaagagcagaggagggagattggaagtagaaatgctgaatgcagaggcaaaaaaggaaaatgaaggacaggaggattaaacagacagaggcaaggatgatgagagaggagcagacagcaagaatgaaaagcagaaaatacaatagaggaaatgaagaaaagtaggcctgctggagctagatgatgatgtgatggaaatagaagta

SEQ ID NO: 32152 - DNA, 6278 bp, Homo Sapiens
tccaaactgttcaaaatgatgaacgaagatgcagctcagaaaagcgacagtggagagaagttcaacggcagtagtcagaggagaaaaagacccaagaagtctgacagcaatgcaagcttcctccgtgctgccagagcaggcaacctggacaaagttgtggaatatctgaaggggggcatagacatcaatacctgcaatcagaatggactcaacgctctccatctggctgccaaggaaggccacgtggggctggtgcaggagctgctgggaagagggtcctctgtggattctgccactaagaagggaaataccgctcttcacattgcatctttggctggacaagcagaagttgtcaaagttcttgttaaggaaggagccaatattaatgcacagtctcagaatggctttactcctttatacatggctgcccaagagaatcacattgatgttgtaaaatatttgctggaaaatggagctaatcagagcactgctacagaggatggctttactcctctagctgtggcactccagcaaggacacaaccaggcggtggccatcctcttggagaatgacaccaaagggaaagtgaggctgccagctctgcatattgccgctaggaaagacgacaccaaatctgccgcacttctgcttcagaatgaccacaatgctgacgtacaatccaagatgatggtgaataggacaactgagagtggttttacccctttgcacatagctgcacattacggaaatgtcaacgtggcaactcttcttctaaaccggggagctgctgtggacttcacagccaggaatggaatcactcctctgcatgtggcttccaaaagaggaaatacaaacatggtgaagctcttactggatcgaggcggtcagatcgatgccaaaactagggatgggttgacaccacttcactgtgctgcacgaagtgggcatgaccaagtggtggaacttctgttggaacggggtgcccccttgctggcaaggactaagaatgggctgtctccactacacatggctgcccagggagaccacgtggaatgtgtgaagcacctgttacagcacaaggcacctgttgatgatgtcaccctagactacctgacagccctccacgttgctgcgcactgtggccactaccgtgtaaccaaactccttttagacaagagagccaatccgaacgccagagccctgaatggttttactccactgcacattgcctgcaagaaaaaccgcatcaaagtcatggaactgctggtgaaatatggggcttcaatccaagctataacagagtctggcctcacaccaatacatgtggctgccttcatgggccacttgaacattgtcctccttctgctgcagaacggagcctctccagatgtcactaacattcgtggtgagacggcactacacatggcagcccgagccgggcaggtggaagtggtccgatgcctcctgagaaatggtgcccttgttgatgccagagccagggaggaacagacacctttacatattgcctcccgcctgggtaagacagaaattgtccagctgcttctacaacatatggctcatccagatgcggccactacaaatgggtacacaccactgcacatctctgcccgggagggccaggtggatgtggcatcagtcctattggaagcaggagcagcccactccttagctaccaagaagggttttactcccctgcatgtagcagccaagtatggaagcctggatgtggcaaaacttctcttgcaacgccgtgctgccgcagattctgcagggaagaacggccttaccccgctccatgttgctgctcattatgacaaccagaaggtggcgctgctgttactggagaagggtgcttcccctcatgccactgccaagaatggctatactccgttacatattgctgccaagaagaatcaaatgcagatagcttccacactcctgaactatggagcagagacaaacattgtgacaaagcaaggagtaactccactccatctggcctcgcaggaggggcacacagatatggttaccttgcttctggataagggagccaatatccacatgtcaactaagagtggactcacatccttacaccttgcagcccaggaagataaagtgaatgttgctgatattctcaccaagcatggagctgatcaggatgctcatacaaagcttggttacacacctttaattgtggcctgtcactatggaaatgtgaaaatggtcaactttcttctgaagcagggagcaaatgttaacgcaaaaaccaagaacggctacacgcctttgcaccaggccgctcagcagggtcacacgcacatcatcaacgtcctgctccagcatggggccaagcccaacgccaccactgcgaatggcaacactgccttggcgattgctaagcgtctgggctacatctccgtggtcgacaccctgaaggttgtgactgaggaggtcaccaccaccaccacaactattacagaaaaacacaaactaaatgtacctgagacgatgactgaggttcttgatgtttctgatgaagagggtgatgacacaatgactggtgatgggggagaataccttaggcctgaggacctaaaagaactgggtgatgactcactacccagcagtcagttcctggatggtatgaattacctgcgatacagcttggagggaggacgatctgacagccttcgatccttcagttccgacaggtctcacactctgagccatgcctcctacctgagggacagtgccgtgatggatgactcagttgtgattcccagtcaccaggtgtcaactctagccaaggaggcagaaaggaattcttatcgcctaagctggggcactgagaacttagacaacgtggctctttcttctagtcctattcattcaggtttcctggttagttttatggtggatgcccgaggtggtgctatgcgaggatgcagacacaatgggctccgaatcattattccacctcggaaatgtactgctccaacgcgagtcacctgccgactggtcaagcgccacagactggcaacaatgcctccaatggtggaaggagaaggcctggccagtcgcctgatcgaagttggaccttctggtgctcagttccttggtaaacttcacctgccaacggctcctcccccacttaatgagggagaaagtttggtcagccgcattcttcagctggggcctcctggaaccaaattccttgggcctgtgatcgtggagatccctcactttgcggcccttcgaggaaaggaaagggaactggtggtcctgcgcagtgagaatggggacagctggaaagagcatttctgtgactacactgaagatgaattgaatgaaattcttaacggcatggatgaagtactggatagcccagaagacctagaaaagaaacgaatctgccgcatcatcacccgagacttcccacagtactttgcagtggtgtctcgtatcaaacaggacagcaatctgattggcccagaaggaggtgtactgagcagcacagtggtgccccaggtgcaggccgtcttcccagagggggcactcaccaagcggatccgtgtaggcctgcaggctcaacctatgcacagtgagctggttaagaagatcctaggcaacaaagctaccttcagccctatagtcactttggaacctagaagaagaaaattccacaaaccaattaccatgaccattcctgtccccaaagcttcaagtgatgtcatgttgaatggttttgggggagatgcaccaaccttaagattactatgcagcataacaggtggaaccacccctgcccagtgggaagatattacaggaactacgccattaacatttgtcaatgaatgtgtttcctttacaacaaacgtgtctgccaggttctggctgatagattgtcgacagatccaggaatccgttacttttgcatcacaagtatacagagaaattatctgcgtaccttatatggccaaatttgtagtgtttgccaaatcacatgaccccattgaagccaggttgaggtgtttctgcatgactgatgataaagtggataagacccttgaacaacaagaaaattttgctgaggtggccagaagcagggatgtggaggtgttagaaggaaaacccatctacgttgattgtttcggcaacttggtaccattaactaaaagtggccagcatcatatattcagtttttttgccttcaaagaaaatagacttcctctatttgtcaaggtacgcgatacgactcaggaaccttgcggacgactatcatttatgaaggagccaaaatccacgagaggcctggtgcatcaagctatttgcaacttaaacatcactttgccgatttatacaaaggaatcagagtcagatcaagaacaggaggaagagatcgatatgacatcagaaaaaaatccacaggatgagcaggaacggatcgaggaaaggctggcttatattgctgatcaccttggcttcagctggacagaattagcaagagaactggatttcactgaggagcaaattcatcaaattcgaattgaaaatcccaactctcttcaagaccagagtcatgcactgttgaagtactggctagagagggatgggaaacatgctacagataccaacctcgttgaatgtctcaccaagatcaaccgaatggatattgttcatctcatggagaccaacacagaacctctccaggagcgcatcagtcatagttatgcagaaattgaacagaccattacactggatcatagtgaagggttctcggtacttcaagaggagttatgcactgcacagcacaagcagaaagaggagcaagctgtttctaaagaaagtgagacctgcgatcaccctcctatcgtctcagaggaagacatttctgttggttattccacttttcaggatggcgtccccaaaactgagggggacagctcatcaacagcactctttccccaaactcacaaggagcaagttcaacaggatttctcagggaaaatgcaagacctgcctgaagagtcatctctggaatatcagcaggaatattttgtgacaactccaggaacagaaacatcagagactcagaaggctatgatagtacccagctctcccagcaagacacctgaggaagttagcacccctgcagaggaggagaagctgtacctccagaccccaacatccagcgagcggggaggctctcccatcatacaagaacccgaagagccctcagagcacagagaggagagctctccgcggaaaaccagcctcgtaatagtggagtctgccgataaccagcctgagacctgtgaaagactcgatgaagatgcagcttttgaaaagggagacgatatgcctgaaatacccccagaaacagtcacagaagaagaatacattgatgagcatggacacaccgtggtaaagaaggttactaggaaaatcattaggcggtatgtatcctctgaaggcacagagaaagaagagattatggtgcagggaatgccacaggaacctgtcaacatcgaggaaggggatggctattccaaagttataaagcgtgttgtattgaagagtgacaccgagcagtcagaggacaacaatgagtaaagccatcacacagaagagggctgtggtgaaggaccagcatggaaaacgcattgacttggagcacctggaggatgtaccagaagcactagaccaggacgacctccagcgcgatctccagcagctccttcggcatttctgcaaggaggacttgaagcaagaggccaagtgagggactgcccagttctcacaccagaaaccacacattcactcaatatgcagcttcctgtttcagtaggggagtgacctaactggcctaattaatgggataccccgacatttccactgttagcaaatatacggcattttgctttagttttcccccatcctctttaactataaagctaatttgtgaccaaagatggcatccttcatactggatgctgtatccaatactttgttgtgtctgtgctaacctgggaactggccacctccattgttctttgcttctgcacaagatccatgaaaatccattgatcagaagaacttcacctgcagacctcttcaagtgacactatgtaggaatccttccaaggaatatctatgtacaatgtatatagctgaaatgctcagatgaacaacatattaaaattaaaaccactgcctattgtaactacactgggcatcagaataaaaggcctctaaaa

SEQ ID NO: 32153 - DNA, 3090 bp, Homo Sapiens
gaattccgggcccggatagccggcggcggcggcggcggcggcggcggcggcggccgggagaggcccctccttcacgccctgcttctctccctcgctcgcagtcgagccgagccggcggacccgcctgggctccgaccctgcccaggccatggccggcaacgtgaagaagagctctggggccgggggcggcacgggctccgggggctcgggttcgggtggcctgattgggctcatgaaggacgccttccagccgcaccaccaccaccaccaccacctcagcccccacccgccggggacggtggacaagaagatggtggagaagtgctggaagctcatggacaaggtggtgcggttgtgtcagaacccaaagctggcgctaaagaatagcccaccttatatcttagacctgctaccagatacctaccagcatctccgtactatcttgtcaagatatgaggggaagatggagacacttggagaaaatgagtattttagggtgtttatggagaatttgatgaagaaaactaagcaaaccataagcctcttcaaggagggaaaagaaagaatgtatgaggagaattctcagcctaggcgaaacctaaccaaactgtccctcatcttcagccacatgctggcagaactaaaaggaatctttccaagtggactctttcagggagacacatttcggattactaaagcagatgctgcggaattttggagaaaagcttttggggaaaagacaatagtcccttggaagagctttcgacaggctctacatgaagtgcatcccatcagttctgggctggaggccatggctctgaaatccactattgatctgacctgcaatgattatatttcggtttttgaatttgacatctttacccgactctttcagccctggtcctctttgctcaggaattggaacagccttgctgtaactcatcctggctacatggcttttttgacgtatgacgaagtgaaagctcggctccagaaattcattcacaaacctggcagttatatcttccggctgagctgtactcgtctgggtcagtgggctattgggtatgttactgctgatgggaacattctccagacaatccctcacaataaacctctcttccaagcactgattgatggcttcagggaaggcttctatttgtttcctgatggacgaaatcagaatcctgatctgactggcttatgtgaaccaactccccaagaccatatcaaagtgacccaggaacaatatgaattatactgtgagatgggctccacattccaactatgtaaaatatgtgctgaaaatgataaggatgtaaagattgagccctgtggacacctcatgtgcacatcctgtcttacatcctggcaggaatcagaaggtcagggctgtcctttctgccgatgtgaaattaaaggtactgaacccatcgtggtagatccgtttgatcctagagggagtggcagcctgttgaggcaaggagcagagggagctccctccccaaattatgatgatgatgatgatgaacgagctgatgatactctcttcatgatgaaggaattggctggtgccaaggtggaacggccgccttctccattctccatggccccacaagcttcccttcccccggtgccaccacgacttgaccttctgccgcagcgagtatgtgttccctcaagtgcttctgctcttggaactgcttctaaggctgcttctggctcccttcataaagacaaaccattgccagtacctcccacacttcgagatcttccaccaccaccgcctccagaccggccatattctgttggagcagaatcccgacctcaaagacgccccttgccttgtacaccaggcgactgtccctccagagacaaactgccccctgtcccctctagccgccttggagactcatggctgccccggccaatccccaaagtaccagtatctgccccaagttccagtgatccctggacaggaagagaattaaccaaccggcactcacttccattttcattgccctcacaaatggagcccagaccagatgtgcctaggctcggaagcacgttcagtctggatacctccatgagtatgaatagcagcccattagtaggtccagagtgtgaccaccccaaaatcaaaccttcctcatctgccaatgccatttattctctggctgccagacctcttcctgtgccaaaactgccacctggggagcaatgtgagggtgaagaggacacagagtacatgactccctcttccaggcctctacggcctttggatacatcccagagttcacgagcatgtgattgcgaccagcagattgatagctgtacgtatgaagcaatgtataatattcagtcccaggcgccatctatcaccgagagcagcacctttggtgaagggaatttggccgcagcccatgccaacactggtcccgaggagtcagaaaatgaggatgatgggtatgatgtcccaaagccacctgtgccggccgtgctggcccgccgaactctctcagatatctctaatgccagctcctcctttggctggttgtctctggatggtgatcctacaacaaatgtcactgaaggttcccaagttcccgagaggcctccaaaaccattcccgcggagaatcaactctgaacggaaagctggcagctgtcagcaaggtagtggtcctgccgcctctgctgccaccgcctcacctcagctctccagtgagatcgagaacctcatgagtcaggggtactcctaccaggacatccagaaagctttggtcattgcccagaacaacatcgagatggccaaaaacatcctccgggaatttgtttccatttcttctcctgcccatgtagctacctagcacaccatctccctgctgcaggtttagaggaccagtgagttgggagttattactcaagtggcacctagaagggcaggagttcctttggtgacttcacagtgaagtcttgccctctctgtgggatatcacatcagtggttccaagatttcaaagtggtgaaatgaaaatggagcagctagtatgttttattattttatgggtcttgagtgcatttgaaggtg

SEQ ID NO: 32154 - DNA, 4505 bp, Homo Sapiens
gaattccggagggagggtccccaacgctgggcttgcttgggggcagcccctcagcacagccggggaccgggaatgtggaggcgggaattccttctggcagaatgctggagcctttgccctgttgggacgctgcgaaagatctgaaagaacctcagtgccctcctggggacagggtgggtgtgcagcctgggaactccagggtttggcagggcaccatggagaaagccggtttggcttggacgcgtggcacaggggtgcaatcagaggggacttgggaaagccagcggcaggacagtgatgccctcccaagtccggagctgctaccccaagatcaggacaagcctttcctgaggaaggcctgcagccccagcaacatacctgctgtcatcattacagacatgggcacccaggaggatggggccttggaggagacgcagggaagccctcggggcaacctgcccctgaggaaactgtcctcttcctcggcctcctccacgggcttctcctcatcctacgaagactcagaggaggacatctccagtgaccctgagcgcaccctggaccccaactcagctttcctgcataccctggaccagcagaaacctagagtgagcaaatcatggaggaagataaaaaacatggtgcactggtctcccttcgtcatgtccttcaagaagaagtacccctggatccagctggcaggacacgcagggagtttcaaggcagctgccaatggcaggatcctgaagaagcactgtgagtcagagcagcgctgcctggaccggctgatggtggatgtgctgaggcccttcgtacctgcctaccatggggatgtggtgaaggacggggagcgctacaaccagatggacgacctgctggccgacttcgactcgccctgtgtgatggactgcaagatgggaatcaggacctacctggaggaggagctcacgaaggcccggaagaagcccagcctgcggaaggacatgtaccagaagatgatcgaggtggaccccgaggcccccaccgaggaggaaaaagcacagcgggctgtgaccaagccacggtacatgcagtggcgggagaccatcagctccacggccaccctggggttcaggatcgagggaatcaagaaagaagacggcaccgtgaaccgggacttcaagaagaccaaaacgagggagcaggtcaccgaggccttcagagagttcactaaaggaaaccataacatcctgatcgcctatcgggaccggctgaaggccattcgaaccactctagaagtttctcccttcttcaagtgccacgaggtcattggcagctccctcctcttcatccacgacaagaaggaacaggccaaagtgtggatgatcgactttgggaaaaccacgcccctgcctgagggccagaccctgcagcatgacgtcccctggcaggaggggaaccgggaggatggctacctctcggggctcaataacctcgtcgacatcctgaccgagatgtcccaggatgccccactcgcctgagctgcccacgccctccctggcccccgcctgggcctcctttcctcctcctgtgcttcctttctcgttcctaacttttccttcacttacacctgactgaccctcctgaactgcactacaagacactttgtagaagaggagatgagagtttctagtcattttcctaacttcagggcttggaggtggtgtttgcactgctttttgtagagagggtcacctactagaagagaaatgcccagtcttagaggtgggtcaggtgtagagctggagggggtccctggctgctgaggggaccctaccagatgagccctgcctctgggagccccctaggaagcaccagcctggacctaccacctgcggaggcctgctgccccctggcggccagtgctgttagagtgctgccaagcacagccttatttctgccggggcctccccaccggagagcccagggggccggccgggttcctggtccctggctgggagcagggctttctggtagttggggcacaaaaccatcggggaaccacatgttgactgtgagcaaagtgtcttccgattagcagcctcagggatgccctggtggcctctccagggctgctcaggcaaggccccccacccatctggtatggaaacctgccggctccaggccagacccaggagccaagagaaggctgaagccagcttggctgtgttctctgatctaggccttcccagaggaggcgagcagaagctgtgccacttggaattgcaacccatgagttcagaaggcacactctgccatgctgagctccaagggtgctaccaggggaagatgggatctatagagtctctgggccctggccccagggaggagcacatttttcttgaccctcacctacctggtgctagttggtcaaccctgcctgcatacatgggctcctgtcatggggcccagagtcccttgcagatatagaaataggggaggagctcaggtctgcgccaggcaggaagaaggcaggcttctggcttccagaggtgccgcggtggcctcctggcatcatttgttattgcctctgaaacaagccttactgcctggagggcttagattcctgcttccccaatgtagtgtgggtatcttgtagggtatgtggtggatgccagggcgtgctccaggcacctcttcctgaagtctctgcatttggagattcgtggagaacctatttaagcccaattttaactgaaagccagtgagtctgatatggaagggaatgtaaaatttgcctgacttcttaagaacaaaacccccagctctgtgccccatgctccttggggcttgccacccactcctttgctgtcagaggtacaggagctgggagagtccaggagctagggacacagagggagactatggaccaaggtgtgtgtgtctggaggaaccactgcccaccccaccaccccggggtctctggggaactgtcaacctgcccacgggacatgtacatttccccttttgtgctggaagtgtgagtgacacttgctgggggtggagggtgggacacatgaggatgtataagtacagattttaaaaaaggaaatcaacttacacttcctggctcttgtttaaaacagtggtgagctcctgtgtgggccgacttgctaaaggtcacacacgcgcccggtggagcacgagagacctcgtggcagcatgtgatctggaaggcaggcaggacgggggcgttggggagccaaagtcaactctgggcctctggagctatagtgacttttgggctagaagggaccctggtggtctgtgcttcagccatttgcagggcaggggcatcattaattcagacgtaaagattctatgaatatggactggccaaaagttatccttactccatctgtgaaagaagtttgctaaagcaaatcatgatatgaacaaaaattacaggggacctgtttaagagaacaaaatgttccaagcactttaggcagacaccagctgtttgcaaacaatgtgctaatatgcaaatgatgtgcttattaaaggaggcccatggggcctcttattggcaatacttggctgtgggttacattaaatatgtgaacatagtatgaagtagcatcattttagggttattctgttacttagggtttttgttttctgttttttttttctctttttttgtatttaccgtgctagttctcttctacacctactctgtctctcaagccattttgccactcgcttccctgccatctggcccttccctttgtctcagtgggatagatggattgtgaaatggaatctcccagaacccctgccctggcagcctggaagaccgtgcctgcccagccctcgtcaccacagggactccttgggtcctggcagtgcatgtgccagcaggcaggacaaactctgtgtacctgtgcccaggtgaatgggcgcagggtcctcttgccctgtcctgcggggggccccacgagttcctggcattcagcactgcttagcattctcggaaggtttcttcaactgcttgcttttcccaggcttgcctttagtgtcatgtaagacatttttaagttatatttattttgttgggttttaaaattgcacagaacactaagaccgaaaggctggactcttgtttctccttgaaagctttgcctttgttttgaacttcctttcccacttggtagaaagagcccagaagcagccctggccctgtaagatggactctttcatccttcagttgtatttagctttgagtttctctgcatctgtccaccccatgtgtatataacccagcccctggctctggggtggtcacctcgtcagtgccttttgttctggaggagaggacccccccgcctgccgagaggctctcttcctgttctgcacccctctccccatgggaccttggagaaaactgaactgttacaaacccctgcacagtgcctgtcaaacagatgcaaaccttcctgaataaagccttggagacggaattc

SEQ ID NO: 32155 - DNA, 1509 bp, Homo Sapiens
ggccagtgctgggtctttgctggcgtgaccaccacagtgctgcgctgcctgggtctggccacccgtactgtcaccaacttcaactccgcccacgacacagacacatcccttaccatggacatctacttcgacgagaacatgaagcccctggagcacctgaaccatgattctgtctggaacttccatgtgtggaacgactgctggatgaagaggccggatctgccctcgggctttgatgggtggcaggtggtggatgccacaccccaagagactagcagtggcatcttctgctgcggcccctgctctgtggagtccatcaagaatggcctggtctacatgaagtacgacacgcctttcatttttgctgaggtgaatagtgacaaggtgtactggcagcggcaggatgatggcagcttcaagattgtttatgtggaggagaaggccatcggcacactcattgtcacaaaggccatcagctccaacatgcgggaggacatcacctacctctataagcacccagaaggctcagacgcagagcggaaggcagtagagacagcagcagcccacggcagcaaacccaatgtgtatgccaaccggggctcagcggaggatgtggccatgcaggtggaggcacaggacgcggtgatggggcaggatctgatggtctctgtgatgctgatcaatcacagcagcagccgccgcacagtgaaactgcacctctacctctcagtcactttctatactggtgtcagtggtaccatcttcaaggagaccaagaaggaagtggagctggcaccaggggcctcggaccgtgtgaccatgccagtggcctacaaggaataccggccccatcttgtggaccagggggccatgctgctcaatgtctcaggccacgtcaaggagagcgggcaggtgctggccaagcagcacaccttccgtctgcgcaccccagacctctccctcacgttactgggagcagcagtggttggccaggagtgtgaagtacagattgtcttcaagaacccccttcccgtcaccctcaccaatgtcgtcttccggctcgaaggctctgggttacagaggcccaagatcctcaacgttggggacattggaggcaatgaaacagtgacactgcgccagtcgtttgtgcctgtgcgaccaggcccccgccagctcattgccagcttggacagcccacagctctcccaggtgcacggtgtcatccaggtggatgtggccccagcccctggggatgggggcttcttctcagacgctggaggtgacagtcacttaggagagaccatccctatggcatctcgaggtggagcttagccctgtgccaggagcaatgggactggagtcagatgagcaaggacattgccccaagataggggcacactacagagcagctccccaggagctcaggtggggagtccagggctcccggagagggagtcagtcttcacttgcactgggggaacagatgctaataaactgttttttaatgaa

SEQ ID NO: 32156 - DNA, 3510 bp, Homo Sapiens
ctgtgcttgctctacctgtcggcggggctcctgtcccggctcggcgcagccttcaacttggacactcgggaggacaacgtgatccggaaatatggagaccccgggagcctcttcggcttctcgctggccatgcactggcaactgcagcccgaggacaagcggctgttgctcgtgggggccccgcgcggagaagcgcttccactgcagagagccaacagaacgggagggctgtacagctgcgacatcaccgcccgggggccatgcacgcggatcgagtttgataacgatgctgaccccacgtcagaaagcaaggaagatcagtggatgggggtcaccgtccagagccaaggtccagggggcaaggtcgtgacatgtgctcaccgatatgaaaaaaggcagcatgttaatacgaagcaggaatcccgagacatctttgggcggtgttatgtcctgagtcagaatctcaggattgaagacgatatggatgggggagattggagcttttgtgatgggcgattgagaggccatgagaaatttggctcttgccagcaaggtgtagcagctacttttactaaagactttcattacattgtatttggagccccgggtacttataactggaaagggattgttcgtgtagagcaaaagaataacactttttttgacatgaacatctttgaagatgggccttatgaagttggtggagagactgagcatgatgaaagtctcgttcctgttcctgctaacagttacttaggtttttctttggactcagggaaaggtattgtttctaaagatgagatcacttttgtatctggtgctcccagagccaatcacagtggagccgtggttttgctgaagagagacatgaagtctgcacatctcctccctgagcacatattcgatggagaaggtctggcctcttcatttggctatgatgtggcggtggtggacctcaacaaggatgggtggcaagatatagttattggagccccacagtattttgatagagatggagaagttggaggtgcagtgtatgtctacatgaaccagcaaggcagatggaataatgtgaagccaattcgtcttaatggaaccaaagattctatgtttggcattgcagtaaaaaatattggagatattaatcaagatggctacccagatattgcagttggagctccgtatgatgacttgggaaaggtttttatctatcatggatctgcaaatggaataaataccaaaccaacacaggttctcaagggtatatcaccttattttggatattcaattgctggaaacatggaccttgatcgaaattcctaccctgatgttgctgttggttccctctcagattcagtaactattctcagatcccggcctgtgattaatattcagaaaaccatcacagtaactcctaacagaattgacctccgccagaaaacagcgtgtggggcgcctagtgggatatgcctccaggttaaatcctgttttgaatatactgctaaccccgctggttataatccttcaatatcaattgtgggcacacttgaagctgaaaaagaaagaagaaaatctgggctatcctcaagagttcagtttcgaaaccaaggttctgagcccaaatatactcaagaactaactctgaagaggcagaaacagaaagtgtgcatggaggaaaccctgtggctacaggataatatcagagataaactgcgtcccattcccataactgcctcagtggagatccaagagccaagctctcgtaggcgagtgaattcacttccagaagttcttccaattctgaattcagatgaacccaagacagctcatattgatgttcacttcttaaaagagggatgtggagacgacaatgtatgtaacagcaaccttaaactagaatataaattttgcacccgagaaggaaatcaagacaaattttcttatttaccaattcaaaaaggtgtaccagaactagttctaaaagatcagaaggatattgctttagaaataacagtgacaaacagcccttccaacccaaggaatcccacaaaagatggcgatgacgcccatgaggctaaactgattgcaacgtttccagacactttaacctattctgcatatagagaactgagggctttccctgagaaacagttgagttgtgttgccaaccagaatggctcgcaagctgactgtgagctcggaaatccttttaaacgaaattcaaatgtcactttttatttggttttaagtacaactgaagtcacctttgacaccccagatctggatattaatctgaagttagaaacaacaagcaatcaagataatttggctccaattacagctaaagcaaaagtggttattgaactgcttttatcggtctcgggagttgctaaaccttcccaggtgtattttggaggtacagttgttggcgagcaagctatgaaatctgaagatgaagtgggaagtttaatagagtatgaattcagggtaataaacttaggtaaacctcttacaaacctcggcacagcaaccttgaacattcagtggccaaaagaaattagcaatgggaaatggttgctttatttggtgaaagtagaatccaaaggattggaaaaggtaacttgtgagccacaaaaggagataaactccctgaacctaacggagtctcacaactcaagaaagaaacgggaaattactgaaaaacagatagatgataacagaaaattttctttatttgctgaaagaaaataccagactcttaactgtagcgtgaacgtgaactgtgtgaacatcagatgcccgctgcgggggctggacagcaaggcgtctcttattttgcgctcgaggttatggaacagcacatttctagaggaatattccaaactgaactacttggacattctcatgcgagccttcattgatgtgactgctgctgccgaaaatatcaggctgccaaatgcaggcactcaggttcgagtgactgtgtttccctcaaagactgtagctcagtattcgggagtaccttggtggatcatcctagtggctattctcgctgggatcttgatgcttgctttattagtgtttatactatggaagtgtggtttcttcaagagaaataagaaagatcattatgatgccacatatcacaaggctgagatccatgctcagccatctgataaagagaggcttacttctgatgcatagtattgatctacttctgtaattgtgtggattctttaaacgctctaggtacgatgacagtgttccccgataccatgctgtaaggatccggaaagaagagcgagagatcaaagatgaaaagtatattgataaccttgaaaaaaaacagtggatcacaaagtggaacagaaatgaaagctactcatagcgggggcctaaaaaaaaaaaatgcttcacagtacccaaactgctttttccaactcagaaattcaatttggatttaaaagcctgctcaatccctgaggactgatttcagagtgactacacaca

SEQ ID NO: 32157 - DNA, 3224 bp, Homo Sapiens
actccctcactggctgccattgaaagagtccacttctcagtgactcctagctgggcactggatgcagttgaggattgctggtcaatatgattcttcttgctgtgctttttctctgcttcatttcctcatattcagcttctgttaaaggtcacacaactggtctctcattaaataatgaccggctgtacaagctcacgtactccactgaagttcttcttgatcggggcaaaggaaaactgcaagacagcgtgggctaccgcatttcctccaacgtggatgtggccttactatggaggaatcctgatggtgatgatgaccagttgatccaaataacgatgaaggatgtaaatgttgaaaatgtgaatcagcagagaggagagaagagcatcttcaaaggaaaaagcccatctaaaataatgggaaaggaaaacttggaagctctgcaaagacctacgctccttcatctaatccatggaaaggtcaaagagttctactcatatcaaaatgaggcagtggccatagaaaatatcaagagaggtctggctagcctatttcagacacagttaagctctggaaccaccaatgaggtagatatctctggaaattgtaaagtgacctaccaggctcatcaagacaaagtgatcaaaattaaggccttggattcatgcaaaatagcgaggtctggatttacgaccccaaatcaggtcttgggtgtcagttcaaaagctacatctgtcaccacctataagatagaagacagctttgttatagctgtgcttgctgaagaaacacacaattttggactgaatttcctacaaaccattaaggggaaaatagtatcgaagcagaaattagagctgaagacaaccgaagcaggcccaagattgatgtctggaaagcaggctgcagccataatcaaagcagttgattcaaagtacacggccattcccattgtggggcaggtcttccagagccactgtaaaggatgtccttctctctcggagctctggcggtccaccaggaaatacctgcagcctgacaacctttccaaggctgaggctgtcagaaacttcctggccttcattcagcacctcaggactgcgaagaaagaagagatccttcaaatactaaagatggaaaataaggaagtattacctcagctggtggatgctgtcacctctgctcagacctcagactcattagaagccattttggactttttggatttcaaaagtgacagcagcattatcctccaggagaggtttctctatgcctgtggatttgcttctcatcccaatgaagaactcctgagagccctcattagtaagttcaaaggttctattggtagcagtgacatcagagaaactgttatgatcatcactgggacacttgtcagaaagttgtgtcagaatgaaggctgcaaactcaaagcagtagtggaagctaagaagttaatcctgggaggacttgaaaaagcagagaaaaaagaggacaccaggatgtatctgctggctttgaagaatgccctgcttccagaaggcatcccaagtcttctgaagtatgcagaagcaggagaagggcccatcagccacctggctaccactgctctccagagatatgatctccctttcataactgatgaggtgaagaagaccttaaacagaatataccaccaaaaccgtaaagttcatgaaaagactgtgcgcactgctgcagctgctatcattttaaataacaatccatcctacatggacgtcaagaacatcctgctgtctattggggagcttccccaagaaatgaataaatacatgctcgccattgttcaagacatcctacgtttggaaatgcctgcaagcaaaattgtccgtcgagttctgaaggaaatggtcgctcacaattatgaccgtttctccaggagtggatcttcttctgcctacactggctacatagaacgtagtccccgttcggcatctacttacagcctagacattctctactcgggttctggcattctaaggagaagtaacctgaacatctttcagtacattgggaaggctggtcttcacggtagccaggtggttattgaagcccaaggactggaagccttaatcgcagccacccctgacgagggggaggagaaccttgactcctatgctggtatgtcagccatcctctttgatgttcagctcagacctgtcacctttttcaacggatacagtgatttgatgtccaaaatgctgtcagcatctggcgaccctatcagtgtggtgaaaggacttattctgctaatagatcattctcaggaacttcagttacaatctggactaaaagccaatatagaggtccagggtggtctagctattgatatttcaggtgcaatggagtttagcttgtggtatcgtgagtctaaaacccgagtgaaaaatagggtgactgtggtaataaccactgacatcacagtggactcctcttttgtgaaagctggcctggaaaccagtacagaaacagaagcaggcttggagtttatctccacagtgcagttttctcagtacccattcttagtttgcatgcagatggacaaggatgaagctccattcaggcaatttgagaaaaagtacgaaaggctgtccacaggcagaggttatgtctctcagaaaagaaaagaaagcgtattagcaggatgtgaattcccgctccatcaagagaactcagagatgtgcaaagtggtgtttgcccctcagccggatagtacttccagcggatggttttgaaactgacctgtgatattttacttgaatttgtctccccgaaagggacacaatgtggcatgactaagtacttgctctctgagagcacagcgtttacatatttacctgtatttaagatttttgtaaaaagctacaaaaaactgcagtttgatcaaatttgggtatatgcagtatgctacccacagcgtcattttgaatcatcatgtgacgctttcaacaacgttcttagtttacttatacctctctcaaatctcatttggtacagtcagaatagttattctctaagaggaaactagtgtttgttaaaaacaaaaataaaaacaaaaccacacaaggagaacccaattttgtttcaacaatttttgatcaatgtatatgaagctcttgataggacttccttaagcatgacgggaaaaccaaacacgttccctaatcaggaaaaaaaaaaaaaaaaaa
